United States Patent Application Publication US 2011/0183924 A1 - sequence listing, part 133

SEQ ID NO: 362237 - DNA, 2439 bp, Homo sapiens
agcttgtcggcgccattttgtctcggcagcggtggccgtagctccatcgcattttatgtttctggcgagaagggaacggagttttcatcaggtagattggtttttgtgcggccgtcctccaccgtttcctccaggacagcacctagtcgtggccggaggagtctcagagctgtcagaaagaataagactgattttatgggaaaattaagcagatgctccagtttgagaaacctggatctgcgatctgtttgtggtctctatgaataaagaaaagcaaatagaatcttatcagataagtgcttttataagtctaaatatattctttggaatctctaaagcaaaacttttaaacttttttttttttttttttttttttaggtaccagcatcaagatgatttatggtaataagatataaaaccaaggaaaataacctaaagtctgaaaaagaccagaatcgaagtttcctgattcatattttaatgttttgaaatttatactccaggctgggtgcagtggcttgtgcctgtaatcccagcactttgggaggccgaggcggccggattgcctgaagtcagaagttcgagaccagcctgaccaacatggtgaaaccctgtctctacttaaaaatacaaaagagctgggcatggaggtggtgcgcgcctgtaaccctagctactcgggaggctgaggcctaagaatctcttgaacccaggaggcagaggttgtagtgagccgggatcacgccactgcactctagcctgggcgacagagagagagactgtctaaaaaaggaaaagaaaaaaatttatacgccaaaaaagatattctgagataacctgtagttaccactaactttgtgacaaaattataaaaatccacagccatctatgaatctgtaggcagacctgaagtttgaacgactggtgaagacatctgattttctttatagccaagttaggataacaaaatgcaaacaagtcattaatatttactatatgcaagatacagaaagatgaaggaaggagtaagaagttatccttcgtggaactattcaaagcaaaaatgcaaaataccagggaaagctttgaagaaccaagatttgagcaggttcttagaatatagattggattggatttgatttcaagaaagatgaacgtgtaaagcagaagtgggaagccaaaaacttttttccaaattagaattaagcattctttcaatgaacatttggaaatcaaggtagaaaaatatccctagggcctagctgaggagtctgtatgttgttgggttttgatagtaaccagtccaagattttgttattagacgtgggtttctgaatagacaggcatttctgaacagacatgacaggatcaaaacaatgtttgagcaaactgcccttcatctactgtggatatgttgggggatgatggaatatagtgaaagataatgggtgctcatacagcagtctagacttaaggtgattcaactactatatattaaactagattatcttttattttttaattttgaaatctggatgctcaagctctgcctgcacaaccacatgaggaagaaggaacaatgacaacaaaaataacactaaatttaaatttaagagtactacttttaggaaatagacaaaccattatttgggtacaactaaaggcaactggcatggactcaaatattttggggaagaaaaagactaaaagttctaaggaagaaaatgcgaaccttgatagtttgaaatagttaaaaagacagtgtagaaactgtttaggcagtttgattatggactattagatgatacttgggtctgataatggtataaggagaataaagtatttagggatccaatattacgcctgcagctttttccaaatagttcatgggggagggggatgtgtaagtggttaactgaagtctaactagataggtttgttgtaagcttaggatgtttacagttcttcatgttaagttgagcgtgatgggaagggaaagaatgctgatctttaaatttttgtccttagttaagttctgtatttagtgaattaattgcatcctaaaaagtcaaacttgaaaagcacattttaaatggcaaatctattttttacatgtttgtgaagtttttattttttagtaaacagaccatcagaagagaacaatggtacagagcaggggtcagcagatggattttgtaaagcatcaacttgtaaatattttcaagtttattagctgtatggctctggtttctgttccctgttccaaatgttaaagtctactgttgtattctaaaagcagccatggactgaatgtagctgtgttccaataaaacttacacaaaagcaggcagtgggccataatttgcaacacctgattcacagcataattttgtcacaaactgaaagtgttcctcaattaaagtgatttttttttcttga

SEQ ID NO: 362238 - DNA, 2353 bp, Homo sapiens
agcttgtcggcgccattttgtctcggcagcggtggccgtagctccatcgcattttatgtttctggcgagaagggaacggagttttcatcaggtagattggtttttgtgcggccgtcctccaccgtttcctccaggacagcacctagtcgtggccggaggagtctcagagctgtcagaaagaataagactgattttatgggaaaattaagcagatgctccagtttgagaaacctggatctgcgatctgtttgtggtctctatgaataaagaaaagcaaatagaatcttatcaggtaccagcatcaagatgatttatggtaataagatataaaaccaaggaaaataacctaaagtctgaaaaagaccagaatcgaagtttcctgattcatattttaatgttttgaaatttatactccaggctgggtgcagtggcttgtgcctgtaatcccagcactttgggaggccgaggcggccggattgcctgaagtcagaagttcgagaccagcctgaccaacatggtgaaaccctgtctctacttaaaaatacaaaagagctgggcatggaggtggtgcgcgcctgtaaccctagctactcgggaggctgaggcctaagaatctcttgaacccaggaggcagaggttgtagtgagccgggatcacgccactgcactctagcctgggcgacagagagagagactgtctaaaaaaggaaaagaaaaaaatttatacgccaaaaaagatattctgagataacctgtagttaccactaactttgtgacaaaattataaaaatccacagccatctatgaatctgtaggcagacctgaagtttgaacgactggtgaagacatctgattttctttatagccaagttaggataacaaaatgcaaacaagtcattaatatttactatatgcaagatacagaaagatgaaggaaggagtaagaagttatccttcgtggaactattcaaagcaaaaatgcaaaataccagggaaagctttgaagaaccaagatttgagcaggttcttagaatatagattggattggatttgatttcaagaaagatgaacgtgtaaagcagaagtgggaagccaaaaacttttttccaaattagaattaagcattctttcaatgaacatttggaaatcaaggtagaaaaatatccctagggcctagctgaggagtctgtatgttgttgggttttgatagtaaccagtccaagattttgttattagacgtgggtttctgaatagacaggcatttctgaacagacatgacaggatcaaaacaatgtttgagcaaactgcccttcatctactgtggatatgttgggggatgatggaatatagtgaaagataatgggtgctcatacagcagtctagacttaaggtgattcaactactatatattaaactagattatcttttattttttaattttgaaatctggatgctcaagctctgcctgcacaaccacatgaggaagaaggaacaatgacaacaaaaataacactaaatttaaatttaagagtactacttttaggaaatagacaaaccattatttgggtacaactaaaggcaactggcatggactcaaatattttggggaagaaaaagactaaaagttctaaggaagaaaatgcgaaccttgatagtttgaaatagttaaaaagacagtgtagaaactgtttaggcagtttgattatggactattagatgatacttgggtctgataatggtataaggagaataaagtatttagggatccaatattacgcctgcagctttttccaaatagttcatgggggagggggatgtgtaagtggttaactgaagtctaactagataggtttgttgtaagcttaggatgtttacagttcttcatgttaagttgagcgtgatgggaagggaaagaatgctgatctttaaatttttgtccttagttaagttctgtatttagtgaattaattgcatcctaaaaagtcaaacttgaaaagcacattttaaatggcaaatctattttttacatgtttgtgaagtttttattttttagtaaacagaccatcagaagagaacaatggtacagagcaggggtcagcagatggattttgtaaagcatcaacttgtaaatattttcaagtttattagctgtatggctctggtttctgttccctgttccaaatgttaaagtctactgttgtattctaaaagcagccatggactgaatgtagctgtgttccaataaaacttacacaaaagcaggcagtgggccataatttgcaacacctgattcacagcataattttgtcacaaactgaaagtgttcctcaattaaagtgatttttttttcttga

SEQ ID NO: 362239 - DNA, 2742 bp, Homo sapiens
tactgccccgccccccccaaaaaatttctggtctgtctttagcttcatttctgaacattttatcctggacctctctttcttcaagtagaaataatcggctgggcgtggtggctcatgcctgtaatctcagcaccttgggaggccgaggcgggtggatcacctgaggtcgagagttcaagaccagcctgaccaacatggagaaaccccgtctctactaaaaatacagaattagccgggcgtggtggcgcatgcctgtaattccagctaattgggaggctgaggcaggagaatcgcttaaacctggaagatggaggttgcggtaagctgagatcgtggaattgcacttcaccctaggcaacaggagcaaaactgtctcaaaaaaaaaaaaaataatcgcagtctttaagttacacataccataaaatatatgagaatttttcttggaccctaggagtgattttttttttccactttttttttttttttcactttaggtgagcatttgtacagtgaaacattttgctacacaaaagtgatgtttaggaatactaacaaattattttcaagaataagactgattttatgggaaaattaagcagatgctccagtttgagaaacctggatctgcgatctgtttgtgagtggtattcagttaagagaacaattatttcgtataagccacatcagagacgactgaagatgaaaaaactaccatccccgtatataactaatttgtgctgtgcaccaacaagaacctgctttaaatttccatggcaatttacaacccccatactgtaccaggcaaggctgggtgcagtggcttgtgcctgtaatcccagcactttgggaggccgaggcggccggattgcctgaagtcagaagttcgagaccagcctgaccaacatggtgaaaccctgtctctacttaaaaatacaaaagagctgggcatggaggtggtgcgcgcctgtaaccctagctactcgggaggctgaggcctaagaatctcttgaacccaggaggcagaggttgtagtgagccgggatcacgccactgcactctagcctgggcgacagagagagagactgtctaaaaaaggaaaagaaaaaaatttatacgccaaaaaagatattctgagataacctgtagttaccactaactttgtgacaaaattataaaaatccacagccatctatgaatctgtaggcagacctgaagtttgaacgactggtgaagacatctgattttctttatagccaagttaggataacaaaatgcaaacaagtcattaatatttactatatgcaagatacagaaagatgaaggaaggagtaagaagttatccttcgtggaactattcaaagcaaaaatgcaaaataccagggaaagctttgaagaaccaagatttgagcaggttcttagaatatagattggattggatttgatttcaagaaagatgaacgtgtaaagcagaagtgggaagccaaaaacttttttccaaattagaattaagcattctttcaatgaacatttggaaatcaaggtagaaaaatatccctagggcctagctgaggagtctgtatgttgttgggttttgatagtaaccagtccaagattttgttattagacgtgggtttctgaatagacaggcatttctgaacagacatgacaggatcaaaacaatgtttgagcaaactgcccttcatctactgtggatatgttgggggatgatggaatatagtgaaagataatgggtgctcatacagcagtctagacttaaggtgattcaactactatatattaaactagattatcttttattttttaattttgaaatctggatgctcaagctctgcctgcacaaccacatgaggaagaaggaacaatgacaacaaaaataacactaaatttaaatttaagagtactacttttaggaaatagacaaaccattatttgggtacaactaaaggcaactggcatggactcaaatattttggggaagaaaaagactaaaagttctaaggaagaaaatgcgaaccttgatagtttgaaatagttaaaaagacagtgtagaaactgtttaggcagtttgattatggactattagatgatacttgggtctgataatggtataaggagaataaagtatttagggatccaatattacgcctgcagctttttccaaatagttcatgggggagggggatgtgtaagtggttaactgaagtctaactagataggtttgttgtaagcttaggatgtttacagttcttcatgttaagttgagcgtgatgggaagggaaagaatgctgatctttaaatttttgtccttagttaagttctgtatttagtgaattaattgcatcctaaaaagtcaaacttgaaaagcacattttaaatggcaaatctattttttacatgtttgtgaagtttttattttttagtaaacagaccatcagaagagaacaatggtacagagcaggggtcagcagatggattttgtaaagcatcaacttgtaaatattttcaagtttattagctgtatggctctggtttctgttccctgttccaaatgttaaagtctactgttgtattctaaaagcagccatggactgaatgtagctgtgttccaataaaacttacacaaaagcaggcagtgggccataatttgcaacacctgattcacagcataattttgtcacaaactgaaagtgttcctcaattaaagtgatttttttttcttga

SEQ ID NO: 362240 - DNA, 2426 bp, Homo sapiens
agcttgtcggcgccattttgtctcggcagcggtggccgtagctccatcgcattttatgtttctggcgagaagggaacggagttttcatcaggtagattggtttttgtgcggccgtcctccaccgtttcctccaggacagcacctagtcgtggccggaggagtctcagagctgtcagaaaggtgagcatttgtacagtgaaacattttgctacacaaaagtgatgtttaggaatactaacaaattattttcaagaataagactgattttatgggaaaattaagcagatgctccagtttgagaaacctggatctgcgatctgtttgtggtctctatgaataaagaaaagcaaatagaatcttatcaggtaccagcatcaagatgatttatggtaataagatataaaaccaaggaaaataacctaaagtctgaaaaagaccagaatcgaagtttcctgattcatattttaatgttttgaaatttatactccaggctgggtgcagtggcttgtgcctgtaatcccagcactttgggaggccgaggcggccggattgcctgaagtcagaagttcgagaccagcctgaccaacatggtgaaaccctgtctctacttaaaaatacaaaagagctgggcatggaggtggtgcgcgcctgtaaccctagctactcgggaggctgaggcctaagaatctcttgaacccaggaggcagaggttgtagtgagccgggatcacgccactgcactctagcctgggcgacagagagagagactgtctaaaaaaggaaaagaaaaaaatttatacgccaaaaaagatattctgagataacctgtagttaccactaactttgtgacaaaattataaaaatccacagccatctatgaatctgtaggcagacctgaagtttgaacgactggtgaagacatctgattttctttatagccaagttaggataacaaaatgcaaacaagtcattaatatttactatatgcaagatacagaaagatgaaggaaggagtaagaagttatccttcgtggaactattcaaagcaaaaatgcaaaataccagggaaagctttgaagaaccaagatttgagcaggttcttagaatatagattggattggatttgatttcaagaaagatgaacgtgtaaagcagaagtgggaagccaaaaacttttttccaaattagaattaagcattctttcaatgaacatttggaaatcaaggtagaaaaatatccctagggcctagctgaggagtctgtatgttgttgggttttgatagtaaccagtccaagattttgttattagacgtgggtttctgaatagacaggcatttctgaacagacatgacaggatcaaaacaatgtttgagcaaactgcccttcatctactgtggatatgttgggggatgatggaatatagtgaaagataatgggtgctcatacagcagtctagacttaaggtgattcaactactatatattaaactagattatcttttattttttaattttgaaatctggatgctcaagctctgcctgcacaaccacatgaggaagaaggaacaatgacaacaaaaataacactaaatttaaatttaagagtactacttttaggaaatagacaaaccattatttgggtacaactaaaggcaactggcatggactcaaatattttggggaagaaaaagactaaaagttctaaggaagaaaatgcgaaccttgatagtttgaaatagttaaaaagacagtgtagaaactgtttaggcagtttgattatggactattagatgatacttgggtctgataatggtataaggagaataaagtatttagggatccaatattacgcctgcagctttttccaaatagttcatgggggagggggatgtgtaagtggttaactgaagtctaactagataggtttgttgtaagcttaggatgtttacagttcttcatgttaagttgagcgtgatgggaagggaaagaatgctgatctttaaatttttgtccttagttaagttctgtatttagtgaattaattgcatcctaaaaagtcaaacttgaaaagcacattttaaatggcaaatctattttttacatgtttgtgaagtttttattttttagtaaacagaccatcagaagagaacaatggtacagagcaggggtcagcagatggattttgtaaagcatcaacttgtaaatattttcaagtttattagctgtatggctctggtttctgttccctgttccaaatgttaaagtctactgttgtattctaaaagcagccatggactgaatgtagctgtgttccaataaaacttacacaaaagcaggcagtgggccataatttgcaacacctgattcacagcataattttgtcacaaactgaaagtgttcctcaattaaagtgatttttttttcttga

SEQ ID NO: 362241 - DNA, 2263 bp, Homo sapiens
  misc_feature (2252)..(2252): n is a, c, g, or t
aaacagcttcttaggattaatgtaatatatatatgcaaaggtcaaatgaaatatttttgtggatggtaagaaaaatttcaacttacatttttgcaacttctttaacgatatcacggcaggtcatttctttcatctatagaaaataaaatgtatactgttcatcagaagaacattttccacttgtgtaataactattttcacttttatactcagatataaaaccaaggaaaataacctaaagtctgaaaaagaccagaatcgaagtttcctgattcatattttaatgttttgaaatttatactccaggctgggtgcagtggcttgtgcctgtaatcccagcactttgggaggccgaggcggccggattgcctgaagtcagaagttcgagaccagcctgaccaacatggtgaaaccctgtctctacttaaaaatacaaaagagctgggcatggaggtggtgcgcgcctgtaaccctagctactcgggaggctgaggcctaagaatctcttgaacccaggaggcagaggttgtagtgagccgggatcacgccactgcactctagcctgggcgacagagagagagactgtctaaaaaaggaaaagaaaaaaatttatacgccaaaaaagatattctgagataacctgtagttaccactaactttgtgacaaaattataaaaatccacagccatctatgaatctgtaggcagacctgaagtttgaacgactggtgaagacatctgattttctttatagccaagttaggataacaaaatgcaaacaagtcattaatatttactatatgcaagatacagaaagatgaaggaaggagtaagaagttatccttcgtggaactattcaaagcaaaaatgcaaaataccagggaaagctttgaagaaccaagatttgagcaggttcttagaatatagattggattggatttgatttcaagaaagatgaacgtgtaaagcagaagtgggaagccaaaaacttttttccaaattagaattaagcattctttcaatgaacatttggaaatcaaggtagaaaaatatccctagggcctagctgaggagtctgtatgttgttgggttttgatagtaaccagtccaagattttgttattagacgtgggtttctgaatagacaggcatttctgaacagacatgacaggatcaaaacaatgtttgagcaaactgcccttcatctactgtggatatgttgggggatgatggaatatagtgaaagataatgggtgctcatacagcagtctagacttaaggtgattcaactactatatattaaactagattatcttttattttttaattttgaaatctggatgctcaagctctgcctgcacaaccacatgaggaagaaggaacaatgacaacaaaaataacactaaatttaaatttaagagtactacttttaggaaatagacaaaccattatttgggtacaactaaaggcaactggcatggactcaaatattttggggaagaaaaagactaaaagttctaaggaagaaaatgcgaaccttgatagtttgaaatagttaaaaagacagtgtagaaactgtttaggcagtttgattatggactattagatgatacttgggtctgataatggtataaggagaataaagtatttagggatccaatattacgcctgcagctttttccaaatagttcatgggggagggggatgtgtaagtggttaactgaagtctaactagataggtttgttgtaagcttaggatgtttacagttcttcatgttaagttgagcgtgatgggaagggaaagaatgctgatctttaaatttttgtccttagttaagttctgtatttagtgaattaattgcatcctaaaaagtcaaacttgaaaagcacattttaaatggcaaatctattttttacatgtttgtgaagtttttattttttagtaaacagaccatcagaagagaacaatggtacagagcaggggtcagcagatggattttgtaaagcatcaacttgtaaatattttcaagtttattagctgtatggctctggtttctgttccctgttccaaatgttaaagtctactgttgtattctaaaagcagccatggactgaatgtagctgtgttccaataaaacttacacaaaagcaggcagtgggccataatttgcaacacctgattcacagcataattttgtcacaaactgaaagtgttcctcaattaaagtgatttttttttcttgaatgtagaccnactggtccgct

SEQ ID NO: 362242 - DNA, 2188 bp, Homo sapiens
aaacagcttcttaggattaatgtaatatatatatgcaaaggtcaaatgaaatatttttgtggatggtaagaaaaatttcaacttacatttttgcaacttctttaacgatatcacggcaggtcatttctttcatctatagaaaataaaatgtatactgttcatcagaagaacattttccacttgtgtaataactattttcacttttatactcagatataaaaccaaggaaaataacctaaagtctgaaaaagaccagaatcgaagtttcctgattcatattttaatgttttgaaatttatactccaggctgggtgcagtggcttgtgcctgtaatcccagcactttgggaggccgaggcggccggattgcctgaagtcagaagttcgagaccagcctgaccaacatggtgaaaccctgtctctacttaaaaatacaaaagagctgggcatggaggtggtgcgcgcctgtaaccctagctactcgggaggctgaggcctaagaatctcttgaacccaggaggcagaggttgtagtgagccgggatcacgccactgcactctagcctgggcgacagagagagagactgtctaaaaaaggaaaagaaaaaaatttatacgccaaaaaagatattctgagataacctgtagttaccactaactttgtgacaaaattataaaaatccacagccatctatgaatctgtaggcagacctgaagtttgaacgactggtgaagacatctgattttctttatagccaagttaggataacaaaatgcaaacaagtcattaatatttactatatgcaagatacagaaagatgaaggaaggagtaagaagttatccttcgtggaactattcaaagcaaaaatgcaaaataccagggaaagctttgaagaaccaagatttgagcaggttcttagaatatagattggattggatttgatttcaagaaagatgaacgtgtaaagcagaagtgggaagccaaaaacttttttccaaattagaattaagcattctttcaatgaacatttggaaatcaaggtagaaaaatatccctagggcctagctgaggagtctgtatgttgttgggttttgatagtaaccagtccaagattttgttattagacgtgggtttctgaatagacaggcatttctgaacagacatgacaggatcatggaatatagtgaaagataatgggtgctcatacagcagtctagacttaaggtgattcaactactatatattaaactagattatcttttattttttaattttgaaatctggatgctcaagctctgcctgcacaaccacatgaggaagaaggaacaatgacaacaaaaataacactaaatttaaatttaagagtactacttttaggaaatagacaaaccattatttgggtacaactaaaggcaactggcatggactcaaatattttggggaagaaaaagactaaaagttctaaggaagaaaatgcgaaccttgatagtttgaaatagttaaaaagacagtgtagaaactgtttaggcagtttgattatggactattagatgatacttgggtctgataatggtataaggagaataaagtatttagggatccaatattacgcctgcagctttttccaaatagttcatgggggagggggatgtgtaagtggttaactgaagtctaactagataggtttgttgtaagcttaggatgtttacagttcttcatgttaagttgagcgtgatgggaagggaaagaatgctgatctttaaatttttgtccttagttaagttctgtatttagtgaattaattgcatcctaaaaagtcaaacttgaaaagcacattttaaatggcaaatctattttttacatgtttgtgaagtttttattttttagtaaacagaccatcagaagagaacaatggtacagagcaggggtcagcagatggattttgtaaagcatcaacttgtaaatattttcaagtttattagctgtatggctctggtttctgttccctgttccaaatgttaaagtctactgttgtattctaaaagcagccatggactgaatgtagctgtgttccaataaaacttacacaaaagcaggcagtgggccataatttgcaacacctgattcacagcataattttgtcacaaactgaaagtgttcctcaattaaagtgatttttttttcttga

SEQ ID NO: 362243 - DNA, 2188 bp, Homo sapiens
aaacagcttcttaggattaatgtaatatatatatgcaaaggtcaaatgaaatatttttgtggatggtaagaaaaatttcaacttacatttttgcaacttctttaacgatatcacggcaggtcatttctttcatctatagaaaataaaatgtatactgttcatcagaagaacattttccacttgtgtaataactattttcacttttatactcagatataaaaccaaggaaaataacctaaagtctgaaaaagaccagaatcgaagtttcctgattcatattttaatgttttgaaatttatactccaggctgggtgcagtggcttgtgcctgtaatcccagcactttgggaggccgaggcggccggattgcctgaagtcagaagttcgagaccagcctgaccaacatggtgaaaccctgtctctacttaaaaatacaaaagagctgggcatggaggtggtgcgcgcctgtaaccctagctactcgggaggctgaggcctaagaatctcttgaacccaggaggcagaggttgtagtgagccgggatcacgccactgcactctagcctgggcgacagagagagagactgtctaaaaaaggaaaagaaaaaaatttatacgccaaaaaagatattctgagataacctgtagttaccactaactttgtgacaaaattataaaaatccacagccatctatgaatctgtaggcagacctgaagtttgaacgactggtgaagacatctgattttctttatagccaagttaggataacaaaatgcaaacaagtcattaatatttactatatgcaagatacagaaagatgaaggaaggagtaagaagttatccttcgtggaactattcaaagcaaaaatgcaaaataccagggaaagctttgaagaaccaagatttgagcaggttcttagaatatagattggattggatttgatttcaagaaagatgaacgtgtaaagcagaagtgggaagccaaaaacttttttccaaattagaattaagcattctttcaatgaacatttggaaatcaaggtagaaaaatatccctagggcctagctgaggagtctgtatgttgttgggttttgatagtaaccagtccaagattttgttattagacgtgggtttctgaatagacaggcatttctgaacagacatgacaggatcaaaacaatgtttgagcaaactgcccttcatctactgtggatatgttgggggatgatggaatatagtgaaagataatgggtgctcatacagcagtctagacttaaggtgattcaactactatatattaaactagattatcttttattttttaattttgaaatctggatgctcaagctctgcctgcacaaccacatgaggaagaaggaacaatgacaacaaaaataacactaaatttaaatttaagagtactacttttaggaaatagacaaaccattatttgggtacaactaaaggcaactggcatggactcaaatattttggggaagaaaaagactaaaagttctaaggaagaaaatgcgaaccttgatagtttgaaatagatacttgggtctgataatggtataaggagaataaagtatttagggatccaatattacgcctgcagctttttccaaatagttcatgggggagggggatgtgtaagtggttaactgaagtctaactagataggtttgttgtaagcttaggatgtttacagttcttcatgttaagttgagcgtgatgggaagggaaagaatgctgatctttaaatttttgtccttagttaagttctgtatttagtgaattaattgcatcctaaaaagtcaaacttgaaaagcacattttaaatggcaaatctattttttacatgtttgtgaagtttttattttttagtaaacagaccatcagaagagaacaatggtacagagcaggggtcagcagatggattttgtaaagcatcaacttgtaaatattttcaagtttattagctgtatggctctggtttctgttccctgttccaaatgttaaagtctactgttgtattctaaaagcagccatggactgaatgtagctgtgttccaataaaacttacacaaaagcaggcagtgggccataatttgcaacacctgattcacagcataattttgtcacaaactgaaagtgttcctcaattaaagtgatttttttttcttga

SEQ ID NO: 362244 - DNA, 2732 bp, Homo sapiens
  misc_feature (2330)..(2330): n is a, c, g, or t
  misc_feature (2605)..(2605): n is a, c, g, or t
  misc_feature (2678)..(2678): n is a, c, g, or t
  misc_feature (2682)..(2682): n is a, c, g, or t
  misc_feature (2704)..(2704): n is a, c, g, or t
aaacagcttcttaggattaatgtaatatatatatgcaaaggtcaaatgaaatatttttgtggatggtaagaaaaatttcaacttacatttttgcaacttctttaacgatatcacggcaggtcatttctttcatctatagaaaataaaatgtatactgttcatcagaagaacattttccacttgtgtaataactattttcacttttatactcagatataaaaccaaggaaaataacctaaagtctgaaaaagaccagaatcgaagtttcctgattcatattttaatgttttgaaatttatactccaggctgggtgcagtggcttgtgcctgtaatcccagcactttgggaggccgaggcggccggattgcctgaagtcagaagttcgagaccagcctgaccaacatggtgaaaccctgtctctacttaaaaatacaaaagagctgggcatggaggtggtgcgcgcctgtaaccctagctactcgggaggctgaggcctaagaatctcttgaacccaggaggcagaggttgtagtgagccgggatcacgccactgcactctagcctgggcgacagagagagagactgtctaaaaaaggaaaagaaaaaaatttatacgccaaaaaagatattctgagataacctgtagttaccactaactttgtgacaaaattataaaaatccacagccatctatgaatctgtaggcagacctgaagtttgaacgactggtgaagacatctgattttctttatagccaagttaggataacaaaatgcaaacaagtcattaatatttactatatgcaagatacagaaagatgaaggaaggagtaagaagttatccttcgtggaactattcaaagcaaaaatgcaaaataccagggaaagctttgaagaaccaagatttgagcaggttcttagaatatagattggattggatttgatttcaagaaagatgaacgtgtaaagcagaagtgggaagccaaaaacttttttccaaattagaattaagcattctttcaatgaacatttggaaatcaaggtagaaaaatatccctagggcctagctgaggagtctgtatgttgttgggttttgatagtaaccagtccaagattttgttattagacgtgggtttctgaatagacaggcatttctgaacagacatgacaggatcaaaacaatgtttgagcaaactgcccttcatctactgtggatatgttgggggatgatggaatatagtgaaagataatgggtgctcatacagcagtctagacttaaggtgattcaactactatatattaaactagattatcttttattttttaattttgaaatctggatgctcaagctctgcctgcacaaccataaaaaaaaaaaaaaaaaaaaaaaaaaaaaaaaaaaaaaaaaaaaaaaaaaaaaaaaaaaaaaaaaaaaagggaggggcggacgaatcacaaaagaattcaatcacaggcaggggccacgcaatcacggagcgagcacgcccagtctggttagaacgaggaaggcccaccacatagatgaggccgcatgtctaacgagaagcgcacggcgacagagcatccatacaacaagctcggctgaagagcatcacaggtgaaaactggtggaaccatcttagcgaggacaccacacacatacgggaaggcggcaaaactcgaggcgagacgcgctacacacgaagaagatgaaatcgacacacagcggaaaacacacaaagacgtacgcagagcgcacacagcggtgaccaacaacaagcaacaaatagagacagacagacagagcaaagaaaaaaatcgagaccaatacacgaaaagtatcagctaccagcacagacaactaaccatcaacacgagcagcagacaagagccagaacacacagaaaaccacaagaacatacaaaacagcaacagaaacacgacaagcaagcaacagaacagactcgacagaagctaaagcgacaacaggaacaataacagcgacataggaacacgactaacgcagatcagtcagacagacgagacaacagacagaagtaacagtacgatcagacaagaactaaactagcaagagagaccgagagagagagacgaacgacagcagaggtaacgaagacaggagaggtacgaaaagcgagaggagacagtacaacacagaaaaggagcacgacaggagactgtaagagagagctacgagcatgcagatcagagcacgcaacagcagaagacaagagacgatgaatagccgtacggaaagcgatacatgcaggaacaagctgcgcacgtagcagaagagctagtgcagtagagncgtggagaaccgagctgaaagaagacacgagcaaccgagaacagaataagactagcgaggagacaagacagcggagactcagacgaacgacaaagcacagcagaacgagcacgacaagaagctgacagacgagacaggacggactaagatggcgaagcgagcgagacgcgcacagtgaacacagagcgacacgacggatcgagcgtcggacaggagagcgaagcaggagtgacaggcatgaaagcaagagaccgatagaaaggacgaggcgtagnatgagcagcaatcggccgcgataggcactacatgatcatagtaggaacgcagacgaacaagacagaatgatantgcngagccaatacgaagacgagcangagagctgaggagtagccgcagaggcag

SEQ ID NO: 362245 - DNA, 1394 bp, Homo sapiens
aaacagcttcttaggattaatgtaatatatatatgcaaaggtcaaatgaaatatttttgtggatggtaagaaaaatttcaacttacatttttgcaacttctttaacgatatcacggcaggtcatttctttcatctatagaaaataaaatgtatactgttcatcagaagaacattttccacttgtgtaataactattttcacttttatactcagatataaaaccaaggaaaataacctaaagtctgaaaaagaccagaatcgaagtttcctgattcatattttaatgttttgaaatttatactccaggctgggtgcagtggcttgtgcctgtaatcccagcactttgggaggccgaggcggccggattgcctgaagtcagaagttcgagaccagcctgaccaacatggtgaaaccctgtctctacttaaaaatacaaaagagctgggcatggaggtggtgcgcgcctgtaaccctagctactcgggaggctgaggcctaagaatctcttgaacccaggaggcagaggttgtagtgagccgggatcacgccactgcactctagcctgggcgacagagagagagactgtctaaaaaaggaaaagaaaaaaatttatacgccaaaaaagatattctgagataacctgtagttaccactaactttgtgacaaaattataaaaatccacagccatctatgaatctgtaggcagacctgaagtttgaacgactggtgaagacatctgattttctttatagccaagttaggataacaaaatgcaaacaagtcattaatatttactatatgcaagatacagaaagatgaaggaaggagtaagaagttatccttcgtggaactattcaaagcaaaaatgcaaaataccagggaaagctttgaagaaccaagatttgagcaggttcttagaatatagattggattggatttgatttcaagaaagatgaacgtgtaaagcagaagtgggaagccaaaaacttttttccaaattagaattaagcattctttcaatgaacatttggaaatcaaggtagaaaaatatccctagggcctagctgaggagtctgtatgttgttgggttttgatagtaaccagtccaagattttgttattagacgtgggtttctgaatagacaggcatttctgaacagacatgacaggatcaaaacaatgtttgagcaaactgcccttcatctactgtggatatgttgggggatgatggaatatagtgaaagataatgggtgctcatacagcagtctagacttaaggtgattcaactactatatattaaactagattatcttttattttttaattttgaaatctggatgctcaagctctgcctgcacaactctagcctgggcgacagagagagagactgtct

SEQ ID NO: 362246 - DNA, 1675 bp, Homo sapiens
tactgccccgccccccccaaaaaatttctggtctgtctttagcttcatttctgaacattttatcctggacctctctttcttcaagtagaaataatcggctgggcgtggtggctcatgcctgtaatctcagcaccttgggaggccgaggcgggtggatcacctgaggtcgagagttcaagaccagcctgaccaacatggagaaaccccgtctctactaaaaatacagaattagccgggcgtggtggcgcatgcctgtaattccagctaattgggaggctgaggcaggagaatcgcttaaacctggaagatggaggttgcggtaagctgagatcgtggaattgcacttcaccctaggcaacaggagcaaaactgtctcaaaaaaaaaaaaaataatcgcagtctttaagttacacataccataaaatatatgagaatttttcttggaccctaggagtgattttttttttccactttttttttttttttcactttaggtgagcatttgtacagtgaaacattttgctacacaaaagtgatgtttaggaatactaacaaattattttcaagaataagactgattttatgggaaaattaagcagatgctccagtttgagaaacctggatctgcgatctgtttgtggtctctatgaataaagaaaagcaaatagaatcttatcagataagtgcttttataagtctaaatatattctttggaatctctaaagcaaaacttttaaacttttttttttttttttttttttttaggtaccagcatcaagatgatttatggtaataaggtactcagtctttgcttaaaataaattttacgtttatcaaagtaaaatttaccagctttttttcctaaagaggctagtcatatctcatcagtggttacaaagtatccttacaattgaacctacatttgttaatcctgttcagtgtgtatgaaaatcacttggtggccgggcatggtggctcacgcctgtaatcccagcactttgggaggccaaggcgggcagatcacaaggtcaggagttcgagaccagcctggctaatatagtgaaaccccatttctactaaaaatgcaaacattagtcaggcatggtggcaggtgcctgtagtcccagctacttgggaggctgaggcaggagactctcttcaacccgtgaggcagaggttgcagtgagtcgagatcatgtcactgcacttcagcttaagcaacagagcgagactccatctcaaaaaaagaaaagcacgtcactcgatgttctttctttcataagagttgaagaactaggtatatctgcttatattatggcatctatagtagcttagctgctcatatttgggtctctttagaaccagtgtctttcaaagagggttttaactatgctggtgtaaattttaagaatagatacattcaaagaagaattcaacattcatgtgacattcatactttggaactttgggaaagtataggaatgaccatagattggcttagggatagtcaatttacctgtctgtaaatggatccaatttagtattgttcctgtatttttctaagaccaacacttgtgtcattcacagttaaatatatgagttgtggccaggcccggtggctcatgcctgtaatttcagcattttaggaggctgaggtgaacagattgctcaagtc

SEQ ID NO: 362247 - DNA, 879 bp, Homo sapiens
tactgccccgccccccccaaaaaatttctggtctgtctttagcttcatttctgaacattttatcctggacctctctttcttcaagtagaaataatcggctgggcgtggtggctcatgcctgtaatctcagcaccttgggaggccgaggcgggtggatcacctgaggtcgagagttcaagaccagcctgaccaacatggagaaaccccgtctctactaaaaatacagaattagccgggcgtggtggcgcatgcctgtaattccagctaattgggaggctgaggcaggagaatcgcttaaacctggaagatggaggttgcggtaagctgagatcgtggaattgcacttcaccctaggcaacaggagcaaaactgtctcaaaaaaaaaaaaaataatcgcagtctttaagttacacataccataaaatatatgagaatttttcttggaccctaggagtgattttttttttccactttttttttttttttcactttaggtgagcatttgtacagtgaaacattttgctacacaaaagtgatgtttaggaatactaacaaattattttcaagaataagactgattttatgggaaaattaagcagatgctccagtttgagaaacctggatctgcgatctgtttgtgagtggtattcagttaagagaacaattatttcgtataagccacatcagagacgactgaagatgaaaaaactaccatccccgtatataactaatttgtgctgtgcaccaacaagaacctgctttaaatttccatggcaatttacaacccccatactgtaccaggcaaggtaccagcatcaagatgatttatggtaataaggtactcagtctttgcttaaaataaattttacgtttatcaaa

SEQ ID NO: 362248 - DNA, 326 bp, Homo sapiens
agcttgtcggcgccattttgtctcggcagcggtggccgtagctccatcgcattttatgtttctggcgagaagggaacggagttttcatcaggtagattggtttttgtgcggccgtcctccaccgtttcctccaggacagcacctagtcgtggccggaggagtctcagagctgtcagaaagaataagactgattttatgggaaaattaagcagatgctccagtttgagaaacctggatctgcgatctgtttgtggtaccagcatcaagatgatttatggtaataaggtactcagtctttgcttaaaataaattttacgtttatcaaa

SEQ ID NO: 362249 - DNA, 2480 bp, Homo sapiens
agcttgtcggcgccattttgtctcggcagcggtggccgtagctccatcgcattttatgtttctggcgagaagggaacggagttttcatcaggtagattggtttttgtgcggccgtcctccaccgtttcctccaggacagcacctagtcgtggccggaggagtctcagagctgtcagaaagaataagactgattttatgggaaaattaagcagatgctccagtttgagaaacctggatctgcgatctgtttgtgagtggtattcagttaagagaacaattatttcgtataagccacatcagagacgactgaagatgaaaaaactaccatccccgtatataactaatttgtgctgtgcaccaacaagaacctgctttaaatttccatggcaatttacaacccccatactgtaccaggcaaggtaccagcatcaagatgatttatggtaataagatataaaaccaaggaaaataacctaaagtctgaaaaagaccagaatcgaagtttcctgattcatattttaatgttttgaaatttatactccaggctgggtgcagtggcttgtgcctgtaatcccagcactttgggaggccgaggcggccggattgcctgaagtcagaagttcgagaccagcctgaccaacatggtgaaaccctgtctctacttaaaaatacaaaagagctgggcatggaggtggtgcgcgcctgtaaccctagctactcgggaggctgaggcctaagaatctcttgaacccaggaggcagaggttgtagtgagccgggatcacgccactgcactctagcctgggcgacagagagagagactgtctaaaaaaggaaaagaaaaaaatttatacgccaaaaaagatattctgagataacctgtagttaccactaactttgtgacaaaattataaaaatccacagccatctatgaatctgtaggcagacctgaagtttgaacgactggtgaagacatctgattttctttatagccaagttaggataacaaaatgcaaacaagtcattaatatttactatatgcaagatacagaaagatgaaggaaggagtaagaagttatccttcgtggaactattcaaagcaaaaatgcaaaataccagggaaagctttgaagaaccaagatttgagcaggttcttagaatatagattggattggatttgatttcaagaaagatgaacgtgtaaagcagaagtgggaagccaaaaacttttttccaaattagaattaagcattctttcaatgaacatttggaaatcaaggtagaaaaatatccctagggcctagctgaggagtctgtatgttgttgggttttgatagtaaccagtccaagattttgttattagacgtgggtttctgaatagacaggcatttctgaacagacatgacaggatcaaaacaatgtttgagcaaactgcccttcatctactgtggatatgttgggggatgatggaatatagtgaaagataatgggtgctcatacagcagtctagacttaaggtgattcaactactatatattaaactagattatcttttattttttaattttgaaatctggatgctcaagctctgcctgcacaaccacatgaggaagaaggaacaatgacaacaaaaataacactaaatttaaatttaagagtactacttttaggaaatagacaaaccattatttgggtacaactaaaggcaactggcatggactcaaatattttggggaagaaaaagactaaaagttctaaggaagaaaatgcgaaccttgatagtttgaaatagttaaaaagacagtgtagaaactgtttaggcagtttgattatggactattagatgatacttgggtctgataatggtataaggagaataaagtatttagggatccaatattacgcctgcagctttttccaaatagttcatgggggagggggatgtgtaagtggttaactgaagtctaactagataggtttgttgtaagcttaggatgtttacagttcttcatgttaagttgagcgtgatgggaagggaaagaatgctgatctttaaatttttgtccttagttaagttctgtatttagtgaattaattgcatcctaaaaagtcaaacttgaaaagcacattttaaatggcaaatctattttttacatgtttgtgaagtttttattttttagtaaacagaccatcagaagagaacaatggtacagagcaggggtcagcagatggattttgtaaagcatcaacttgtaaatattttcaagtttattagctgtatggctctggtttctgttccctgttccaaatgttaaagtctactgttgtattctaaaagcagccatggactgaatgtagctgtgttccaataaaacttacacaaaagcaggcagtgggccataatttgcaacacctgattcacagcataattttgtcacaaactgaaagtgttcctcaattaaagtgatttttttttcttga

SEQ ID NO: 362250 - DNA, 2195 bp, Homo sapiens
gcgggccgagtcgggctgagcggctggagctgggccttggccgcgagaggccggcgaaagctatcttcctgcaccggcggccgggtgagggcggtgggagggagcggtgcctgcgctgtggccatgtctgtgtacgcagggggccggggccccgcgaagctgtgccctcaggccggccccggccggacacccttacccctccatgggtccggcagagggcagtgaccggcaccttctgtgcgtcctggactcctctgagaaacaggagagctcaaaggatggctactgacatgcagaggaagagaagcagcgaatgccttgatggcacattgactccttctgatggacagagtatggagagagctgagagccccacaccaggaatggcccagggaatggagccaggtgcgggccaggagggtgccatgttcgtccatgcccgttcctacgaggacctgactgagtcagaggatggggcagcttctggggacagccacaaggagggtaccaggggtcccccgccgctgcctacagacatgcgccagatcagccaggactttagcgagctaagcacccagctgacgggtgtggcccgggacctgcaggaggagatgctgccaggaagctctgaggattggctggaacccccaggggcagttgggcgaccagccacagagccccccagggagggcacaaccgagggggatgaggaggatgccacggaggcatggcgcctgcaccagaagcatgtctttgtgctgagtgaggcagggaagcctgtgtactcccgctatgggtctgaggaggcactttccagcactatgggtgttatggtggccctggtgtccttcctggaggcagacaagaacgccatccgctccatccatgcagatggctacaaggtagtattcgtgcgccggagcccgctggtgctagtggcggtggctcgtacgcggcagtcggcacaagagctggcgcaggagctgctctacatctactaccagatcctaagccttcttaccggtgcgcagctgagccacatcttccagcagaagcagaactatgatttgcggcgcctactctcgggctcagagcgcatcaccgacaacctgctgcagctcatggcacgagaccccagcttcctgatgggggcggcacggtgcctgcccctggcggcggccgtgcgcgacactgtgagcgccagcctgcagcaggcgcgtgcgcgcagcctggtcttctccatcctgctggcccgcaaccagctcgtggcactcgtgcgccgaaaggaccaatttctgcaccccatcgacctgcacctgctcttcaacctcattagttcctcctcgtcctttcgcgagggcgaggcctggacgcccgtgtgcctgcccaaattcaacgcagccggcttcttccacgcacacatctcttacctagagcctgacactgacctctgcctgctgcttgtctccactgaccgtgaggacttctttgcagtctctgactgccgccgccgcttccaggagcgccttcgcaagcgcggagcccacctggccctgcgagaggcactgcgcacaccctactacagcgttgcccaagtgggcatccctgacctgcgtcacttcctctataagtcaaagagctcgggactcttcaccagccctgagattgaggccccatacaccagtgaagaggagcaggagcggctgctgggcctctaccagtacttgcacagtcgtgcccacaatgcctctcgcccactcaagaccatttactacacgggccccaacgagaacctcctggcctgggtaaggcagccctgggatgggctgggctttatggaggtcctaggtatgggccatgaggggcctctaacctagatgacgaccctttgccccttctccaggtgacaggcgcctttgagctctacatgtgttacagccccctggggaccaaggcgtcagccgtcagtgccatccataagctgatgcgctggatccgcaaagaggaagaccgcctcttcattctcacgcccctcacctattgatgggaatgtgtgcgggctcagccttcctggacacactaggtgtgggaagccataggagcctccagatgggggctggcctctcttgcccagccagcgggcagggactgtgggttggtgaatgcattaaagtgctttggggaaaaaaaatcaa

SEQ ID NO: 362251 - DNA, 2030 bp, Homo sapiens
gcgggccgagtcgggctgagcggctggagctgggccttggccgcgagaggccggcgaaagctatcttcctgcaccggcggccgggtgagggcggtgggagggagcggtgcctgcgctgtggccatgtctgtgtacgcagggggccggggccccgcgaagctgtgccctcaggccggccccggccggacacccttacccctccatgggtccggcagagggcagtgaccggcaccttctgtgcgtcctggactcctctgagaaacaggagagctcaaaggatggctactgacatgcagaggaagagaagcagcgaatgccttgatggcacattgactccttctgatggacagagtatggagagagctgagagccccacaccaggaatggcccagggaatggagccaggtgcgggccaggagggtgccatgttcgtccatgcccgttcctacgaggacctgactgagtcagaggatggggcagcttctggggacagccacaaggagggtaccaggggtcccccgccgctgcctacagacatgcgccagatcagccaggactttagcgagctaagcacccagctgacgggtgtggcccgggacctgcaggaggagatgctgccaggaagctctgaggattggctggaacccccaggggcagttgggcgaccagccacagagccccccagggagggcacaaccgagggggatgaggaggatgccacggaggcatggcgcctgcaccagaagcatgtctttgtgctgagtgaggcagggaagcctgtgtactcccgctatgggtctgaggaggcactttccagcactatgggtgttatggtggccctggtgtccttcctggaggcagacaagaacgccatccgctccatccatgcagatggctacaaggtagtattcgtgcgccggagcccgctggtgctagtggcggtggctcgtacgcggcagtcggcacaagagctggcgcaggagctgctctacatctactaccagatcctaagccttcttaccggtgcgcagctgagccacatcttccagcagaagcagaactatgatttgcggcgcctactctcgggctcagagcgcatcaccgacaacctgctgcagctcatggcacgagaccccagcttcctgatgggggcggcacggtgcctgcccctggcggcggccgtgcgcgacactgtgagcgccagcctgcagcaggcgcgtgcgcgcagcctggtcttctccatcctgctggcccgcaaccagctcgtggcactcgtgcgccgaaaggaccaatttctgcaccccatcgacctgcacctgctcttcaacctcattagttcctcctcgtcctttcgcgagggcgaggcctggacgcccgtgtgcctgcccaaattcaacgcagccggcttcttccacgcacacatctcttacctagagcctgacactgacctctgcctgctgcttgtctccactgaccgtgaggacttctttgcagtctctgactgccgccgccgcttccaggagcgccttcgcaagcgcggagcccacctggccctgcgagaggcactgcgcacaccctactacagcgttgcccaagtgggcatccctgacctgcgtcacttcctctataagtcaaagagctcgggactcttcaccagccctgagattgaggccccatacaccagtgaagaggagcaggagcggctgctgggcctctaccagtacttgcacagtcgtgcccacaatgcctctcgcccactcaagaccatttactacacgggccccaacgagaacctcctggcctgggatgaaagagcagaattttgcgaataataccatgatgattaaagcaaacatggagacaaagaaataagaagcaaagaagcccataaattaaaaatgaatagaatggaataagacaaaaaggaaagaaagaaatattaattcataagaccataaaatattgcctgagaatgtgtgaccgagtagacttttggacaataggtgtggaaaaaatagcagcctaaatgg

SEQ ID NO: 362252 - DNA, 1288 bp, Homo sapiens
aagagctgcgctggaaggcggttttcggagggagctgccgctgaggctgacatccttctttcctgtcccgctctcagatggcatggctacaaggtagtattcgtgcgccggagcccgctggtgctagtggcggtggctcgtacgcggcagtcggcacaagagctggcgcaggagctgctctacatctactaccagatcctaagccttcttaccggtgcgcagctgagccacatcttccagcagaagcagaactatgatttgcggcgcctactctcgggctcagagcgcatcaccgacaacctgctgcagctcatggcacgagaccccagcttcctgatgggggcggcacggtgcctgcccctggcggcggccgtgcgcgacactgtgagcgccagcctgcagcaggcgcgtgcgcgcagcctggtcttctccatcctgctggcccgcaaccagctcgtggcactcgtgcgccgaaaggaccaatttctgcaccccatcgacctgcacctgctcttcaacctcattagttcctcctcgtcctttcgcgagggcgaggcctggacgcccgtgtgcctgcccaaattcaacgcagccggcttcttccacgcacacatctcttacctagagcctgacactgacctctgcctgctgcttgtctccactgaccgtgaggacttctttgcagtctctgactgccgccgccgcttccaggagcgccttcgcaagcgcggagcccacctggccctgcgagaggcactgcgcacaccctactacagcgttgcccaagtgggcatccctgacctgcgtcacttcctctataagtcaaagagctcgggactcttcaccagccctgagattgaggccccatacaccagtgaagaggagcaggagcggctgctgggcctctaccagtacttgcacagtcgtgcccacaatgcctctcgcccactcaagaccatttactacacgggccccaacgagaacctcctggcctgggtgacaggcgcctttgagctctacatgtgttacagccccctggggaccaaggcgtcagccgtcagtgccatccataagctgatgcgctggatccgcaaagaggaagaccgcctcttcattctcacgcccctcacctattgatgggaatgtgtgcgggctcagccttcctggacacactaggtgtgggaagccataggagcctccagatgggggctggcctctcttgcccagccagcgggcagggactgtgggttggtgaatgcattaaagtgctttggggaaaaaaaatcaa

SEQ ID NO: 362253 - DNA, 874 bp, Homo sapiens
gcgggccgagtcgggctgagcggctggagctgggccttggccgcgagaggccggcgaaagctatcttcctgcaccggcggccgggtgagggcggtgggagggagcggtgcctgcgctgtggccatgtctgtgtacgcagggggccggggccccgcgaagctgtgccctcaggccggccccggccggacacccttacccctccatgggtccggcagagggcagtgaccggcaccttctgtgcgtcctggactcctctgagaaacaggagagctcaaaggatggctactgacatgcagaggaagagaagcagcgaatgccttgatggcacattgactccttctgatggacagagtatggagagagctgagagccccacaccaggaatggcccagggaatggagccaggtgcgggccaggagggtgccatgttcgtccatgcccgttcctacgaggacctgactgagtcagaggatggggcagcttctggggacagccacaaggagggtaccaggggtcccccgccgctgcctacagacatgcgccagatcagccaggactttagcgagctaagcacccagctgacgggttggcccgcaaccagctcgtggcactcgtgcgccgaaaggaccaatttctgcaccccatcgacctgcacctgctcttcaacctcattagttcctcctcgtcctttcgcgagggcgaggcctggacgcccgtgtgcctgcccaaattcaacgcagtcagccttcctggacacactaggtgtgggaagccataggagcctccagatgggggctggcctctcttgcccagccagcgggcagggactgtgggttggtgaatgcattaaagtgctttggggaaaaaaaatcaa

SEQ ID NO: 362254 - DNA, 2097 bp, Homo sapiens
gcgggccgagtcgggctgagcggctggagctgggccttggccgcgagaggccggcgaaagctatcttcctgcaccggcggccgggtgagggcggtgggagggagcggtgcctgcgctgtggccatgtctgtgtacgcagggggccggggccccgcgaagctgtgccctcaggccggccccggccggacacccttacccctccatgggtccggcagagggcagtgaccggcaccttctgtgcgtcctggactcctctgagaaacaggagagctcaaaggatggctactgacatgcagaggaagagaagcagcgaatgccttgatggcacattgactccttctgatggacagagtatggagagagctgagagccccacaccaggaatggcccagggaatggagccaggtgcgggccaggagggtgccatgttcgtccatgcccgttcctacgaggacctgactgagtcagaggatggggcagcttctggggacagccacaaggagggtaccaggggtcccccgccgctgcctacagacatgcgccagatcagccaggactttagcgagctaagcacccagctgacgggtgtggcccgggacctgcaggaggagatgctgccaggaagctctgaggattggctggaacccccaggggcagttgggcgaccagccacagagccccccagggagggcacaaccgagggggatgaggaggatgccacggaggcatggcgcctgcaccagaagcatgtctttgtgctgagtgaggcagggaagcctgtgtactcccgctatgggtctgaggaggcactttccagcactatgggtgttatggtggccctggtgtccttcctggaggcagacaagaacgccatccgctccatccatgcagatggctacaaggtagtattcgtgcgccggagcccgctggtgctagtggcggtggctcgtacgcggcagtcggcacaagagctggcgcaggagctgctctacatctactaccagatcctaagccttcttaccggtgcgcagctgagccacatcttccagcagaagcagaactatgatttgcggcgcctactctcgggctcagagcgcatcaccgacaacctgctgcagctcatggcacgagaccccagcttcctgatgggggcggcacggtgcctgcccctggcggcggccgtgcgcgacactgtgagcgccagcctgcagcaggcgcgtgcgcgcagcctggtcttctccatcctgctggcccgcaaccagctcgtggcactcgtgcgccgaaaggaccaatttctgcaccccatcgacctgcacctgctcttcaacctcattagttcctcctcgtcctttcgcgagggcgaggcctggacgcccgtgtgcctgcccaaattcaacgcagccggcttcttccacgcacacatctcttacctagagcctgacactgacctctgcctgctgcttgtctccactgaccgtgaggacttctttgcagtctctgactgccgccgccgcttccaggagcgccttcgcaagcgcggagcccacctggccctgcgagaggcactgcgcacaccctactacagcgttgcccaagtgggcatccctgacctgcgtcacttcctctataagtcaaagagctcgggactcttcaccagccctgagattgaggccccatacaccagtgaagaggagcaggagcggctgctgggcctctaccagtacttgcacagtcgtgcccacaatgcctctcgcccactcaagaccatttactacacgggccccaacgagaacctcctggcctgggtgacaggcgcctttgagctctacatgtgttacagccccctggggaccaaggcgtcagccgtcagtgccatccataagctgatgcgctggatccgcaaagaggaagaccgcctcttcattctcacgcccctcacctattgatgggaatgtgtgcgggctcagccttcctggacacactaggtgtgggaagccataggagcctccagatgggggctggcctctcttgcccagccagcgggcagggactgtgggttggtgaatgcattaaagtgctttggggaaaaaaaatcaa

SEQ ID NO: 362255 - DNA, 1997 bp, Homo sapiens
tgaagacgggggcctccagccatcaacgctatcgtttgcaatgggaagactgtgtctccctgcggtccctcagccggctagtccccagctggggaatacaaaaggcgagatctggaacccatcctttggctgggagggcgagatccggtagggggcagtggccaggagagctcaaaggatggctactgacatgcagaggaagagaagcagcgaatgccttgatggcacattgactccttctgatggacagagtatggagagagctgagagccccacaccaggaatggcccagggaatggagccaggtgcgggccaggagggtgccatgttcgtccatgcccgttcctacgaggacctgactgagtcagaggatggggcagcttctggggacagccacaaggagggtaccaggggtcccccgccgctgcctacagacatgcgccagatcagccaggactttagcgagctaagcacccagctgacgggtgtggcccgggacctgcaggaggagatgctgccaggaagctctgaggattggctggaacccccaggggcagttgggcgaccagccacagagccccccagggagggcacaaccgagggggatgaggaggatgccacggaggcatggcgcctgcaccagaagcatgtctttgtgctgagtgaggcagggaagcctgtgtactcccgctatgggtctgaggaggcactttccagcactatgggtgttatggtggccctggtgtccttcctggaggcagacaagaacgccatccgctccatccatgcagatggctacaaggtagtattcgtgcgccggagcccgctggtgctagtggcggtggctcgtacgcggcagtcggcacaagagctggcgcaggagctgctctacatctactaccagatcctaagccttcttaccggtgcgcagctgagccacatcttccagcagaagcagaactatgatttgcggcgcctactctcgggctcagagcgcatcaccgacaacctgctgcagctcatggcacgagaccccagcttcctgatgggggcggcacggtgcctgcccctggcggcggccgtgcgcgacactgtgagcgccagcctgcagcaggcgcgtgcgcgcagcctggtcttctccatcctgctggcccgcaaccagctcgtggcactcgtgcgccgaaaggaccaatttctgcaccccatcgacctgcacctgctcttcaacctcattagttcctcctcgtcctttcgcgagggcgaggcctggacgcccgtgtgcctgcccaaattcaacgcagccggcttcttccacgcacacatctcttacctagagcctgacactgacctctgcctgctgcttgtctccactgaccgtgaggacttctttgcagtctctgactgccgccgccgcttccaggagcgccttcgcaagcgcggagcccacctggccctgcgagaggcactgcgcacaccctactacagcgttgcccaagtgggcatccctgacctgcgtcacttcctctataagtcaaagagctcgggactcttcaccagccctgagattgaggccccatacaccagtgaagaggagcaggagcggctgctgggcctctaccagtacttgcacagtcgtgcccacaatgcctctcgcccactcaagaccatttactacacgggccccaacgagaacctcctggcctgggtgacaggcgcctttgagctctacatgtgttacagccccctggggaccaaggcgtcagccgtcagtgccatccataagctgatgcgctggatccgcaaagaggaagaccgcctcttcattctcacgcccctcacctattgatgggaatgtgtgcgggctcagccttcctggacacactaggtgtgggaagccataggagcctccagatgggggctggcctctcttgcccagccagcgggcagggactgtgggttggtgaatgcattaaagtgctttggggaaaaaaaatcaa

SEQ ID NO: 362256 - DNA, 1611 bp, Homo sapiens
gcgggccgagtcgggctgagcggctggagctgggccttggccgcgagaggccggcgaaagctatcttcctgcaccggcggccgggtgagggcggtgggagggagcggtgcctgcgctgtggccatgtctgtgtacgcagggggccggggccccgcgaagctgtgccctcaggccggccccggccggacacccttacccctccatgggtccggcagagggcagtgaccggcaccttctgtgcgtcctggactcctctgagaaacaggagagctcaaaggatggctactgacatgcagaggaagagaagcagcgaatgccttgatggcacattgactccttctgatggacagagtatggagagagctgagagccccacaccaggaatggcccagggaatggagccagatggctacaaggtagtattcgtgcgccggagcccgctggtgctagtggcggtggctcgtacgcggcagtcggcacaagagctggcgcaggagctgctctacatctactaccagatcctaagccttcttaccggtgcgcagctgagccacatcttccagcagaagcagaactatgatttgcggcgcctactctcgggctcagagcgcatcaccgacaacctgctgcagctcatggcacgagaccccagcttcctgatgggggcggcacggtgcctgcccctggcggcggccgtgcgcgacactgtgagcgccagcctgcagcaggcgcgtgcgcgcagcctggtcttctccatcctgctggcccgcaaccagctcgtggcactcgtgcgccgaaaggaccaatttctgcaccccatcgacctgcacctgctcttcaacctcattagttcctcctcgtcctttcgcgagggcgaggcctggacgcccgtgtgcctgcccaaattcaacgcagccggcttcttccacgcacacatctcttacctagagcctgacactgacctctgcctgctgcttgtctccactgaccgtgaggacttctttgcagtctctgactgccgccgccgcttccaggagcgccttcgcaagcgcggagcccacctggccctgcgagaggcactgcgcacaccctactacagcgttgcccaagtgggcatccctgacctgcgtcacttcctctataagtcaaagagctcgggactcttcaccagccctgagattgaggccccatacaccagtgaagaggagcaggagcggctgctgggcctctaccagtacttgcacagtcgtgcccacaatgcctctcgcccactcaagaccatttactacacgggccccaacgagaacctcctggcctgggtgacaggcgcctttgagctctacatgtgttacagccccctggggaccaaggcgtcagccgtcagtgccatccataagctgatgcgctggatccgcaaagaggaagaccgcctcttcattctcacgcccctcacctattgatgggaatgtgtgcgggctcagccttcctggacacactaggtgtgggaagccataggagcctccagatgggggctggcctctcttgcccagccagcgggcagggactgtgggttggtgaatgcattaaagtgctttggggaaaaaaaatcaa

SEQ ID NO: 362257 - DNA, 953 bp, Homo sapiens
  misc_feature (54)..(54): n is a, c, g, or t
gacaagaacgccatccgctccatccatgcagatggctacaaggtagtattcgtntgcctgcccaaattcaacgcagccggcttcttccacgcacacatctcttacctagagcctgtgcagacattcaattgttatatggctacaaggtagtattcgtgcgccggagcccgctggtgctagtggcggtggctcgtacgcggcagtcggcacaagagctggcgcaggagctgctctacatctactaccagatcctaagcccggcttcttccacgcacacatctcttacctagagcctgacactgacctctgcctgctgcttgtctccactgaccgtgaggacttctttgcagtctctgactgccgccgccgcttccaggagcgccttcgcaagcgcggagcccacctggccctgcgagaggcactgcgcacaccctactacagcgttgcccaagtgggcatccctgacctgcgtcacttcctctataagtcaaagagctcgggactcttcaccagccctgagattgaggccccatacaccagtgaagaggagcaggagcggctgctgggcctctaccagtacttgcacagtcgtgcccacaatgcctctcgcccactcaagaccatttactacacgggccccaacgagaacctcctggcctgggtgacaggcgcctttgagctctacatgtgttacagccccctggggaccaaggcgtcagccgtcagtgccatccataagctgatgcgctggatccgcaaagaggaagaccgcctcttcattctcacgcccctcacctattgatgggaatgtgtgcgggctcagccttcctggacacactaggtgtgggaagccataggagcctccagatgggggctggcctctcttgcccagccagcgggcagggactgtgggttggtgaatgcattaaagtgctttggggaaaaaaaatcaa

SEQ ID NO: 362258 - DNA, 369 bp, Homo sapiens
acgtccgcctagcccttcgctgccgcctgccctcggcctgacctccgccggccccttctccccctggccattcagggtagccctggctttgcagcgcgccagggaagaggacgccgcttcccccgtcctgtccctactcaggtgtgcaccccttgctcgggcccgcgcccccaccctgggcagagcatagagatcactccttgttttcacgtttaaatgagatgcaagcaaaaggctggcgcagaataggcgctgcacacttgttcataagcacttggtagaatcacatagtagatgattaatattgactgaaaagtctagtacccagtaagcactcaaaacctggtgaaaataaagcgtctgtccaca

SEQ ID NO: 362259 - DNA, 643 bp, Homo sapiens
agggaaagaaggctctgttggagcctggataggggaaaatacaccagagggtcaaaataggaaagtcacattgaagcggaattggtaagtggtaggaaaatcttaagtgttctgttttcctgattaatcatcaggggccaccatattttgaaaaatgataacaataactatatcagatgacacttcaaatgaaaatataagcaggacatgaaacactgtcctcagcaagaaacctcaacaattggggggaaaaagaaacatccagagggtggagaccctgagaactctcacatctacaggagtctgccgcctgttccaggtactggggtgcaaccaagatcacaaaagtccctgtcctcacggagctcacacagtcatcggggggggaagacagacatgctaagtgatctagaatgtgagatcaggtgttgacaagaaccctggagggaggagagcagggaaaggtcagaaagggaagacccagggtctctgaaggaggtatcaggaaagaagtctaaggatgccctgatgtgagcaggacctgagggcagtgtggagggggccgtgcggacccctggggaagaggaatccaaaaagaaaaatgccaaggtcagaagtgttgaaggaatgggggtcatgctgc

SEQ ID NO: 362260 - DNA, 291 bp, Homo sapiens
ggactcatgaaactgaggtgtagataacagacccgggtctctagaaatggaaagaatattttcgcactctgtgattgaatactggctcccaatagaaatgaacacagagatattgcctgtgtgtttgcagagaagatggtttctataaagagtaggaaagctgaaattatagtagagtctcctttaaatgcacattgtgtggatggctctcaccatttcctaagagatacagtgtaaaacgtgacagtaatactgattctagcagaataaaacatgtaccacatttgctaa

SEQ ID NO: 362261 - DNA, 2080 bp, Homo sapiens
  misc_feature (2076)..(2076): n is a, c, g, or t
ctgccccgggaggaggctcagacagaaggaggaaggacagcacagctgacagccgtactcaggaagcttctggatcctaggcttatctccacagaggagaacacacaagcagcagagaccatggggcccctctcagcccctccctgcacacacctcatcacttggaagggggtcctgctcacagcatcacttttaaacttctggaatccgcccacaactgcccaagtcacgattgaagcccagccacccaaagtttctgaggggaaggatgttcttctacttgtccacaatttgccccagaatcttgctggctacatttggtacaaagggcaaatgacatacctctaccattacattacatcatatgtagtagacggtcaaagaattatatatgggcctgcatacagtggaagagaaagagtatattccaatgcatccctgctgatccagaatgtcacgcaggaggatgcaggatcctacaccttacacatcataaagcgacgcgatgggactggaggagtaactggacatttcaccttcaccttacacctggagactcccaagccctccatctccagcagcaacttaaatcccagggaggccatggaggctgtgatcttaacctgtgatcctgcgactccagccgcaagctaccagtggtggatgaatggtcagagcctccctatgactcacaggttgcagctgtccaaaaccaacaggaccctctttatatttggtgtcacaaagtatattgcaggaccctatgaatgtgaaatacggaacccagtgagtgccagccgcagtgacccagtcaccctgaatctcctcccaaagctgtccaagccctacatcacaatcaacaacttaaaccccagagagaataaggatgtcttaaccttcacctgtgaacctaagagtgagaactacacctacatttggtggctaaatggtcagagcctccctgtcagtcccagggtaaagcgacccattgaaaacaggatcctcattctacccaatgtcacgagaaatgaaacaggaccttatcaatgtgaaatacgggaccgatatggtggcatccgcagtgacccagtcaccctgaatgtcctctatggtccagacctccccagcatttacccttcattcacctattaccgttcaggagaaaacctctacttgtcctgcttcgccgagtctaacccacgggcacaatattcttggacaattaatgggaagtttcagctatcaggacaaaagctctctatcccccaaataactacaaagcatagtgggctctatgcttgctctgttcgtaactcagccactggcaaggaaagctccaaatccatcacagtcaaagtctctgactggatattaccctgaattctactagttcctccaattccattttctcccatggaatcacgaagagcaagacccactctgttccagaagccctataagctggaggtggacaactcgatgtaaatttcatgggaaaacccttgtacctgacatgtgagccactcagaactcaccaaaatgttcgacaccataacaacagctactcaaactgtaaaccaggataacaagttgatgacttcacactgtggacagtttttccaaagatgtcagaacaagactccccatcatgataaggctcccacccctcttaactgtccttgctcatgcctgcctctttcacttggcaggataatgcagtcattagaatttcacatgtagtagcttctgagggtaacaacagagtgtcagatatgtcatctcaacctcaaacttttacgtaacatctcaggggaaatgtggctctctccatcttgcatacagggctcccaatagaaatgaacacagagatattgcctgtgtgtttgcagagaagatggtttctataaagagtaggaaagctgaaattatagtagagtctcctttaaatgcacattgtgtggatggctctcaccatttcctaagagatacagtgtaaaacgtgacagtaatactgattctagcagaataaaacatgtaccacatttgctaaaaaaaaaaaacacacacaaaaaaacnaaaa

SEQ ID NO: 362262 - DNA, 2187 bp, Homo sapiens
  misc_feature (2124)..(2124): n is a, c, g, or t
  misc_feature (2126)..(2126): n is a, c, g, or t
  misc_feature (2132)..(2132): n is a, c, g, or t
  misc_feature (2138)..(2138): n is a, c, g, or t
  misc_feature (2183)..(2183): n is a, c, g, or t
ctgccccgggaggaggctcagacagaaggaggaaggacagcacagctgacagccgtactcaggaagcttctggatcctaggcttatctccacagaggagaacacacaagcagcagagaccatggggcccctctcagcccctccctgcacacacctcatcacttggaagggggtcctgctcacagcatcacttttaaacttctggaatccgcccacaactgcccaagtcacgattgaagcccagccacccaaagtttctgaggggaaggatgttcttctacttgtccacaatttgccccagaatcttgctggctacatttggtacaaagggcaaatgacatacctctaccattacattacatcatatgtagtagacggtcaaagaattatatatgggcctgcatacagtggaagagaaagagtatattccaatgcatccctgctgatccagaatgtcacgcaggaggatgcaggatcctacaccttacacatcataaagcgacgcgatgggactggaggagtaactggacatttcaccttcaccttacacctggagactcccaagccctccatctccagcagcaacttaaatcccagggaggccatggaggctgtgatcttaacctgtgatcctgcgactccagccgcaagctaccagtggtggatgaatggtcagagcctccctatgactcacaggttgcagctgtccaaaaccaacaggaccctctttatatttggtgtcacaaagtatattgcaggaccctatgaatgtgaaatacggaacccagtgagtgccagccgcagtgacccagtcaccctgaatctcctcccaaagctgtccaagccctacatcacaatcaacaacttaaaccccagagagaataaggatgtcttaaccttcacctgtgaacctaagagtgagaactacacctacatttggtggctaaatggtcagagcctccctgtcagtcccagggtaaagcgacccattgaaaacaggatcctcattctacccaatgtcacgagaaatgaaacaggaccttatcaatgtgaaatacgggaccgatatggtggcatccgcagtgacccagtcaccctgaatgtcctctatggtccagacctccccagcatttacccttcattcacctattaccgttcaggagaaaacctctacttgtcctgcttcgccgagtctaacccacgggcacaatattcttggacaattaatgggaagtttcagctatcaggacaaaagctctctatcccccaaataactacaaagcatagtgggctctatgcttgctctgttcgtaactcagccactggcaaggaaagctccaaatccatcacagtcaaagtctctgactggatattaccctgaattctactagttcctccaattccattttctcccatggaatcacgaagagcaagacccactctgttccagaagccctataagctggaggtggacaactcgatgtaaatttcatgggaaaacccttgtacctgacatgtgagccactcagaactcaccaaaatgttcgacaccataacaacagctactcaaactgtaaaccaggataacaagttgatgacttcacactgtggacagtttttccaaagatgtcagaacaagactccccatcatgataaggctcccacccctcttaactgtccttgctcatgcctgcctctttcacttggcaggataatgcagtcattagaatttcacatgtagtagcttctgagggtaacaacagagtgtcagatatgtcatctcaacctcaaacttttacgtaacatctcaggggaaatgtggctctctccatcttgcatacagggctcccaatagaaatgaacacagagatattgcctgtgtgtttgcagagaagatggtttctataaagagtaggaaagctgaaattatagtagagtctcctttaaatgcacattgtgtggatggctctcaccatttcctaagagatacagtgtaaaacgtgacagtaatactgattctagcagaataaaacatgtaccacatttgctaaagaaaaaaaaaagaaaaaaaagaaaaagaaagaaaaagaaaaaaaaaaaaaaaaagaaaaaaacgccaaaaaananaaaaanaaaaanaaaaaaacaaaagaggtgtaaaaaaaaaacacacacaaaaaaacnaaaa

SEQ ID NO: 362263 - DNA, 1560 bp, Homo sapiens
gctcggtacccctctatccttaatctggagtaactggacatttcaccttcaccttacacctggagactcccaagccctccatctccagcagcaacttaaatcccagggaggccatggaggctgtgatcttaacctgtgatcctgcgactccagccgcaagctaccagtggtggatgaatggtcagagcctccctatgactcacaggttgcagctgtccaaaaccaacaggaccctctttatatttggtgtcacaaagtatattgcaggaccctatgaatgtgaaatacggaacccagtgagtgccagccgcagtgacccagtcaccctgaatctcctcccaaagctgtccaagccctacatcacaatcaacaacttaaaccccagagagaataaggatgtcttaaccttcacctgtgaacctaagagtgagaactacacctacatttggtggctaaatggtcagagcctccctgtcagtcccagggtaaagcgacccattgaaaacaggatcctcattctacccaatgtcacgagaaatgaaacaggaccttatcaatgtgaaatacgggaccgatatggtggcatccgcagtgacccagtcaccctgaatgtcctctatggtccagacctccccagcatttacccttcattcacctattaccgttcaggagaaaacctctacttgtcctgcttcgccgagtctaacccacgggcacaatattcttggacaattaatgggaagtttcagctatcaggacaaaagctctctatcccccaaataactacaaagcatagtgggctctatgcttgctctgttcgtaactcagccactggcaaggaaagctccaaatccatcacagtcaaagtctctgactggatattaccctgaattctactagttcctccaattccattttctcccatggaatcacgaagagcaagacccactctgttccagaagccctataagctggaggtggacaactcgatgtaaatttcatgggaaaacccttgtacctgacatgtgagccactcagaactcaccaaaatgttcgacaccataacaacagctactcaaactgtaaaccaggataacaagttgatgacttcacactgtggacagtttttccaaagatgtcagaacaagactccccatcatgataaggctcccacccctcttaactgtccttgctcatgcctgcctctttcacttggcaggataatgcagtcattagaatttcacatgtagtagcttctgagggtaacaacagagtgtcagatatgtcatctcaacctcaaacttttacgtaacatctcaggggaaatgtggctctctccatcttgcatacagggctcccaatagaaatgaacacagagatattgcctgtgtgtttgcagagaagatggtttctataaagagtaggaaagctgaaattatagtagagtctcctttaaatgcacattgtgtggatggctctcaccatttcctaagagatacagtgtaaaacgtgacagtaatactgattctagcagaataaaacatgtaccacatttgctaa

SEQ ID NO: 362264 - DNA, 1771 bp, Homo sapiens
ctgccccgggaggaggctcagacagaaggaggaaggacagcacagctgacagccgtactcaggaagcttctggatcctaggcttatctccacagaggagaacacacaagcagcagagaccatggggcccctctcagcccctccctgcacacacctcatcacttggaagggggtcctgctcacagcatcacttttaaacttctggaatccgcccacaactgcccaagtcacgattgaagcccagccacccaaagtttctgaggggaaggatgttcttctacttgtccacaatttgccccagaatcttgctggctacatttggtacaaagggcaaatgacatacctctaccattacattacatcatatgtagtagacggtcaaagaattatatatgggcctgcatacagtggaagagaaagagtatattccaatgcatccctgctgatccagaatgtcacgcaggaggatgcaggatcctacaccttacacatcataaagcgacgcgatgggactggaggagtaactggacatttcaccttcaccttacacctggagactcccaagccctccatctccagcagcaacttaaatcccagggaggccatggaggctgtgatcttaacctgtgatcctgcgactccagccgcaagctaccagtggtggatgaatggtcagagcctccctatgactcacaggttgcagctgtccaaaaccaacaggaccctctttatatttggtgtcacaaagtatattgcaggaccctatgaatgtgaaatacggaacccagtgagtgccagccgcagtgacccagtcaccctgaatctcctccatggtccagacctccccagcatttacccttcattcacctattaccgttcaggagaaaacctctacttgtcctgcttcgccgagtctaacccacgggcacaatattcttggacaattaatgggaagtttcagctatcaggacaaaagctctctatcccccaaataactacaaagcatagtgggctctatgcttgctctgttcgtaactcagccactggcaaggaaagctccaaatccatcacagtcaaagtctctgactggatattaccctgaattctactagttcctccaattccattttctcccatggaatcacgaagagcaagacccactctgttccagaagccctataagctggaggtggacaactcgatgtaaatttcatgggaaaacccttgtacctgacatgtgagccactcagaactcaccaaaatgttcgacaccataacaacagctactcaaactgtaaaccaggataacaagttgatgacttcacactgtggacagtttttccaaagatgtcagaacaagactccccatcatgataaggctcccacccctcttaactgtccttgctcatgcctgcctctttcacttggcaggataatgcagtcattagaatttcacatgtagtagcttctgagggtaacaacagagtgtcagatatgtcatctcaacctcaaacttttacgtaacatctcaggggaaatgtggctctctccatcttgcatacagggctcccaatagaaatgaacacagagatattgcctgtgtgtttgcagagaagatggtttctataaagagtaggaaagctgaaattatagtagagtctcctttaaatgcacattgtgtggatggctctcaccatttcctaagagatacagtgtaaaacgtgacagtaatactgattctagcagaataaaacatgtaccacatttgctaa

SEQ ID NO: 362265 - DNA, 1984 bp, Homo sapiens
ctgccccgggaggaggctcagacagaaggaggaaggacagcacagctgacagccgtactcaggaagcttctggatcctaggcttatctccacagaggagaacacacaagcagcagagaccatggggcccctctcagcccctccctgcacacacctcatcacttggaagggggtcctgctcacagcatcacttttaaacttctggaatccgcccacaactgcccaagtcacgattgaagcccagccacccaaagtttctgaggggaaggatgttcttctacttgtccacaatttgccccagaatcttgctggctacatttggtacaaagggcaaatgacatacctctaccattacattacatcatatgtagtagacggtcaaagaattatatatgggcctgcatacagtggaagagaaagagtatattccaatgcatccctgctgatccagaatgtcacgcaggaggatgcaggatcctacaccttacacatcataaagcgacgcgatgggactggaggagtaactggacatttcaccttcaccttacacctggagactcccaagccctccatctccagcagcaacttaaatcccagggaggccatggaggctgtgatcttaacctgtgatcctgcgactccagccgcaagctaccagtggtggatgaatggtcagagcctccctattgcaggaccctatgaatgtgaaatacggaacccagtgagtgccagccgcagtgacccagtcaccctgaatctcctcccaaagctgtccaagccctacatcacaatcaacaacttaaaccccagagagaataaggatgtcttaaccttcacctgtgaacctaagagtgagaactacacctacatttggtggctaaatggtcagagcctccctgtcagtcccagggtaaagcgacccattgaaaacaggatcctcattctacccaatgtcacgagaaatgaaacaggaccttatcaatgtgaaatacgggaccgatatggtggcatccgcagtgacccagtcaccctgaatgtcctctatggtccagacctccccagcatttacccttcattcacctattaccgttcaggagaaaacctctacttgtcctgcttcgccgagtctaacccacgggcacaatattcttggacaattaatgggaagtttcagctatcaggacaaaagctctctatcccccaaataactacaaagcatagtgggctctatgcttgctctgttcgtaactcagccactggcaaggaaagctccaaatccatcacagtcaaagtctctgactggatattaccctgaattctactagttcctccaattccattttctcccatggaatcacgaagagcaagacccactctgttccagaagccctataagctggaggtggacaactcgatgtaaatttcatgggaaaacccttgtacctgacatgtgagccactcagaactcaccaaaatgttcgacaccataacaacagctactcaaactgtaaaccaggataacaagttgatgacttcacactgtggacagtttttccaaagatgtcagaacaagactccccatcatgataaggctcccacccctcttaactgtccttgctcatgcctgcctctttcacttggcaggataatgcagtcattagaatttcacatgtagtagcttctgagggtaacaacagagtgtcagatatgtcatctcaacctcaaacttttacgtaacatctcaggggaaatgtggctctctccatcttgcatacagggctcccaatagaaatgaacacagagatattgcctgtgtgtttgcagagaagatggtttctataaagagtaggaaagctgaaattatagtagagtctcctttaaatgcacattgtgtggatggctctcaccatttcctaagagatacagtgtaaaacgtgacagtaatactgattctagcagaataaaacatgtaccacatttgctaa

SEQ ID NO: 362266 - DNA, 1959 bp, Homo sapiens
ctgccccgggaggaggctcagacagaaggaggaaggacagcacagctgacagccgtactcaggaagcttctggatcctaggcttatctccacagaggagaacacacaagcagcagagaccatggggcccctctcagcccctccctgcacacacctcatcacttggaagggggtcctgctcacagcatcacttttaaacttctggaatccgcccacaactgcccaagtcacgattgaagcccagccacccaaagtttctgaggggaaggatgttcttctacttgtccacaatttgccccagaatcttgctggctacatttggtacaaagggcaaatgacatacctctaccattacattacatcatatgtagtagacggtcaaagaattatatatgggcctgcatacagtggaagagaaagagtatattccaatgcatccctgctgatccagaatgtcacgcaggaggatgcaggatcctacaccttacacatcataaagcgacgcgatgggactggaggagtaactggacatttcaccttcaccttacacctggagactcccaagccctccatctccagcagcaacttaaatccatgactcacaggttgcagctgtccaaaaccaacaggaccctctttatatttggtgtcacaaagtatattgcaggaccctatgaatgtgaaatacggaacccagtgagtgccagccgcagtgacccagtcaccctgaatctcctcccaaagctgtccaagccctacatcacaatcaacaacttaaaccccagagagaataaggatgtcttaaccttcacctgtgaacctaagagtgagaactacacctacatttggtggctaaatggtcagagcctccctgtcagtcccagggtaaagcgacccattgaaaacaggatcctcattctacccaatgtcacgagaaatgaaacaggaccttatcaatgtgaaatacgggaccgatatggtggcatccgcagtgacccagtcaccctgaatgtcctctatggtccagacctccccagcatttacccttcattcacctattaccgttcaggagaaaacctctacttgtcctgcttcgccgagtctaacccacgggcacaatattcttggacaattaatgggaagtttcagctatcaggacaaaagctctctatcccccaaataactacaaagcatagtgggctctatgcttgctctgttcgtaactcagccactggcaaggaaagctccaaatccatcacagtcaaagtctctgactggatattaccctgaattctactagttcctccaattccattttctcccatggaatcacgaagagcaagacccactctgttccagaagccctataagctggaggtggacaactcgatgtaaatttcatgggaaaacccttgtacctgacatgtgagccactcagaactcaccaaaatgttcgacaccataacaacagctactcaaactgtaaaccaggataacaagttgatgacttcacactgtggacagtttttccaaagatgtcagaacaagactccccatcatgataaggctcccacccctcttaactgtccttgctcatgcctgcctctttcacttggcaggataatgcagtcattagaatttcacatgtagtagcttctgagggtaacaacagagtgtcagatatgtcatctcaacctcaaacttttacgtaacatctcaggggaaatgtggctctctccatcttgcatacagggctcccaatagaaatgaacacagagatattgcctgtgtgtttgcagagaagatggtttctataaagagtaggaaagctgaaattatagtagagtctcctttaaatgcacattgtgtggatggctctcaccatttcctaagagatacagtgtaaaacgtgacagtaatactgattctagcagaataaaacatgtaccacatttgctaa

SEQ ID NO: 362267 - DNA, 1435 bp, Homo sapiens
catcctgctgggggaagtactcaatgcccaccctccctctcatctcctgaatcctcccaccccatcctgatgactcacaggttgcagctgtccaaaaccaacaggaccctctttatatttggtgtcacaaagtatattgcaggaccctatgaatgtgaaatacggaacccagtgagtgccagccgcagtgacccagtcaccctgaatctcctcccaaagctgtccaagccctacatcacaatcaacaacttaaaccccagagagaataaggatgtcttaaccttcacctgtgaacctaagagtgagaactacacctacatttggtggctaaatggtcagagcctccctgtcagtcccagggtaaagcgacccattgaaaacaggatcctcattctacccaatgtcacgagaaatgaaacaggaccttatcaatgtgaaatacgggaccgatatggtggcatccgcagtgacccagtcaccctgaatgtcctctatggtccagacctccccagcatttacccttcattcacctattaccgttcaggagaaaacctctacttgtcctgcttcgccgagtctaacccacgggcacaatattcttggacaattaatgggaagtttcagctatcaggacaaaagctctctatcccccaaataactacaaagcatagtgggctctatgcttgctctgttcgtaactcagccactggcaaggaaagctccaaatccatcacagtcaaagtctctgactggatattaccctgaattctactagttcctccaattccattttctcccatggaatcacgaagagcaagacccactctgttccagaagccctataagctggaggtggacaactcgatgtaaatttcatgggaaaacccttgtacctgacatgtgagccactcagaactcaccaaaatgttcgacaccataacaacagctactcaaactgtaaaccaggataacaagttgatgacttcacactgtggacagtttttccaaagatgtcagaacaagactccccatcatgataaggctcccacccctcttaactgtccttgctcatgcctgcctctttcacttggcaggataatgcagtcattagaatttcacatgtagtagcttctgagggtaacaacagagtgtcagatatgtcatctcaacctcaaacttttacgtaacatctcaggggaaatgtggctctctccatcttgcatacagggctcccaatagaaatgaacacagagatattgcctgtgtgtttgcagagaagatggtttctataaagagtaggaaagctgaaattatagtagagtctcctttaaatgcacattgtgtggatggctctcaccatttcctaagagatacagtgtaaaacgtgacagtaatactgattctagcagaataaaacatgtaccacatttgctaa

SEQ ID NO: 362268 - DNA, 2450 bp, Homo sapiens
ctgccccgggaggaggctcagacagaaggaggaaggacagcacagctgacagccgtactcaggaagcttctggatcctaggcttatctccacagaggagaacacacaagcagcagagaccatggggcccctctcagcccctccctgcacacacctcatcacttggaagggggtcctgctcacagcatcacttttaaacttctggaatccgcccacaactgcccaagtcacgattgaagcccagccacccaaagtttctgaggggaaggatgttcttctacttgtccacaatttgccccagaatcttgctggctacatttggtacaaagggcaaatgacatacctctaccattacattacatcatatgtagtagacggtcaaagaattatatatgggcctgcatacagtggaagagaaagagtatattccaatgcatccctgctgatccagaatgtcacgcaggaggatgcaggatcctacaccttacacatcataaagcgacgcgatgggactggaggagtaactggacatttcaccttcaccttacacctggagactcccaagccctccatctccagcagcaacttaaatcccagggaggccatggaggctgtgatcttaacctgtgatcctgcgactccagccgcaagctaccagtggtggatgaatggtcagagcctccctatgactcacaggttgcagctgtccaaaaccaacaggaccctctttatatttggtgtcacaaagtatattgcaggaccctatgaatgtgaaatacggaacccagtgagtgccagccgcagtgacccagtcaccctgaatctcctcccaaagctgtccaagccctacatcacaatcaacaacttaaaccccagagagaataaggatgtcttaaccttcacctgtgaacctaagagtgagaactacacctacatttggtggctaaatggtcagagcctccctgtcagtcccagggtaaagcgacccattgaaaacaggatcctcattctacccaatgtcacgagaaatgaaacaggaccttatcaatgtgaaatacgggaccgatatggtggcatccgcagtgacccagtcaccctgaatgtcctctgtgagtatcttttgttcctctgtgggccaggacaccagcttaaatccaaaccaccagaggccaggtctctcagtctctctccagtccaagtatagacacctttacttctggacatccgaggtggccatgactccctgccctgggaaaacctaggtaggcacagccttaaccaagaatataaggggaggggacgctcttgtcatgggagacttggggcctaaaacttgtgatgggagaaacaggtgaatacctcaggcttcggctcagtgaacatagagggagtttggctgggacttgaaggtgtgtcttggcttagagggtaactgtgtccctttaagagaccaggaacatccccttccctcggatgacatcacctatggctttattctctttgcgccagatggtccagacctccccagcatttacccttcattcacctattaccgttcaggagaaaacctctacttgtcctgcttcgccgagtctaacccacgggcacaatattcttggacaattaatgggaagtttcagctatcaggacaaaagctctctatcccccaaataactacaaagcatagtgggctctatgcttgctctgttcgtaactcagccactggcaaggaaagctccaaatccatcacagtcaaagtctctgactggatattaccctgaattctactagttcctccaattccattttctcccatggaatcacgaagagcaagacccactctgttccagaagccctataagctggaggtggacaactcgatgtaaatttcatgggaaaacccttgtacctgacatgtgagccactcagaactcaccaaaatgttcgacaccataacaacagctactcaaactgtaaaccaggataacaagttgatgacttcacactgtggacagtttttccaaagatgtcagaacaagactccccatcatgataaggctcccacccctcttaactgtccttgctcatgcctgcctctttcacttggcaggataatgcagtcattagaatttcacatgtagtagcttctgagggtaacaacagagtgtcagatatgtcatctcaacctcaaacttttacgtaacatctcaggggaaatgtggctctctccatcttgcatacagggctcccaatagaaatgaacacagagatattgcctgtgtgtttgcagagaagatggtttctataaagagtaggaaagctgaaattatagtagagtctcctttaaatgcacattgtgtggatggctctcaccatttcctaagagatacagtgtaaaacgtgacagtaatactgattctagcagaataaaacatgtaccacatttgctaa

SEQ ID NO: 362269 - DNA, 2171 bp, Homo sapiens
ctgccccgggaggaggctcagacagaaggaggaaggacagcacagctgacagccgtactcaggaagcttctggatcctaggcttatctccacagaggagaacacacaagcagcagagaccatggggcccctctcagcccctccctgcacacacctcatcacttggaagggggtcctgctcacagcatcacttttaaacttctggaatccgcccacaactgcccaagtcacgattgaagcccagccacccaaagtttctgaggggaaggatgttcttctacttgtccacaatttgccccagaatcttgctggctacatttggtacaaagggcaaatgacatacctctaccattacattacatcatatgtagtagacggtcaaagaattatatatgggcctgcatacagtggaagagaaagagtatattccaatgcatccctgctgatccagaatgtcacgcaggaggatgcaggatcctacaccttacacatcataaagcgacgcgatgggactggaggagtaactggacatttcaccttcaccttacacccaaagctgtccaagccctacatcacaatcaacaacttaaaccccagagagaataaggatgtcttaaccttcacctgtgaacctaagagtgagaactacacctacatttggtggctaaatggtcagagcctccctgtcagtcccagggtaaagcgacccattgaaaacaggatcctcattctacccaatgtcacgagaaatgaaacaggaccttatcaatgtgaaatacgggaccgatatggtggcatccgcagtgacccagtcaccctgaatgtcctctgtgagtatcttttgttcctctgtgggccaggacaccagcttaaatccaaaccaccagaggccaggtctctcagtctctctccagtccaagtatagacacctttacttctggacatccgaggtggccatgactccctgccctgggaaaacctaggtaggcacagccttaaccaagaatataaggggaggggacgctcttgtcatgggagacttggggcctaaaacttgtgatgggagaaacaggtgaatacctcaggcttcggctcagtgaacatagagggagtttggctgggacttgaaggtgtgtcttggcttagagggtaactgtgtccctttaagagaccaggaacatccccttccctcggatgacatcacctatggctttattctctttgcgccagatggtccagacctccccagcatttacccttcattcacctattaccgttcaggagaaaacctctacttgtcctgcttcgccgagtctaacccacgggcacaatattcttggacaattaatgggaagtttcagctatcaggacaaaagctctctatcccccaaataactacaaagcatagtgggctctatgcttgctctgttcgtaactcagccactggcaaggaaagctccaaatccatcacagtcaaagtctctgactggatattaccctgaattctactagttcctccaattccattttctcccatggaatcacgaagagcaagacccactctgttccagaagccctataagctggaggtggacaactcgatgtaaatttcatgggaaaacccttgtacctgacatgtgagccactcagaactcaccaaaatgttcgacaccataacaacagctactcaaactgtaaaccaggataacaagttgatgacttcacactgtggacagtttttccaaagatgtcagaacaagactccccatcatgataaggctcccacccctcttaactgtccttgctcatgcctgcctctttcacttggcaggataatgcagtcattagaatttcacatgtagtagcttctgagggtaacaacagagtgtcagatatgtcatctcaacctcaaacttttacgtaacatctcaggggaaatgtggctctctccatcttgcatacagggctcccaatagaaatgaacacagagatattgcctgtgtgtttgcagagaagatggtttctataaagagtaggaaagctgaaattatagtagagtctcctttaaatgcacattgtgtggatggctctcaccatttcctaagagatacagtgtaaaacgtgacagtaatactgattctagcagaataaaacatgtaccacatttgctaa

SEQ ID NO: 362270 - DNA, 1692 bp, Homo sapiens
  misc_feature (1692)..(1692): n is a, c, g, or t
ctgccccgggaggaggctcagacagaaggaggaaggacagcacagctgacagccgtactcaggaagcttctggatcctaggcttatctccacagaggagaacacacaagcagcagagaccatggggcccctctcagcccctccctgcacacacctcatcacttggaagggggtcctgctcacagcatcacttttaaacttctggaatccgcccacaactgcccaagtcacgattgaagcccagccacccaaagtttctgaggggaaggatgttcttctacttgtccacaatttgccccagaatcttgctggctacatttggtacaaagggcaaatgacatacctctaccattacattacatcatatgtagtagacggtcaaagaattatatatgggcctgcatacagtggaagagaaagagtatattccaatgcatccctgctgatccagaatgtcacgcaggaggatgcaggatcctacaccttacacatcataaagcgacgcgatgggactggaggagtaactggacatttcaccttcaccttacacctggagactcccaagccctccatctccagcagcaacttaaatcccagggaggccatggaggctgtgatcttaacctgtgatcctgcgactccagccgcaagctaccagtggtggatgaatggtcagagcctccctatgactcacaggttgcagctgtccaaaaccaacaggaccctctttatatttggtgtcacaaagtatattgcaggaccctatgaatgtgaaatacggaacccagtgagtgccagccgcagtgacccagtcaccctgaatctcctcccaaagctgtccaagccctacatcacaatcaacaacttaaaccccagagagaataaggatgtcttaaccttcacctgtgaacctaagagtgagaactacacctacatttggtggctaaatggtcagagcctccctgtcagtcccagggtaaagcgacccattgaaaacaggatcctcattctacccaatgtcacgagaaatgaaacaggaccttatcaatgtgaaatacgggaccgatatggtggcatccgcagtgacccagtcaccctgaatgtcctctatggtccagacctccccagcatttacccttcattcacctattaccgttcaggagaaaacctctacttgtcctgcttcgccgagtctaacccacgggcacaatattcttggacaattaatgggaagtttcagctatcaggacaaaagctctctatcccccaaataactacaaagcatagtgggctctatgcttgctctgttcgtaactcagccactggcaaggaaagctccaaatccatcacagtcaaagtctctgactggatattaccctgaattctactagttcctccaattccattttctcccatggaatcacgaagagcaagacccactctgttccagaagccctataagctggaggtggacaactcgatgtaaatttcatgggaaaacccttgtacctgacatgtgagccactcagaactcaccaaaatgttcgacaccataacaacagctactcaaactgtaaaccaggataacaagttcgcgagctcgcgaacgtgtaatccctattcccgttctcttcctctccggaaacatgttttcacaagaatggtccatagtccatctaatttcgtatccatn

SEQ ID NO: 362271 - DNA, 1655 bp, Homo sapiens
agaagaaattcgacatttcaccttcaccttatacttggagactcccaagccctacatctccagcagcaacttaaaccccagggaggccatggaggctgtgcgcttaatctgtgatcctgagactctggacgcaagctacctatggtggatgaatggtcagagcctccctgtgactcacaggttgcagctgtccaaaaccaacaggaccctctatctatttggtgtcacaaagtatattgcaggaccctatgaatgtgaaatacggaacccagtgagtgccagtcgcatgacccagtcaccctgaatgtcctctgtgagtatcttttgttcctctgtgggccaggacaccagcttaaatccaaaccaccagaggccaggtctctcagtctctctccagtccaagtatagacacctttacttctggacatccgaggtggccatgactccctgccctgggaaaacctaggtaggcacagccttaaccaagaatataaggggaggggacgctcttgtcatgggagacttggggcctaaaacttgtgatgggagaaacaggtgaatacctcaggcttcggctcagtgaacatagagggagtttggctgggacttgaaggtgtgtcttggcttagagggtaactgtgtccctttaagagaccaggaacatccccttccctcggatgacatcacctatggctttattctctttgcgccagatggtccagacctccccagcatttacccttcattcacctattaccgttcaggagaaaacctctacttgtcctgcttcgccgagtctaacccacgggcacaatattcttggacaattaatgggaagtttcagctatcaggacaaaagctctctatcccccaaataactacaaagcatagtgggctctatgcttgctctgttcgtaactcagccactggcaaggaaagctccaaatccatcacagtcaaagtctctgactggatattaccctgaattctactagttcctccaattccattttctcccatggaatcacgaagagcaagacccactctgttccagaagccctataagctggaggtggacaactcgatgtaaatttcatgggaaaacccttgtacctgacatgtgagccactcagaactcaccaaaatgttcgacaccataacaacagctactcaaactgtaaaccaggataacaagttgatgacttcacactgtggacagtttttccaaagatgtcagaacaagactccccatcatgataaggctcccacccctcttaactgtccttgctcatgcctgcctctttcacttggcaggataatgcagtcattagaatttcacatgtagtagcttctgagggtaacaacagagtgtcagatatgtcatctcaacctcaaacttttacgtaacatctcaggggaaatgtggctctctccatcttgcatacagggctcccaatagaaatgaacacagagatattgcctgtgtgtttgcagagaagatggtttctataaagagtaggaaagctgaaattatagtagagtctcctttaaatgcacattgtgtggatggctctcaccatttcctaagagatacagtgtaaaacgtgacagtaatactgattctagcagaataaaacatgtaccacatttgctaa

SEQ ID NO: 362272 - DNA, 2099 bp, Homo sapiens
ctgccccgggaggaggctcagacagaaggaggaaggacagcacagctgacagccgtactcaggaagcttctggatcctaggcttatctccacagaggagaacacacaagcagcagagaccatggggcccctctcagcccctccctgcacacacctcatcacttggaagggggtcctgctcacagcatcacttttaaacttctggaatccgcccacaactgcccaagtcacgattgaagcccagccacccaaagtttctgaggggaaggatgttcttctacttgtccacaatttgccccagaatcttgctggctacatttggtacaaagggcaaatgacatacctctaccattacattacatcatatgtagtagacggtcaaagaattatatatgggcctgcatacagtggaagagaaagagtatattccaatgcatccctgctgatccagaatgtcacgcaggaggatgcaggatcctacaccttacacatcataaagcgacgcgatgggactggaggagtaactggacatttcaccttcaccttacacctggagactcccaagccctccatctccagcagcaacttaaatcccagggaggccatggaggctgtgatcttaacctgtgatcctgcgactccagccgcaagctaccagtggtggatgaatggtcagagcctccctatgactcacaggttgcagctgtccaaaaccaacaggaccctctttatatttggtgtcacaaagtatattgcaggaccctatgaatgtgaaatacggaacccagtgagtgccagccgcagtgacccagtcaccctgaatctcctcccaaagctgtccaagccctacatcacaatcaacaacttaaaccccagagagaataaggatgtcttaaccttcacctgtgaacctaagagtgagaactacacctacatttggtggctaaatggtcagagcctccctgtcagtcccagggtaaagcgacccattgaaaacaggatcctcattctacccaatgtcacgagaaatgaaacaggaccttatcaatgtgaaatacgggaccgatatggtggcatccgcagtgacccagtcaccctgaatgtcctctatggtccagacctccccagcatttacccttcattcacctattaccgttcaggagaaaacctctacttgtcctgcttcgccgagtctaacccacgggcacaatattcttggacaattaatgggaagtttcagctatcaggacaaaagctctctatcccccaaataactacaaagcatagtgggctctatgcttgctctgttcgtaactcagccactggcaaggaaagctccaaatccatcacagtcaaagtctctggtaagtggatcccagcatccttggcaatagggatttaggtggagtctatctggcattcagggaagagtgaggaaaacatttttattcccagcctgtgtcccatgggcacaagcaaatcccaaattctcctcctgaacactcccaatttgtctaagaacttccaaaactttaacaaacaggctgatatcttcttaaaattcccagcctagaccaagcaggagaaacattgatttcattgaaataattgacaatattgaggataatatttttatgatttttatttgaaaatttgctgattctttaaatggtttgttttctagatttatggaatttttttcttttaatctatctatagcttgtagcagttcaataaactatacttctgggaaccgtaattgaaacatttacttttgctctctacctgactgccccagaattgggcaactattcatgagtattgatatgtttatggtaatacacatatttgcacaagtacagtaacaatctgctctctttgtaacaggacacatttcaaatcattggttatattaccaaggctttgactgggatgttatattcaagaatatagatagaatgaaccaatatgaactgcaggcaaagtctgaagtcagccttggtttggcttcctattctcaagggttttgtaaaagtttaatctgagagtccttataaaaacttagagcaaataaaattctaaaagagcgccaacatggtc

SEQ ID NO: 362273 - DNA, 925 bp, Homo sapiens
tagaggatccctatcagagcatacccctactcaggagaaaacctctacttgtcctgcttcgccgagtctaacccacgggcacaatattcttggacaattaatgggaagtttcagctatcaggacaaaagctctctatcccccaaataactacaaagcatagtgggctctatgcttgctctgttcgtaactcagccactggcaaggaaagctccaaatccatcacagtcaaagtctctgactggatattaccctgaattctactagttcctccaattccattttctcccatggaatcacgaagagcaagacccactctgttccagaagccctataagctggaggtggacaactcgatgtaaatttcatgggaaaacccttgtacctgacatgtgagccactcagaactcaccaaaatgttcgacaccataacaacagctactcaaactgtaaaccaggataacaagttgatgacttcacactgtggacagtttttccaaagatgtcagaacaagactccccatcatgataaggctcccacccctcttaactgtccttgctcatgcctgcctctttcacttggcaggataatgcagtcattagaatttcacatgtagtagcttctgagggtaacaacagagtgtcagatatgtcatctcaacctcaaacttttacgtaacatctcaggggaaatgtggctctctccatcttgcatacagggctcccaatagaaatgaacacagagatattgcctgtgtgtttgcagagaagatggtttctataaagagtaggaaagctgaaattatagtagagtctcctttaaatgcacattgtgtggatggctctcaccatttcctaagagatacagtgtaaaacgtgacagtaatactgattctagcagaataaaacatgtaccacatttgctaa

SEQ ID NO: 362274 - DNA, 2499 bp, Homo sapiens
ctgccccgggaggaggctcagacagaaggaggaaggacagcacagctgacagccgtactcaggaagcttctggatcctaggcttatctccacagaggagaacacacaagcagcagagaccatggggcccctctcagcccctccctgcacacacctcatcacttggaagggggtcctgctcacagcatcacttttaaacttctggaatccgcccacaactgcccaagtcacgattgaagcccagccacccaaagtttctgaggggaaggatgttcttctacttgtccacaatttgccccagaatcttgctggctacatttggtacaaagggcaaatgacatacctctaccattacattacatcatatgtagtagacggtcaaagaattatatatgggcctgcatacagtggaagagaaagagtatattccaatgcatccctgctgatccagaatgtcacgcaggaggatgcaggatcctacaccttacacatcataaagcgacgcgatgggactggaggagtaactggacatttcaccttcaccttacacctggagactcccaagccctccatctccagcagcaacttaaatcccagggaggccatggaggctgtgatcttaacctgtgatcctgcgactccagccgcaagctaccagtggtggatgaatggtcagagcctccctatgactcacaggttgcagctgtccaaaaccaacaggaccctctttatatttggtgtcacaaagtatattgcaggaccctatgaatgtgaaatacggaacccagtgagtgccagccgcagtgacccagtcaccctgaatctcctcccaaagctgtccaagccctacatcacaatcaacaacttaaaccccagagagaataaggatgtcttaaccttcacctgtgaacctaagagtgagaactacacctacatttggtggctaaatggtcagagcctccctgtcagtcccagggtaaagcgacccattgaaaacaggatcctcattctacccaatgtcacgagaaatgaaacaggaccttatcaatgtgaaatacgggaccgatatggtggcatccgcagtgacccagtcaccctgaatgtcctctgtgagtatcttttgttcctctgtgggccaggacaccagcttaaatccaaaccaccagaggccaggtctctcagtctctctccagtccaagtatagacacctttacttctggacatccgaggtggccatgactccctgccctgggaaaacctaggtaggcacagccttaaccaagaatataaggggaggggacgctcttgtcatgggagacttggggcctaaaacttgtgatgggagaaacaggtgaatacctcaggcttcggctcagtgaacatagagggagtttggctgggacttgaaggtgtgtcttggcttagagggtaactgtgtccctttaagagaccaggaacatccccttccctcggatgacatcacctatggctttattctctttgcgccagatggtccagacctccccagcatttacccttcattcacctattaccgttcaggagaaaacctctacttgtcctgcttcgccgagtctaacccacgggcacaatattcttggacaattaatgggaagtttcagctatcaggacaaaagctctctatcccccaaataactacaaagcatagtgggctctatgcttgctctgttcgtaactcagccactggcaaggaaagctccaaatccatcacagtcaaagtctctggtaagtggatcccagcatccttggcaatagggatttaggtggagtctatctggcattcagggaagagtgaggaaaacatttttattcccagcctgtgtcccatgggcacaagcaaatcccaaattctcctcctgaacactcccaatttgtctaagaacttccaaaactttaacaaacaggctgatatcttcttaaaattcccagcctagaccaagcaggagaaacattgatttcattgaaataattgacaatattgaggataatatttttatgatttttatttgaaaatttgctgattctttaaatggtttgttttctagatttatggaatttttttcttttaatctatctatagcttgtagcagttcaataaactatacttctgggaaccgtaattgaaacatttacttttgctctctacctgactgccccagaattgggcaactattcatgagtattgatatgtttatggtaatacacatatttgcacaagtacagtaacaatctgctctctttgtaacaggacacatttcaaatcattggttatattaccaaggctttgactgggatgttatattcaagaatatagatagaatgaaccaatatgaactgcaggcaaagtctgaagtcagccttggtttggcttcctattctcaagggttttgtaaaagtttaatctgagagtccttataaaaacttagagcaaataaaattctaaaagagcgccaacatggtc

SEQ ID NO: 362275 - DNA, 1445 bp, Homo sapiens
ctgccccgggaggaggctcagacagaaggaggaaggacagcacagctgacagccgtactcaggaagcttctggatcctaggcttatctccacagaggagaacacacaagcagcagagaccatggggcccctctcagcccctccctgcacacacctcatcacttggaagggggtcctgctcacagcatcacttttaaacttctggaatccgcccacaactgcccaagtcacgattgaagcccagccacccaaagtttctgaggggaaggatgttcttctacttgtccacaatttgccccagaatcttgctggctacatttggtacaaagggcaaatgacatacctctaccattacattacatcatatgtagtagacggtcaaagaattatatatgggcctgcatacagtggaagagaaagagtatattccaatgcatccctgctgatccagaatgtcacgcaggaggatgcaggatcctacaccttacacatcataaagcgacgcgatgggactggaggagtaactggacatttcaccttcaccttacacctggagactcccaagccctccatctccagcagcaacttaaatcccagggaggccatggaggctgtgatcttaacctgtgatcctgcgactccagccgcaagctaccagtggtggatgaatggtcagagcctccctatgactcacaggttgcagctgtccaaaaccaacaggaccctctttatatttggtgtcacaaagtatattgcaggaccctatgaatgtgaaatacggaacccagtgagtgccagccgcagtgacccagtcaccctgaatctcctccatggtccagacctccccagaatttacccttcattcacctattaccgttcaggagaaaacctcgacttgtcctgcttcacggaatctaacccaccggcagagtatttttggacaattaatgggaagtttcagcaatcaggacaaaagctctttatcccccaaattactagaaatcatagcgggctctatgcttgctctgttcataactcagccactggcaaggaaatctccaaatccatgacagtcaaagtctctggtccctgccatggagacctgacagagtctcagtcatgactgcaacaactgagacactgagaaaaagaacaggctgataccttcatgaaattcaagacaaagaagaaaaaaactcaatgttattggactaaataatcaaaaggataatgttttcataattttttattggaaaatgtgctgattctttgaatgttttattctccagatttatgaactttttttcttcagcaattggtaaagtatacttttgtaaacaaaaattgaaatatttgcttttgctgtctatctgaatgccccagaattgtgaaactattcatgagtattcataggtttatggtaataaagttatttgcacatgttca

SEQ ID NO: 362276 - DNA, 1163 bp, Homo sapiens
ctgccccgggaggaggctcagacagaaggaggaaggacagcacagctgacagccgtactcaggaagcttctggatcctaggcttatctccacagaggagaacacacaagcagcagagaccatggggcccctctcagcccctccctgcacacacctcatcacttggaagggggtcctgctcacagcatcacttttaaacttctggaatccgcccacaactgcccaagtcacgattgaagcccagccacccaaagtttctgaggggaaggatgttcttctacttgtccacaatttgccccagaatcttgctggctacatttggtacaaagggcaaatgacatacctctaccattacattacatcatatgtagtagacggtcaaagaattatatatgggcctgcatacagtggaagagaaagagtatattccaatgcatccctgctgatccagaatgtcacgcaggaggatgcaggatcctacaccttacacatcataaagcgacgcgatgggactggaggagtaactggacatttcaccttcaccttacacctggagactcccaagccctccatctccagcagcaacttaaatcccagggaggccatggaggctgtgatcttaacctgtgatcctgcgactccagccgcaagctaccagtggtggatgaatggtcagagcctccctatgactcacaggttgcagctgtccaaaaccaacaggaccctctttatatttggtgtcacaaagtatattgcaggaccctatgaatgtgaaatacggaacccagtgagtgccagccgcagtgacccagtcaccctgaatctcctcccaaagctgtccaagccctacatcacaatcaacaacttaaaccccagagagaataaggatgtcttaaccttcacctgtgaacctaagagtgagaactacacctacatttggtggctaaatggtcagagcctccctgtcagtcccagggtaaagcgacccattgaaaacaggatcctcattctacccaatgtcacgagaaatgaaacaggaccttatcaatgtgaaatacgggaccgatatggtggcatccgcagtgacccagtcaccctgaatgtcctctatggtccagacctccccagcattacccttctgtcgtcttctcgagtcctctaatc

SEQ ID NO: 362277 - DNA, 1038 bp, Homo sapiens
ctgccccgggaggaggctcagacagaaggaggaaggacagcacagctgacagccgtactcaggaagcttctggatcctaggcttatctccacagaggagaacacacaagcagcagagaccatggggcccctctcagcccctccctgcacacacctcatcacttggaagggggtcctgctcacagcatcacttttaaacttctggaatccgcccacaactgcccaagtcacgattgaagcccagccacccaaagtttctgaggggaaggatgttcttctacttgtccacaatttgccccagaatcttgctggctacatttggtacaaagggcaaatgacatacctctaccattacattacatcatatgtagtagacggtcaaagaattatatatgggcctgcatacagtggaagagaaagagtatattccaatgcatccctgctgatccagaatgtcacgcaggaggatgcaggatcctacaccttacacatcataaagcgacgcgatgggactggaggagtaactggacatttcaccttcaccttacacctggagactcccaagccctccatctccagcagcaacttaaatcccagggaggccatggaggctgtgatcttaacctgtgatcctgcgactccagccgcaagctaccagtggtggatgaatggtcagagcctccctatgactcacaggttgcagctgtccaaaaccaacaggaccctctttatatttggtgtcacaaagtatattgcaggaccctatgaatgtgaaatacggaacccagtgagtgccagccgcagtgacccagtcaccctgaatctcctcccgaagctgcccaagccctacatcaccatcaacaacttaaaccccagggagaataaggatgtcttagccttcacctgtgaacctaagagtgagaactacacctacatttggtggctaaacggtcagagcctccccgtcagtcccggggtaaagcgacccattgaaaacaggatcctcattctacccagtgtcacgagaaatgaaacagga

SEQ ID NO: 362278 - DNA, 848 bp, Homo sapiens
tacccggtgcttatcgatgccacctgtgaagtttcagctatcaggacaaaagctctctatcccccaaataactacaaagcatagtgggctctatgcttgctctgttcgtaactcagccactggcaaggaaagctccaaatccatcacagtcaaagtctctgactggatattaccctgaattctactagttcctccaattccattttctcccatggaatcacgaagagcaagacccactctgttccagaagccctataagctggaggtggacaactcgatgtaaatttcatgggaaaacccttgtacctgacatgtgagccactcagaactcaccaaaatgttcgacaccataacaacagctactcaaactgtaaaccaggataacaagttgatgacttcacactgtggacagtttttccaaagatgtcagaacaagactccccatcatgataaggctcccacccctcttaactgtccttgctcatgcctgcctctttcacttggcaggataatgcagtcattagaatttcacatgtagtagcttctgagggtaacaacagagtgtcagatatgtcatctcaacctcaaacttttacgtaacatctcaggggaaatgtggctctctccatcttgcatacagggctcccaatagaaatgaacacagagatattgcctgtgtgtttgcagagaagatggtttctataaagagtaggaaagctgaaattatagtagagtctcctttaaatgcacattgtgtggatggctctcaccatttcctaagagatacagtgtaaaacgtgacagtaatactgattctagcagaataaaacatgtaccacatttgctaa

SEQ ID NO: 362279 - DNA, 1227 bp, Homo sapiens
ctgccccgggaggaggctcagacagaaggaggaaggacagcacagctgacagccgtactcaggaagcttctggatcctaggcttatctccacagaggagaacacacaagcagcagagaccatggggcccctctcagcccctccctgcacacacctcatcacttggaagggggtcctgctcacagcatcacttttaaacttctggaatccgcccacaactgcccaagtcacgattgaagcccagccacccaaagtttctgaggggaaggatgttcttctacttgtccacaatttgccccagaatcttgctggctacatttggtacaaagggcaaatgacatacctctaccattacattacatcatatgtagtagacggtcaaagaattatatatgggcctgcatacagtggaagagaaagagtatattccaatgcatccctgctgatccagaatgtcacgcaggaggatgcaggatcctacaccttacacatcataaagcgacgcgatgggactggaggagtaactggacatttcaccttcaccttacacctggagactcccaagccctccatctccagcagcaacttaaatcccagggaggccatggaggctgtgatcttaacctgtgatcctgcgactccagccgcaagctaccagtggtggatgaatggtcagagcctccctatgactcacaggttgcagctgtccaaaaccaacaggaccctctttatatttggtgtcacaaagtatattgcaggaccctatgaatgtgaaatacggaacccagtgagtgccagccgcagtgacccagtcaccctgaatctcctccgtgagtatcctctgttcctctgtgagccaggctgccatcccaaatacacatggccagaggccaggcctctcagtccctctcaggtccaagtacagagacctttacccctggacatcaaagctggccatgactttctgccccaggcaaaacagagtaggcctaggcttgatccacaataggagaaaagaggctgctcctgtcatgggagactcaggttccacagcttgtgatgggagaaacaggtgaatgtctcaggctccagatcagtgaacacagcggggatttggctgggacttcagtgagtgccagccacagtgacccagtcaccctgaatctcctccgtgagtatcctctgttcctctgtgagccaggctgccatcccaaatacacatggccag

SEQ ID NO: 362280 - DNA, 1043 bp, Homo sapiens
ctgccccgggaggaggctcagacagaaggaggaaggacagcacagctgacagccgtactcaggaagcttctggatcctaggcttatctccacagaggagaacacacaagcagcagagaccatggggcccctctcagcccctccctgcacacacctcatcacttggaagggggtcctgctcacagcatcacttttaaacttctggaatccgcccacaactgcccaagtcacgattgaagcccagccacccaaagtttctgaggggaaggatgttcttctacttgtccacaatttgccccagaatcttgctggctacatttggtacaaagggcaaatgacatacctctaccattacattacatcatatgtagtagacggtcaaagaattatatatgggcctgcatacagtggaagagaaagagtatattccaatgcatccctgctgatccagaatgtcacgcaggaggatgcaggatcctacaccttacacatcataaagcgacgcgatgggactggaggagtaactggacatttcaccttcaccttacacctggagactcccaagccctccatctccagcagcaacttaaatcccagggaggccatggaggctgtgatcttaacctgtgatcctgcgactccagccgcaagctaccagtggtggatgaatggtcagagcctccctatgactcacaggttgcagctgtccaaaaccaacaggaccctctttatatttggtgtcacaaagtatattgcaggaccctatgaatgtgaaatacggaacccagtcaagctcacattgcatgcagctcagatctactagaggatctccctggaagaatttcctgcatggtgatcgatcattaagctcaatgtaaattgcagggagtatcgggaggcaaaaaaatgcaaatgcagatggtgggtgtgacatacacggttacagaagtgtaaggtaacagatcagaggcgtacacgtctcagcaagggttgaatgagcaattattgacagaataagctctggaacaagtcagaggagttgat

SEQ ID NO: 362281 - DNA, 1108 bp, Homo sapiens
tcacgggacaaaggtatggatggtggcagcacttcttaacgatccactgatattaagcagcgacacctggttcccaccacctcgtggaattcaaggcctcaaaatttcgagtcaggatgtatttgtagtatttcttctgcatggggcttagctccacccgaacgatgagctctgtcttggctggcatgttcttaaagacatctgccttgagtctccgcagcatgtgtggccccagcaaatcatgcagtttcttgatctggtcctctttggatatgtcagcaaactcctccaggaagccctccaagttgttaaatctctctggggtgaggaagttcaggagatggaagagctcctccagattattctgcaatggggttcctgtcagcagcaacttatgatctatcttgtaaccattgagaacactggatattaccctgaattctactagttcctccaattccattttctcccatggaatcacgaagagcaagacccactctgttccagaagccctataagctggaggtggacaactcgatgtaaatttcatgggaaaacccttgtacctgacatgtgagccactcagaactcaccaaaatgttcgacaccataacaacagctactcaaactgtaaaccaggataacaagttgatgacttcacactgtggacagtttttccaaagatgtcagaacaagactccccatcatgataaggctcccacccctcttaactgtccttgctcatgcctgcctctttcacttggcaggataatgcagtcattagaatttcacatgtagtagcttctgagggtaacaacagagtgtcagatatgtcatctcaacctcaaacttttacgtaacatctcaggggaaatgtggctctctccatcttgcatacagggctcccaatagaaatgaacacagagatattgcctgtgtgtttgcagagaagatggtttctataaagagtaggaaagctgaaattatagtagagtctcctttaaatgcacattgtgtggatggctctcaccatttcctaagagatacagtgtaaaacgtgacagtaatactgattctagcagaataaaacatgtaccacatttgctaa

SEQ ID NO: 362282 - DNA, 734 bp, Homo sapiens
tcggtaccggtcccatgcacagttaggtcccatcacagttaaagttgactggatattaccctgaattctactagttcctccaattccattttctcccatggaatcacgaagagcaagacccactctgttccagaagccctataagctggaggtggacaactcgatgtaaatttcatgggaaaacccttgtacctgacatgtgagccactcagaactcaccaaaatgttcgacaccataacaacagctactcaaactgtaaaccaggataacaagttgatgacttcacactgtggacagtttttccaaagatgtcagaacaagactccccatcatgataaggctcccacccctcttaactgtccttgctcatgcctgcctctttcacttggcaggataatgcagtcattagaatttcacatgtagtagcttctgagggtaacaacagagtgtcagatatgtcatctcaacctcaaacttttacgtaacatctcaggggaaatgtggctctctccatcttgcatacagggctcccaatagaaatgaacacagagatattgcctgtgtgtttgcagagaagatggtttctataaagagtaggaaagctgaaattatagtagagtctcctttaaatgcacattgtgtggatggctctcaccatttcctaagagatacagtgtaaaacgtgacagtaatactgattctagcagaataaaacatgtaccacatttgctaa

SEQ ID NO: 362283 - DNA, 597 bp, Homo sapiens
tggtacctatctgtgtcggggttgcacagggaggccatggaggctgtgatcttaacctgtgatcctgcgactccagccgcaagctaccagtggtggatgaatggtcagagcctccctatgactcacaggttgcagctgtccaaaaccaacaggaccctctttatatttggtgtcacaaagtatattgcaggaccctatgaatgtgaaatacggaacccagtgagtgccagccgcagtgacccagtcaccctgaatctcctcccaaagctgtccaagccctacatcacaatcaacaacttaaaccccagagagaataaggatgtcttaaccttcacctgtgaacctaagagtgagaactacacctacatttggtggctaaatggtcagagctccctatgactcacaggttgcagctgtccaaaaccaacaggaccctctttatatttggtgtcacaaagtatattgcaggaccctatgaatgtgaaatacggaacccagtgagtgccagccacagtgacccagtcaccctgaatctcctccgtgagtatcctctgttcctctgtgagccaggctgccatcccaaatacacatggccag

SEQ ID NO: 362284 - DNA, 648 bp, Homo sapiens
  misc_feature (34)..(34): n is a, c, g, or t
gaacaacgagtcacgaattcgagatcggataacntggacatttgacctgaaccttacacatggccagaggccaggcctctcagtccctctcaggtccaagtacagatgactcacaggttgcagctgtccaaaaccaacaggaccctctttatatttggtgtcacaaagtatattgcaggaccctatgaatgtgaaatacggaacccagtgagtgccagccgcagtgacccagtcaccctgaatctcctccgtgagtatcctctgttcctctgtgagccaggctgccatcccaaatacacatggccagaggccaggcctctcagtccctctcaggtccaagtacagagacctttacccctggacatcaaagctggccatgactttctgccccaggcaaaacagagtaggcctaggcttgatccacaataggagaaaagaggctgctcctgtcatgggagactcaggttccacagcttgtgatgggagaaacaggtgaatgtctcaggctccagatcagtgaacacagcggggatttggctgggacttcagtgagtgccagccacagtgacccagtcaccctgaatctcctccgtgagtatcctctgttcctctgtgagccaggctgccatcccaaatacacatggccag

SEQ ID NO: 362285 - DNA, 2050 bp, Homo sapiens
ctgccccgggaggaggctcagacagaaggaggaaggacagcacagctgacagccgtactcaggaagcttctggatcctaggcttatctccacagaggagaacacacaagcagcagagaccatggggcccctctcagcccctccctgcacacacctcatcacttggaagggggtcctgctcacagcatcacttttaaacttctggaatccgcccacaactgcccaagtcacgattgaagcccagccacccaaagtttctgaggggaaggatgttcttctacttgtccacaatttgccccagaatcttgctggctacatttggtacaaagggcaaatgacatacctctaccattacattacatcatatgtagtagacggtcaaagaattatatatgggcctgcatacagtggaagagaaagagtatattccaatgcatccctgctgatccagaatgtcacgcaggaggatgcaggatcctacaccttacacatcataaagcgacgcgatgggactggaggagtaactggacatttcaccttcaccttacacctggagactcccaagccctccatctccagcagcaacttaaatcccagggaggccatggaggctgtgatcttaacctgtgatcctgcgactccagccgcaagctaccagtggtggatgaatggtcagagcctccctatgactcacaggttgcagctgtccaaaaccaacaggaccctctttatatttggtgtcacaaagtatattgcaggaccctatgaatgtgaaatacggaacccagtgagtgccagccgcagtgacccagtcaccctgaatctcctcccaaagctgtccaagccctacatcacaatcaacaacttaaaccccagagagaataaggatgtcttaaccttcacctgtgaacctaagagtgagaactacacctacatttggtggctaaatggtcagagcctccctgtcagtcccagggtaaagcgacccattgaaaacaggatcctcattctacccaatgtcacgagaaatgaaacaggaccttatcaatgtgaaatacgggaccgatatggtggcatccgcagtgacccagtcaccctgaatgtcctctatggtccagacctccccagcatttacccttcattcacctattaccgttcaggagaaaacctctacttgtcctgcttcgccgagtctaacccacgggcacaatattcttggacaattaatgggaagtttcagctatcaggacaaaagctctctatcccccaaataactacaaagcatagtgggctctatgcttgctctgttcgtaactcagccactggcaaggaaagctccaaatccatcacagtcaaagtctctgactggatattaccctgaattctactagttcctccaattccattttctcccatggaatcacgaagagcaagacccactctgttccagaagccctataagctggaggtggacaactcgatgtaaatttcatgggaaaacccttgtacctgacatgtgagccactcagaactcaccaaaatgttcgacaccataacaacagctactcaaactgtaaaccaggataacaagttgatgacttcacactgtggacagtttttccaaagatgtcagaacaagactccccatcatgataaggctcccacccctcttaactgtccttgctcatgcctgcctctttcacttggcaggataatgcagtcattagaatttcacatgtagtagcttctgagggtaacaacagagtgtcagatatgtcatctcaacctcaaacttttacgtaacatctcaggggaaatgtggctctctccatcttgcatacagggctcccaatagaaatgaacacagagatattgcctgtgtgtttgcagagaagatggtttctataaagagtaggaaagctgaaattatagtagagtctcctttaaatgcacattgtgtggatggctctcaccatttcctaagagatacagtgtaaaacgtgacagtaatactgattctagcagaataaaacatgtaccacatttgctaa

SEQ ID NO: 362286 - DNA, 2058 bp, Homo sapiens
gtatcaacgcagagtgcccattacgccggggagaaggaggaaggacagcacagctgacagccgtactcaggaagcttctggatcctaggcttatctccacagaggagaacacacaagcagcagagaccatggggcccctctcagcccctccctgcacacacctcatcacttggaagggggtcctgctcacagcatcacttttaaacttctggaatccgcccacaactgcccaagtcacgattgaagcccagccacccaaagtttctgaggggaaggatgttcttctacttgtccacaatttgccccagaatcttgctggctacatttggtacaaagggcaaatgacatacctctaccattacattacatcatatgtagtagacggtcaaagaattatatatgggcctgcatacagtggaagagaaagagtatattccaatgcatccctgctgatccagaatgtcacgcaggaggatgcaggatcctacaccttacacatcataaagcgacgcgatgggactggaggagtaactggacatttcaccttcaccttacacctggagactcccaagccctccatctccagcagcaacttaaatcccagggaggccatggaggctgtgatcttaacctgtgatcctgcgactccagccgcaagctaccagtggtggatgaatggtcagagcctccctatgactcacaggttgcagctgtccaaaaccaacaggaccctctttatatttggtgtcacaaagtatattgcaggaccctatgaatgtgaaatacggaacccagtgagtgccagccgcagtgacccagtcaccctgaatctcctcccaaagctgtccaagccctacatcacaatcaacaacttaaaccccagagagaataaggatgtcttaaccttcacctgtgaacctaagagtgagaactacacctacatttggtggctaaatggtcagagcctccctgtcagtcccagggtaaagcgacccattgaaaacaggatcctcattctacccaatgtcacgagaaatgaaacaggaccttatcaatgtgaaatacgggaccgatatggtggcatccgcagtgacccagtcaccctgaatgtcctctatggtccagacctccccagcatttacccttcattcacctattaccgttcaggagaaaacctctacttgtcctgcttcgccgagtctaacccacgggcacaatattcttggacaattaatgggaagtttcagctatcaggacaaaagctctctatcccccaaataactacaaagcatagtgggctctatgcttgctctgttcgtaactcagccactggcaaggaaagctccaaatccatcacagtcaaagtctctgactggatattaccctgaattctactagttcctccaattccattttctcccatggaatcacgaagagcaagacccactctgttccagaagccctataagctggaggtggacaactcgatgtaaatttcatgggaaaacccttgtacctgacatgtgagccactcagaactcaccaaaatgttcgacaccataacaacagctactcaaactgtaaaccaggataacaagttgatgacttcacactgtggacagtttttccaaagatgtcagaacaagactccccatcatgataaggctcccacccctcttaactgtccttgctcatgcctgcctctttcacttggcaggataatgcagtcattagaatttcacatgtagtagcttctgagggtaacaacagagtgtcagatatgtcatctcaacctcaaacttttacgtaacatctcaggggaaatgtggctctctccatcttgcatacagggctcccaatagaaatgaacacagagatattgcctgtgtgtttgcagagaagatggtttctataaagagtaggaaagctgaaattatagtagagtctcctttaaatgcacattgtgtggatggctctcaccatttcctaagagatacagtgtaaaacgtgacagtaatactgattctagcagaataaaacatgtaccacatttgctaa

SEQ ID NO: 362287 - DNA, 2185 bp, Homo sapiens
agggaaagaaggctctgttggagcctggataggggaaaatacaccagagggtcaaaataggaaagtcacattgaagcggaattggtaagtggtaggaaaatcttaagtgttctgttttcctgattaatcatcaggggccaccatattttgaaaaatgataacaataactatatcagatgacacttcaaatgaaaatataagcaggacatgaaacactgtcctcagcaagaaacctcaacaattggggggaaaaagaaacatccagagggtggagaccctgagaactctcacatctacaggagtctgccgcctgttccagcatcacttttaaacttctggaatccgcccacaactgcccaagtcacgattgaagcccagccacccaaagtttctgaggggaaggatgttcttctacttgtccacaatttgccccagaatcttgctggctacatttggtacaaagggcaaatgacatacctctaccattacattacatcatatgtagtagacggtcaaagaattatatatgggcctgcatacagtggaagagaaagagtatattccaatgcatccctgctgatccagaatgtcacgcaggaggatgcaggatcctacaccttacacatcataaagcgacgcgatgggactggaggagtaactggacatttcaccttcaccttacacctggagactcccaagccctccatctccagcagcaacttaaatcccagggaggccatggaggctgtgatcttaacctgtgatcctgcgactccagccgcaagctaccagtggtggatgaatggtcagagcctccctatgactcacaggttgcagctgtccaaaaccaacaggaccctctttatatttggtgtcacaaagtatattgcaggaccctatgaatgtgaaatacggaacccagtgagtgccagccgcagtgacccagtcaccctgaatctcctcccaaagctgtccaagccctacatcacaatcaacaacttaaaccccagagagaataaggatgtcttaaccttcacctgtgaacctaagagtgagaactacacctacatttggtggctaaatggtcagagcctccctgtcagtcccagggtaaagcgacccattgaaaacaggatcctcattctacccaatgtcacgagaaatgaaacaggaccttatcaatgtgaaatacgggaccgatatggtggcatccgcagtgacccagtcaccctgaatgtcctctatggtccagacctccccagcatttacccttcattcacctattaccgttcaggagaaaacctctacttgtcctgcttcgccgagtctaacccacgggcacaatattcttggacaattaatgggaagtttcagctatcaggacaaaagctctctatcccccaaataactacaaagcatagtgggctctatgcttgctctgttcgtaactcagccactggcaaggaaagctccaaatccatcacagtcaaagtctctgactggatattaccctgaattctactagttcctccaattccattttctcccatggaatcacgaagagcaagacccactctgttccagaagccctataagctggaggtggacaactcgatgtaaatttcatgggaaaacccttgtacctgacatgtgagccactcagaactcaccaaaatgttcgacaccataacaacagctactcaaactgtaaaccaggataacaagttgatgacttcacactgtggacagtttttccaaagatgtcagaacaagactccccatcatgataaggctcccacccctcttaactgtccttgctcatgcctgcctctttcacttggcaggataatgcagtcattagaatttcacatgtagtagcttctgagggtaacaacagagtgtcagatatgtcatctcaacctcaaacttttacgtaacatctcaggggaaatgtggctctctccatcttgcatacagggctcccaatagaaatgaacacagagatattgcctgtgtgtttgcagagaagatggtttctataaagagtaggaaagctgaaattatagtagagtctcctttaaatgcacattgtgtggatggctctcaccatttcctaagagatacagtgtaaaacgtgacagtaatactgattctagcagaataaaacatgtaccacatttgctaa

SEQ ID NO: 362288 - DNA, 1899 bp, Homo sapiens
accgatctgactacgcggctgaagggggtcctgcatcacttttaaacttctggaatccgcccacaactgcccaagtcacgattgaagcccagccacccaaagtttctgaggggaaggatgttcttctacttgtccacaatttgccccagaatcttgctggctacatttggtacaaagggcaaatgacatacctctaccattacattacatcatatgtagtagacggtcaaagaattatatatgggcctgcatacagtggaagagaaagagtatattccaatgcatccctgctgatccagaatgtcacgcaggaggatgcaggatcctacaccttacacatcataaagcgacgcgatgggactggaggagtaactggacatttcaccttcaccttacacctggagactcccaagccctccatctccagcagcaacttaaatcccagggaggccatggaggctgtgatcttaacctgtgatcctgcgactccagccgcaagctaccagtggtggatgaatggtcagagcctccctatgactcacaggttgcagctgtccaaaaccaacaggaccctctttatatttggtgtcacaaagtatattgcaggaccctatgaatgtgaaatacggaacccagtgagtgccagccgcagtgacccagtcaccctgaatctcctcccaaagctgtccaagccctacatcacaatcaacaacttaaaccccagagagaataaggatgtcttaaccttcacctgtgaacctaagagtgagaactacacctacatttggtggctaaatggtcagagcctccctgtcagtcccagggtaaagcgacccattgaaaacaggatcctcattctacccaatgtcacgagaaatgaaacaggaccttatcaatgtgaaatacgggaccgatatggtggcatccgcagtgacccagtcaccctgaatgtcctctatggtccagacctccccagcatttacccttcattcacctattaccgttcaggagaaaacctctacttgtcctgcttcgccgagtctaacccacgggcacaatattcttggacaattaatgggaagtttcagctatcaggacaaaagctctctatcccccaaataactacaaagcatagtgggctctatgcttgctctgttcgtaactcagccactggcaaggaaagctccaaatccatcacagtcaaagtctctgactggatattaccctgaattctactagttcctccaattccattttctcccatggaatcacgaagagcaagacccactctgttccagaagccctataagctggaggtggacaactcgatgtaaatttcatgggaaaacccttgtacctgacatgtgagccactcagaactcaccaaaatgttcgacaccataacaacagctactcaaactgtaaaccaggataacaagttgatgacttcacactgtggacagtttttccaaagatgtcagaacaagactccccatcatgataaggctcccacccctcttaactgtccttgctcatgcctgcctctttcacttggcaggataatgcagtcattagaatttcacatgtagtagcttctgagggtaacaacagagtgtcagatatgtcatctcaacctcaaacttttacgtaacatctcaggggaaatgtggctctctccatcttgcatacagggctcccaatagaaatgaacacagagatattgcctgtgtgtttgcagagaagatggtttctataaagagtaggaaagctgaaattatagtagagtctcctttaaatgcacattgtgtggatggctctcaccatttcctaagagatacagtgtaaaacgtgacagtaatactgattctagcagaataaaacatgtaccacatttgctaa

SEQ ID NO: 362289 - DNA, 1483 bp, Homo sapiens
tggtacctatctgtgtcggggttgcacagggaggccatggaggctgtgatcttaacctgtgatcctgcgactccagccgcaagctaccagtggtggatgaatggtcagagcctccctatgactcacaggttgcagctgtccaaaaccaacaggaccctctttatatttggtgtcacaaagtatattgcaggaccctatgaatgtgaaatacggaacccagtgagtgccagccgcagtgacccagtcaccctgaatctcctcccaaagctgtccaagccctacatcacaatcaacaacttaaaccccagagagaataaggatgtcttaaccttcacctgtgaacctaagagtgagaactacacctacatttggtggctaaatggtcagagcctccctgtcagtcccagggtaaagcgacccattgaaaacaggatcctcattctacccaatgtcacgagaaatgaaacaggaccttatcaatgtgaaatacgggaccgatatggtggcatccgcagtgacccagtcaccctgaatgtcctctatggtccagacctccccagcatttacccttcattcacctattaccgttcaggagaaaacctctacttgtcctgcttcgccgagtctaacccacgggcacaatattcttggacaattaatgggaagtttcagctatcaggacaaaagctctctatcccccaaataactacaaagcatagtgggctctatgcttgctctgttcgtaactcagccactggcaaggaaagctccaaatccatcacagtcaaagtctctgactggatattaccctgaattctactagttcctccaattccattttctcccatggaatcacgaagagcaagacccactctgttccagaagccctataagctggaggtggacaactcgatgtaaatttcatgggaaaacccttgtacctgacatgtgagccactcagaactcaccaaaatgttcgacaccataacaacagctactcaaactgtaaaccaggataacaagttgatgacttcacactgtggacagtttttccaaagatgtcagaacaagactccccatcatgataaggctcccacccctcttaactgtccttgctcatgcctgcctctttcacttggcaggataatgcagtcattagaatttcacatgtagtagcttctgagggtaacaacagagtgtcagatatgtcatctcaacctcaaacttttacgtaacatctcaggggaaatgtggctctctccatcttgcatacagggctcccaatagaaatgaacacagagatattgcctgtgtgtttgcagagaagatggtttctataaagagtaggaaagctgaaattatagtagagtctcctttaaatgcacattgtgtggatggctctcaccatttcctaagagatacagtgtaaaacgtgacagtaatactgattctagcagaataaaacatgtaccacatttgctaa

SEQ ID NO: 362290 - DNA, 1558 bp, Homo sapiens
gtatcaacgcagagtgcccattacgccggggagaaggaggaaggacagcacagctgacagccgtactcaggaagcttctggatcctaggcttatctccacagaggagaacacacaagcagcagagaccatggggcccctctcagcccctccctgcacacacctcatcacttggaagggggtcctgctcacagatgactcacaggttgcagctgtccaaaaccaacaggaccctctttatatttggtgtcacaaagtatattgcaggaccctatgaatgtgaaatacggaacccagtgagtgccagccgcagtgacccagtcaccctgaatctcctcccaaagctgtccaagccctacatcacaatcaacaacttaaaccccagagagaataaggatgtcttaaccttcacctgtgaacctaagagtgagaactacacctacatttggtggctaaatggtcagagcctccctgtcagtcccagggtaaagcgacccattgaaaacaggatcctcattctacccaatgtcacgagaaatgaaacaggaccttatcaatgtgaaatacgggaccgatatggtggcatccgcagtgacccagtcaccctgaatgtcctctatggtccagacctccccagcatttacccttcattcacctattaccgttcaggagaaaacctctacttgtcctgcttcgccgagtctaacccacgggcacaatattcttggacaattaatgggaagtttcagctatcaggacaaaagctctctatcccccaaataactacaaagcatagtgggctctatgcttgctctgttcgtaactcagccactggcaaggaaagctccaaatccatcacagtcaaagtctctgactggatattaccctgaattctactagttcctccaattccattttctcccatggaatcacgaagagcaagacccactctgttccagaagccctataagctggaggtggacaactcgatgtaaatttcatgggaaaacccttgtacctgacatgtgagccactcagaactcaccaaaatgttcgacaccataacaacagctactcaaactgtaaaccaggataacaagttgatgacttcacactgtggacagtttttccaaagatgtcagaacaagactccccatcatgataaggctcccacccctcttaactgtccttgctcatgcctgcctctttcacttggcaggataatgcagtcattagaatttcacatgtagtagcttctgagggtaacaacagagtgtcagatatgtcatctcaacctcaaacttttacgtaacatctcaggggaaatgtggctctctccatcttgcatacagggctcccaatagaaatgaacacagagatattgcctgtgtgtttgcagagaagatggtttctataaagagtaggaaagctgaaattatagtagagtctcctttaaatgcacattgtgtggatggctctcaccatttcctaagagatacagtgtaaaacgtgacagtaatactgattctagcagaataaaacatgtaccacatttgctaa

SEQ ID NO: 362291 - DNA, 2021 bp, Homo sapiens
ctgccccgggaggaggctcagacagaaggaggaaggacagcacagctgacagccgtactcaggaagcttctggatcctaggcttatctccacagaggagaacacacaagcagcagagaccatggggcccctctcagcccctccctgcacacacctcatcacttggaagggggtcctgctcacagcatcacttttaaacttctggaatccgcccacaactgcccaagtcacgattgaagcccagccacccaaagtttctgaggggaaggatgttcttctacttgtccacaatttgccccagaatcttgctggctacatttggtacaaagggcaaatgacatacctctaccattacattacatcatatgtagtagacggtcaaagaattatatatgggcctgcatacagtggaagagaaagagtatattccaatgcatccctgctgatccagaatgtcacgcaggaggatgcaggatcctacaccttacacatcataaagcgacgcgatgggactggaggagtaactggacatttcaccttcaccttacacctggagactcccaagccctccatctccagcagcaacttaaatcccagggaggccatggaggctgtgatcttaacctgtgatcctgcgactccagccgcaagctaccagtggtggatgaatggtcagagcctccctatgactcacaggttgcagctgtccaaaaccaacaggaccctctttatatttggtgtcacaaagtatattgcaggaccctatgaatgtgaaatacggaacccagtgagtgccagccgcagtgacccagtcaccctgaatctcctcccaaagctgtccaagccctacatcacaatcaacaacttaaaccccagagagaataaggatgtcttaaccttcacctgtgaacctaagagtgagaactacacctacatttggtggctaaatggtcagagcctccctgtcagtcccagggtaaagcgacccattgaaaacaggatcctcaggaccttatcaatgtgaaatacgggaccgatatggtggcatccgcagtgacccagtcaccctgaatgtcctctatggtccagacctccccagcatttacccttcattcacctattaccgttcaggagaaaacctctacttgtcctgcttcgccgagtctaacccacgggcacaatattcttggacaattaatgggaagtttcagctatcaggacaaaagctctctatcccccaaataactacaaagcatagtgggctctatgcttgctctgttcgtaactcagccactggcaaggaaagctccaaatccatcacagtcaaagtctctgactggatattaccctgaattctactagttcctccaattccattttctcccatggaatcacgaagagcaagacccactctgttccagaagccctataagctggaggtggacaactcgatgtaaatttcatgggaaaacccttgtacctgacatgtgagccactcagaactcaccaaaatgttcgacaccataacaacagctactcaaactgtaaaccaggataacaagttgatgacttcacactgtggacagtttttccaaagatgtcagaacaagactccccatcatgataaggctcccacccctcttaactgtccttgctcatgcctgcctctttcacttggcaggataatgcagtcattagaatttcacatgtagtagcttctgagggtaacaacagagtgtcagatatgtcatctcaacctcaaacttttacgtaacatctcaggggaaatgtggctctctccatcttgcatacagggctcccaatagaaatgaacacagagatattgcctgtgtgtttgcagagaagatggtttctataaagagtaggaaagctgaaattatagtagagtctcctttaaatgcacattgtgtggatggctctcaccatttcctaagagatacagtgtaaaacgtgacagtaatactgattctagcagaataaaacatgtaccacatttgctaa

SEQ ID NO: 362292 - DNA, 1327 bp, Homo sapiens
tcggtacctgctcgcccctctctgcacattgcaggaccctatgaatgtgaaatacggaacccagtgagtgccagccgcagtgacccagtcaccctgaatctcctcccaaagctgtccaagccctacatcacaatcaacaacttaaaccccagagagaataaggatgtcttaaccttcacctgtgaacctaagagtgagaactacacctacatttggtggctaaatggtcagagcctccctgtcagtcccagggtaaagcgacccattgaaaacaggatcctcattctacccaatgtcacgagaaatgaaacaggaccttatcaatgtgaaatacgggaccgatatggtggcatccgcagtgacccagtcaccctgaatgtcctctatggtccagacctccccagcatttacccttcattcacctattaccgttcaggagaaaacctctacttgtcctgcttcgccgagtctaacccacgggcacaatattcttggacaattaatgggaagtttcagctatcaggacaaaagctctctatcccccaaataactacaaagcatagtgggctctatgcttgctctgttcgtaactcagccactggcaaggaaagctccaaatccatcacagtcaaagtctctgactggatattaccctgaattctactagttcctccaattccattttctcccatggaatcacgaagagcaagacccactctgttccagaagccctataagctggaggtggacaactcgatgtaaatttcatgggaaaacccttgtacctgacatgtgagccactcagaactcaccaaaatgttcgacaccataacaacagctactcaaactgtaaaccaggataacaagttgatgacttcacactgtggacagtttttccaaagatgtcagaacaagactccccatcatgataaggctcccacccctcttaactgtccttgctcatgcctgcctctttcacttggcaggataatgcagtcattagaatttcacatgtagtagcttctgagggtaacaacagagtgtcagatatgtcatctcaacctcaaacttttacgtaacatctcaggggaaatgtggctctctccatcttgcatacagggctcccaatagaaatgaacacagagatattgcctgtgtgtttgcagagaagatggtttctataaagagtaggaaagctgaaattatagtagagtctcctttaaatgcacattgtgtggatggctctcaccatttcctaagagatacagtgtaaaacgtgacagtaatactgattctagcagaataaaacatgtaccacatttgctaa

SEQ ID NO: 362293 - DNA, 1771 bp, Homo sapiens
ctgccccgggaggaggctcagacagaaggaggaaggacagcacagctgacagccgtactcaggaagcttctggatcctaggcttatctccacagaggagaacacacaagcagcagagaccatggggcccctctcagcccctccctgcacacacctcatcacttggaagggggtcctgctcacagcatcacttttaaacttctggaatccgcccacaactgcccaagtcacgattgaagcccagccacccaaagtttctgaggggaaggatgttcttctacttgtccacaatttgccccagaatcttgctggctacatttggtacaaagggcaaatgacatacctctaccattacattacatcatatgtagtagacggtcaaagaattatatatgggcctgcatacagtggaagagaaagagtatattccaatgcatccctgctgatccagaatgtcacgcaggaggatgcaggatcctacaccttacacatcataaagcgacgcgatgggactggaggagtaactggacatttcaccttcaccttacacccaaagctgtccaagccctacatcacaatcaacaacttaaaccccagagagaataaggatgtcttaaccttcacctgtgaacctaagagtgagaactacacctacatttggtggctaaatggtcagagcctccctgtcagtcccagggtaaagcgacccattgaaaacaggatcctcattctacccaatgtcacgagaaatgaaacaggaccttatcaatgtgaaatacgggaccgatatggtggcatccgcagtgacccagtcaccctgaatgtcctctatggtccagacctccccagcatttacccttcattcacctattaccgttcaggagaaaacctctacttgtcctgcttcgccgagtctaacccacgggcacaatattcttggacaattaatgggaagtttcagctatcaggacaaaagctctctatcccccaaataactacaaagcatagtgggctctatgcttgctctgttcgtaactcagccactggcaaggaaagctccaaatccatcacagtcaaagtctctgactggatattaccctgaattctactagttcctccaattccattttctcccatggaatcacgaagagcaagacccactctgttccagaagccctataagctggaggtggacaactcgatgtaaatttcatgggaaaacccttgtacctgacatgtgagccactcagaactcaccaaaatgttcgacaccataacaacagctactcaaactgtaaaccaggataacaagttgatgacttcacactgtggacagtttttccaaagatgtcagaacaagactccccatcatgataaggctcccacccctcttaactgtccttgctcatgcctgcctctttcacttggcaggataatgcagtcattagaatttcacatgtagtagcttctgagggtaacaacagagtgtcagatatgtcatctcaacctcaaacttttacgtaacatctcaggggaaatgtggctctctccatcttgcatacagggctcccaatagaaatgaacacagagatattgcctgtgtgtttgcagagaagatggtttctataaagagtaggaaagctgaaattatagtagagtctcctttaaatgcacattgtgtggatggctctcaccatttcctaagagatacagtgtaaaacgtgacagtaatactgattctagcagaataaaacatgtaccacatttgctaa

SEQ ID NO: 362294 - DNA, 1255 bp, Homo sapiens
cgtctagaggatccgatagagcataccctcctcccaaagctgtccaagccctacatcacaatcaacaacttaaaccccagagagaataaggatgtcttaaccttcacctgtgaacctaagagtgagaactacacctacatttggtggctaaatggtcagagcctccctgtcagtcccagggtaaagcgacccattgaaaacaggatcctcattctacccaatgtcacgagaaatgaaacaggaccttatcaatgtgaaatacgggaccgatatggtggcatccgcagtgacccagtcaccctgaatgtcctctatggtccagacctccccagcatttacccttcattcacctattaccgttcaggagaaaacctctacttgtcctgcttcgccgagtctaacccacgggcacaatattcttggacaattaatgggaagtttcagctatcaggacaaaagctctctatcccccaaataactacaaagcatagtgggctctatgcttgctctgttcgtaactcagccactggcaaggaaagctccaaatccatcacagtcaaagtctctgactggatattaccctgaattctactagttcctccaattccattttctcccatggaatcacgaagagcaagacccactctgttccagaagccctataagctggaggtggacaactcgatgtaaatttcatgggaaaacccttgtacctgacatgtgagccactcagaactcaccaaaatgttcgacaccataacaacagctactcaaactgtaaaccaggataacaagttgatgacttcacactgtggacagtttttccaaagatgtcagaacaagactccccatcatgataaggctcccacccctcttaactgtccttgctcatgcctgcctctttcacttggcaggataatgcagtcattagaatttcacatgtagtagcttctgagggtaacaacagagtgtcagatatgtcatctcaacctcaaacttttacgtaacatctcaggggaaatgtggctctctccatcttgcatacagggctcccaatagaaatgaacacagagatattgcctgtgtgtttgcagagaagatggtttctataaagagtaggaaagctgaaattatagtagagtctcctttaaatgcacattgtgtggatggctctcaccatttcctaagagatacagtgtaaaacgtgacagtaatactgattctagcagaataaaacatgtaccacatttgctaa

SEQ ID NO: 362295 - DNA, 2003 bp, Homo sapiens
ctgccccgggaggaggctcagacagaaggaggaaggacagcacagctgacagccgtactcaggaagcttctggatcctaggcttatctccacagaggagaacacacaagcagcagagaccatggggcccctctcagcccctccctgcacacacctcatcacttggaagggggtcctgctcacagcatcacttttaaacttctggaatccgcccacaactgcccaagtcacgattgaagcccagccacccaaagtttctgaggggaaggatgttcttctacttgtccacaatttgccccagaatcttgctggctacatttggtacaaagggcaaatgacatacctctaccattacattacatcatatgtagtagacggtcaaagaattatatatgggcctgcatacagtggaagagaaagagtatattccaatgcatccctgctgatccagaatgtcacgcaggaggatgcaggatcctacaccttacacatcataaagcgacgcgatgggactggaggagtaactggacatttcaccttcaccttacacctggagactcccaagccctccatctccagcagcaacttaaatcccagggaggccatggaggctgtgatcttaacctgtgatcctgcgactccagccgcaagctaccagtggtggatgaatggtcagagcctccctatgactcacaggttgcagctgtccaaaaccaacaggaccctctttatatttggtgtcacaaagtatattgcaggaccctatgaatgtgaaatacggaacccagtgagtgccagccgcagtgacccagtcaccctgaatctcctcccaaagctgtccaagccctacatcacaatcaacaacttaaaccccagagagaataaggatgtcttaaccttcacctgtgaacctaagagtgagaactacacctacatttggtggctaaatggtcagagcctccctgtcagtcccagggtaaagcgacccattgaaaacaggatcctcattctacccaatgtcacgagaaatgaaacaggaccttatcaatgtgaaatacgggaccgatatggtggcatccgcagtgacccagtcaccctgaatgtcctcttcaggagaaaacctctacttgtcctgcttcgccgagtctaacccacgggcacaatattcttggacaattaatgggaagtttcagctatcaggacaaaagctctctatcccccaaataactacaaagcatagtgggctctatgcttgctctgttcgtaactcagccactggcaaggaaagctccaaatccatcacagtcaaagtctctgactggatattaccctgaattctactagttcctccaattccattttctcccatggaatcacgaagagcaagacccactctgttccagaagccctataagctggaggtggacaactcgatgtaaatttcatgggaaaacccttgtacctgacatgtgagccactcagaactcaccaaaatgttcgacaccataacaacagctactcaaactgtaaaccaggataacaagttgatgacttcacactgtggacagtttttccaaagatgtcagaacaagactccccatcatgataaggctcccacccctcttaactgtccttgctcatgcctgcctctttcacttggcaggataatgcagtcattagaatttcacatgtagtagcttctgagggtaacaacagagtgtcagatatgtcatctcaacctcaaacttttacgtaacatctcaggggaaatgtggctctctccatcttgcatacagggctcccaatagaaatgaacacagagatattgcctgtgtgtttgcagagaagatggtttctataaagagtaggaaagctgaaattatagtagagtctcctttaaatgcacattgtgtggatggctctcaccatttcctaagagatacagtgtaaaacgtgacagtaatactgattctagcagaataaaacatgtaccacatttgctaa

SEQ ID NO: 362296 - DNA, 1149 bp, Homo sapiens
gtgtcacagtgcgacgtatacacgaacgttctgtgtagcttaaatagtgtctgatcctccctgtcagtcccagggtaaagcgacccattgaaaacaggatcctcattctacccaatgtcacgagaaatgaaacaggaccttatcaatgtgaaatacgggaccgatatggtggcatccgcagtgacccagtcaccctgaatgtcctctatggtccagacctccccagcatttacccttcattcacctattaccgttcaggagaaaacctctacttgtcctgcttcgccgagtctaacccacgggcacaatattcttggacaattaatgggaagtttcagctatcaggacaaaagctctctatcccccaaataactacaaagcatagtgggctctatgcttgctctgttcgtaactcagccactggcaaggaaagctccaaatccatcacagtcaaagtctctgactggatattaccctgaattctactagttcctccaattccattttctcccatggaatcacgaagagcaagacccactctgttccagaagccctataagctggaggtggacaactcgatgtaaatttcatgggaaaacccttgtacctgacatgtgagccactcagaactcaccaaaatgttcgacaccataacaacagctactcaaactgtaaaccaggataacaagttgatgacttcacactgtggacagtttttccaaagatgtcagaacaagactccccatcatgataaggctcccacccctcttaactgtccttgctcatgcctgcctctttcacttggcaggataatgcagtcattagaatttcacatgtagtagcttctgagggtaacaacagagtgtcagatatgtcatctcaacctcaaacttttacgtaacatctcaggggaaatgtggctctctccatcttgcatacagggctcccaatagaaatgaacacagagatattgcctgtgtgtttgcagagaagatggtttctataaagagtaggaaagctgaaattatagtagagtctcctttaaatgcacattgtgtggatggctctcaccatttcctaagagatacagtgtaaaacgtgacagtaatactgattctagcagaataaaacatgtaccacatttgctaa

SEQ ID NO: 362297 - DNA, 1146 bp, Homo sapiens
atatgctgttttcttgccctagagcctggaaagaaggaatcgaaagtgcccagtgcattgataagaacagcagtctggaggcagactccccaatgtagtgcacattcaggtactcaggctcaccatgccttggaccttatcaatgtgaaatacgggaccgatatggtggcatccgcagtgacccagtcaccctgaatgtcctctatggtccagacctccccagcatttacccttcattcacctattaccgttcaggagaaaacctctacttgtcctgcttcgccgagtctaacccacgggcacaatattcttggacaattaatgggaagtttcagctatcaggacaaaagctctctatcccccaaataactacaaagcatagtgggctctatgcttgctctgttcgtaactcagccactggcaaggaaagctccaaatccatcacagtcaaagtctctgactggatattaccctgaattctactagttcctccaattccattttctcccatggaatcacgaagagcaagacccactctgttccagaagccctataagctggaggtggacaactcgatgtaaatttcatgggaaaacccttgtacctgacatgtgagccactcagaactcaccaaaatgttcgacaccataacaacagctactcaaactgtaaaccaggataacaagttgatgacttcacactgtggacagtttttccaaagatgtcagaacaagactccccatcatgataaggctcccacccctcttaactgtccttgctcatgcctgcctctttcacttggcaggataatgcagtcattagaatttcacatgtagtagcttctgagggtaacaacagagtgtcagatatgtcatctcaacctcaaacttttacgtaacatctcaggggaaatgtggctctctccatcttgcatacagggctcccaatagaaatgaacacagagatattgcctgtgtgtttgcagagaagatggtttctataaagagtaggaaagctgaaattatagtagagtctcctttaaatgcacattgtgtggatggctctcaccatttcctaagagatacagtgtaaaacgtgacagtaatactgattctagcagaataaaacatgtaccacatttgctaa

SEQ ID NO: 362298 - DNA, 983 bp, Homo sapiens
  misc_feature (26)..(26): n is a, c, g, or t
tctagaggatcctgcgggagccttancctccgggagccttaatggtccagacctccccagcatttacccttcattcacctattaccgttcaggagaaaacctctacttgtcctgcttcgccgagtctaacccacgggcacaatattcttggacaattaatgggaagtttcagctatcaggacaaaagctctctatcccccaaataactacaaagcatagtgggctctatgcttgctctgttcgtaactcagccactggcaaggaaagctccaaatccatcacagtcaaagtctctgactggatattaccctgaattctactagttcctccaattccattttctcccatggaatcacgaagagcaagacccactctgttccagaagccctataagctggaggtggacaactcgatgtaaatttcatgggaaaacccttgtacctgacatgtgagccactcagaactcaccaaaatgttcgacaccataacaacagctactcaaactgtaaaccaggataacaagttgatgacttcacactgtggacagtttttccaaagatgtcagaacaagactccccatcatgataaggctcccacccctcttaactgtccttgctcatgcctgcctctttcacttggcaggataatgcagtcattagaatttcacatgtagtagcttctgagggtaacaacagagtgtcagatatgtcatctcaacctcaaacttttacgtaacatctcaggggaaatgtggctctctccatcttgcatacagggctcccaatagaaatgaacacagagatattgcctgtgtgtttgcagagaagatggtttctataaagagtaggaaagctgaaattatagtagagtctcctttaaatgcacattgtgtggatggctctcaccatttcctaagagatacagtgtaaaacgtgacagtaatactgattctagcagaataaaacatgtaccacatttgctaa

SEQ ID NO: 362299 - DNA, 1576 bp, Homo sapiens
ctgccccgggaggaggctcagacagaaggaggaaggacagcacagctgacagccgtactcaggaagcttctggatcctaggcttatctccacagaggagaacacacaagcagcagagaccatggggcccctctcagcccctccctgcacacacctcatcacttggaagggggtcctgctcacagcatcacttttaaacttctggaatccgcccacaactgcccaagtcacgattgaagcccagccacccaaagtttctgaggggaaggatgttcttctacttgtccacaatttgccccagaatcttgctggctacatttggtacaaagggcaaatgacatacctctaccattacattacatcatatgtagtagacggtcaaagaattatatatgggcctgcatacagtggaagagaaagagtatattccaatgcatccctgctgatccagaatgtcacgcaggaggatgcaggatcctacaccttacacatcataaagcgacgcgatgggactggaggagtaactggacatttcaccttcaccttacacctggagactcccaagccctccatctccagcagcaacttaaatcccagggaggccatggaggctgtgatcttaacctgtgatcctgcgactccagccgcaagctaccagtggtggatgaatggtcagagcctccctatgactcacaggttgcagctgtccaaaaccaacaggaccctctttatatttggtgtcacaaagtatattgcaggaccctatgaatgtgaaatacggaacccagtgagtgccagccgcagtgacccagtcaccctgaatctcctcccaaagctgtccaagccctacatcacaatcaacaacttaaaccccagagagaataaggatgtcttaaccttcacctgtgaacctaagagtgagaactacacctacatttggtggctaaatggtcagagcctccctgtcagtcccagggtaaagcgacccattgaaaacaggatcctcattctacccaatgtcacgagaaatgaaacaggaccttatcaatgtgaaatacgggaccgatatggtggcatccgcagtgacccagtcaccctgaatgtcctctatggtccagacctccccagcatttacccttcattcacctattaccgttcaggagaaaacctctacttgtcctgcttcgccgagtctaacccacgggcacaatattcttggacaattaatgggaagtttcagctatcaggacaaaagctctctatcccccaaataactacaaagcatagtgggctctatgcttgctctgttcgtaactcagccactggcaaggaaagctccaaatccatcacagtcaaagtctctggacacatttcaaatcattggttatattaccaaggctttgactgggatgttatattcaagaatatagatagaatgaaccaatatgaactgcaggcaaagtctgaagtcagccttggtttggcttcctattctcaagggttttgtaaaagtttaatctgagagtccttataaaaacttagagcaaataaaattctaaaagagcgccaacatggtc

SEQ ID NO: 362300 - DNA, 2474 bp, Homo sapiens
ctgccccgggaggaggctcagacagaaggaggaaggacagcacagctgacagccgtactcaggaagcttctggatcctaggcttatctccacagaggagaacacacaagcagcagagaccatggggcccctctcagcccctccctgcacacacctcatcacttggaagggggtcctgctcacagcatcacttttaaacttctggaatccgcccacaactgcccaagtcacgattgaagcccagccacccaaagtttctgaggggaaggatgttcttctacttgtccacaatttgccccagaatcttgctggctacatttggtacaaagggcaaatgacatacctctaccattacattacatcatatgtagtagacggtcaaagaattatatatgggcctgcatacagtggaagagaaagagtatattccaatgcatccctgctgatccagaatgtcacgcaggaggatgcaggatcctacaccttacacatcataaagcgacgcgatgggactggaggagtaactggacatttcaccttcaccttacacctggagactcccaagccctccatctccagcagcaacttaaatcccagggaggccatggaggctgtgatcttaacctgtgatcctgcgactccagccgcaagctaccagtggtggatgaatggtcagagcctccctatgactcacaggttgcagctgtccaaaaccaacaggaccctctttatatttggtgtcacaaagtatattgcaggaccctatgaatgtgaaatacggaacccagtgagtgccagccgcagtgacccagtcaccctgaatctcctcccaaagctgtccaagccctacatcacaatcaacaacttaaaccccagagagaataaggatgtcttaaccttcacctgtgaacctaagagtgagaactacacctacatttggtggctaaatggtcagagcctccctgtcagtcccagggtaaagcgacccattgaaaacaggatcctcattctacccaatgtcacgagaaatgaaacaggaccttatcaatgtgaaatacgggaccgatatggtggcatccgcagtgacccagtcaccctgaatgtcctctgtgagtatcttttgttcctctgtgggccaggacaccagcttaaatccaaaccaccagaggccaggtctctcagtctctctccagtccaagtatagacacctttacttctggacatccgaggtggccatgactccctgccctgggaaaacctaggtaggcacagccttaaccaagaatataaggggaggggacgctcttgtcatgggagacttggggcctaaaacttgtgatgggagaaacagtgaacatagagggagtttggctgggacttgaaggtgtgtcttggcttagagggtaactgtgtccctttaagagaccaggaacatccccttccctcggatgacatcacctatggctttattctctttgcgccagatggtccagacctccccagcatttacccttcattcacctattaccgttcaggagaaaacctctacttgtcctgcttcgccgagtctaacccacgggcacaatattcttggacaattaatgggaagtttcagctatcaggacaaaagctctctatcccccaaataactacaaagcatagtgggctctatgcttgctctgttcgtaactcagccactggcaaggaaagctccaaatccatcacagtcaaagtctctggtaagtggatcccagcatccttggcaatagggatttaggtggagtctatctggcattcagggaagagtgaggaaaacatttttattcccagcctgtgtcccatgggcacaagcaaatcccaaattctcctcctgaacactcccaatttgtctaagaacttccaaaactttaacaaacaggctgatatcttcttaaaattcccagcctagaccaagcaggagaaacattgatttcattgaaataattgacaatattgaggataatatttttatgatttttatttgaaaatttgctgattctttaaatggtttgttttctagatttatggaatttttttcttttaatctatctatagcttgtagcagttcaataaactatacttctgggaaccgtaattgaaacatttacttttgctctctacctgactgccccagaattgggcaactattcatgagtattgatatgtttatggtaatacacatatttgcacaagtacagtaacaatctgctctctttgtaacaggacacatttcaaatcattggttatattaccaaggctttgactgggatgttatattcaagaatatagatagaatgaaccaatatgaactgcaggcaaagtctgaagtcagccttggtttggcttcctattctcaagggttttgtaaaagtttaatctgagagtccttataaaaacttagagcaaataaaattctaaaagagcgccaacatggtc

SEQ ID NO: 362301 - DNA, 1164 bp, Homo sapiens
ctgccccgggaggaggctcagacagaaggaggaaggacagcacagctgacagccgtactcaggaagcttctggatcctaggcttatctccacagaggagaacacacaagcagcagagaccatggggcccctctcagcccctccctgcacacacctcatcacttggaagggggtcctgctcacagcatcacttttaaacttctggaatccgcccacaactgcccaagtcacgattgaagcccagccacccaaagtttctgaggggaaggatgttcttctacttgtccacaatttgccccagaatcttgctggctacatttggtacaaagggcaaatgacatacctctaccattacattacatcatatgtagtagacggtcaaagaattatatatgggcctgcatacagtggaagagaaagagtatattccaatgcatccctgctgatccagaatgtcacgcaggaggatgcaggatcctacaccttacacatcataaagcgacgcgatgggactggaggagtaactggacatttcaccttcaccttacacctggagactcccaagccctccatctccagcagcaacttaaatcccagggaggccatggaggctgtgatcttaacctgtgatcctgcgactccagccgcaagctaccagtggtggatgaatggtcagagcctccctatgactcacaggttgcagctgtccaaaaccaacaggaccctctttatatttggtgtcacaaagtatattgcaggaccctatgaatgtgaaatacggaacccagtgagtgccagccgcagtgacccagtcaccctgaatctcctcccaaagctgtccaagccctacatcacaatcaacaacttaaaccccagagagaataaggatgtcttaaccttcacctgtgaacctaagagtgagaactacacctacatttggtggctaaatggtcagagctccctatgactcacaggttgcagctgtccaaaaccaacaggaccctctttatatttggtgtcacaaagtatattgcaggaccctatgaatgtgaaatacggaacccagtgagtgccagccacagtgacccagtcaccctgaatctcctccgtgagtatcctctgttcctctgtgagccaggctgccatcccaaatacacatggccag

SEQ ID NO: 362302 - DNA, 1515 bp, Homo sapiens
  misc_feature (1452)..(1452): n is a, c, g, or t
  misc_feature (1454)..(1454): n is a, c, g, or t
  misc_feature (1460)..(1460): n is a, c, g, or t
  misc_feature (1466)..(1466): n is a, c, g, or t
  misc_feature (1511)..(1511): n is a, c, g, or t
ctgccccgggaggaggctcagacagaaggaggaaggacagcacagctgacagccgtactcaggaagcttctggatcctaggcttatctccacagaggagaacacacaagcagcagagaccatggggcccctctcagcccctccctgcacacacctcatcacttggaagggggtcctgctcacagcatcacttttaaacttctggaatccgcccacaactgcccaagtcacgattgaagcccagccacccaaagtttctgaggggaaggatgttcttctacttgtccacaatttgccccagaatcttgctggctacatttggtacaaagggcaaatgacatacctctaccattacattacatcatatgtagtagacggtcaaagaattatatatgggcctgcatacagtggaagagaaagagtatattccaatgcatccctgctgatccagaatgtcacgcaggaggatgcaggatcctacaccttacacatcataaagcgacgcgatgggactggaggagtaactggacatttcaccttcaccttacacctggagactcccaagccctccatctccagcagcaacttaaatcccagggaggccatggaggctgtgatcttaacctgtgatcctgcgactccagccgcaagctaccagtggtggatgaatggtcagagcctccctatgactcacaggttgcagctgtccaaaaccaacaggaccctctttatatttggtgtcacaaagtatattgcaggaccctatgaatgtgaaatacggaacccagtgagtgccagccgcagtgacccagtcaccctgaatctcctccatggtccagacctccccagaatttacccttcattcacctattaccgttcaggagaaaacctcgacttgtcctgcttcacggaatctaacccaccggcagagtatttttggacaattaatgggaagtttcagcaatcaggacaaaagctctttatcccccaaattactagaaatcatagcgggctctatgcttgctctgttcataactcagccactggcaaggaaatctccaaatccatgacagtcaaagtctctggtccctgccatggagacctgacagagtctcagtcatgactgcaacaactgagacactgagaaaaagaacaggctgataccttcatgaaattcaagacaaagaagaaaaaaactcaatgttattggactaaataatcaaaaggataatgttttcataattttttattggaaaatgtgctgattctttgaatgttttattctccagatttatgaactttttttcttcagcaattggtaaagtatacttttgtaaacaaaaattgaaatatttgcttttgctgtctatctgaatgccccagaattgtgaaactattcatgagtattcataggtttatggtaataaagttatttgcacatgttcaaaaaaananaaaaanaaaaanaaaaaaacaaaagaggtgtaaaaaaaaaacacacacaaaaaaacnaaaa

SEQ ID NO: 362303 - DNA, 800 bp, Homo sapiens
ctgccccgggaggaggctcagacagaaggaggaaggacagcacagctgacagccgtactcaggaagcttctggatcctaggcttatctccacagaggagaacacacaagcagcagagaccatggggcccctctcagcccctccctgcacacacctcatcacttggaagggggtcctgctcacagcatcacttttaaacttctggaatccgcccacaactgcccaagtcacgattgaagcccagccacccaaagtttctgaggggaaggatgttcttctacttgtccacaatttgccccagaatcttgctggctacatttggtacaaagggcaaatgacatacctctaccattacattacatcatatgtagtagacggtcaaagaattatatatgggcctgcatacagtggaagagaaagagtatattccaatgcatccctgctgatccagaatgtcacgcaggaggatgcaggatcctacaccttacacatcataaagcgacgcgatgggactggaggagtaactggacatttcaccttcaccttacaccagtcagaacataacatgaggtctaaactcctgacaactttttatgggaaaattacagtattacgaattgagcatcggaaatccagaaatccacaatctgaaatgctccaaaactcaacccttctgaccactgatgtgatgttaaaaagaagtgctcactggcgcattgtggattttaaatttttcagatttgggatgctaaaccagtacatgtactgcaaatattccaaaattaaaaaaattagaaatcc

SEQ ID NO: 362304 - DNA, 465 bp, Homo sapiens
aactctgattgaagtatgcctgtggaggaatcaaaggtgccacacaggacaatcttctctctgttatccacacagcaaagctgtccaagccctacatcacaatcaacaacttaaaccccagagagaataaggatgtcttaaccttcacctgtgaacctaagagtgagaactacacctacatttggtggctaaatggtcagagcctccctgtcagtcccagggtaaagcgacccattgaaaacaggatcctcattctacccaatgtcacgagaaatgaaacaggaccttatcaatgtgaaatacgggaccgatatggtggcatccgcagtgacccagtcaccctgaatgtcctctgtgagtatcttttgttcctctgtgggccaggacaccagcttaaatccaaaccaccagaggccaggtctctcagtctctctccagtccaagtatagacacctttacttctgg

SEQ ID NO: 362305 - DNA, 5605 bp, Homo sapiens
tcgagggtgcgatggcgcggacgcgggacgcgcgtacgccctgctgcttctcctgatctgctttaacgttggaagtggacttcacttacaggtcttaagcacaagaaatgaaaataagctgcttcctaaacatcctcatttagtgcggcaaaagcgcgcctggatcaccgcccccgtggctcttcgggagggagaggatctgtccaagaagaatccaattgccaagatacattctgatcttgcagaagaaagaggactcaaaattacttacaaatacactggaaaagggattacagagccaccttttggtatatttgtctttaacaaagatactggagaactgaatgttaccagcattcttgatcgagaagaaacaccattttttctgctaacaggttacgctttggatgcaagaggaaacaatgtagagaaacccttagagctacgcattaaggttcttgatatcaatgacaacgaaccagtgttcacacaggatgtctttgttgggtctgttgaagagttgagtgcagcacatactcttgtgatgaaaatcaatgcaacagatgcagatgagcccaataccctgaattcgaaaatttcctatagaatcgtatctctggagcctgcttatcctccagtgttctacctaaataaagatacaggagagatttatacaaccagtgttaccttggacagagaggaacacagcagctacactttgacagtagaagcaagagatggcaatggagaagttacagacaaacctgtaaaacaagctcaagttcagattcgtattttggatgtcaatgacaatatacctgtagtagaaaataaagtgcttgaagggatggttgaagaaaatcaagtcaatgtagaagttacgcgcataaaagtgttcgatgcagatgaaataggttctgataattggctggcaaattttacatttgcatcaggaaatgaaggaggttatttccacatagaaacagatgctcaaactaacgaaggaattgtgacccttattaaggaagtagattatgaagaaatgaagaatcttgacttcagtgttattgtcgctaataaagcagcttttcacaagtcgattaggagtaaatacaagcctacacccattcccatcaaggtcaaagtgaaaaatgtgaaagaaggcattcattttaaaagcagcgtcatctcaatttatgttagcgagagcatggatagatcaagcaaaggccaaataattggaaattttcaagcttttgatgaggacactggactaccagcccatgcaagatatgtaaaattagaagatagagataattggatctctgtggattctgtcacatctgaaattaaacttgcaaaacttcctgattttgaatctagatatgttcaaaatggcacatacactgtaaagattgtggccatatcagaagattatcctagaaaaaccatcactggcacagtccttatcaatgttgaagacatcaacgacaactgtcccacactgatagagcctgtgcagacaatctgtcacgatgcagagtatgtgaatgttactgcagaggacctggatggacacccaaacagtggccctttcagtttctccgtcattgacaaaccacctggcatggcagaaaaatggaaaatagcacgccaagaaagtaccagtgtgctgctgcaacaaagtgagaaaaagcttgggagaagtgaaattcagttcctgatttcagacaatcagggttttagttgtcctgaaaagcaggtccttacactcacagtttgtgagtgtctgcatggcagcggctgcagggaagcacagcatgactcctatgtgggcctgggacccgcagcaattgcgctcatgattttggcctttctgctcctgctattggtaccacttttactgctgatgtgccattgcggaaagggcgccaaaggctttacccccatacctggcaccatagagatgctgcatccttggaataatgaaggagcaccacctgaagacaaggtggtgccatcatttctgccagtggatcaagggggcagtctagtaggaagaaatggagtaggaggtatggccaaggaagccacgatgaaaggaagtagctctgcttccattgtcaaagggcaacatgagatgtccgagatggatggaaggtgggaagaacacagaagcctgctttctggtagagctacccagtttacaggggccacaggcgctatcatgaccactgaaaccacgaagaccgcaagggccacaggggcttccagagacatggccggagctcaggcagctgctgttgcactgaacgaagaattcttaagaaattatttcactgataaagcggcctcttacactgaggaagatgaaaatcacacagccaaagattgccttctggtttattctcaggaagaaactgaatcgctgaatgcttctattggttgttgcagttttattgaaggagagctagatgaccgcttcttagatgatttgggacttaaattcaagacactagctgaagtttgcctgggtcaaaaaatagatataaataaggaaattgagcagagacaaaaacctgccacagaaacaagtatgaacacagcttcacattcactctgtgagcaaactatggttaattcagagaatacctactcctctggcagtagcttcccagttccaaaatctttgcaagaagccaatgcagagaaagtaactcaggaaatagtcactgaaagatctgtgtcttctaggcaggcgcaaaaggtagctacacctcttcctgacccaatggcttctagaaatgtgatagcaacagaaacttcctatgtcacagggtccactatgccaccaaccactgtgatcctgggtcctagccagccacagagccttattgtgacagagagggtgtatgctccagcttctaccttggtagatcagccttatgctaatgaaggtacagttgtggtcactgaaagagtaatacagcctcatgggggtggatcgaatcctctggaaggcactcagcatcttcaagatgtaccttacgtcatggtgagggaaagagagagcttccttgcccccagctcaggtgtgcagcctactctggccatgcctaatatagcagtaggacagaatgtgacagtgacagaaagagttctagcacctgcttccactctgcaatccagttaccagattcccactgaaaattctatgacggctaggaacaccacggtgtctggagctggagtccctggccctctgccagattttggtttagaggaatctggtcattctaattctaccataaccacatcttccaccagagtcaccaagcatagcactgtacagcattcttactcctaaacagcagtcagccacaaactgacccagagtttaattagcagtgactaatttcatgtttccaatgtacctgatttttcatgagccttacagacacacagagacacatacacattgatcttaaaatttttctcagtcactgatatgcaaaggaccacactgtctctgcttccaggagtattttagaaatgttccacaatttactgaagacatagagatgatgctgctgcttaggtgccttttagcaagctatgcaaacaatcctgataaaacaagatacatagagagtcaatctggcttctgagaatttaccaagtgaacagagtacctagttcatcagccgtccagtaaagcaacccaggaaactgactgggtctctttgcctaccgtattaacattaaacattgatgttctgtattctgtactttactgcacccagcagactttcaacaactcattgatccaaagatacatgcacagtctgagcaccagctatggtgctcataacttctttaagacttgaaccctttcaatctgtgtgattcattaaattggaccattgatgataagaatacacattgtatgtttctgtgcacatgacagtgtgtgtgtgtgcacgtacatactgtatagtcttaaaaatagcattatactggccaggggtggtggctaacgcctgtaatcccagcactttgggaggccgaggcgggtggatcaactgtggtcaggagtttgagatcagccaggccaacctggtgaaaccccgtctctactaaaaatacaaaaattagctgggcgtgatggtgggcgcctgtaatcccagctacttgggaggctgaggcaggagaatcacttgaacccgggaggcggaggttgcagtgagccgagatcgcaccattgcactccagtctgggcaacagagtgagattccgtctcaaaaaaaaaaagaaaaggaaaaaaaaatagcattatacctcttccttgtctcaaccgccatgaaaattctgaacactccaaattcagttgaataatccaaaacaaaatttataagtataaaataattttacttcttatagtaatagtatactttaaaaagcctcagggtatattatcttctaaacagctacaattcagtgcagctacattaaccaactatgttctctagttgagaacaactaggcctatttcactgctgtgtagcctcagtgcctaacatgggtgccaaataaatattcgtagaattacactgaattgtaaaaaccattcgttttggtttacaattgccaaaaatctcaaaaggccctgtatttatgtaattctttgaaattattattttattttgatttctcagttattgactggctgggtgtgacttagtacataagtactcaatattataaaaacctcaaataattgacttgattttacacaacatccttcccttttctacaagttaatttttttacaaatcatttgggttatctcctaaataggttatattttattgcttctagaaacaatgtttcaaaatatatgtgcattatcagtaataatttgtataaatatttcccacaacaattttcataattttcaaagactaatttcttgactgaagatattttgctagggaagtgaaactttaaaattttgtagattttaaaaaatattgttgaatggtgtcatgcaaaggatttatatagtgtgctcccactaactgtgtacagatcaggacacatatttttagacatctaagtctgtagcttaaatggaggttactcttccatcatctagaattgtttacttagtaattgttgtttcttttattattatagacttactatcagttttattttgccaagtatgcaacaggtatatcactagtatatgaaaatgtaaatatcacttgtgtactcaaacaaaagttggtcttaagcttccaccttgagcagccttggaaacctaacctgcctcttttagcataatcacattttctaaatgattttctttgttcctgaaaaagtgatttgtattagttttacatttgttttttggaagattatatttgtatatgtatcatcataaaatatttaaataaaaagtatctttagagtgaaaaaaaaaaaaaaaaaaaaatggtgggctgggccgaaaattaaaacatggggggggcgaaggagggaggagggcaggacggggaaagggttccaaaaaagggggggttgaacagggggggggaagggc

SEQ ID NO: 362306 - DNA, 5348 bp, Homo sapiens
tcgagggtgcgatggcgcggacgcgggacgcgcgtacgccctgctgcttctcctgatctgctttaacgttggaagtggacttcacttacaggtcttaagcacaagaaatgaaaataagctgcttcctaaacatcctcatttagtgcggcaaaagcgcgcctggatcaccgcccccgtggctcttcgggagggagaggatctgtccaagaagaatccaattgccaagatacattctgatcttgcagaagaaagaggactcaaaattacttacaaatacactggaaaagggattacagagccaccttttggtatatttgtctttaacaaagatactggagaactgaatgttaccagcattcttgatcgagaagaaacaccattttttctgctaacaggttacgctttggatgcaagaggaaacaatgtagagaaacccttagagctacgcattaaggttcttgatatcaatgacaacgaaccagtgttcacacaggatgtctttgttgggtctgttgaagagttgagtgcagcacatactcttgtgatgaaaatcaatgcaacagatgcagatgagcccaataccctgaattcgaaaatttcctatagaatcgtatctctggagcctgcttatcctccagtgttctacctaaataaagatacaggagagatttatacaaccagtgttaccttggacagagaggaacacagcagctacactttgacagtagaagcaagagatggcaatggagaagttacagacaaacctgtaaaacaagctcaagttcagattcgtattttggatgtcaatgacaatatacctgtagtagaaaataaagtgcttgaagggatggttgaagaaaatcaagtcaatgtagaagttacgcgcataaaagtgttcgatgcagatgaaataggttctgataattggctggcaaattttacatttgcatcaggaaatgaaggaggttatttccacatagaaacagatgctcaaactaacgaaggaattgtgacccttattaaggaagtagattatgaagaaatgaagaatcttgacttcagtgttattgtcgctaataaagcagcttttcacaagtcgattaggagtaaatacaagcctacacccattcccatcaaggtcaaagtgaaaaatgtgaaagaaggcattcattttaaaagcagcgtcatctcaatttatgttagcgagagcatggatagatcaagcaaaggccaaataattggaaattttcaagcttttgatgaggacactggactaccagcccatgcaagatatgtaaaattagaagatagagataattggatctctgtggattctgtcacatctgaaattaaacttgcaaaacttcctgattttgaatctagatatgttcaaaatggcacatacactgtaaagattgtggccatatcagaagattatcctagaaaaaccatcactggcacagtccttatcaatgttgaagacatcaacgacaactgtcccacactgatagagcctgtgcagacaatctgtcacgatgcagagtatgtgaatgttactgcagaggacctggatggacacccaaacagtggccctttcagtttctccgtcattgacaaaccacctggcatggcagaaaaatggaaaatagcacgccaagaaagtaccagtgtgctgctgcaacaaagtgagaaaaagcttgggagaagtgaaattcagttcctgatttcagacaatcagggttttagttgtcctgaaaagcaggtccttacactcacagtttgtgagtgtctgcatggcagcggctgcagggaagcacagcatgactcctatgtgggcctgggacccgcagcaattgcgctcatgattttggcctttctgctcctgctattggtaccacttttactgctgatgtgccattgcggaaagggcgccaaaggctttacccccatacctggcaccatagagatgctgcatccttggaataatgaaggagcaccacctgaagacaaggtggtgccatcatttctgccagtggatcaagggggcagtctagtaggaagaaatggagtaggaggtatggccaaggaagccacgatgaaaggaagtagctctgcttccattgtcaaagggcaacatgagatgtccgagatggatggaaggtgggaagaacacagaagcctgctttctggtagagctacccagtttacaggggccacaggcgctatcatgaccactgaaaccacgaagaccgcaagggccacaggggcttccagagacatggccggagctcaggcagctgctgttgcactgaacgaagaattcttaagaaattatttcactgataaagcggcctcttacactgaggaagatgaaaatcacacagccaaagattgccttctggtttattctcaggaagaaactgaatcgctgaatgcttctattggttgttgcagttttattgaaggagagctagatgaccgcttcttagatgatttgggacttaaattcaagacactagctgaagtttgcctgggtcaaaaaatagatataaataaggaaattgagcagagacaaaaacctgccacagaaacaagtatgaacacagcttcacattcactctgtgagcaaactatggttaattcagagaatacctactcctctggcagtagcttcccagttccaaaatctttgcaagaagccaatgcagagaaagtaactcaggaaatagtcactgaaagatctgtgtcttctaggcaggcgcaaaaggtagctacacctcttcctgacccaatggcttctagaaatgtgatagcaacagaaacttcctatgtcacagggtccactatgccaccaaccactgtgatcctgggtcctagccagccacagagccttattgtgacagagagggtgtatgctccagcttctaccttggtagatcagccttatgctaatgaaggtacagttgtggtcactgaaagagtaatacagcctcatgggggtggatcgaatcctctggaaggcactcagcatcttcaagatgtaccttacgtcatggtgagggaaagagagagcttccttgcccccagctcaggtgtgcagcctactctggccatgcctaatatagcagtaggacagaatgtgacagtgacagaaagagttctagcacctgcttccactctgcaatccagttaccagattcccactgaaaattctatgacggctaggaacaccacggtgtctggagctggagtccctggccctctgccagattttggtttagaggaatctggtcattctaattctaccataaccacatcttccaccagagtcaccaagcatagcactgtacagcattcttactcctaaacagcagtcagccacaaactgacccagagtttaattagcagtgactaatttcatgtttccaatgtacctgatttttcatgagccttacagacacacagagacacatacacattgatcttaaaatttttctcagtcactgatatgcaaaggaccacactgtctctgcttccaggagtattttagaaatgttccacaatttactgaagacatagagatgatgctgctgcttaggtgccttttagcaagctatgcaaacaatcctgataaaacaagatacatagagagtcaatctggcttctgagaatttaccaagtgaacagagtacctagttcatcagccgtccagtaaagcaacccaggaaactgactgggtctctttgcctaccgtattaacattaaacattgatgttctgtattctgtactttactgcacccagcagactttcaacaactcattgatccaaagatacatgcacagtctgagcaccagctatggtgctcataacttctttaagacttgaaccctttcaatctgtgtgattcattaaattggaccattgatgataagaatacacattgtatgtttctgtgcacatgacagtgtgtgtgtgtgcacgtacatactgtatagtcttaaaaatagcattatactggccaggggtggtggctaacgcctgtaatcccagcactttgggagtgggaggctgaggcaggagaatcacttgaacccgggaggcggaggttgcagtgagccgagatcgcaccattgcactccagtctgggcaacagagtgagattccgtctcaaaaaaaaaaagaaaaggaaaaaaaaatagcattatacctcttccttgtctcaaccgccatgaaaattctgaacactccaaattcagttgaataatccaaaacaaaatttataagtataaaataattttacttcttatagtaatagtatactttaaaaagcctcagggtatattatcttctaaacagctacaattcagtgcagctacattaaccaactatgttctctagttgagaacaactaggcctatttcactgctgtgtagcctcagtgcctaacatgggtgccaaataaatattcgtagaattacactgaattgtaaaaaccattcgttttggtttacaattgccaaaaatctcaaaaggccctgtatttatgtaattctttgaaattattattttattttgatttctcagttattgactggctgggtgtgacttagtacataagtactcaatattataaaaacctcaaataattgacttgattttacacaacatccttcccttttctacaagttaatttttttacaaatcatttgggttatctcctaaataggttatattttattgcttctagaaacaatgtttcaaaatatatgtgcattatcagtaataatttgtataaatatttcccacaacaattttcataattttcaaagactaatttcttgactgaagatattttgctagggaagtgaaactttaaaattttgtagattttaaaaaatattgttgaatggtgtcatgcaaaggatttatatagtgtgctcccactaactgtgtacagatcaggacacatatttttagacatctaagtctgtagcttaaatggaggttactcttccatcatctagaattgtttacttagtaattgttgtttcttttattattatagacttactatcagttttattttgccaagtatgcaacaggtatatcactagtatatgaaaatgtaaatatcacttgtgtactcaaacaaaagttggtcttaagcttccaccttgagcagccttggaaacctaacctgcctcttttagcataatcacattttctaaatgattttctttgttcctgaaaaagtgatttgtattagttttacatttgttttttggaagattatatttgtatatgtatcatcataaaatatttaaataaaaagtatctttagagtga

SEQ ID NO: 362307 - DNA, 4391 bp, Homo sapiens
ggctgcgtaaaccgggaccacggggaaaagttttaccggagcaataattcgttcgcaaaccccaaacggtcggttcatatgtaaaattagaagatagagataattggatctctgtggattctgtcacatctgaaattaaacttgcaaaacttcctgattttgaatctagatatgttcaaaatggcacatacactgtaaagattgtggccatatcagaagattatcctagaaaaaccatcactggcacagtccttatcaatgttgaagacatcaacgacaactgtcccacactgatagagcctgtgcagacaatctgtcacgatgcagagtatgtgaatgttactgcagaggacctggatggacacccaaacagtggccctttcagtttctccgtcattgacaaaccacctggcatggcagaaaaatggaaaatagcacgccaagaaagtaccagtgtgctgctgcaacaaagtgagaaaaagcttgggagaagtgaaattcagttcctgatttcagacaatcagggttttagttgtcctgaaaagcaggtccttacactcacagtttgtgagtgtctgcatggcagcggctgcagggaagcacagcatgactcctatgtgggcctgggacccgcagcaattgcgctcatgattttggcctttctgctcctgctattggtaccacttttactgctgatgtgccattgcggaaagggcgccaaaggctttacccccatacctggcaccatagagatgctgcatccttggaataatgaaggagcaccacctgaagacaaggtggtgccatcatttctgccagtggatcaagggggcagtctagtaggaagaaatggagtaggaggtatggccaaggaagccacgatgaaaggaagtagctctgcttccattgtcaaagggcaacatgagatgtccgagatggatggaaggtgggaagaacacagaagcctgctttctggtagagctacccagtttacaggggccacaggcgctatcatgaccactgaaaccacgaagaccgcaagggccacaggggcttccagagacatggccggagctcaggcagctgctgttgcactgaacgaagaattcttaagaaattatttcactgataaagcggcctcttacactgaggaagatgaaaatcacacagccaaagattgccttctggtttattctcaggaagaaactgaatcgctgaatgcttctattggttgttgcagttttattgaaggagagctagatgaccgcttcttagatgatttgggacttaaattcaagacactagctgaagtttgcctgggtcaaaaaatagatataaataaggaaattgagcagagacaaaaacctgccacagaaacaagtatgaacacagcttcacattcactctgtgagcaaactatggttaattcagagaatacctactcctctggcagtagcttcccagttccaaaatctttgcaagaagccaatgcagagaaagtaactcaggaaatagtcactgaaagatctgtgtcttctaggcaggcgcaaaaggtagctacacctcttcctgacccaatggcttctagaaatgtgatagcaacagaaacttcctatgtcacagggtccactatgccaccaaccactgtgatcctgggtcctagccagccacagagccttattgtgacagagagggtgtatgctccagcttctaccttggtagatcagccttatgctaatgaaggtacagttgtggtcactgaaagagtaatacagcctcatgggggtggatcgaatcctctggaaggcactcagcatcttcaagatgtaccttacgtcatggtgagggaaagagagagcttccttgcccccagctcaggtgtgcagcctactctggccatgcctaatatagcagtaggacagaatgtgacagtgacagaaagagttctagcacctgcttccactctgcaatccagttaccagattcccactgaaaattctatgacggctaggaacaccacggtgtctggagctggagtccctggccctctgccagattttggtttagaggaatctggtcattctaattctaccataaccacatcttccaccagagtcaccaagcatagcactgtacagcattcttactcctaaacagcagtcagccacaaactgacccagagtttaattagcagtgactaatttcatgtttccaatgtacctgatttttcatgagccttacagacacacagagacacatacacattgatcttaaaatttttctcagtcactgatatgcaaaggaccacactgtctctgcttccaggagtattttagaaatgttccacaatttactgaagacatagagatgatgctgctgcttaggtgccttttagcaagctatgcaaacaatcctgataaaacaagatacatagagagtcaatctggcttctgagaatttaccaagtgaacagagtacctagttcatcagccgtccagtaaagcaacccaggaaactgactgggtctctttgcctaccgtattaacattaaacattgatgttctgtattctgtactttactgcacccagcagactttcaacaactcattgatccaaagatacatgcacagtctgagcaccagctatggtgctcataacttctttaagacttgaaccctttcaatctgtgtgattcattaaattggaccattgatgataagaatacacattgtatgtttctgtgcacatgacagtgtgtgtgtgtgcacgtacatactgtatagtcttaaaaatagcattatactggccaggggtggtggctaacgcctgtaatcccagcactttgggaggccgaggcgggtggatcaactgtggtcaggagtttgagatcagccaggccaacctggtgaaaccccgtctctactaaaaatacaaaaattagctgggcgtgatggtgggcgcctgtaatcccagctacttgggaggctgaggcaggagaatcacttgaacccgggaggcggaggttgcagtgagccgagatcgcaccattgcactccagtctgggcaacagagtgagattccgtctcaaaaaaaaaaagaaaaggaaaaaaaaatagcattatacctcttccttgtctcaaccgccatgaaaattctgaacactccaaattcagttgaataatccaaaacaaaatttataagtataaaataattttacttcttatagtaatagtatactttaaaaagcctcagggtatattatcttctaaacagctacaattcagtgcagctacattaaccaactatgttctctagttgagaacaactaggcctatttcactgctgtgtagcctcagtgcctaacatgggtgccaaataaatattcgtagaattacactgaattgtaaaaaccattcgttttggtttacaattgccaaaaatctcaaaaggccctgtatttatgtaattctttgaaattattattttattttgatttctcagttattgactggctgggtgtgacttagtacataagtactcaatattataaaaacctcaaataattgacttgattttacacaacatccttcccttttctacaagttaatttttttacaaatcatttgggttatctcctaaataggttatattttattgcttctagaaacaatgtttcaaaatatatgtgcattatcagtaataatttgtataaatatttcccacaacaattttcataattttcaaagactaatttcttgactgaagatattttgctagggaagtgaaactttaaaattttgtagattttaaaaaatattgttgaatggtgtcatgcaaaggatttatatagtgtgctcccactaactgtgtacagatcaggacacatatttttagacatctaagtctgtagcttaaatggaggttactcttccatcatctagaattgtttacttagtaattgttgtttcttttattattatagacttactatcagttttattttgccaagtatgcaacaggtatatcactagtatatgaaaatgtaaatatcacttgtgtactcaaacaaaagttggtcttaagcttccaccttgagcagccttggaaacctaacctgcctcttttagcataatcacattttctaaatgattttctttgttcctgaaaaagtgatttgtattagttttacatttgttttttggaagattatatttgtatatgtatcatcataaaatatttaaataaaaagtatctttagagtgaaaaaaaaaaaaaaaaaaaaatggtgggctgggccgaaaattaaaacatggggggggcgaaggagggaggagggcaggacggggaaagggttccaaaaaagggggggttgaacagggggggggaagggc

SEQ ID NO: 362308 - DNA, 4011 bp, Homo sapiens
gatcagctcgcccgtctatcttctgaatcccggcatggcagaaaaatggaaatagcacgccaagaaagtaccagtgtgctgctgcaacaaagtgagaaaaagcttgggagaagtgaaattcagttcctgatttcagacaatcagggttttagttgtcctgaaaagcaggtccttacactcacagtttgtgagtgtctgcatggcagcggctgcagggaagcacagcatgactcctatgtgggcctgggacccgcagcaattgcgctcatgattttggcctttctgctcctgctattggtaccacttttactgctgatgtgccattgcggaaagggcgccaaaggctttacccccatacctggcaccatagagatgctgcatccttggaataatgaaggagcaccacctgaagacaaggtggtgccatcatttctgccagtggatcaagggggcagtctagtaggaagaaatggagtaggaggtatggccaaggaagccacgatgaaaggaagtagctctgcttccattgtcaaagggcaacatgagatgtccgagatggatggaaggtgggaagaacacagaagcctgctttctggtagagctacccagtttacaggggccacaggcgctatcatgaccactgaaaccacgaagaccgcaagggccacaggggcttccagagacatggccggagctcaggcagctgctgttgcactgaacgaagaattcttaagaaattatttcactgataaagcggcctcttacactgaggaagatgaaaatcacacagccaaagattgccttctggtttattctcaggaagaaactgaatcgctgaatgcttctattggttgttgcagttttattgaaggagagctagatgaccgcttcttagatgatttgggacttaaattcaagacactagctgaagtttgcctgggtcaaaaaatagatataaataaggaaattgagcagagacaaaaacctgccacagaaacaagtatgaacacagcttcacattcactctgtgagcaaactatggttaattcagagaatacctactcctctggcagtagcttcccagttccaaaatctttgcaagaagccaatgcagagaaagtaactcaggaaatagtcactgaaagatctgtgtcttctaggcaggcgcaaaaggtagctacacctcttcctgacccaatggcttctagaaatgtgatagcaacagaaacttcctatgtcacagggtccactatgccaccaaccactgtgatcctgggtcctagccagccacagagccttattgtgacagagagggtgtatgctccagcttctaccttggtagatcagccttatgctaatgaaggtacagttgtggtcactgaaagagtaatacagcctcatgggggtggatcgaatcctctggaaggcactcagcatcttcaagatgtaccttacgtcatggtgagggaaagagagagcttccttgcccccagctcaggtgtgcagcctactctggccatgcctaatatagcagtaggacagaatgtgacagtgacagaaagagttctagcacctgcttccactctgcaatccagttaccagattcccactgaaaattctatgacggctaggaacaccacggtgtctggagctggagtccctggccctctgccagattttggtttagaggaatctggtcattctaattctaccataaccacatcttccaccagagtcaccaagcatagcactgtacagcattcttactcctaaacagcagtcagccacaaactgacccagagtttaattagcagtgactaatttcatgtttccaatgtacctgatttttcatgagccttacagacacacagagacacatacacattgatcttaaaatttttctcagtcactgatatgcaaaggaccacactgtctctgcttccaggagtattttagaaatgttccacaatttactgaagacatagagatgatgctgctgcttaggtgccttttagcaagctatgcaaacaatcctgataaaacaagatacatagagagtcaatctggcttctgagaatttaccaagtgaacagagtacctagttcatcagccgtccagtaaagcaacccaggaaactgactgggtctctttgcctaccgtattaacattaaacattgatgttctgtattctgtactttactgcacccagcagactttcaacaactcattgatccaaagatacatgcacagtctgagcaccagctatggtgctcataacttctttaagacttgaaccctttcaatctgtgtgattcattaaattggaccattgatgataagaatacacattgtatgtttctgtgcacatgacagtgtgtgtgtgtgcacgtacatactgtatagtcttaaaaatagcattatactggccaggggtggtggctaacgcctgtaatcccagcactttgggaggccgaggcgggtggatcaactgtggtcaggagtttgagatcagccaggccaacctggtgaaaccccgtctctactaaaaatacaaaaattagctgggcgtgatggtgggcgcctgtaatcccagctacttgggaggctgaggcaggagaatcacttgaacccgggaggcggaggttgcagtgagccgagatcgcaccattgcactccagtctgggcaacagagtgagattccgtctcaaaaaaaaaaagaaaaggaaaaaaaaatagcattatacctcttccttgtctcaaccgccatgaaaattctgaacactccaaattcagttgaataatccaaaacaaaatttataagtataaaataattttacttcttatagtaatagtatactttaaaaagcctcagggtatattatcttctaaacagctacaattcagtgcagctacattaaccaactatgttctctagttgagaacaactaggcctatttcactgctgtgtagcctcagtgcctaacatgggtgccaaataaatattcgtagaattacactgaattgtaaaaaccattcgttttggtttacaattgccaaaaatctcaaaaggccctgtatttatgtaattctttgaaattattattttattttgatttctcagttattgactggctgggtgtgacttagtacataagtactcaatattataaaaacctcaaataattgacttgattttacacaacatccttcccttttctacaagttaatttttttacaaatcatttgggttatctcctaaataggttatattttattgcttctagaaacaatgtttcaaaatatatgtgcattatcagtaataatttgtataaatatttcccacaacaattttcataattttcaaagactaatttcttgactgaagatattttgctagggaagtgaaactttaaaattttgtagattttaaaaaatattgttgaatggtgtcatgcaaaggatttatatagtgtgctcccactaactgtgtacagatcaggacacatatttttagacatctaagtctgtagcttaaatggaggttactcttccatcatctagaattgtttacttagtaattgttgtttcttttattattatagacttactatcagttttattttgccaagtatgcaacaggtatatcactagtatatgaaaatgtaaatatcacttgtgtactcaaacaaaagttggtcttaagcttccaccttgagcagccttggaaacctaacctgcctcttttagcataatcacattttctaaatgattttctttgttcctgaaaaagtgatttgtattagttttacatttgttttttggaagattatatttgtatatgtatcatcataaaatatttaaataaaaagtatctttagagtgaaaaaaaaaaaaaaaaaaaaatggtgggctgggccgaaaattaaaacatggggggggcgaaggagggaggagggcaggacggggaaagggttccaaaaaagggggggttgaacagggggggggaagggc

SEQ ID NO: 362309 - DNA, 4149 bp, Homo sapiens
agggctctgaaattgttatatgtttcactttattatttctaattactgttttcaatagtacatatatttttgcaacagtgatttttttttaattggaccatagttttaaaaaaattaatctttaagctggttttgatgatttggatactatctgaacctagtcttggtattccactcagcagccacagacagcctctttttgatgaacaaggccttgaatctgtaagactccctcatcctgccttcgggttttggagtaattcacccaaaacaagcttggtaaggttggatcagggtgaagaaaagaaaaatagagctgtaaataagtgaagacaagtccaggaagggacatgcaaattccaaaattgtgcaatataaatttagaaatatatcaaggttaaccttatctgtgttcaattttgtgtctgtacagtggtaccacttttactgctgatgtgccattgcggaaagggcgccaaaggctttacccccatacctggcaccatagagatgctgcatccttggaataatgaaggagcaccacctgaagacaaggtggtgccatcatttctgccagtggatcaagggggcagtctagtaggaagaaatggagtaggaggtatggccaaggaagccacgatgaaaggaagtagctctgcttccattgtcaaagggcaacatgagatgtccgagatggatggaaggtgggaagaacacagaagcctgctttctggtagagctacccagtttacaggggccacaggcgctatcatgaccactgaaaccacgaagaccgcaagggccacaggggcttccagagacatggccggagctcaggcagctgctgttgcactgaacgaagaattcttaagaaattatttcactgataaagcggcctcttacactgaggaagatgaaaatcacacagccaaagattgccttctggtttattctcaggaagaaactgaatcgctgaatgcttctattggttgttgcagttttattgaaggagagctagatgaccgcttcttagatgatttgggacttaaattcaagacactagctgaagtttgcctgggtcaaaaaatagatataaataaggaaattgagcagagacaaaaacctgccacagaaacaagtatgaacacagcttcacattcactctgtgagcaaactatggttaattcagagaatacctactcctctggcagtagcttcccagttccaaaatctttgcaagaagccaatgcagagaaagtaactcaggaaatagtcactgaaagatctgtgtcttctaggcaggcgcaaaaggtagctacacctcttcctgacccaatggcttctagaaatgtgatagcaacagaaacttcctatgtcacagggtccactatgccaccaaccactgtgatcctgggtcctagccagccacagagccttattgtgacagagagggtgtatgctccagcttctaccttggtagatcagccttatgctaatgaaggtacagttgtggtcactgaaagagtaatacagcctcatgggggtggatcgaatcctctggaaggcactcagcatcttcaagatgtaccttacgtcatggtgagggaaagagagagcttccttgcccccagctcaggtgtgcagcctactctggccatgcctaatatagcagtaggacagaatgtgacagtgacagaaagagttctagcacctgcttccactctgcaatccagttaccagattcccactgaaaattctatgacggctaggaacaccacggtgtctggagctggagtccctggccctctgccagattttggtttagaggaatctggtcattctaattctaccataaccacatcttccaccagagtcaccaagcatagcactgtacagcattcttactcctaaacagcagtcagccacaaactgacccagagtttaattagcagtgactaatttcatgtttccaatgtacctgatttttcatgagccttacagacacacagagacacatacacattgatcttaaaatttttctcagtcactgatatgcaaaggaccacactgtctctgcttccaggagtattttagaaatgttccacaatttactgaagacatagagatgatgctgctgcttaggtgccttttagcaagctatgcaaacaatcctgataaaacaagatacatagagagtcaatctggcttctgagaatttaccaagtgaacagagtacctagttcatcagccgtccagtaaagcaacccaggaaactgactgggtctctttgcctaccgtattaacattaaacattgatgttctgtattctgtactttactgcacccagcagactttcaacaactcattgatccaaagatacatgcacagtctgagcaccagctatggtgctcataacttctttaagacttgaaccctttcaatctgtgtgattcattaaattggaccattgatgataagaatacacattgtatgtttctgtgcacatgacagtgtgtgtgtgtgcacgtacatactgtatagtcttaaaaatagcattatactggccaggggtggtggctaacgcctgtaatcccagcactttgggaggccgaggcgggtggatcaactgtggtcaggagtttgagatcagccaggccaacctggtgaaaccccgtctctactaaaaatacaaaaattagctgggcgtgatggtgggcgcctgtaatcccagctacttgggaggctgaggcaggagaatcacttgaacccgggaggcggaggttgcagtgagccgagatcgcaccattgcactccagtctgggcaacagagtgagattccgtctcaaaaaaaaaaagaaaaggaaaaaaaaatagcattatacctcttccttgtctcaaccgccatgaaaattctgaacactccaaattcagttgaataatccaaaacaaaatttataagtataaaataattttacttcttatagtaatagtatactttaaaaagcctcagggtatattatcttctaaacagctacaattcagtgcagctacattaaccaactatgttctctagttgagaacaactaggcctatttcactgctgtgtagcctcagtgcctaacatgggtgccaaataaatattcgtagaattacactgaattgtaaaaaccattcgttttggtttacaattgccaaaaatctcaaaaggccctgtatttatgtaattctttgaaattattattttattttgatttctcagttattgactggctgggtgtgacttagtacataagtactcaatattataaaaacctcaaataattgacttgattttacacaacatccttcccttttctacaagttaatttttttacaaatcatttgggttatctcctaaataggttatattttattgcttctagaaacaatgtttcaaaatatatgtgcattatcagtaataatttgtataaatatttcccacaacaattttcataattttcaaagactaatttcttgactgaagatattttgctagggaagtgaaactttaaaattttgtagattttaaaaaatattgttgaatggtgtcatgcaaaggatttatatagtgtgctcccactaactgtgtacagatcaggacacatatttttagacatctaagtctgtagcttaaatggaggttactcttccatcatctagaattgtttacttagtaattgttgtttcttttattattatagacttactatcagttttattttgccaagtatgcaacaggtatatcactagtatatgaaaatgtaaatatcacttgtgtactcaaacaaaagttggtcttaagcttccaccttgagcagccttggaaacctaacctgcctcttttagcataatcacattttctaaatgattttctttgttcctgaaaaagtgatttgtattagttttacatttgttttttggaagattatatttgtatatgtatcatcataaaatatttaaataaaaagtatctttagagtgaaaaaaaaaaaaaaaaaaaaatggtgggctgggccgaaaattaaaacatggggggggcgaaggagggaggagggcaggacggggaaagggttccaaaaaagggggggttgaacagggggggggaagggc

SEQ ID NO: 362310 - DNA, 2017 bp, Homo sapiens
cggggtgactctacaggatctcggcagctatccggttccctgataaaacaagatacatagagagtcaatctggcttctgagaatttaccaagtgaacagagtacctagttcatcagccgtccagtaaagcaacccaggaaactgactgggtctctttgcctaccgtattaacattaaacattgatgttctgtattctgtactttactgcacccagcagactttcaacaactcattgatccaaagatacatgcacagtctgagcaccagctatggtgctcataacttctttaagacttgaaccctttcaatctgtgtgattcattaaattggaccattgatgataagaatacacattgtatgtttctgtgcacatgacagtgtgtgtgtgtgcacgtacatactgtatagtcttaaaaatagcattatactggccaggggtggtggctaacgcctgtaatcccagcactttgggaggccgaggcgggtggatcaactgtggtcaggagtttgagatcagccaggccaacctggtgaaaccccgtctctactaaaaatacaaaaattagctgggcgtgatggtgggcgcctgtaatcccagctacttgggaggctgaggcaggagaatcacttgaacccgggaggcggaggttgcagtgagccgagatcgcaccattgcactccagtctgggcaacagagtgagattccgtctcaaaaaaaaaaagaaaaggaaaaaaaaatagcattatacctcttccttgtctcaaccgccatgaaaattctgaacactccaaattcagttgaataatccaaaacaaaatttataagtataaaataattttacttcttatagtaatagtatactttaaaaagcctcagggtatattatcttctaaacagctacaattcagtgcagctacattaaccaactatgttctctagttgagaacaactaggcctatttcactgctgtgtagcctcagtgcctaacatgggtgccaaataaatattcgtagaattacactgaattgtaaaaaccattcgttttggtttacaattgccaaaaatctcaaaaggccctgtatttatgtaattctttgaaattattattttattttgatttctcagttattgactggctgggtgtgacttagtacataagtactcaatattataaaaacctcaaataattgacttgattttacacaacatccttcccttttctacaagttaatttttttacaaatcatttgggttatctcctaaataggttatattttattgcttctagaaacaatgtttcaaaatatatgtgcattatcagtaataatttgtataaatatttcccacaacaattttcataattttcaaagactaatttcttgactgaagatattttgctagggaagtgaaactttaaaattttgtagattttaaaaaatattgttgaatggtgtcatgcaaaggatttatatagtgtgctcccactaactgtgtacagatcaggacacatatttttagacatctaagtctgtagcttaaatggaggttactcttccatcatctagaattgtttacttagtaattgttgtttcttttattattatagacttactatcagttttattttgccaagtatgcaacaggtatatcactagtatatgaaaatgtaaatatcacttgtgtactcaaacaaaagttggtcttaagcttccaccttgagcagccttggaaacctaacctgcctcttttagcataatcacattttctaaatgattttctttgttcctgaaaaagtgatttgtattagttttacatttgttttttggaagattatatttgtatatgtatcatcataaaatatttaaataaaaagtatctttagagtgaaaaaaaaaaaaaaaaaaaaatggtgggctgggccgaaaattaaaacatggggggggcgaaggagggaggagggcaggacggggaaagggttccaaaaaagggggggttgaacagggggggggaagggc

SEQ ID NO: 362311 - DNA, 1571 bp, Homo sapiens
cttggctcagtaaatcctctgcctcccgacctcaagcaatcctcccacctgagcctcctgagtagctgggactacaggcgtgcaccaccacacccagctaatttttgcattcgtttgtagagacagggtttctccatgttgcccaggcttgtcttgagtgggaggctgaggcaggagaatcacttgaacccgggaggcggaggttgcagtgagccgagatcgcaccattgcactccagtctgggcaacagagtgagattccgtctcaaaaaaaaaaagaaaaggaaaaaaaaatagcattatacctcttccttgtctcaaccgccatgaaaattctgaacactccaaattcagttgaataatccaaaacaaaatttataagtataaaataattttacttcttatagtaatagtatactttaaaaagcctcagggtatattatcttctaaacagctacaattcagtgcagctacattaaccaactatgttctctagttgagaacaactaggcctatttcactgctgtgtagcctcagtgcctaacatgggtgccaaataaatattcgtagaattacactgaattgtaaaaaccattcgttttggtttacaattgccaaaaatctcaaaaggccctgtatttatgtaattctttgaaattattattttattttgatttctcagttattgactggctgggtgtgacttagtacataagtactcaatattataaaaacctcaaataattgacttgattttacacaacatccttcccttttctacaagttaatttttttacaaatcatttgggttatctcctaaataggttatattttattgcttctagaaacaatgtttcaaaatatatgtgcattatcagtaataatttgtataaatatttcccacaacaattttcataattttcaaagactaatttcttgactgaagatattttgctagggaagtgaaactttaaaattttgtagattttaaaaaatattgttgaatggtgtcatgcaaaggatttatatagtgtgctcccactaactgtgtacagatcaggacacatatttttagacatctaagtctgtagcttaaatggaggttactcttccatcatctagaattgtttacttagtaattgttgtttcttttattattatagacttactatcagttttattttgccaagtatgcaacaggtatatcactagtatatgaaaatgtaaatatcacttgtgtactcaaacaaaagttggtcttaagcttccaccttgagcagccttggaaacctaacctgcctcttttagcataatcacattttctaaatgattttctttgttcctgaaaaagtgatttgtattagttttacatttgttttttggaagattatatttgtatatgtatcatcataaaatatttaaataaaaagtatctttagagtgaaaaaaaaaaaaaaaaaaaaatggtgggctgggccgaaaattaaaacatggggggggcgaaggagggaggagggcaggacggggaaagggttccaaaaaagggggggttgaacagggggggggaagggc

SEQ ID NO: 362312 - DNA, 1380 bp, Homo sapiens
gagaatgtgtgttccatcaaaaatatttaaaatacagaattttttgggatggtaaaaaaaaaaaaaaaaaaaaaaaaaaaaaaaaagaaaaggaaaaaaaaatagcattatacctcttccttgtctcaaccgccatgaaaattctgaacactccaaattcagttgaataatccaaaacaaaatttataagtataaaataattttacttcttatagtaatagtatactttaaaaagcctcagggtatattatcttctaaacagctacaattcagtgcagctacattaaccaactatgttctctagttgagaacaactaggcctatttcactgctgtgtagcctcagtgcctaacatgggtgccaaataaatattcgtagaattacactgaattgtaaaaaccattcgttttggtttacaattgccaaaaatctcaaaaggccctgtatttatgtaattctttgaaattattattttattttgatttctcagttattgactggctgggtgtgacttagtacataagtactcaatattataaaaacctcaaataattgacttgattttacacaacatccttcccttttctacaagttaatttttttacaaatcatttgggttatctcctaaataggttatattttattgcttctagaaacaatgtttcaaaatatatgtgcattatcagtaataatttgtataaatatttcccacaacaattttcataattttcaaagactaatttcttgactgaagatattttgctagggaagtgaaactttaaaattttgtagattttaaaaaatattgttgaatggtgtcatgcaaaggatttatatagtgtgctcccactaactgtgtacagatcaggacacatatttttagacatctaagtctgtagcttaaatggaggttactcttccatcatctagaattgtttacttagtaattgttgtttcttttattattatagacttactatcagttttattttgccaagtatgcaacaggtatatcactagtatatgaaaatgtaaatatcacttgtgtactcaaacaaaagttggtcttaagcttccaccttgagcagccttggaaacctaacctgcctcttttagcataatcacattttctaaatgattttctttgttcctgaaaaagtgatttgtattagttttacatttgttttttggaagattatatttgtatatgtatcatcataaaatatttaaataaaaagtatctttagagtgaaaaaaaaaaaaaaaaaaaaatggtgggctgggccgaaaattaaaacatggggggggcgaaggagggaggagggcaggacggggaaagggttccaaaaaagggggggttgaacagggggggggaagggc

SEQ ID NO: 362313 - DNA, 2523 bp, Homo sapiens
tcgagggtgcgatggcgcggacgcgggacgcgcgtacgccctgctgcttctcctgatctgctttaacgttggaagtggacttcacttacaggtcttaagcacaagaaatgaaaataagctgcttcctaaacatcctcatttagtgcggcaaaagcgcgcctggatcaccgcccccgtggctcttcgggagggagaggatctgtccaagaagaatccaattgccaagatacattctgatcttgcagaagaaagaggactcaaaattacttacaaatacactggaaaagggattacagagccaccttttggtatatttgtctttaacaaagatactggagaactgaatgttaccagcattcttgatcgagaagaaacaccattttttctgctaacaggttacgctttggatgcaagaggaaacaatgtagagaaacccttagagctacgcattaaggttcttgatatcaatgacaacgaaccagtgttcacacaggatgtctttgttgggtctgttgaagagttgagtgcagcacatactcttgtgatgaaaatcaatgcaacagatgcagatgagcccaataccctgaattcgaaaatttcctatagaatcgtatctctggagcctgcttatcctccagtgttctacctaaataaagatacaggagagatttatacaaccagtgttaccttggacagagaggaacacagcagctacactttgacagtagaagcaagagatggcaatggagaagttacagacaaacctgtaaaacaagctcaagttcagattcgtattttggatgtcaatgacaatatacctgtagtagaaaataaagtgcttgaagggatggttgaagaaaatcaagtcaatgtagaagttacgcgcataaaagtgttcgatgcagatgaaataggttctgataattggctggcaaattttacatttgcatcaggaaatgaaggaggttatttccacatagaaacagatgctcaaactaacgaaggaattgtgacccttattaaggaagtagattatgaagaaatgaagaatcttgacttcagtgttattgtcgctaataaagcagcttttcacaagtcgattaggagtaaatacaagcctacacccattcccatcaaggtcaaagtgaaaaatgtgaaagaaggcattcattttaaaagcagcgtcatctcaatttatgttagcgagagcatggatagatcaagcaaaggccaaataattggaaattttcaagcttttgatgaggacactggactaccagcccatgcaagatatgtaaaattagaagatagagataattggatctctgtggattctgtcacatctgaaattaaacttgcaaaacttcctgattttgaatctagatatgttcaaaatggcacatacactgtaaagattgtggccatatcagaagattatcctagaaaaaccatcactggcacagtccttatcaatgttgaagacatcaacgacaactgtcccacactgatagagcctgtgcagacaatctgtcacgatgcagagtatgtgaatgttactgcagaggacctggatggacacccaaacagtggccctttcagtttctccgtcattgacaaaccacctggcatggcagaaaaatggaaaatagcacgccaagaaagtaccagtgtgctgctgcaacaaagtgagaaaaagcttgggagaagtgaaattcagttcctgatttcagacaatcagggttttagttgtcctgaaaagcaggtccttacactcacagtttgtgagtgtctgcatggcagcggctgcagggaagcacagcatgactcctatgtgggcctgggacccgcagcaattgcgctcatgattttggcctttctgctcctgctattggtaccacttttactgctgatgtgccattgcggaaagggcgccaaaggctttacccccatacctggcaccatagagatgctgcatccttggaataatgaaggagcaccacctgaagacaaggtggtgccatcatttctgccagtggatcaagggggcagtctagtaggaagaaatggagtaggaggtatggccaaggaagccacgatgaaaggaagtagctctgcttccattgtcaaagggcaacatgagatgtccgagatggatggaaggtgggaagaacacagaagcctgctttctggtagagctacccagtttacaggggccacaggcgctatcatgaccactgaaaccacgaagaccgcaagggccacaggggcttccagagacatggccggagctcaggcagctgctgttgcactgaacgaagaattcttaagaaattatttcactgataaagcggcctcttacactgaggaagatgaaaatcacacagccaaagattgccttctggtttattctcaggaagaaactgaatcgctgaatgcttctattggttgttgcagttttattgaagggtttcgatgacagggtttagatgaagggtttgatgagggttgatgagggtttgatga

SEQ ID NO: 362314 - DNA, 1050 bp, Homo sapiens
tcgagggtgcgatggcgcggacgcgggacgcgcgtacgccctgctgcttctcctgatctgctttaacgttggaagtggacttcacttacaggtcttaagcacaagaaatgaaaataagctgcttcctaaacatcctcatttagtgcggcaaaagcgcgcctggatcaccgcccccgtggctcttcgggagggagaggatctgtccaagaagaatccaattgccaagatacattctgatcttgcagaagaaagaggactcaaaattacttacaaatacactggaaaagggattacagagccaccttttggtatatttgtctttaacaaagatactggagaactgaatgttaccagcattcttgatcgagaagaaacaccattttttctgctaacaggttacgctttggatgcaagaggaaacaatgtagagaaacccttagagctacgcattaaggttcttgatatcaatgacaacgaaccagtgttcacacaggatgtctttgttgggtctgttgaagagttgagtgcagcacatactcttgtgatgaaaatcaatgcaacagatgcagatgagcccaataccctgaattcgaaaatttcctatagaatcgtatctctggagcctgcttatcctccagtgttctacctaaataaagatacaggagagatttatacaaccagtgttaccttggacagagaggtaagttaatatgttatgttgcccatctttaaactctctatcctttccagtttctcctctccttttctaattttcttattttgttctgtattccttatccataggataactcttggaattactctcttttagggatgtgctgtccaatatgggccatgtgactattgagcacttaaaatgtgactggcccaaattgtaatgtgctgtatgcacgttgaatgtgtaatatatgcaccagatttgaaaaacttaatatgaaaaatgcaaaatatgaccttaatgttttttgtgatcattgcatgttaaaataatattttagatatcatagattaaataaaatatacttgttt

SEQ ID NO: 362315 - DNA, 292 bp, Homo sapiens
tgcctcttttagcataatcacattttctaaatgattttctttgttcctgaaaaagtgatttgtattagttttacatttgttttttggaagattatatttgtatatgtatcatcataaaatatttaaataaaaagtatctttagagtgaccctttccccatagatttttatttctctattatattttacaaggaatataactcagtttgttagggagagtgccttaaaggcaggtgtttcttggactttgttatttaattagatctgcttgcaataaaaaaagttgtcggtta

SEQ ID NO: 362316 - DNA, 5477 bp, Homo sapiens
tcgagggtgcgatggcgcggacgcgggacgcgcgtacgccctgctgcttctcctgatctgctttaacgttggaagtggacttcacttacaggtcttaagcacaagaaatgaaaataagctgcttcctaaacatcctcatttagtgcggcaaaagcgcgcctggatcaccgcccccgtggctcttcgggagggagaggatctgtccaagaagaatccaattgccaagatacattctgatcttgcagaagaaagaggactcaaaattacttacaaatacactggaaaagggattacagagccaccttttggtatatttgtctttaacaaagatactggagaactgaatgttaccagcattcttgatcgagaagaaacaccattttttctgctaacaggttacgctttggatgcaagaggaaacaatgtagagaaacccttagagctacgcattaaggttcttgatatcaatgacaacgaaccagtgttcacacaggatgtctttgttgggtctgttgaagagttgagtgcagcacatactcttgtgatgaaaatcaatgcaacagatgcagatgagcccaataccctgaattcgaaaatttcctatagaatcgtatctctggagcctgcttatcctccagtgttctacctaaataaagatacaggagagatttatacaaccagtgttaccttggacagagaggaacacagcagctacactttgacagtagaagcaagagatggcaatggagaagttacagacaaacctgtaaaacaagctcaagttcagattcgtattttggatgtcaatgacaatatacctgtagtagaaaataaagtgcttgaagggatggttgaagaaaatcaagtcaatgtagaagttacgcgcataaaagtgttcgatgcagatgaaataggttctgataattggctggcaaattttacatttgcatcaggaaatgaaggaggttatttccacatagaaacagatgctcaaactaacgaaggaattgtgacccttattaaggaagtagattatgaagaaatgaagaatcttgacttcagtgttattgtcgctaataaagcagcttttcacaagtcgattaggagtaaatacaagcctacacccattcccatcaaggtcaaagtgaaaaatgtgaaagaaggcattcattttaaaagcagcgtcatctcaatttatgttagcgagagcatggatagatcaagcaaaggccaaataattggaaattttcaagcttttgatgaggacactggactaccagcccatgcaagatatgtaaaattagaagatagagataattggatctctgtggattctgtcacatctgaaattaaacttgcaaaacttcctgattttgaatctagatatgttcaaaatggcacatacactgtaaagattgtggccatatcagaagattatcctagaaaaaccatcactggcacagtccttatcaatgttgaagacatcaacgacaactgtcccacactgatagagcctgtgcagacaatctgtcacgatgcagagtatgtgaatgttactgcagaggacctggatggacacccaaacagtggccctttcagtttctccgtcattgacaaaccacctggcatggcagaaaaatggaaaatagcacgccaagaaagtaccagtgtgctgctgcaacaaagtgagaaaaagcttgggagaagtgaaattcagttcctgatttcagacaatcagggttttagttgtcctgaaaagcaggtccttacactcacagtttgtgagtgtctgcatggcagcggctgcagggaagcacagcatgactcctatgtgggcctgggacccgcagcaattgcgctcatgattttggcctttctgctcctgctattggtaccacttttactgctgatgtgccattgcggaaagggcgccaaaggctttacccccatacctggcaccatagagatgctgcatccttggaataatgaaggagcaccacctgaagacaaggtggtgccatcatttctgccagtggatcaagggggcagtctagtaggaagaaatggagtaggaggtatggccaaggaagccacgatgaaaggaagtagctctgcttccattgtcaaagggcaacatgagatgtccgagatggatggaaggtgggaagaacacagaagcctgctttctggtagagctacccagtttacaggggccacaggcgctatcatgaccactgaaaccacgaagaccgcaagggccacaggggcttccagagacatggccggagctcaggcagctgctgttgcactgaacgaagaattcttaagaaattatttcactgataaagcggcctcttacactgaggaagatgaaaatcacacagccaaagattgccttctggtttattctcaggaagaaactgaatcgctgaatgcttctattggttgttgcagttttattgaaggagagctagatgaccgcttcttagatgatttgggacttaaattcaagacactagctgaagtttgcctgggtcaaaaaatagatataaataaggaaattgagcagagacaaaaacctgccacagaaacaagtatgaacacagcttcacattcactctgtgagcaaactatggttaattcagagaatacctactcctctggcagtagcttcccagttccaaaatctttgcaagaagccaatgcagagaaagtaactcaggaaatagtcactgaaagatctgtgtcttctaggcaggcgcaaaaggtagctacacctcttcctgacccaatggcttctagaaatgtgatagcaacagaaacttcctatgtcacagggtccactatgccaccaaccactgtgatcctgggtcctagccagccacagagccttattgtgacagagagggtgtatgctccagcttctaccttggtagatcagccttatgctaatgaaggtacagttgtggtcactgaaagagtaatacagcctcatgggggtggatcgaatcctctggaaggcactcagcatcttcaagatgtaccttacgtcatggtgagggaaagagagagcttccttgcccccagctcaggtgtgcagcctactctggccatgcctaatatagcagtaggacagaatgtgacagtgacagaaagagttctagcacctgcttccactctgcaatccagttaccagattcccactgaaaattctatgacggctaggaacaccacggtgtctggagctggagtccctggccctctgccagattttggtttagaggaatctggtcattctaattctaccataaccacatcttccaccagagtcaccaagcatagcactgtacagcattcttactcctaaacagcagtcagccacaaactgacccagagtttaattagcagtgactaatttcatgtttccaatgtacctgatttttcatgagccttacagacacacagagacacatacacattgatcttaaaatttttctcagtcactgatatgcaaaggaccacactgtctctgcttccaggagtattttagaaatgttccacaatttactgaagacatagagatgatgctgctgcttaggtgccttttagcaagctatgcaaacaatcctgataaaacaagatacatagagagtcaatctggcttctgagaatttaccaagtgaacagagtacctagttcatcagccgtccagtaaagcaacccaggaaactgactgggtctctttgcctaccgtattaacattaaacattgatgttctgtattctgtactttactgcacccagcagactttcaacaactcattgatccaaagatacatgcacagtctgagcaccagctatggtgctcataacttctttaagacttgaaccctttcaatctgtgtgattcattaaattggaccattgatgataagaatacacattgtatgtttctgtgcacatgacagtgtgtgtgtgtgcacgtacatactgtatagtcttaaaaatagcattatactggccaggggtggtggctaacgcctgtaatcccagcactttgggaggccgaggcgggtggatcaactgtggtcaggagtttgagatcagccaggccaacctggtgaaaccccgtctctactaaaaatacaaaaattagctgggcgtgatggtgggcgcctgtaatcccagctacttgggaggctgaggcaggagaatcacttgaacccgggaggcggaggttgcagtgagccgagatcgcaccattgcactccagtctgggcaacagagtgagattccgtctcaaaaaaaaaaagaaaaggaaaaaaaaatagcattatacctcttccttgtctcaaccgccatgaaaattctgaacactccaaattcagttgaataatccaaaacaaaatttataagtataaaataattttacttcttatagtaatagtatactttaaaaagcctcagggtatattatcttctaaacagctacaattcagtgcagctacattaaccaactatgttctctagttgagaacaactaggcctatttcactgctgtgtagcctcagtgcctaacatgggtgccaaataaatattcgtagaattacactgaattgtaaaaaccattcgttttggtttacaattgccaaaaatctcaaaaggccctgtatttatgtaattctttgaaattattattttattttgatttctcagttattgactggctgggtgtgacttagtacataagtactcaatattataaaaacctcaaataattgacttgattttacacaacatccttcccttttctacaagttaatttttttacaaatcatttgggttatctcctaaataggttatattttattgcttctagaaacaatgtttcaaaatatatgtgcattatcagtaataatttgtataaatatttcccacaacaattttcataattttcaaagactaatttcttgactgaagatattttgctagggaagtgaaactttaaaattttgtagattttaaaaaatattgttgaatggtgtcatgcaaaggatttatatagtgtgctcccactaactgtgtacagatcaggacacatatttttagacatctaagtctgtagcttaaatggaggttactcttccatcatctagaattgtttacttagtaattgttgtttcttttattattatagacttactatcagttttattttgccaagtatgcaacaggtatatcactagtatatgaaaatgtaaatatcacttgtgtactcaaacaaaagttggtcttaagcttccaccttgagcagccttggaaacctaacctgcctcttttagcataatcacattttctaaatgattttctttgttcctgaaaaagtgatttgtattagttttacatttgttttttggaagattatatttgtatatgtatcatcataaaatatttaaataaaaagtatctttagagtga

SEQ ID NO: 362317 - DNA, 5225 bp, Homo sapiens
tcgagggtgcgatggcgcggacgcgggacgcgcgtacgccctgctgcttctcctgatctgctttaacgttggaagtggacttcacttacaggtcttaagcacaagaaatgaaaataagctgcttcctaaacatcctcatttagtgcggcaaaagcgcgcctggatcaccgcccccgtggctcttcgggagggagaggatctgtccaagaagaatccaattgccaagatacattctgatcttgcagaagaaagaggactcaaaattacttacaaatacactggaaaagggattacagagccaccttttggtatatttgtctttaacaaagatactggagaactgaatgttaccagcattcttgatcgagaagaaacaccattttttctgctaacaggttacgctttggatgcaagaggaaacaatgtagagaaacccttagagctacgcattaaggttcttgatatcaatgacaacgaaccagtgttcacacaggatgtctttgttgggtctgttgaagagttgagtgcagcacatactcttgtgatgaaaatcaatgcaacagatgcagatgagcccaataccctgaattcgaaaatttcctatagaatcgtatctctggagcctgcttatcctccagtgttctacctaaataaagatacaggagagatttatacaaccagtgttaccttggacagagaggaacacagcagctacactttgacagtagaagcaagagatggcaatggagaagttacagacaaacctgtaaaacaagctcaagttcagattcgtattttggatgtcaatgacaatatacctgtagtagaaaataaagtgcttgaagggatggttgaagaaaatcaagtcaatgtagaagttacgcgcataaaagtgttcgatgcagatgaaataggttctgataattggctggcaaattttacatttgcatcaggaaatgaaggaggttatttccacatagaaacagatgctcaaactaacgaaggaattgtgacccttattaaggaagtagattatgaagaaatgaagaatcttgacttcagtgttattgtcgctaataaagcagcttttcacaagtcgattaggagtaaatacaagcctacacccattcccatcaaggtcaaagtgaaaaatgtgaaagaaggcattcattttaaaagcagcgtcatctcaatttatgttagcgagagcatggatagatcaagcaaaggccaaataattggaaattttcaagcttttgatgaggacactggactaccagcccatgcaagatatgtaaaattagaagatagagataattggatctctgtggattctgtcacatctgaaattaaacttgcaaaacttcctgattttgaatctagatatgttcaaaatggcacatacactgtaaagattgtggccatatcagaagattatcctagaaaaaccatcactggcacagtccttatcaatgttgaagacatcaacgacaactgtcccacactgatagagcctgtgcagacaatctgtcacgatgcagagtatgtgaatgttactgcagaggacctggatggacacccaaacagtggccctttcagtttctccgtcattgacaaaccacctggcatggcagaaaaatggaaaatagcacgccaagaaagtaccagtgtgctgctgcaacaaagtgagaaaaagcttgggagaagtgaaattcagttcctgatttcagacaatcagggttttagttgtcctgaaaagcaggtccttacactcacagtttgtgagtgtctgcatggcagcggctgcagggaagcacagcatgactcctatgtgggcctgggacccgcagcaattgcgctcatgattttggcctttctgctcctgctattggtaccacttttactgctgatgtgccattgcggaaagggcgccaaaggctttacccccatacctggcaccatagagatgctgcatccttggaataatgaaggagcaccacctgaagacaaggtggtgccatcatttctgccagtggatcaagggggcagtctagtaggaagaaatggagtaggaggtatggccaaggaagccacgatgaaaggaagtagctctgcttccattgtcaaagggcaacatgagatgtccgagatggatggaaggtgggaagaacacagaagcctgctttctggtagagctacccagtttacaggggccacaggcgctatcatgaccactgaaaccacgaagaccgcaagggccacaggggcttccagagacatggccggagctcaggcagctgctgttgcactgaacgaagaattcttaagaaattatttcactgataaagcggcctcttacactgaggaagatgaaaatcacacagccaaagattgccttctggtttattctcaggaagaaactgaatcgctgaatgcttctattggttgttgcagttttattgaaggagagctagatgaccgcttcttagatgatttgggacttaaattcaagacactagctgaagtttgcctgggtcaaaaaatagatataaataaggaaattgagcagagacaaaaacctgccacagaaacaagtatgaacacagcttcacattcactctgtgagcaaactatggttaattcagagaatacctactcctctggcagtagcttcccagttccaaaatctttgcaagaagccaatgcagagaaagtaactcaggaaatagtcactgaaagatctgtgtcttctaggcaggcgcaaaaggtagctacacctcttcctgacccaatggcttctagaaatgtgatagcaacagaaacttcctatgtcacagggtccactatgccaccaaccactgtgatcctgggtcctagccagccacagagccttattgtgacagagagggtgtatgctccagcttctaccttggtagatcagccttatgctaatgaaggtacagttgtggtcactgaaagagtaatacagcctcatgggggtggatcgaatcctctggaaggcactcagcatcttcaagatgtaccttacgtcatggtgagggaaagagagagcttccttgcccccagctcaggtgtgcagcctactctggccatgcctaatatagcagtaggacagaatgtgacagtgacagaaagagttctagcacctgcttccactctgcaatccagttaccagattcccactgaaaattctatgacggctaggaacaccacggtgtctggagctggagtccctggccctctgccagattttggtttagaggaatctggtcattctaattctaccataaccacatcttccaccagagtcaccaagcatagcactgtacagcattcttactcctaaacagcagtcagccacaaactgacccagagtttaattagcagtgactaatttcatgtttccaatgtacctgatttttcatgagccttacagacacacagagacacatacacattgatcttaaaatttttctcagtcactgatatgcaaaggaccacactgtctctgcttccaggagtattttagaaatgttccacaatttactgaagacatagagatgatgctgctgcttaggtgccttttagcaagctatgcaaacaatcctgataaaacaagatacatagagagtcaatctggcttctgagaatttaccaagtgaacagagtacctagttcatcagccgtccagtaaagcaacccaggaaactgactgggtctctttgcctaccgtattaacattaaacattgatgttctgtattctgtactttactgcacccagcagactttcaacaactcattgatccaaagatacatgcacagtctgagcaccagctatggtgctcataacttctttaagacttgaaccctttcaatctgtgtgattcattaaattggaccattgatgataagaatacacattgtatgtttctgtgcacatgacagtgtgtgtgtgtgcacgtacatactgtatagtcttaaaaatagcattatactggccaggggtggtggctaacgcctgtaatcccagcactttgggaggccgaggcgggtggatcaactgtggtcaggagtttgagatcagccaggccaacctggtgaaaccccgtctctactaaaaatacaaaaattagctgggcgtgatggtgggcgcctgtaatcccagctacttgggaggctgaggcaggagaatcacttgaacccgggaggcggaggttgcagtgagccgagatcgcaccattgcactccagtctgggcaacagagtgagattccgtctcaaaaaaaaaaagaaaaggaaaaaaaaatagcattatacctcttccttgtctcaaccgccatgaaaattctgaacactccaaattcagttgaataatccaaaacaaaatttataagtataaaataattttacttcttatagtaatagtatactttaaaaagcctcagggtatattatcttctaaacagctacaattcagtgcagctacattaaccaactatgttctctagttgagaacaactaggcctatttcactgctgtgtagcctcagtgcctaacatgggtgccaaataaatattcgtagaattacactgaattgtaaaaaccattcgttttggtttacaattgccaaaaatctcaaaaggccctgtatttatgtaattctttgaaattattattttattttgatttctcagttattgactggctgggtgtgacttagtacataagtactcaatattataaaaacctcaaataattgacttgattttacacaacatccttcccttttctacaagttaatttttttacaaatcatttgggttatctcctaaataggttatattttattgcttctagaaacaatgtttcaaaatatatgtgcattatcagtaataatttgtataaatatttcccacaacaattttcttaatccagtctatcactgatagacatttgggttggttccaagtctttgctattgtgaacagtgcttcttggtgccatatttttaacggcacatactcactttgtgtcacattttggtaattctcacaatatttcaaactttttcagtatcatcatgtctgttgtggtatctgtgatcagtgatggtactactcgaattgctttggggtgccacaaaccacacccatataagacagtgaacacagtatagtgtgtctgttctgactgctcatacgtcg

SEQ ID NO: 362318 - DNA, 5186 bp, Homo sapiens
tcgagggtgcgatggcgcggacgcgggacgcgcgtacgccctgctgcttctcctgatctgctttaacgttggaagtggacttcacttacaggtcttaagcacaagaaatgaaaataagctgcttcctaaacatcctcatttagtgcggcaaaagcgcgcctggatcaccgcccccgtggctcttcgggagggagaggatctgtccaagaagaatccaattgccaagatacattctgatcttgcagaagaaagaggactcaaaattacttacaaatacactggaaaagggattacagagccaccttttggtatatttgtctttaacaaagatactggagaactgaatgttaccagcattcttgatcgagaagaaacaccattttttctgctaacaggttacgctttggatgcaagaggaaacaatgtagagaaacccttagagctacgcattaaggttcttgatatcaatgacaacgaaccagtgttcacacaggatgtctttgttgggtctgttgaagagttgagtgcagcacatactcttgtgatgaaaatcaatgcaacagatgcagatgagcccaataccctgaattcgaaaatttcctatagaatcgtatctctggagcctgcttatcctccagtgttctacctaaataaagatacaggagagatttatacaaccagtgttaccttggacagagaggaacacagcagctacactttgacagtagaagcaagagatggcaatggagaagttacagacaaacctgtaaaacaagctcaagttcagattcgtattttggatgtcaatgacaatatacctgtagtagaaaataaagtgcttgaagggatggttgaagaaaatcaagtcaatgtagaagttacgcgcataaaagtgttcgatgcagatgaaataggttctgataattggctggcaaattttacatttgcatcaggaaatgaaggaggttatttccacatagaaacagatgctcaaactaacgaaggaattgtgacccttattaaggaagtagattatgaagaaatgaagaatcttgacttcagtgttattgtcgctaataaagcagcttttcacaagtcgattaggagtaaatacaagcctacacccattcccatcaaggtcaaagtgaaaaatgtgaaagaaggcattcattttaaaagcagcgtcatctcaatttatgttagcgagagcatggatagatcaagcaaaggccaaataattggaaattttcaagcttttgatgaggacactggactaccagcccatgcaagatatgtaaaattagaagatagagataattggatctctgtggattctgtcacatctgaaattaaacttgcaaaacttcctgattttgaatctagatatgttcaaaatggcacatacactgtaaagattgtggccatatcagaagattatcctagaaaaaccatcactggcacagtccttatcaatgttgaagacatcaacgacaactgtcccacactgatagagcctgtgcagacaatctgtcacgatgcagagtatgtgaatgttactgcagaggacctggatggacacccaaacagtggccctttcagtttctccgtcattgacaaaccacctggcatggcagaaaaatggaaaatagcacgccaagaaagtaccagtgtgctgctgcaacaaagtgagaaaaagcttgggagaagtgaaattcagttcctgatttcagacaatcagggttttagttgtcctgaaaagcaggtccttacactcacagtttgtgagtgtctgcatggcagcggctgcagggaagcacagcatgactcctatgtgggcctgggacccgcagcaattgcgctcatgattttggcctttctgctcctgctattggtaccacttttactgctgatgtgccattgcggaaagggcgccaaaggctttacccccatacctggcaccatagagatgctgcatccttggaataatgaaggagcaccacctgaagacaaggtggtgccatcatttctgccagtggatcaagggggcagtctagtaggaagaaatggagtaggaggtatggccaaggaagccacgatgaaaggaagtagctctgcttccattgtcaaagggcaacatgagatgtccgagatggatggaaggtgggaagaacacagaagcctgctttctggtagagctacccagtttacaggggccacaggcgctatcatgaccactgaaaccacgaagaccgcaagggccacaggggcttccagagacatggccggagctcaggcagctgctgttgcactgaacgaagaattcttaagaaattatttcactgataaagcggcctcttacactgaggaagatgaaaatcacacagccaaagattgccttctggtttattctcaggaagaaactgaatcgctgaatgcttctattggttgttgcagttttattgaaggagagctagatgaccgcttcttagatgatttgggacttaaattcaagacactagctgaagtttgcctgggtcaaaaaatagatataaataaggaaattgagcagagacaaaaacctgccacagaaacaagtatgaacacagcttcacattcactctgtgagcaaactatggttaattcagagaatacctactcctctggcagtagcttcccagttccaaaatctttgcaagaagccaatgcagagaaagtaactcaggaaatagtcactgaaagatctgtgtcttctaggcaggcgcaaaaggtagctacacctcttcctgacccaatggcttctagaaatgtgatagcaacagaaacttcctatgtcacagggtccactatgccaccaaccactgtgatcctgggtcctagccagccacagagccttattgtgacagagagggtgtatgctccagcttctaccttggtagatcagccttatgctaatgaaggtacagttgtggtcactgaaagagtaatacagcctcatgggggtggatcgaatcctctggaaggcactcagcatcttcaagatgtaccttacgtcatggtgagggaaagagagagcttccttgcccccagctcaggtgtgcagcctactctggccatgcctaatatagcagtaggacagaatgtgacagtgacagaaagagttctagcacctgcttccactctgcaatccagttaccagattcccactgaaaattctatgacggctaggaacaccacggtgtctggagctggagtccctggccctctgccagattttggtttagaggaatctggtcattctaattctaccataaccacatcttccaccagagtcaccaagcatagcactgtacagcattcttactcctaaacagcagtcagccacaaactgacccagagtttaattagcagtgactaatttcatgtttccaatgtacctgatttttcatgagccttacagacacacagagacacatacacattgatcttaaaatttttctcagtcactgatatgcaaaggaccacactgtctctgcttccaggagtattttagaaatgttccacaatttactgaagacatagagatgatgctgctgcttaggtgccttttagcaagctatgcaaacaatcctgataaaacaagatacatagagagtcaatctggcttctgagaatttaccaagtgaacagagtacctagttcatcagccgtccagtaaagcaacccaggaaactgactgggtctctttgcctaccgtattaacattaaacattgatgttctgtattctgtactttactgcacccagcagactttcaacaactcattgatccaaagatacatgcacagtctgagcaccagctatggtgctcataacttctttaagacttgaaccctttcaatctgtgtgattcattaaattggaccattgatgataagaatacacattgtatgtttctgtgcacatgacagtgtgtgtgtgtgcacgtacatactgtatagtcttaaaaatagcattatactggccaggggtggtggctaacgcctgtaatcccagcactttgggaggccgaggcgggtggatcaactgtggtcaggagtttgagatcagccaggccaacctggtgaaaccccgtctctactaaaaatacaaaaattagctgggcgtgatggtgggcgcctgtaatcccagctacttgggaggctgaggcaggagaatcacttgaacccgggaggcggaggttgcagtgagccgagatcgcaccattgcactccagtctgggcaacagagtgagattccgtctcaaaaaaaaaaagaaaaggaaaaaaaaatagcattatacctcttccttgtctcaaccgccatgaaaattctgaacactccaaattcagttgaataatccaaaacaaaatttataagtataaaataattttacttcttatagtaatagtatactttaaaaagcctcagggtatattatcttctaaacagctacaattcagtgcagctacattaaccaactatgttctctagttgagaacaactaggcctatttcactgctgtgtagcctcagtgcctaacatgggtgccaaataaatattcgtagaattacactgaattgtaaaaaccattcgttttggtttacaattgccaaaaatctcaaaaggccctgtatttatgtaattctttgaaattattattttattttgatttctcagttattgactggctgggtgtgacttagtacataagtactcaatattataaaaacctcaaataattgacttgattttacacaacatccttcccttttctacaagttaatttttttacaaatcatttgggttatctcctaaataggttatattttattgcttctagaaacaatgtttcaaaatatatgtgcattatacctcttccttgtctcaaccgccatgaaaattctgaacactccaaattcagttgaataatccaaaacaaaatttataagtataaaataattttacttcttatagaaatagtatactttaaaaagcctcagggtatttatcttctgaccagctacaattcagtacagctacattgagcatctatgtctgatctactcgaggaatactaggcctatttcactgctgtgtagcctcagtgccaaacgtgtgtgccaaataaatattcgtagaattacactg

SEQ ID NO: 362319 - DNA, 3860 bp, Homo sapiens
tcgagggtgcgatggcgcggacgcgggacgcgcgtacgccctgctgcttctcctgatctgctttaacgttggaagtggacttcacttacaggtcttaagcacaagaaatgaaaataagctgcttcctaaacatcctcatttagtgcggcaaaagcgcgcctggatcaccgcccccgtggctcttcgggagggagaggatctgtccaagaagaatccaattgccaagatacattctgatcttgcagaagaaagaggactcaaaattacttacaaatacactggaaaagggattacagagccaccttttggtatatttgtctttaacaaagatactggagaactgaatgttaccagcattcttgatcgagaagaaacaccattttttctgctaacaggttacgctttggatgcaagaggaaacaatgtagagaaacccttagagctacgcattaaggttcttgatatcaatgacaacgaaccagtgttcacacaggatgtctttgttgggtctgttgaagagttgagtgcagcacatactcttgtgatgaaaatcaatgcaacagatgcagatgagcccaataccctgaattcgaaaatttcctatagaatcgtatctctggagcctgcttatcctccagtgttctacctaaataaagatacaggagagatttatacaaccagtgttaccttggacagagaggaacacagcagctacactttgacagtagaagcaagagatggcaatggagaagttacagacaaacctgtaaaacaagctcaagttcagattcgtattttggatgtcaatgacaatatacctgtagtagaaaataaagtgcttgaagggatggttgaagaaaatcaagtcaatgtagaagttacgcgcataaaagtgttcgatgcagatgaaataggttctgataattggctggcaaattttacatttgcatcaggaaatgaaggaggttatttccacatagaaacagatgctcaaactaacgaaggaattgtgacccttattaaggaagtagattatgaagaaatgaagaatcttgacttcagtgttattgtcgctaataaagcagcttttcacaagtcgattaggagtaaatacaagcctacacccattcccatcaaggtcaaagtgaaaaatgtgaaagaaggcattcattttaaaagcagcgtcatctcaatttatgttagcgagagcatggatagatcaagcaaaggccaaataattggaaattttcaagcttttgatgaggacactggactaccagcccatgcaagatatgtaaaattagaagatagagataattggatctctgtggattctgtcacatctgaaattaaacttgcaaaacttcctgattttgaatctagatatgttcaaaatggcacatacactgtaaagattgtggccatatcagaagattatcctagaaaaaccatcactggcacagtccttatcaatgttgaagacatcaacgacaactgtcccacactgatagagcctgtgcagacaatctgtcacgatgcagagtatgtgaatgttactgcagaggacctggatggacacccaaacagtggccctttcagtttctccgtcattgacaaaccacctggcatggcagaaaaatggaaaatagcacgccaagaaagtaccagtgtgctgctgcaacaaagtgagaaaaagcttgggagaagtgaaattcagttcctgatttcagacaatcagggttttagttgtcctgaaaagcaggtccttacactcacagtttgtgagtgtctgcatggcagcggctgcagggaagcacagcatgactcctatgtgggcctgggacccgcagcaattgcgctcatgattttggcctttctgctcctgctattggtaccacttttactgctgatgtgccattgcggaaagggcgccaaaggctttacccccatacctggcaccatagagatgctgcatccttggaataatgaaggagcaccacctgaagacaaggtggtgccatcatttctgccagtggatcaagggggcagtctagtaggaagaaatggagtaggaggtatggccaaggaagccacgatgaaaggaagtagctctgcttccattgtcaaagggcaacatgagatgtccgagatggatggaaggtgggaagaacacagaagcctgctttctggtagagctacccagtttacaggggccacaggcgctatcatgaccactgaaaccacgaagaccgcaagggccacaggggcttccagagacatggccggagctcaggcagctgctgttgcactgaacgaagaattcttaagaaattatttcactgataaagcggcctcttacactgaggaagatgaaaatcacacagccaaagattgccttctggtttattctcaggaagaaactgaatcgctgaatgcttctattggttgttgcagttttattgaaggagagctagatgaccgcttcttagatgatttgggacttaaattcaagacactagctgaagtttgcctgggtcaaaaaatagatataaataaggaaattgagcagagacaaaaacctgccacagaaacaagtatgaacacagcttcacattcactctgtgagcaaactatggttaattcagagaatacctactcctctggcagtagcttcccagttccaaaatctttgcaagaagccaatgcagagaaagtaactcaggaaatagtcactgaaagatctgtgtcttctaggcaggcgcaaaaggtagctacacctcttcctgacccaatggcttctagaaatgtgatagcaacagaaacttcctatgtcacagggtccactatgccaccaaccactgtgatcctgggtcctagccagccacagagccttattgtgacagagagggtgtatgctccagcttctaccttggtagatcagccttatgctaatgaaggtacagttgtggtcactgaaagagtaatacagcctcatgggggtggatcgaatcctctggaaggcactcagcatcttcaagatgtaccttacgtcatggtgagggaaagagagagcttccttgcccccagctcaggtgtgcagcctactctggccatgcctaatatagcagtaggacagaatgtgacagtgacagaaagagttctagcacctgcttccactctgcaatccagttaccagattcccactgaaaattctatgacggctaggaacaccacggtgtctggagctggagtccctggccctctgccagattttggtttagaggaatctggtcattctaattctaccataaccacatcttccaccagagtcaccaagcatagcactgtacagcattcttactcctaaacagcagtcagccacaaactgacccagagtttaattagcagtgactaatttcatgtttccaatgtacctgatttttcatgagccttacagacacacagagacacatacacattgatcttaaaatttttctcagtcactgatatgcaaaggaccacactgtctctgcttccaggagtattttagaaatgttccacaatttactgaagacatagagatgatgctgctgcttaggtgccttttagcaagctatgcaaacaatgggagaagatgcgccagtcttgctcccatcaggcctgcattcccctacctctgcaggtgctgctctcttcccagggcacaggccacctgaacacacttggttgaccaaaacattttaatgcaactatgacttagtactaatacagagggttggtaccatccaaaaacatacctaaatgtacattgtctaataaactctacccttaaaagcacaatctgatgggagaagactgcg

SEQ ID NO: 362320 - DNA, 3944 bp, Homo sapiens
  misc_feature (3651)..(3651): n is a, c, g, or t
cctgcgtgtccctctgcgctccgactggtgcgacttctccctgcgctagcgaggcagggttttggcctcgcctctcgcgagatcgcctcctgttgctgccgccgccgctcctggccactgactggcggcgcctgcgcagccgccatgttcggttgctatgctgcggcctaggagagggggtgtgcttgagggaggaggaagagatagaggaggaggagggggaggaagaggaggtggagaaggaggggggtgactgagctcctcttgcactctcacacacaaacgctgcccaggattacccgccagctcacgccgcgcagtgcgcttttccgctcctcgcgccccaccaccaacattgttctctcaggactcctgggtcccaggggccggaattgggcctgagcgggagaggaaagagacttggctttggccgcggggtcggaggattggggccaggccccctcccccacgcacttttgggggtgtggattatctcatccctgcagggaggtaggagaggtcgccggctgcccgcctccctgccacctccccagcggcgccggcccgcggctgcccagcagcatgaggtggtgctggcggctccgggtcgtggcgcgaccgctgcggcggcggctgctcggggggcgctgaggtagccccccggagcggcacggaggacgcgcttctcctctgcgcgccggggcctcgaggctttttttctccagccgagaggacgcggctgtgatatacgaagactttgtgtggacagtaatgacctcacgtttccgattgcctgctggcagaacctacaatgtacgagcatcagagttggcccgagacagacagcatactgaagtggtttgcaacatccttcttctggataacactgtacaagctttcaaagtcaataaacatgatcaggggcaagtcttgttggatgtcgtcttcaagcatctagatttgactgagcaggactattttggtttacagttggctgatgattccacagataacccaaggtggctggatccaaacaaaccaataaggaagcagctaaagagaggatctccttacagtttgaactttagagtcaaattttttgtaagtgaccccaacaagttacaagaagaatatacaaggtaccagtattttttgcaaattaaacaagacattcttactggaagattaccctgtccttctaatactgctgcccttttagcttcatttgctgttcagtctgaacttggagactacgatcagtcagagaacttgtcaggctacctctcagattattctttcattcctaatcaacctcaagattttgaaaaagaaattgcaaaattacatcagcaacacataggcttatctcctgcagaagcagaatttaattacctaaacacagcacgtaccttagaactctatggagttgaattccactatgcaagggatcagagtaacaatgaaattatgattggagtgatgtcaggaggaattctgatttataagaacagggtacgaatgaatacctttccatggttgaagattgtaaaaatttcttttaagtgcaaacagttttttattcaacttagaaaagaattgcatgaatctagagaaacattattgggatttaatatggtgaattacagagcatgtaaaaatttgtggaaagcatgtgtagaacatcacacattcttccgtttggacagaccacttccacctcaaaagaatttttttgcacattattttacattaggttcaaaattccggtactgtgggagaactgaagtccaatcagttcagtatggcaaagaaaaggcaaataaagacagggtatttgcaagatccccaagtaagcccttggcacggaaattaatggattgggaagtagtaagcagaaattcaatatctgatgacaggttagaaacacaaagtcttccatcacgatctccaccgggaactcctaatcatcgaaattctacattcacgcaggaaggaacccggttacgaccatcttcagttggtcatttggtagaccatatggttcatacttccccaagcgaagtgtttgtaaatcagagatctccgtcatcaacacaagctaatagcattgttctggaatcatcaccatcacaagagacccctggagatgggaagcctccagctttaccacccaaacagtcaaagaaaaacagttggaaccaaattcattattcacattcgcaacaagatctagaaagtcatattaatgaaacatttgatattccatcttctcctgaaaaacccactcctaatggtggtattccacatgataatcttgtcctaatcagaatgaaacctgatgaaaatgggaggtttggattcaatgtaaagggaggatatgatcagaagatgcctgtgattgtgtctcgagtagcaccaggaacacctgctgacctctgtgtccctagactgaatgaaggggaccaagttgtactgatcaatggtcgggacattgcagaacacactcatgatcaggttgtgctgtttattaaagctagttgtgagagacattctggggaactcatgcttctagttcgacctaatgctgtatatgatgtagtggaagaaaagctagaaaatgagccagatttccagtatattcctgagaaagccccactagatagtgtgcatcaggatgaccattccctgcgggagtcaatgatccagctagctgaggggcttatcactggaacagtcctgacacagtttgatcaactgtatcggaaaaaacctggaatgacaatgtcctgtgccaaattacctcagaatatttccaaaaatagatacagagatatttcgccttatgatgccacacgggtcattttaaaaggtaatgaagactacatcaatgcgaactatataaatatggaaattccttcttccagcattataaatcagtacattgcttgtcaagggccattaccacacacttgtacagatttttggcagatgacttgggaacaaggctcctctatggttgtaatgttgaccacacaagttgaacgtggcagagttaaatgtcaccaatattggccagaacccacaggcagttcatcttatggatgctaccaagttacctgccactctgaagaaggaaacactgcctatatcttcaggaagatgaccctatttaaccaagagaaaaatgaaagtcgtccactcactcagatccagtacatagcctggcctgaccatggagtccctgatgattcgagtgactttctagattttgtttgtcatgtacgaaacaagagggctggcaaggaagaacccgttgttgtccattgcagtgctggaatcggaagaactggggttcttattactatggaaacagccatgtgtctcattgaatgcaatcagccagtttatccactagatattgtaagaacaatgagagatcagcgagccatgatgatccaaacacctagtcaatacagatttgtatgtgaagctattttgaaagtttatgaagaaggctttgttaaacccttaacaacatcaacaaataaataagaaagcaaaaagatctgggatatgtgttggaaaactgctttcccttatgttcactgtgccataatgctgctcgcaggaaatggcattttacaaaaaaanaaatgaagaactcaaaaaaactttgaaaacttcagcactgttgcactttatgttttaaaaaatgtcactctttcaaaatctataactcatgtatttgaagactgtttcatgctttgctccgaacaaatagtaaataactgagtatgttcagggtaatttatgaaattttgtggtggtgccatgcaatccccttttggtagaattgccacaaacaaggctcaaaattctcatcatctctgttatacacctgtatcatgaaagcaaaaagaagtaaacatcaggagtcagctctg

SEQ ID NO: 362321 - DNA, 450 bp, Homo sapiens
  misc_feature (368)..(369): n is a, c, g, or t
  misc_feature (378)..(378): n is a, c, g, or t
ggacctgccttctccacccactggtgcctccctgaagttttacgtgccttgcaagcagtgcccccccatgaagaaaggagtcagttaaatgtcaccaatattggccagaacccacaggcagttcatcttatggatgctaccaagttacctgccactctgaagaaggaaacactgcctatatcttcaggaagatgaccctatttaaccaagagaaaaatgaaagtcgtccactcactcagatccagtacatagcctggcctgaccatggagtccctgatgattcgagtgactttctagattttgtttgtcatgtacgaaacaagagggctggcaaggaagaacccgttgttgtccattgcagtgctggnntcggaaganctggggttattactacaatggaatcgtacaggacggccagtgcgcaagatggcagcacagcagctcggaata

SEQ ID NO: 362322 - DNA, 2936 bp, Homo sapiens
  misc_feature (2643)..(2643): n is a, c, g, or t
tgaggtccctcagttgacttagagtcaattttgtaagtgccccaacagtacagaagaatatacagtaccagtatttttggcaaattaacaagacatccttactggaagattaccctgtccttctaatactgctgcccttttagcttcatttgctgttcagtctgaacttggagactacgatcagtcagagaacttgtcaggctacctctcagattattctttcattcctaatcaacctcaagattttgaaaaagaaattgcaaaattacatcagcaacacataggcttatctcctgcagaagcagaatttaattacctaaacacagcacgtaccttagaactctatggagttgaattccactatgcaagggatcagagtaacaatgaaattatgattggagtgatgtcaggaggaattctgatttataagaacagggtacgaatgaatacctttccatggttgaagattgtaaaaatttcttttaagtgcaaacagttttttattcaacttagaaaagaattgcaccccagatgcttgaaatgttgctgctggagctgatgcccacttccagtcattaagcctcctggaagcatgaatctagagaaacattattgggatttaatatggtgaattacagagcatgtaaaaatttgtggaaagcatgtgtagaacatcacacattcttccgtttggacagaccacttccacctcaaaagaatttttttgcacattattttacattaggttcaaaattccggtactgtgggagaactgaagtccaatcagttcagtatggcaaagaaaaggcaaataaagacagggtatttgcaagatccccaagtaagcccttggcacggaaattaatggattgggaagtagtaagcagaaattcaatatctgatgacaggttagaaacacaaagtcttccatcacgatctccaccgggaactcctaatcatcgaaattctacattcacgcaggaaggaacccggttacgaccatcttcagttggtcatttggtagaccatatggttcatacttccccaagcgaagtgtttgtaaatcagagatctccgtcatcaacacaagctaatagcattgttctggaatcatcaccatcacaagagacccctggagatgggaagcctccagctttaccacccaaacagtcaaagaaaaacagttggaaccaaattcattattcacattcgcaacaagatctagaaagtcatattaatgaaacatttgatattccatcttctcctgaaaaacccactcctaatggtggtattccacatgataatcttgtcctaatcagaatgaaacctgatgaaaatgggaggtttggattcaatgtaaagggaggatatgatcagaagatgcctgtgattgtgtctcgagtagcaccaggaacacctgctgacctctgtgtccctagactgaatgaaggggaccaagttgtactgatcaatggtcgggacattgcagaacacactcatgatcaggttgtgctgtttattaaagctagttgtgagagacattctggggaactcatgcttctagttcgacctaatgctgtatatgatgtagtggaagaaaagctagaaaatgagccagatttccagtatattcctgagaaagccccactagatagtgtgcatcaggatgaccattccctgcgggagtcaatgatccagctagctgaggggcttatcactggaacagtcctgacacagtttgatcaactgtatcggaaaaaacctggaatgacaatgtcctgtgccaaattacctcagaatatttccaaaaatagatacagagatatttcgccttatgatgccacacgggtcattttaaaaggtaatgaagactacatcaatgcgaactatataaatatggaaattccttcttccagcattataaatcagtacattgcttgtcaagggccattaccacacacttgtacagatttttggcagatgacttgggaacaaggctcctctatggttgtaatgttgaccacacaagttgaacgtggcagagttaaatgtcaccaatattggccagaacccacaggcagttcatcttatggatgctaccaagttacctgccactctgaagaaggaaacactgcctatatcttcaggaagatgaccctatttaaccaagagaaaaatgaaagtcgtccactcactcagatccagtacatagcctggcctgaccatggagtccctgatgattcgagtgactttctagattttgtttgtcatgtacgaaacaagagggctggcaaggaagaacccgttgttgtccattgcagtgctggaatcggaagaactggggttcttattactatggaaacagccatgtgtctcattgaatgcaatcagccagtttatccactagatattgtaagaacaatgagagatcagcgagccatgatgatccaaacacctagtcaatacagatttgtatgtgaagctattttgaaagtttatgaagaaggctttgttaaacccttaacaacatcaacaaataaataagaaagcaaaaagatctgggatatgtgttggaaaactgctttcccttatgttcactgtgccataatgctgctcgcaggaaatggcattttacaaaaaaanaaatgaagaactcaaaaaaactttgaaaacttcagcactgttgcactttatgttttaaaaaatgtcactctttcaaaatctataactcatgtatttgaagactgtttcatgctttgctccgaacaaatagtaaataactgagtatgttcagggtaatttatgaaattttgtggtggtgccatgcaatccccttttggtagaattgccacaaacaaggctcaaaattctcatcatctctgttatacacctgtatcatgaaagcaaaaagaagtaaacatcaggagtcagctctg

SEQ ID NO: 362323 - DNA, 3559 bp, Homo sapiens
cctgcgtgtccctctgcgctccgactggtgcgacttctccctgcgctagcgaggcagggttttggcctcgcctctcgcgagatcgcctcctgttgctgccgccgccgctcctggccactgactggcggcgcctgcgcagccgccatgttcggttgctatgctgcggcctaggagagggggtgtgcttgagggaggaggaagagatagaggaggaggagggggaggaagaggaggtggagaaggaggggggtgactgagctcctcttgcactctcacacacaaacgctgcccaggattacccgccagctcacgccgcgcagtgcgcttttccgctcctcgcgccccaccaccaacattgttctctcaggactcctgggtcccaggggccggaattgggcctgagcgggagaggaaagagacttggctttggccgcggggtcggaggattggggccaggccccctcccccacgcacttttgggggtgtggattatctcatccctgcagggaggtaggagaggtcgccggctgcccgcctccctgccacctccccagcggcgccggcccgcggctgcccagcagcatgaggtggtgctggcggctccgggtcgtggcgcgaccgctgcggcggcggctgctcggggggcgctgaggtagccccccggagcggcacggaggacgcgcttctcctctgcgcgccggggcctcgaggctttttttctccagccgagaggacgcggctgtgatatacgaagactttgtgtggacagtaatgacctcacgtttccgattgcctgctggcagaacctacaatgtacgagcatcagagttggcccgagacagacagcatactgaagtggtttgcaacatccttcttctggataacactgtacaagctttcaaagtcaataaacatgatcaggggcaagtcttgttggatgtcgtcttcaagcatctagatttgactgagcaggactattttggtttacagttggctgatgattccacagataacccaaggtggctggatccaaacaaaccaataaggaagcagctaaagagaggatctccttacagtttgaactttagagtcaaattttttgtaagtgaccccaacaagttacaagaagaatatacaaggtaccagtattttttgcaaattaaacaagacattcttactggaagattaccctgtccttctaatactgctgcccttttagcttcatttgctgttcagtctgaacttggagactacgatcagtcagagaacttgtcaggctacctctcagattattctttcattcctaatcaacctcaagattttgaaaaagaaattgcaaaattacatcagcaacacataggcttatctcctgcagaagcagaatttaattacctaaacacagcacgtaccttagaactctatggagttgaattccactatgcaagggatcagagtaacaatgaaattatgattggagtgatgtcaggaggaattctgatttataagaacagggtacgaatgaatacctttccatggttgaagattgtaaaaatttcttttaagtgcaaacagttttttattcaacttagaaaagaattgcatgaatctagagaaacattattgggatttaatatggtgaattacagagcatgtaaaaatttgtggaaagcatgtgtagaacatcacacattcttccgtttggacagaccacttccacctcaaaagaatttttttgcacattattttacattaggttcaaaattccggtactgtgggagaactgaagtccaatcagttcagtatggcaaagaaaaggcaaataaagacagggtatttgcaagatccccaagtaagcccttggcacggaaattaatggattgggaagtagtaagcagaaattcaatatctgatgacaggttagaaacacaaagtcttccatcacgatctccaccgggaactcctaatcatcgaaattctacattcacgcaggaaggaacccggttacgaccatcttcagttggtcatttggtagaccatatggttcatacttccccaagcgaagtgtttgtaaatcagagatctccgtcatcaacacaagctaatagcattgttctggaatcatcaccatcacaagagacccctggagatgggaagcctccagctttaccacccaaacagtcaaagaaaaacagttggaaccaaattcattattcacattcgcaacaagatctagaaagtcatattaatgaaacatttgatattccatcttctcctgaaaaacccactcctaatggtggtattccacatgataatcttgtcctaatcagaatgaaacctgatgaaaatgggaggtttggattcaatgtaaagggaggatatgatcagaagatgcctgtgattgtgtctcgagtagcaccaggaacacctgctgacctctgtgtccctagactgaatgaaggggaccaagttgtactgatcaatggtcgggacattgcagaacacactcatgatcaggttgtgctgtttattaaagctagttgtgagagacattctggggaactcatgcttctagttcgacctaatgctgtatatgatgtagtggaagaaaagctagaaaatgagccagatttccagtatattcctgagaaagccccactagatagtgtgcatcaggatgaccattccctgcgggagtcaatgatccagctagctgaggggcttatcactggaacagtcctgacacagtttgatcaactgtatcggaaaaaacctggaatgacaatgtcctgtgccaaattacctcagaatatttccaaaaatagatacagagatatttcgccttatgatgccacacgggtcattttaaaaggtaatgaagactacatcaatgcgaactatataaatatggaaattccttcttccagcattataaatcagtacattgcttgtcaagggccattaccacacacttgtacagatttttggcagatgacttgggaacaaggctcctctatggttgtaatgttgaccacacaagttgaacgtggcagagttaaatgtcaccaatattggccagaacccacaggcagttcatcttatggatgctaccaagttacctgccactctgaagaaggaaacactgcctatatcttcaggaagatgaccctatttaaccaagagaaaaatgaaagtcgtccactcactcagatccagtacatagcctggcctgaccatggagtccctgatgattcgagtgactttctagattttgtttgtcatgtacgaaacaagagggctggcaaggaagaacccgttgttgtccattgcagtgctggaatcggaagaactggggttcttattactatggaaacagccatgtgtctcattgaatgcaatcagccagtttatccactagatattgtaagaacaatgagagatcagcgagccatgatgatccaaacacctagtcaatacagatttgtatgtgaagctattttgaaagtttatgaagaaggctttgttaaacccttaacaacatcaacaaataaataagaaagca

SEQ ID NO: 362324 - DNA, 3418 bp, Homo sapiens
  misc_feature (3336)..(3337): n is a, c, g, or t
  misc_feature (3346)..(3346): n is a, c, g, or t
cctgcgtgtccctctgcgctccgactggtgcgacttctccctgcgctagcgaggcagggttttggcctcgcctctcgcgagatcgcctcctgttgctgccgccgccgctcctggccactgactggcggcgcctgcgcagccgccatgttcggttgctatgctgcggcctaggagagggggtgtgcttgagggaggaggaagagatagaggaggaggagggggaggaagaggaggtggagaaggaggggggtgactgagctcctcttgcactctcacacacaaacgctgcccaggattacccgccagctcacgccgcgcagtgcgcttttccgctcctcgcgccccaccaccaacattgttctctcaggactcctgggtcccaggggccggaattgggcctgagcgggagaggaaagagacttggctttggccgcggggtcggaggattggggccaggccccctcccccacgcacttttgggggtgtggattatctcatccctgcagggaggtaggagaggtcgccggctgcccgcctccctgccacctccccagcggcgccggcccgcggctgcccagcagcatgaggtggtgctggcggctccgggtcgtggcgcgaccgctgcggcggcggctgctcggggggcgctgaggtagccccccggagcggcacggaggacgcgcttctcctctgcgcgccggggcctcgaggctttttttctccagccgagaggacgcggctgtgatatacgaagactttgtgtggacagtaatgacctcacgtttccgattgcctgctggcagaacctacaatgtacgagcatcagagttggcccgagacagacagcatactgaagtggtttgcaacatccttcttctggataacactgtacaagctttcaaagtcaataaacatgatcaggggcaagtcttgttggatgtcgtcttcaagcatctagatttgactgagcaggactattttggtttacagttggctgatgattccacagataacccaaggtggctggatccaaacaaaccaataaggaagcagctaaagagaggatctccttacagtttgaactttagagtcaaattttttgtaagtgaccccaacaagttacaagaagaatatacaaggtaccagtattttttgcaaattaaacaagacattcttactggaagattaccctgtccttctaatactgctgcccttttagcttcatttgctgttcagtctgaacttggagactacgatcagtcagagaacttgtcaggctacctctcagattattctttcattcctaatcaacctcaagattttgaaaaagaaattgcaaaattacatcagcaacacataggcttatctcctgcagaagcagaatttaattacctaaacacagcacgtaccttagaactctatggagttgaattccactatgcaagggatcagagtaacaatgaaattatgattggagtgatgtcaggaggaattctgatttataagaacagggtacgaatgaatacctttccatggttgaagattgtaaaaatttcttttaagtgcaaacagttttttattcaacttagaaaagaattgcatgaatctagagaaacattattgggatttaatatggtgaattacagagcatgtaaaaatttgtggaaagcatgtgtagaacatcacacattcttccgtttggacagaccacttccacctcaaaagaatttttttgcacattattttacattaggttcaaaattccggtactgtgggagaactgaagtccaatcagttcagtatggcaaagaaaaggcaaataaagacagggtatttgcaagatccccaagtaagcccttggcacggaaattaatggattgggaagtagtaagcagaaattcaatatctgatgacaggttagaaacacaaagtcttccatcacgatctccaccgggaactcctaatcatcgaaattctacattcacgcaggaaggaacccggttacgaccatcttcagttggtcatttggtagaccatatggttcatacttccccaagcgaagtgtttgtaaatcagagatctccgtcatcaacacaagctaatagcattgttctggaatcatcaccatcacaagagacccctggagatgggaagcctccagctttaccacccaaacagtcaaagaaaaacagttggaaccaaattcattattcacattcgcaacaagatctagaaagtcatattaatgaaacatttgatattccatcttctcctgaaaaacccactcctaatggtggtattccacatgataatcttgtcctaatcagaatgaaacctgatgaaaatgggaggtttggattcaatgtaaagggaggatatgatcagaagatgcctgtgattgtgtctcgagtagcaccaggaacacctgctgacctctgtgtccctagactgaatgaaggggaccaagttgtactgatcaatggtcgggacattgcagaacacactcatgatcaggttgtgctgtttattaaagctagttgtgagagacattctggggaactcatgcttctagttcgacctaatgctgtatatgatgtagtggaagaaaagctagaaaatgagccagatttccagtatattcctgagaaagccccactagatagtgtgcatcaggatgaccattccctgcgggagtcaatgatccagctagctgaggggcttatcactggaacagtcctgacacagtttgatcaactgtatcggaaaaaacctggaatgacaatgtcctgtgccaaattacctcagaatatttccaaaaatagatacagagatatttcgccttatgatgccacacgggtcattttaaaaggtaatgaagactacatcaatgcgaactatataaatatggaaattccttcttccagcattataaatcagtacattgcttgtcaagggccattaccacacacttgtacagatttttggcagatgacttgggaacaaggctcctctatggttgtaatgttgaccacacaagttgaacgtggcagagttaaatgtcaccaatattggccagaacccacaggcagttcatcttatggatgctaccaagttacctgccactctgaagaaggaaacactgcctatatcttcaggaagatgaccctatttaaccaagagaaaaatgaaagtcgtccactcactcagatccagtacatagcctggcctgaccatggagtccctgatgattcgagtgactttctagattttgtttgtcatgtacgaaacaagagggctggcaaggaagaacccgttgttgtccattgcagtgctggnntcggaaganctggggttattactacaatggaatcgtacaggacggccagtgcgcaagatggcagcacagcagctcggaata

SEQ ID NO: 362325 - DNA, 1564 bp, Homo sapiens
cctgcgtgtccctctgcgctccgactggtgcgacttctccctgcgctagcgaggcagggttttggcctcgcctctcgcgagatcgcctcctgttgctgccgccgccgctcctggccactgactggcggcgcctgcgcagccgccatgttcggttgctatgctgcggcctaggagagggggtgtgcttgagggaggaggaagagatagaggaggaggagggggaggaagaggaggtggagaaggaggggggtgactgagctcctcttgcactctcacacacaaacgctgcccaggattacccgccagctcacgccgcgcagtgcgcttttccgctcctcgcgccccaccaccaacattgttctctcaggactcctgggtcccaggggccggaattgggcctgagcgggagaggaaagagacttggctttggccgcggggtcggaggattggggccaggccccctcccccacgcacttttgggggtgtggattatctcatccctgcagggaggtaggagaggtcgccggctgcccgcctccctgccacctccccagcggcgccggcccgcggctgcccagcagcatgaggtggtgctggcggctccgggtcgtggcgcgaccgctgcggcggcggctgctcggggggcgctgaggtagccccccggagcggcacggaggacgcgcttctcctctgcgcgccggggcctcgaggctttttttctccagccgagaggacgcggctgtgatatacgaagactttgtgtggacagtaatgacctcacgtttccgattgcctgctggcagaacctacaatgtacgagcatcagagttggcccgagacagacagcatactgaagtggtttgcaacatccttcttctggataacactgtacaagctttcaaagtcaataaacatgatcaggggcaagtcttgttggatgtcgtcttcaagcatctagatttgactgagcaggactattttggtttacagttggctgatgattccacagataacccaaggtggctggatccaaacaaaccaataaggaagcagctaaagagaggatctccttacagtttgaactttagagtcaaattttttgtaagtgaccccaacaagttacaagaagaatatacaaggtaccagtattttttgcaaattaaacaagacattcttactggaagattaccctgtccttctaatactgctgcccttttagcttcatttgctgttcagtctgaacttggagactacgatcagtcagagaacttgtcaggctacctctcagattattctttcattcctaatcaacctcaagattttgaaaaagaaattgcaaaattacatcagcaacacataggcttatctcctgcagaagcagaatttaattacctaaacacagcacgtaccttagaactctatggagttgaattccactatgcaagggatcagagtaacaatgaaattatgattggagtgatgtcaggaggaattctgatttataagaacagggtacgaatgaatacctttccatgttttttttttccccatggttgaagattgc

SEQ ID NO: 362326 - DNA, 3905 bp, Homo sapiens
  misc_feature (3612)..(3612): n is a, c, g, or t
cctgcgtgtccctctgcgctccgactggtgcgacttctccctgcgctagcgaggcagggttttggcctcgcctctcgcgagatcgcctcctgttgctgccgccgccgctcctggccactgactggcggcgcctgcgcagccgccatgttcggttgctatgctgcggcctaggagagggggtgtgcttgagggaggaggaagagatagaggaggaggagggggaggaagaggaggtggagaaggaggggggtgactgagctcctcttgcactctcacacacaaacgctgcccaggattacccgccagctcacgccgcgcagtgcgcttttccgctcctcgcgccccaccaccaacattgttctctcaggactcctgggtcccaggggccggaattgggcctgagcgggagaggaaagagacttggctttggccgcggggtcggaggattggggccaggccccctcccccacgcacttttgggggtgtggattatctcatccctgccacctccccagcggcgccggcccgcggctgcccagcagcatgaggtggtgctggcggctccgggtcgtggcgcgaccgctgcggcggcggctgctcggggggcgctgaggtagccccccggagcggcacggaggacgcgcttctcctctgcgcgccggggcctcgaggctttttttctccagccgagaggacgcggctgtgatatacgaagactttgtgtggacagtaatgacctcacgtttccgattgcctgctggcagaacctacaatgtacgagcatcagagttggcccgagacagacagcatactgaagtggtttgcaacatccttcttctggataacactgtacaagctttcaaagtcaataaacatgatcaggggcaagtcttgttggatgtcgtcttcaagcatctagatttgactgagcaggactattttggtttacagttggctgatgattccacagataacccaaggtggctggatccaaacaaaccaataaggaagcagctaaagagaggatctccttacagtttgaactttagagtcaaattttttgtaagtgaccccaacaagttacaagaagaatatacaaggtaccagtattttttgcaaattaaacaagacattcttactggaagattaccctgtccttctaatactgctgcccttttagcttcatttgctgttcagtctgaacttggagactacgatcagtcagagaacttgtcaggctacctctcagattattctttcattcctaatcaacctcaagattttgaaaaagaaattgcaaaattacatcagcaacacataggcttatctcctgcagaagcagaatttaattacctaaacacagcacgtaccttagaactctatggagttgaattccactatgcaagggatcagagtaacaatgaaattatgattggagtgatgtcaggaggaattctgatttataagaacagggtacgaatgaatacctttccatggttgaagattgtaaaaatttcttttaagtgcaaacagttttttattcaacttagaaaagaattgcatgaatctagagaaacattattgggatttaatatggtgaattacagagcatgtaaaaatttgtggaaagcatgtgtagaacatcacacattcttccgtttggacagaccacttccacctcaaaagaatttttttgcacattattttacattaggttcaaaattccggtactgtgggagaactgaagtccaatcagttcagtatggcaaagaaaaggcaaataaagacagggtatttgcaagatccccaagtaagcccttggcacggaaattaatggattgggaagtagtaagcagaaattcaatatctgatgacaggttagaaacacaaagtcttccatcacgatctccaccgggaactcctaatcatcgaaattctacattcacgcaggaaggaacccggttacgaccatcttcagttggtcatttggtagaccatatggttcatacttccccaagcgaagtgtttgtaaatcagagatctccgtcatcaacacaagctaatagcattgttctggaatcatcaccatcacaagagacccctggagatgggaagcctccagctttaccacccaaacagtcaaagaaaaacagttggaaccaaattcattattcacattcgcaacaagatctagaaagtcatattaatgaaacatttgatattccatcttctcctgaaaaacccactcctaatggtggtattccacatgataatcttgtcctaatcagaatgaaacctgatgaaaatgggaggtttggattcaatgtaaagggaggatatgatcagaagatgcctgtgattgtgtctcgagtagcaccaggaacacctgctgacctctgtgtccctagactgaatgaaggggaccaagttgtactgatcaatggtcgggacattgcagaacacactcatgatcaggttgtgctgtttattaaagctagttgtgagagacattctggggaactcatgcttctagttcgacctaatgctgtatatgatgtagtggaagaaaagctagaaaatgagccagatttccagtatattcctgagaaagccccactagatagtgtgcatcaggatgaccattccctgcgggagtcaatgatccagctagctgaggggcttatcactggaacagtcctgacacagtttgatcaactgtatcggaaaaaacctggaatgacaatgtcctgtgccaaattacctcagaatatttccaaaaatagatacagagatatttcgccttatgatgccacacgggtcattttaaaaggtaatgaagactacatcaatgcgaactatataaatatggaaattccttcttccagcattataaatcagtacattgcttgtcaagggccattaccacacacttgtacagatttttggcagatgacttgggaacaaggctcctctatggttgtaatgttgaccacacaagttgaacgtggcagagttaaatgtcaccaatattggccagaacccacaggcagttcatcttatggatgctaccaagttacctgccactctgaagaaggaaacactgcctatatcttcaggaagatgaccctatttaaccaagagaaaaatgaaagtcgtccactcactcagatccagtacatagcctggcctgaccatggagtccctgatgattcgagtgactttctagattttgtttgtcatgtacgaaacaagagggctggcaaggaagaacccgttgttgtccattgcagtgctggaatcggaagaactggggttcttattactatggaaacagccatgtgtctcattgaatgcaatcagccagtttatccactagatattgtaagaacaatgagagatcagcgagccatgatgatccaaacacctagtcaatacagatttgtatgtgaagctattttgaaagtttatgaagaaggctttgttaaacccttaacaacatcaacaaataaataagaaagcaaaaagatctgggatatgtgttggaaaactgctttcccttatgttcactgtgccataatgctgctcgcaggaaatggcattttacaaaaaaanaaatgaagaactcaaaaaaactttgaaaacttcagcactgttgcactttatgttttaaaaaatgtcactctttcaaaatctataactcatgtatttgaagactgtttcatgctttgctccgaacaaatagtaaataactgagtatgttcagggtaatttatgaaattttgtggtggtgccatgcaatccccttttggtagaattgccacaaacaaggctcaaaattctcatcatctctgttatacacctgtatcatgaaagcaaaaagaagtaaacatcaggagtcagctctg

SEQ ID NO: 362327 - DNA, 2242 bp, Homo sapiens
  misc_feature (1949)..(1949): n is a, c, g, or t
cctgcgtgtccctctgcgctccgactggtgcgacttctccctgcgctagcgaggcagggttttggcctcgcctctcgcgagatcgcctcctgttgctgccgccgccgctcctggccactgactggcggcgcctgcgcagccgccatgttcggttgctatgctgcggcctaggagagggggtgtgcttgagggaggaggaagagatagaggaggaggagggggaggaagaggaggtggagaaggaggggggtgactgagctcctcttgcactctcacacacaaacgctgcccaggattacccgccagctcacgccgcgcagtgcgcttttccgctcctcgcgccccaccaccaacattgttctctcaggactcctgggtcccaggggccggaattgggcctgagcgggagaggaaagagacttggctttggccgcggggtcggaggattggggccaggccccctcccccacgcacttttgggggtgtggattatctcatccctgcagggaggtaggagaggtcgccggctgcccgcctccctgccacctccccagcggcgccggcccgcggctgcccagcagcatgaggtggtgctggcggctccgggtcgtggcgcgaccgctgcggcggcggctgctcggggggcgctgaggtagccccccggagcggcacggaggacgcgcttctcctctgcgcgccggggcctcgaggctttttttctccagccgagaggacgcggctgtgatatacgaagactttgtgtggacagtaatgacctcacgtttccgattgcctgctggcagaacctacaatgtacgagcatcagagttggcccgagacagacagcatactgaagtggtttgcaacatccttcttctggataacactgtacaagctttcaaagtcaataaacatgatcaggggcaagtcttgttggatgtcgtcttcaagcatctagatttgactgagcaggactattttggtttacagttggctgatgattccacagataacccaaggtggctggatccaaacaaaccaataaggaagcagctaaagagaggatctccttacagtttgaactttagagtcaaattttttgtaagtgaccccaacaagttacaagaagaatatacaaggtaccagtattttttgcaaattaaacaagacattcttactggaagattaccctgtccttctaatactgctgcccttttagcttcatttgctgttcagtctgaacttggagactacgatcagtcagagaacttgtcaggctacctctcagattattctttcattcctaatcaacctcaagattttgaaaaagaaattgcaaaattacatcagcaacacataggcttatctcctgcagaagcagaatttaattacctaaacacagcacgtaccttagaactctatggagttgaattccactatgcaagggatcagagtaacaatgaaattatgattggagtgatgtcaggaggaattctgatttataagaacagggtacgaatgaatacctttccatggttgaagattgtaaaaatgactttctagattttgtttgtcatgtacgaaacaagagggctggcaaggaagaacccgttgttgtccattgcagtgctggaatcggaagaactggggttcttattactatggaaacagccatgtgtctcattgaatgcaatcagccagtttatccactagatattgtaagaacaatgagagatcagcgagccatgatgatccaaacacctagtcaatacagatttgtatgtgaagctattttgaaagtttatgaagaaggctttgttaaacccttaacaacatcaacaaataaataagaaagcaaaaagatctgggatatgtgttggaaaactgctttcccttatgttcactgtgccataatgctgctcgcaggaaatggcattttacaaaaaaanaaatgaagaactcaaaaaaactttgaaaacttcagcactgttgcactttatgttttaaaaaatgtcactctttcaaaatctataactcatgtatttgaagactgtttcatgctttgctccgaacaaatagtaaataactgagtatgttcagggtaatttatgaaattttgtggtggtgccatgcaatccccttttggtagaattgccacaaacaaggctcaaaattctcatcatctctgttatacacctgtatcatgaaagcaaaaagaagtaaacatcaggagtcagctctg

SEQ ID NO: 362328 - DNA, 1162 bp, Homo sapiens
aacttggtaccagggaattggaaggtttctgtcattttgtgacgatatttttaaatttctttgcaggtagaagaagaaaggtgccactccggcatgaagacagactcgcttagtcgccagtcacttaagctgagtgcattgtgatttccaataattgaggcagtggttctaaaagctgtctacattaatgaaaagagcaatgtggccagcttgactaagccgccagcgcacagcgcggcaggacgcgcccgggtctcagcggacttgtgcatgttagctgtgtagatttatgtgagggcttgtaaaactctggtcttgtaaactagtcttaagcgcttttaatatggagacagatgagagcccctctccgctcccgtgtgggcccgcaggagaagcggtgatggagagccgagctcgccccttccaagcgctgccccgtgagcagtctccaccacctcccctgcaaacgtccagtggtgcagaggtaatggacgttggctctggtggtgatggacagtccgaactccctgctgaggaccccttcaacttctacggagcttctcttctctccaaaggatccttctctaagggccgcctcctcatagacccgaactgtagtggccacagcccgcgcaccgcccggcacgcacctgcggtccggaagttctcccctgaccttaagttgcttaaggatgtaaagattagcgtgagctttaccgagagctgcaggagtaaggacaggaaggtgctgtacacaggagcagagcgcgacgtgcgggcggagtgcggtctgctccttagccctgtcagtggggacgtgcatgcttgtccctttggcgggagtgttggtgacggggtaggcatagggggtgagagtgctgataagaaggatgaggagaatgagctggatcaggaaaagagagtggagtatgcagtgctcgatgagttagaagattttactgacaatttggagctagatgaagaaggagcaggcgggttcacggctaaagcaatcgttcagagagacagagtggatgaagaggccttgaatttcccctacgaggtatgttggcagcccctcctctagagggctcttagcaaaacccaaagagagatttgggaattgcagcatcttttgaaagcagggaaattaaaaaaaaaa

SEQ ID NO: 362329 - DNA, 1309 bp, Homo sapiens
agcctggacaggctttccagatggcagcggcggtcggtcggtgaggctttcccggctgtggtttggctgcgggcggcttgggcagcccgcgggcgcctcaggtagaagaagaaaggtgccactccggcatgaagacagactcgcttagtcgccagtcacttaagctgagtgcattgtgatttccaataattgaggcagtggttctaaaagctgtctacattaatgaaaagagcaatgtggccagcttgactaagccgccagcgcacagcgcggcaggacgcgcccgggtctcagcggacttgtgcatgttagctgtgtagatttatgtgagggcttgtaaaactctggtcttgtaaactagtcttaagcgcttttaatatggagacagatgagagcccctctccgctcccgtgtgggcccgcaggagaagcggtgatggagagccgagctcgccccttccaagcgctgccccgtgagcagtctccaccacctcccctgcaaacgtccagtggtgcagaggtaatggacgttggctctggtggtgatggacagtccgaactccctgctgaggaccccttcaacttctacggagcttctcttctctccaaaggatccttctctaagggccgcctcctcatagacccgaactgtagtggccacagcccgcgcaccgcccggcacgcacctgcggtccggaagttctcccctgaccttaagttgcttaaggatgtaaagattagcgtgagctttaccgagagctgcaggagtaaggacaggaaggtgctgtacacaggagcagagcgcgacgtgcgggcggagtgcggtctgctccttagccctgtcagtggggacgtgcatgcttgtccctttggcgggagtgttggtgacggggtaggcatagggggtgagagtgctgataagaaggatgaggagaatgagctggatcaggaaaagagagtggagtatgcagtgctcgatgagttagaagattttactgacaatttggagctagatgaagaaggagcaggcgggttcacggctaaagcaatcgttcagagagacagagtggatgaagaggccttgaatttcccctacgaggatgactttgacaacgatgtggatgctctgctggaagaaggcctttgtgcccccaaaaagaggcgaacagaggaaaaatatggcggagacagcgaccatccgtccgatggagagacaagtgtgcagccgatgatgaccaagattaaaacagtgctcaaaagtcgtggccgcccacctacagagcctgttctgtaatcgataaaccccgatc

SEQ ID NO: 362330 - DNA, 690 bp, Homo sapiens
ggcacgaggctactgcactctgcctgggcaacagagggagactctgtctcaaaaacacaaaaaaggaagatttgggctgggcgcagcggctcacattgtaatcccaaagtgctgggattacaggcgtgagccaccacgcctggccgaaaaacccactctcataacagaagtgcagactcattgctagattcagtgcccttgagtgtgccagaggtcctctgtgtttgagacaatcctgtgtgtgccaggaggctccgtgtgcaccaggggctctcagaatcccgcttacccagctggagaccatgcctctggcagccccatctcagccagccctgctctctccctcttccctccaggtgaggcaaacttcataggaatctgtacctgaatgtgagctcctgataataaaactctgaggctttggtgagcgcatttcgaggcctttcccttgtatgcagggtgccagtgggagctgctatgtctcctgtgcagccagacaccctggacgaggcccttcccacctccccctttcctcacggcttcttcagcaccacatgtggatgcctgtgggtcagtccatctgtccatgggcaggggccgctgtgagagaccccatgcgcgtgggatgtggtagatgctgattatggggccagccacccatacaggtctatcaggtcgcaatggaggccc

SEQ ID NO: 362331 - DNA, 507 bp, Homo sapiens
aagggcacatctaggccccctgagagcacctcctttctgtgtctgttctcaggaatgctgttgagctctcctgttgcaggagcatgagcgccaggggctctggtgtctgaacagcgtgttttgcaggatgactttgacaacgatgtggatgctctgctggaagaaggcctttgtgcccccaaaaagaggcgaacagaggaaaaatatggcggagacagcgaccatccgtccgatggagagacaagtgtgcagccgatgatgaccaagattaaaacagtgctcaaaagtcgtggccgcccacctacagagccgctgcccgacgggtggatcatgacattccataactctggagtcccggtgtacctacacagagagtctcgggtggtcacctggtccaggccatacttcttgggaacgggaagcatacgggtaggggaggcatcagtcgtgactttaggcttgtaagttctcagaccaaaacgtgcacatccacacacatggcaccgc

SEQ ID NO: 362332 - DNA, 287 bp, Homo sapiens
acttcagcctggatgatggagaaaaaccctgtctcttaaaaaaaaaaaaaaaggaaaaagaaagatttggacacggacggatacgcgcacaggaagaacaccgtgtaaagactggaattctgctccacgagccaaggcatcaccagaagctgggagaggggcctgcttcagagcctctcttagagccttcagagggagcagacctgctgtcactctgatcatggacttccagcatccagagctgtgtgacaataaatgtctgttatcttaagtggttcaatttgtga

SEQ ID NO: 362333 - DNA, 319 bp, Homo sapiens
cttgccaagttcggaattttagaggatccccccccgaattaaccctcactaaagaagtgcagactcattgctagattcagtgcccttgagtgtgccagaggtcctctgtgtttgagacaatcctgtgtgtgccaggaggctccgtgtgcaccaggggctctcagaatcccgcttacccagctggagaccatgcctctggcagccccatctcagccagccctgctctctccctcttccctccaggtgaggcaaacttcataggaatctgtacctgaatgtgagctcctgataataaaactctgaggctttggtgagcgca

SEQ ID NO: 362334 - DNA, 5003 bp, Homo sapiens
gcggcagccggaagtcggcggcggtggcggaggcggtgagtgcgcggctccggggctggccgactccgctagtggcccggccggcctgggctcgggggctccgggctctgggctctgggtgcgcggaccgggccaggctgcttgaagacctcgcgacctgtgtcagcagagccgccctgcaccaccatgtgcatcatcttctttaagtttgatcctcgccctgtttccaaaaacgcgtacaggctcatcttggcagccaacagggatgaattctacagccgaccctccaagttagctgacttctgggggaacaacaacgagatcctcagtgggctggacatggaggaaggcaaggaaggaggcacatggctgggcatcagcacacgtggcaagctggcagcactcaccaactacctgcagccgcagctggactggcaggcccgagggcgaggtgaacttgtcacccactttctgaccactgacgtggacagcttgtcctacctgaagaaggtctctatggagggccatctgtacaatggcttcaacctcatagcagccgacctgagcacagcaaagggagacgtcatttgctactatgggaaccgaggggagcctgatcctatcgttttgacgccaggtagaagaagaaaggtgccactccggcatgaagacagactcgcttagtcgccagtcacttaagctgagtgcattgtgatttccaataattgaggcagtggttctaaaagctgtctacattaatgaaaagagcaatgtggccagcttgactaagccgccagcgcacagcgcggcaggacgcgcccgggtctcagcggacttgtgcatgttagctgtgtagatttatgtgagggcttgtaaaactctggtcttgtaaactagtcttaagcgcttttaatatggagacagatgagagcccctctccgctcccgtgtgggcccgcaggagaagcggtgatggagagccgagctcgccccttccaagcgctgccccgtgagcagtctccaccacctcccctgcaaacgtccagtggtgcagaggtaatggacgttggctctggtggtgatggacagtccgaactccctgctgaggaccccttcaacttctacggagcttctcttctctccaaaggatccttctctaagggccgcctcctcatagacccgaactgtagtggccacagcccgcgcaccgcccggcacgcacctgcggtccggaagttctcccctgaccttaagttgcttaaggatgtaaagattagcgtgagctttaccgagagctgcaggagtaaggacaggaaggtgctgtacacaggagcagagcgcgacgtgcgggcggagtgcggtctgctccttagccctgtcagtggggacgtgcatgcttgtccctttggcgggagtgttggtgacggggtaggcatagggggtgagagtgctgataagaaggatgaggagaatgagctggatcaggaaaagagagtggagtatgcagtgctcgatgagttagaagattttactgacaatttggagctagatgaagaaggagcaggcgggttcacggctaaagcaatcgttcagagagacagagtggatgaagaggccttgaatttcccctacgaggatgactttgacaacgatgtggatgctctgctggaagaaggcctttgtgcccccaaaaagaggcgaacagaggaaaaatatggcggagacagcgaccatccgtccgatggagagacaagtgtgcagccgatgatgaccaagattaaaacagtgctcaaaagtcgtggccgcccacctacagagccgctgcccgacgggtggatcatgacattccataactctggagtcccggtgtacctacacagagagtctcgggtggtcacctggtccaggccatacttcttgggaacgggaagcatacggaaacacgaccctcctctgagtagcatcccttgtctgcattataagaaaatgaaggacaacgaggaacgggagcaaagcagtgacctcacccctagtggggatgtgtcccccgtcaagcccctgagccgatctgcagagctggagtttcccctggatgagcctgactctatgggtgctgacccggggcccccggacgagaaagacccactaggggctgaggcagcccctggggccctggggcaggtgaaggccaaagtcgaggtgtgcaaagatgaatccgttgatctcgaggaatttcgaagctacctggagaagcgttttgactttgagcaagttactgtgaaaaaattcaggacttgggctgagcggcggcaattcaatcgggaaatgaagcggaagcaggcggagtccgagaggcccatcttgccagccaatcagaagctcattactttatcagtgcaagatgcacccacaaagaaagagtttgttattaaccccaacgggaaatccgaggtctgcatcctgcacgagtacatgcagcgtgtcctcaaggtccgccctgtctataatttctttgaatgtgagaacccaagtgagccttttggtgcctcggtgaccattgatggtgtgacttacggatctggaactgcaagcagcaaaaaacttgcgaagaataaagctgcccgagctacactggaaatcctcatccctgactttgttaaacagacctctgaagagaagcccaaagacagtgaagaactcgagtattttaaccacatcagcatcgaggactcgcgggtctacgagctgaccagcaaggctgggctgttgtctccatatcagatcctccacgagtgccttaaaagaaaccatgggatgggtgacacgtctatcaagtttgaagtggttcctgggaaaaaccagaagagtgaatacgtcatggcgtgtggcaagcacacagtgcgcgggtggtgtaagaacaagagagttggaaagcagttagcctcacagaagatccttcagctgctgcacccacatgtcaagaactgggggtctttactgcgcatgtatggccgtgagagcagcaagatggtcaagcaggagacatcggacaagagtgtgattgagctgcagcagtatgccaagaagaacaagcccaacctgcacatcctcagcaagctccaagaggagatgaagaggctagctgaggaaagggaggagactcgaaagaagcccaagatgtccattgtggcgtccgcccagcctggcggtgagcccctgtgcaccgtggacgtgtgagggaggtggcacgggccagggcgcgggggccgccagccgcacttctgaggagaccagcagtcatgcatcgtgcaccacagtgtcaggcctccaacccacgctccttccctgtggccaacctgtgggcccggccttagggtggaggctttagtgtacagggacagccatggccacacagcacacatgtggagcagcggctctccctggaaagctccaggcctgaatggatggactcagcgactgcaccagtggcagctggtgactgtggacagtggtggaccctgcttctgtgcacctgctgcaggctctttttatgaaggctttcatgaattttagtatgtaatacgcactgacgacacatgatgcttggatgacagatgagaggggatggctgagtcctgtggctggcccgtgatgccaggtggcccatgtgcccagggcgcctgcagggctgctacagggacctggtcaggaggtgcacatggtgccctgccctcacccaccctctgtgtttccccttctttgaaaaggtagaagagaaaggaatattttaaacctttttggcttaaacagaattttagcatcagaactagctttctgggattggaggcaaaccatcaaggtggtccctctccagtctggacacgatgccagcaaggatgacgtcctgccacctcctggagttaccctggcctcctagggtccctttttctgatgaagtcttaatgccctaaaagcgcctctttggacactgaggccctctctgcctttcctggcctccggcaacagttttttacaaagattttttgcagtcgaggcacatatatccacacattgatttttaaagcttttgtgatattttagcattttgaaagactttcacagtgagagtagaaggtagatttggaatcatgcattttagcaagtggacttgttgaaacaggaagcaagggccttcagtgtagcccattcttgatccagagctgttgcctgtgacagcggtttctctggatgtcaaaggcagctgcctggtgcccagcttgcttctcgactggtggcccctatgggtgggtgtgcgatggaaatgtgttcctgccggagtctgaggcaccagggtgtgctcaaaggctggccctggtggtggactggcacctgtgcagagtgccgtgtgcttgtggtgcgccatctgaagcaagagtccagcgttctgccgtgtctgtcccccaccatgccccctacaggcggtactgatggcgcttttttttttttttctgtcaggaaaacaatgttggcctgtgggccgcccacaacatatccttccctcactacctgtgtgaccaaggttggcttctgttgacctttaaaaaagaaaccctcaactcaaattgctataattagacacttgcttctgtcttgcctcctgtctgcagctgtgaatagtcatttgactgtgactgttgcccttagccagccagatgcgcctgtgaaccaaagcttcgtgcacatgtgttcccctaaaggttggggagcctcgctgtgtcttgctgttcccaggcaccaccacagcaggtgctgccatactcttgtggtctctgtgcgccccccccccccccacccgtctgccaagcatgggtatgaatcgtgcacacagccatgcttcaaggccggggcaggggagcctgtgctgatgccatccagggcactgggctgtgcctggaaggcgagccttgattgtctgaacacataaagcaaactgtccagaaaaaa

SEQ ID NO: 362335 - DNA, 5243 bp, Homo sapiens
gcggcagccggaagtcggcggcggtggcggaggcggtgagtgcgcggctccggggctggccgactccgctagtggcccggccggcctgggctcgggggctccgggctctgggctctgggtgcgcggaccgggccaggctgcttgaagacctcgcgacctgtgtcagcagagccgccctgcaccaccatgtgcatcatcttctttaagtttgatcctcgccctgtttccaaaaacgcgtacaggtaaccccctcgctctgcatctgctgcgccctgcagggtcctgggtgcccagccagttctcatgccacccaagctgctgtgtgcaggaaggtgtgtgggccaggacggggctgcacaggcctggcactgccctccaggacagggtcactcagtgtgggatgctgtcagaatgcctctcggggcggggactccagtcaatgtacaaagacgtgaagactcagccacagaaggcagccacaggctcatcttggcagccaacagggatgaattctacagccgaccctccaagttagctgacttctgggggaacaacaacgagatcctcagtgggctggacatggaggaaggcaaggaaggaggcacatggctgggcatcagcacacgtggcaagctggcagcactcaccaactacctgcagccgcagctggactggcaggcccgagggcgaggtgaacttgtcacccactttctgaccactgacgtggacagcttgtcctacctgaagaaggtctctatggagggccatctgtacaatggcttcaacctcatagcagccgacctgagcacagcaaagggagacgtcatttgctactatgggaaccgaggggagcctgatcctatcgttttgacgccaggtagaagaagaaaggtgccactccggcatgaagacagactcgcttagtcgccagtcacttaagctgagtgcattgtgatttccaataattgaggcagtggttctaaaagctgtctacattaatgaaaagagcaatgtggccagcttgactaagccgccagcgcacagcgcggcaggacgcgcccgggtctcagcggacttgtgcatgttagctgtgtagatttatgtgagggcttgtaaaactctggtcttgtaaactagtcttaagcgcttttaatatggagacagatgagagcccctctccgctcccgtgtgggcccgcaggagaagcggtgatggagagccgagctcgccccttccaagcgctgccccgtgagcagtctccaccacctcccctgcaaacgtccagtggtgcagaggtaatggacgttggctctggtggtgatggacagtccgaactccctgctgaggaccccttcaacttctacggagcttctcttctctccaaaggatccttctctaagggccgcctcctcatagacccgaactgtagtggccacagcccgcgcaccgcccggcacgcacctgcggtccggaagttctcccctgaccttaagttgcttaaggatgtaaagattagcgtgagctttaccgagagctgcaggagtaaggacaggaaggtgctgtacacaggagcagagcgcgacgtgcgggcggagtgcggtctgctccttagccctgtcagtggggacgtgcatgcttgtccctttggcgggagtgttggtgacggggtaggcatagggggtgagagtgctgataagaaggatgaggagaatgagctggatcaggaaaagagagtggagtatgcagtgctcgatgagttagaagattttactgacaatttggagctagatgaagaaggagcaggcgggttcacggctaaagcaatcgttcagagagacagagtggatgaagaggccttgaatttcccctacgaggatgactttgacaacgatgtggatgctctgctggaagaaggcctttgtgcccccaaaaagaggcgaacagaggaaaaatatggcggagacagcgaccatccgtccgatggagagacaagtgtgcagccgatgatgaccaagattaaaacagtgctcaaaagtcgtggccgcccacctacagagccgctgcccgacgggtggatcatgacattccataactctggagtcccggtgtacctacacagagagtctcgggtggtcacctggtccaggccatacttcttgggaacgggaagcatacggaaacacgaccctcctctgagtagcatcccttgtctgcattataagaaaatgaaggacaacgaggaacgggagcaaagcagtgacctcacccctagtggggatgtgtcccccgtcaagcccctgagccgatctgcagagctggagtttcccctggatgagcctgactctatgggtgctgacccggggcccccggacgagaaagacccactaggggctgaggcagcccctggggccctggggcaggtgaaggccaaagtcgaggtgtgcaaagatgaatccgttgatctcgaggaatttcgaagctacctggagaagcgttttgactttgagcaagttactgtgaaaaaattcaggacttgggctgagcggcggcaattcaatcgggaaatgaagcggaagcaggcggagtccgagaggcccatcttgccagccaatcagaagctcattactttatcagtgcaagatgcacccacaaagaaagagtttgttattaaccccaacgggaaatccgaggtctgcatcctgcacgagtacatgcagcgtgtcctcaaggtccgccctgtctataatttctttgaatgtgagaacccaagtgagccttttggtgcctcggtgaccattgatggtgtgacttacggatctggaactgcaagcagcaaaaaacttgcgaagaataaagctgcccgagctacactggaaatcctcatccctgactttgttaaacagacctctgaagagaagcccaaagacagtgaagaactcgagtattttaaccacatcagcatcgaggactcgcgggtctacgagctgaccagcaaggctgggctgttgtctccatatcagatcctccacgagtgccttaaaagaaaccatgggatgggtgacacgtctatcaagtttgaagtggttcctgggaaaaaccagaagagtgaatacgtcatggcgtgtggcaagcacacagtgcgcgggtggtgtaagaacaagagagttggaaagcagttagcctcacagaagatccttcagctgctgcacccacatgtcaagaactgggggtctttactgcgcatgtatggccgtgagagcagcaagatggtcaagcaggagacatcggacaagagtgtgattgagctgcagcagtatgccaagaagaacaagcccaacctgcacatcctcagcaagctccaagaggagatgaagaggctagctgaggaaagggaggagactcgaaagaagcccaagatgtccattgtggcgtccgcccagcctggcggtgagcccctgtgcaccgtggacgtgtgagggaggtggcacgggccagggcgcgggggccgccagccgcacttctgaggagaccagcagtcatgcatcgtgcaccacagtgtcaggcctccaacccacgctccttccctgtggccaacctgtgggcccggccttagggtggaggctttagtgtacagggacagccatggccacacagcacacatgtggagcagcggctctccctggaaagctccaggcctgaatggatggactcagcgactgcaccagtggcagctggtgactgtggacagtggtggaccctgcttctgtgcacctgctgcaggctctttttatgaaggctttcatgaattttagtatgtaatacgcactgacgacacatgatgcttggatgacagatgagaggggatggctgagtcctgtggctggcccgtgatgccaggtggcccatgtgcccagggcgcctgcagggctgctacagggacctggtcaggaggtgcacatggtgccctgccctcacccaccctctgtgtttccccttctttgaaaaggtagaagagaaaggaatattttaaacctttttggcttaaacagaattttagcatcagaactagctttctgggattggaggcaaaccatcaaggtggtccctctccagtctggacacgatgccagcaaggatgacgtcctgccacctcctggagttaccctggcctcctagggtccctttttctgatgaagtcttaatgccctaaaagcgcctctttggacactgaggccctctctgcctttcctggcctccggcaacagttttttacaaagattttttgcagtcgaggcacatatatccacacattgatttttaaagcttttgtgatattttagcattttgaaagactttcacagtgagagtagaaggtagatttggaatcatgcattttagcaagtggacttgttgaaacaggaagcaagggccttcagtgtagcccattcttgatccagagctgttgcctgtgacagcggtttctctggatgtcaaaggcagctgcctggtgcccagcttgcttctcgactggtggcccctatgggtgggtgtgcgatggaaatgtgttcctgccggagtctgaggcaccagggtgtgctcaaaggctggccctggtggtggactggcacctgtgcagagtgccgtgtgcttgtggtgcgccatctgaagcaagagtccagcgttctgccgtgtctgtcccccaccatgccccctacaggcggtactgatggcgcttttttttttttttctgtcaggaaaacaatgttggcctgtgggccgcccacaacatatccttccctcactacctgtgtgaccaaggttggcttctgttgacctttaaaaaagaaaccctcaactcaaattgctataattagacacttgcttctgtcttgcctcctgtctgcagctgtgaatagtcatttgactgtgactgttgcccttagccagccagatgcgcctgtgaaccaaagcttcgtgcacatgtgttcccctaaaggttggggagcctcgctgtgtcttgctgttcccaggcaccaccacagcaggtgctgccatactcttgtggtctctgtgcgccccccccccccccacccgtctgccaagcatgggtatgaatcgtgcacacagccatgcttcaaggccggggcaggggagcctgtgctgatgccatccagggcactgggctgtgcctggaaggcgagccttgattgtctgaacacataaagcaaactgtccagaaaaaa

SEQ ID NO: 362336 - DNA, 4487 bp, Homo sapiens
ctccggggctggggggcgggccccgggcccaggcgttgccgactctcgtcgctgtccgcccgggtaaagaggctcctctcccggagggcccgaagcctagcatcgccttcaggcgggaaaggtagaagaagaaaggtgccactccggcatgaagacagactcgcttagtcgccagtcacttaagctgagtgcattgtgatttccaataattgaggcagtggttctaaaagctgtctacattaatgaaaagagcaatgtggccagcttgactaagccgccagcgcacagcgcggcaggacgcgcccgggtctcagcggacttgtgcatgttagctgtgtagatttatgtgagggcttgtaaaactctggtcttgtaaactagtcttaagcgcttttaatatggagacagatgagagcccctctccgctcccgtgtgggcccgcaggagaagcggtgatggagagccgagctcgccccttccaagcgctgccccgtgagcagtctccaccacctcccctgcaaacgtccagtggtgcagaggtaatggacgttggctctggtggtgatggacagtccgaactccctgctgaggaccccttcaacttctacggagcttctcttctctccaaaggatccttctctaagggccgcctcctcatagacccgaactgtagtggccacagcccgcgcaccgcccggcacgcacctgcggtccggaagttctcccctgaccttaagttgcttaaggatgtaaagattagcgtgagctttaccgagagctgcaggagtaaggacaggaaggtgctgtacacaggagcagagcgcgacgtgcgggcggagtgcggtctgctccttagccctgtcagtggggacgtgcatgcttgtccctttggcgggagtgttggtgacggggtaggcatagggggtgagagtgctgataagaaggatgaggagaatgagctggatcaggaaaagagagtggagtatgcagtgctcgatgagttagaagattttactgacaatttggagctagatgaagaaggagcaggcgggttcacggctaaagcaatcgttcagagagacagagtggatgaagaggccttgaatttcccctacgaggatgactttgacaacgatgtggatgctctgctggaagaaggcctttgtgcccccaaaaagaggcgaacagaggaaaaatatggcggagacagcgaccatccgtccgatggagagacaagtgtgcagccgatgatgaccaagattaaaacagtgctcaaaagtcgtggccgcccacctacagagccgctgcccgacgggtggatcatgacattccataactctggagtcccggtgtacctacacagagagtctcgggtggtcacctggtccaggccatacttcttgggaacgggaagcatacggaaacacgaccctcctctgagtagcatcccttgtctgcattataagaaaatgaaggacaacgaggaacgggagcaaagcagtgacctcacccctagtggggatgtgtcccccgtcaagcccctgagccgatctgcagagctggagtttcccctggatgagcctgactctatgggtgctgacccggggcccccggacgagaaagacccactaggggctgaggcagcccctggggccctggggcaggtgaaggccaaagtcgaggtgtgcaaagatgaatccgttgatctcgaggaatttcgaagctacctggagaagcgttttgactttgagcaagttactgtgaaaaaattcaggacttgggctgagcggcggcaattcaatcgggaaatgaagcggaagcaggcggagtccgagaggcccatcttgccagccaatcagaagctcattactttatcagtgcaagatgcacccacaaagaaagagtttgttattaaccccaacgggaaatccgaggtctgcatcctgcacgagtacatgcagcgtgtcctcaaggtccgccctgtctataatttctttgaatgtgagaacccaagtgagccttttggtgcctcggtgaccattgatggtgtgacttacggatctggaactgcaagcagcaaaaaacttgcgaagaataaagctgcccgagctacactggaaatcctcatccctgactttgttaaacagacctctgaagagaagcccaaagacagtgaagaactcgagtattttaaccacatcagcatcgaggactcgcgggtctacgagctgaccagcaaggctgggctgttgtctccatatcagatcctccacgagtgccttaaaagaaaccatgggatgggtgacacgtctatcaagtttgaagtggttcctgggaaaaaccagaagagtgaatacgtcatggcgtgtggcaagcacacagtgcgcgggtggtgtaagaacaagagagttggaaagcagttagcctcacagaagatccttcagctgctgcacccacatgtcaagaactgggggtctttactgcgcatgtatggccgtgagagcagcaagatggtcaagcaggagacatcggacaagagtgtgattgagctgcagcagtatgccaagaagaacaagcccaacctgcacatcctcagcaagctccaagaggagatgaagaggctagctgaggaaagggaggagactcgaaagaagcccaagatgtccattgtggcgtccgcccagcctggcggtgagcccctgtgcaccgtggacgtgtgagggaggtggcacgggccagggcgcgggggccgccagccgcacttctgaggagaccagcagtcatgcatcgtgcaccacagtgtcaggcctccaacccacgctccttccctgtggccaacctgtgggcccggccttagggtggaggctttagtgtacagggacagccatggccacacagcacacatgtggagcagcggctctccctggaaagctccaggcctgaatggatggactcagcgactgcaccagtggcagctggtgactgtggacagtggtggaccctgcttctgtgcacctgctgcaggctctttttatgaaggctttcatgaattttagtatgtaatacgcactgacgacacatgatgcttggatgacagatgagaggggatggctgagtcctgtggctggcccgtgatgccaggtggcccatgtgcccagggcgcctgcagggctgctacagggacctggtcaggaggtgcacatggtgccctgccctcacccaccctctgtgtttccccttctttgaaaaggtagaagagaaaggaatattttaaacctttttggcttaaacagaattttagcatcagaactagctttctgggattggaggcaaaccatcaaggtggtccctctccagtctggacacgatgccagcaaggatgacgtcctgccacctcctggagttaccctggcctcctagggtccctttttctgatgaagtcttaatgccctaaaagcgcctctttggacactgaggccctctctgcctttcctggcctccggcaacagttttttacaaagattttttgcagtcgaggcacatatatccacacattgatttttaaagcttttgtgatattttagcattttgaaagactttcacagtgagagtagaaggtagatttggaatcatgcattttagcaagtggacttgttgaaacaggaagcaagggccttcagtgtagcccattcttgatccagagctgttgcctgtgacagcggtttctctggatgtcaaaggcagctgcctggtgcccagcttgcttctcgactggtggcccctatgggtgggtgtgcgatggaaatgtgttcctgccggagtctgaggcaccagggtgtgctcaaaggctggccctggtggtggactggcacctgtgcagagtgccgtgtgcttgtggtgcgccatctgaagcaagagtccagcgttctgccgtgtctgtcccccaccatgccccctacaggcggtactgatggcgcttttttttttttttctgtcaggaaaacaatgttggcctgtgggccgcccacaacatatccttccctcactacctgtgtgaccaaggttggcttctgttgacctttaaaaaagaaaccctcaactcaaattgctataattagacacttgcttctgtcttgcctcctgtctgcagctgtgaatagtcatttgactgtgactgttgcccttagccagccagatgcgcctgtgaaccaaagcttcgtgcacatgtgttcccctaaaggttggggagcctcgctgtgtcttgctgttcccaggcaccaccacagcaggtgctgccatactcttgtggtctctgtgcgccccccccccccccacccgtctgccaagcatgggtatgaatcgtgcacacagccatgcttcaaggccggggcaggggagcctgtgctgatgccatccagggcactgggctgtgcctggaaggcgagccttgattgtctgaacacataaagcaaactgtccagaaaaaa

SEQ ID NO: 362337 - DNA, 2611 bp, Homo sapiens
tcgacccacgcgtgcggtctataatttctttgaatgtgagacaggggcggaccttgaggacacgctgcatgtactcgtgcaggatgcagacctcaaggtccgccctgtctataatttctttgaatgtgagaacccaagtgagccttttggtgcctcggtgaccattgatggtgtgacttacggatctggaactgcaagcagcaaaaaacttgcgaagaataaagctgcccgagctacactggaaatcctcatccctgactttgttaaacagacctctgaagagaagcccaaagacagtgaagaactcgagtattttaaccacatcagcatcgaggactcgcgggtctacgagctgaccagcaaggctgggctgttgtctccatatcagatcctccacgagtgccttaaaagaaaccatgggatgggtgacacgtctatcaagtttgaagtggttcctgggaaaaaccagaagagtgaatacgtcatggcgtgtggcaagcacacagtgcgcgggtggtgtaagaacaagagagttggaaagcagttagcctcacagaagatccttcagctgctgcacccacatgtcaagaactgggggtctttactgcgcatgtatggccgtgagagcagcaagatggtcaagcaggagacatcggacaagagtgtgattgagctgcagcagtatgccaagaagaacaagcccaacctgcacatcctcagcaagctccaagaggagatgaagaggctagctgaggaaagggaggagactcgaaagaagcccaagatgtccattgtggcgtccgcccagcctggcggtgagcccctgtgcaccgtggacgtgtgagggaggtggcacgggccagggcgcgggggccgccagccgcacttctgaggagaccagcagtcatgcatcgtgcaccacagtgtcaggcctccaacccacgctccttccctgtggccaacctgtgggcccggccttagggtggaggctttagtgtacagggacagccatggccacacagcacacatgtggagcagcggctctccctggaaagctccaggcctgaatggatggactcagcgactgcaccagtggcagctggtgactgtggacagtggtggaccctgcttctgtgcacctgctgcaggctctttttatgaaggctttcatgaattttagtatgtaatacgcactgacgacacatgatgcttggatgacagatgagaggggatggctgagtcctgtggctggcccgtgatgccaggtggcccatgtgcccagggcgcctgcagggctgctacagggacctggtcaggaggtgcacatggtgccctgccctcacccaccctctgtgtttccccttctttgaaaaggtagaagagaaaggaatattttaaacctttttggcttaaacagaattttagcatcagaactagctttctgggattggaggcaaaccatcaaggtggtccctctccagtctggacacgatgccagcaaggatgacgtcctgccacctcctggagttaccctggcctcctagggtccctttttctgatgaagtcttaatgccctaaaagcgcctctttggacactgaggccctctctgcctttcctggcctccggcaacagttttttacaaagattttttgcagtcgaggcacatatatccacacattgatttttaaagcttttgtgatattttagcattttgaaagactttcacagtgagagtagaaggtagatttggaatcatgcattttagcaagtggacttgttgaaacaggaagcaagggccttcagtgtagcccattcttgatccagagctgttgcctgtgacagcggtttctctggatgtcaaaggcagctgcctggtgcccagcttgcttctcgactggtggcccctatgggtgggtgtgcgatggaaatgtgttcctgccggagtctgaggcaccagggtgtgctcaaaggctggccctggtggtggactggcacctgtgcagagtgccgtgtgcttgtggtgcgccatctgaagcaagagtccagcgttctgccgtgtctgtcccccaccatgccccctacaggcggtactgatggcgcttttttttttttttctgtcaggaaaacaatgttggcctgtgggccgcccacaacatatccttccctcactacctgtgtgaccaaggttggcttctgttgacctttaaaaaagaaaccctcaactcaaattgctataattagacacttgcttctgtcttgcctcctgtctgcagctgtgaatagtcatttgactgtgactgttgcccttagccagccagatgcgcctgtgaaccaaagcttcgtgcacatgtgttcccctaaaggttggggagcctcgctgtgtcttgctgttcccaggcaccaccacagcaggtgctgccatactcttgtggtctctgtgcgccccccccccccccacccgtctgccaagcatgggtatgaatcgtgcacacagccatgcttcaaggccggggcaggggagcctgtgctgatgccatccagggcactgggctgtgcctggaaggcgagccttgattgtctgaacacataaagcaaactgtccagaaaaaa

SEQ ID NO: 362338 - DNA, 980 bp, Homo sapiens
taggcggccatctcatgctaccagtcgaaagcacatatatccacacattgatttttaaagcttttgtgatattttagcattttgaaagactttcacagtgagagtagaaggtagatttggaatcatgcattttagcaagtggacttgttgaaacaggaagcaagggccttcagtgtagcccattcttgatccagagctgttgcctgtgacagcggtttctctggatgtcaaaggcagctgcctggtgcccagcttgcttctcgactggtggcccctatgggtgggtgtgcgatggaaatgtgttcctgccggagtctgaggcaccagggtgtgctcaaaggctggccctggtggtggactggcacctgtgcagagtgccgtgtgcttgtggtgcgccatctgaagcaagagtccagcgttctgccgtgtctgtcccccaccatgccccctacaggcggtactgatggcgcttttttttttttttctgtcaggaaaacaatgttggcctgtgggccgcccacaacatatccttccctcactacctgtgtgaccaaggttggcttctgttgacctttaaaaaagaaaccctcaactcaaattgctataattagacacttgcttctgtcttgcctcctgtctgcagctgtgaatagtcatttgactgtgactgttgcccttagccagccagatgcgcctgtgaaccaaagcttcgtgcacatgtgttcccctaaaggttggggagcctcgctgtgtcttgctgttcccaggcaccaccacagcaggtgctgccatactcttgtggtctctgtgcgccccccccccccccacccgtctgccaagcatgggtatgaatcgtgcacacagccatgcttcaaggccggggcaggggagcctgtgctgatgccatccagggcactgggctgtgcctggaaggcgagccttgattgtctgaacacataaagcaaactgtccagaaaaaa

SEQ ID NO: 362339 - DNA, 2311 bp, Homo sapiens
  misc_feature (2298)..(2298): n is a, c, g, or t
  misc_feature (2304)..(2304): n is a, c, g, or t
gcggcagccggaagtcggcggcggtggcggaggcggtgagtgcgcggctccggggctggccgactccgctagtggcccggccggcctgggctcgggggctccgggctctgggctctgggtgcgcggaccgggccaggctgcttgaagacctcgcgacctgtgtcagcagagccgccctgcaccaccatgtgcatcatcttctttaagtttgatcctcgccctgtttccaaaaacgcgtacaggctcatcttggcagccaacagggatgaattctacagccgaccctccaagttagctgacttctgggggaacaacaacgagatcctcagtgggctggacatggaggaaggcaaggaaggaggcacatggctgggcatcagcacacgtggcaagctggcagcactcaccaactacctgcagccgcagctggactggcaggcccgagggcgaggtgaacttgtcacccactttctgaccactgacgtggacagcttgtcctacctgaagaaggtctctatggagggccatctgtacaatggcttcaacctcatagcagccgacctgagcacagcaaagggagacgtcatttgctactatgggaaccgaggggagcctgatcctatcgttttgacgccaggcacctacgggctgagcaacgcgctgctggagactccctggaggaagctgtgctttgggaagcagctcttcctggaggctgtggaacggagccaggcgctgcccaaggatgtgctcatcgccagcctcctggatgtgctcaacaatgaagaggcgcagctgccagacccggccatcgaggaccagggtggggagtacgtgcagcccatgctgagcaagtacgcggctgtgtgcgtgcgctgccctggctacggcaccagaaccaacactatcatcctggtagatgcggacggccacgtgaccttcactgagcgtagcatgatggacaaggacctctcccactgggagaccagaacctatgagttcacactgcagagctaaccccacctctgggcctggccagtgggctcctggggggccctgccttgaggggcactgtggacaggaaaccttcctttgccatactgcattgcactgcccgtggcttggccagcatcccccggatcagggccctgtggtttgcgtgttacccatctgtgtccccatgcccagttcagggtctgcctttatgccagtgaggagcagcagagtctgatactaggtctaggaccggccgaggtataccatgaacatgtggatacacctgagcccactcttgcacatgtacacaggcactcacatggcacacacatacactcctgcgtgtgcacaagcacacacatgcaagccatatacatggacaccgacacaggcacatgtacgtgcacaggtgtgctacacatgtgcacacatgcacagttgcacagacacacacacacaggtgcacacacacgatgccgaacaaggcagaagggcgactctcacctctcatgtgcttctggccagtaggtctttgttctggtccaacgacaggagtaggcttgtatttaaaagcggcccctcctctcctgtggccacagaacacaggcgtgcttggactcttgacaagcagacctgctcctgcagaggagacagccacatttggaattgggcaccgagaagacctgagaaaaacccactctctcttttttttttttttgagacggagtcttgctctgtcacccaggctggagtgcagtggcacgatctcggctcactgcaacctccgcctcccaagttcaagcaattctcctgccccagcctcctgattagctgggattacaggcgtgtgccaccatgcccagctaatttttgtgtttttagtagagacggggtttcaccatgttggtcaggctggtcttgaactcctgacgtggtgatccacctgcctcggcctcccaaagtgctgggattacaggcgtgagccaccacgcctggccgaaaaacccactctcataacagaagtgcagactcattgctagattcagtgcccttgagtgtgccagaggtcctctgtgtttgagacaatcctgtgtgtgccaggaggctccgtgtgcaccaggggctctcagaatcccgcttacccagctggagaccatgcctctggcagccccatctcagccagccctgctctctccctcttccctccaggtgaggcaaacttcataggaatctgtacctgaatgtgagctcctgataataaaactctgaggctttggtgagcgcaaaaaaaaaaaaaaaaanaacacncaaacac

SEQ ID NO: 362340 - DNA, 2437 bp, Homo sapiens
gcggcagccggaagtcggcggcggtggcggaggcggtgagtgcgcggctccggggctggccgactccgctagtggcccggccggcctgggctcgggggctccgggctctgggctctgggtgcgcggaccgggccaggctgcttgaagacctcgcgacctgtgtcagcagagccgccctgcaccaccatgtgcatcatcttctttaagtttgatcctcgccctgtttccaaaaacgcgtacaggctcatcttggcagccaacagggatgaattctacagccgaccctccaagttagctgacttctgggggaacaacaacgagatcctcagtgggctggacatggaggaaggcaaggaaggaggcacatggctgggcatcagcacacgtggcaagctggcagcactcaccaactacctgcagccgcagctggactggcaggcccgagggcgaggtgaacttgtcacccactttctgaccactgacgtggacagcttgtcctacctgaagaaggtctctatggagggccatctgtacaatggcttcaacctcatagcagccgacctgagcacagcaaagggagacgtcatttgctactatgggaaccgaggggagcctgatcctatcgttttgacgccaggcacctacgggctgagcaacgcgctgctggagactccctggaggaagctgtgctttgggaagcagctcttcctggaggctgtggaacggagccaggcgctgcccaaggatgtgctcatcgccagcctcctggatgtgctcaacaatgaagaggcgcagctgccagacccggccatcgaggaccagggtggggagtacgtgcagcccatgctgagcaagtacgcggctgtgtgcgtgcgctgccctggctacggcaccaggtattgcagcaccgtgggtgcgccacctcctatcccatgtcccacctcccacgctagagggccggcaaagaagccaagtgcccatagccagagccaggcttcttcctcgcctgagtggattccagagcttctgccctgtccagacgcagctgcaggaaccaacactatcatcctggtagatgcggacggccacgtgaccttcactgagcgtagcatgatggacaaggacctctcccactgggagaccagaacctatgagttcacactgcagagctaaccccacctctgggcctggccagtgggctcctggggggccctgccttgaggggcactgtggacaggaaaccttcctttgccatactgcattgcactgcccgtggcttggccagcatcccccggatcagggccctgtggtttgcgtgttacccatctgtgtccccatgcccagttcagggtctgcctttatgccagtgaggagcagcagagtctgatactaggtctaggaccggccgaggtataccatgaacatgtggatacacctgagcccactcttgcacatgtacacaggcactcacatggcacacacatacactcctgcgtgtgcacaagcacacacatgcaagccatatacatggacaccgacacaggcacatgtacgtgcacaggtgtgctacacatgtgcacacatgcacagttgcacagacacacacacacaggtgcacacacacgatgccgaacaaggcagaagggcgactctcacctctcatgtgcttctggccagtaggtctttgttctggtccaacgacaggagtaggcttgtatttaaaagcggcccctcctctcctgtggccacagaacacaggcgtgcttggactcttgacaagcagacctgctcctgcagaggagacagccacatttggaattgggcaccgagaagacctgagaaaaacccactctctcttttttttttttttgagacggagtcttgctctgtcacccaggctggagtgcagtggcacgatctcggctcactgcaacctccgcctcccaagttcaagcaattctcctgccccagcctcctgattagctgggattacaggcgtgtgccaccatgcccagctaatttttgtgtttttagtagagacggggtttcaccatgttggtcaggctggtcttgaactcctgacgtggtgatccacctgcctcggcctcccaaagtgctgggattacaggcgtgagccaccacgcctggccgaaaaacccactctcataacagaagtgcagactcattgctagattcagtgcccttgagtgtgccagaggtcctctgtgtttgagacaatcctgtgtgtgccaggaggctccgtgtgcaccaggggctctcagaatcccgcttacccagctggagaccatgcctctggcagccccatctcagccagccctgctctctccctcttccctccaggtgaggcaaacttcataggaatctgtacctgaatgtgagctcctgataataaaactctgaggctttggtgagcgca

SEQ ID NO: 362341 - DNA, 3160 bp, Homo sapiens
agcctggacaggctttccagatggcagcggcggtcggtcggtgaggctttcccggctgtggtttggctgcgggcggcttgggcagcccgcgggcgcctcaggtagaagaagaaaggtgccactccggcatgaagacagactcgcttagtcgccagtcacttaagctgagtgcattgtgatttccaataattgaggcagtggttctaaaagctgtctacattaatgaaaagagcaatgtggccagcttgactaagccgccagcgcacagcgcggcaggacgcgcccgggtctcagcggacttgtgcatgttagctgtgtagatttatgtgagggcttgtaaaactctggtcttgtaaactagtcttaagcgcttttaatatggagacagatgagagcccctctccgctcccgtgtgggcccgcaggagaagcggtgatggagagccgagctcgccccttccaagcgctgccccgtgagcagtctccaccacctcccctgcaaacgtccagtggtgcagaggtaatggacgttggctctggtggtgatggacagtccgaactccctgctgaggaccccttcaacttctacggagcttctcttctctccaaaggatccttctctaagggccgcctcctcatagacccgaactgtagtggccacagcccgcgcaccgcccggcacgcacctgcggtccggaagttctcccctgaccttaagttgcttaaggatgtaaagattagcgtgagctttaccgagagctgcaggagtaaggacaggaaggtgctgtacacaggagcagagcgcgacgtgcgggcggagtgcggtctgctccttagccctgtcagtggggacgtgcatgcttgtccctttggcgggagtgttggtgacggggtaggcatagggggtgagagtgctgataagaaggatgaggagaatgagctggatcaggaaaagagagtggagtatgcagtgctcgatgagttagaagattttactgacaatttggagctagatgaagaaggagcaggcgggttcacggctaaagcaatcgttcagagagacagagtggatgaagaggccttgaatttcccctacgaggatgactttgacaacgatgtggatgctctgctggaagaaggcctttgtgcccccaaaaagaggcgaacagaggaaaaatatggcggagacagcgaccatccgtccgatggagagacaagtgtgcagccgatgatgaccaagattaaaacagtgctcaaaagtcgtggccgcccacctacagagccgctgcccgacgggtggatcatgacattccataactctggagtcccggtgtacctacacagagagtctcgggtggtcacctggtccaggccatacttcttgggaacgggaagcatacggaaacacgaccctcctctgagtagcatcccttgtctgcattataagaaaatgaaggacaacgaggaacgggagcaaagcagtgacctcacccctagtggggatgtgtcccccgtcaagcccctgagccgatctgcagagctggagtttcccctggatgagcctgactctatgggtgctgacccggggcccccggacgagaaagacccactaggggctgaggcagcccctggggccctggggcaggtgaaggccaaagtcgaggtgtgcaaagatgaatccgttgatctcgaggaatttcgaagctacctggagaagcgttttgactttgagcaagttactgtgaaaaaattcaggacttgggctgagcggcggcaattcaatcgggaaatgaagcggaagcaggcggagtccgagaggcccatcttgccagccaatcagaagctcattactttatcagtgcaagatgcacccacaaagaaagagtttgttattaaccccaacgggaaatccgaggtctgcatcctgcacgagtacatgcagcgtgtcctcaaggtccgccctgtctataatttctttgaatgtgagaacccaagtgagccttttggtgcctcggtgaccattgatggtgtgacttacggatctggaactgcaagcagcaaaaaacttgcgaagaataaagctgcccgagctacactggaaatcctcatccctgactttgttaaacagacctctgaagagaagcccaaagacagtgaagaactcgagtattttaaccacatcagcatcgaggactcgcgggtctacgagctgaccagcaaggctgggctgttgtctccatatcagatcctccacgagtgccttaaaagaaaccatgggatgggtgacacgtctatcaagtttgaagtggttcctgggaaaaaccagaagagtgaatacgtcatggcgtgtggcaagcacacagtgcgcgggtggtgtaagaacaagagagttggaaagcagttagcctcacagaagatccttcagctgctgcacccacatgtcaagaactgggggtctttactgcgcatgtatggccgtgagagcagcaagatggtcaagcaggagacatcggacaagagtgtgattgagctgcagcagtatgccaagaagaacaagcccaacctgcacatcctcagcaagctccaagaggagatgaagaggctagctgaggaaagggaggagactcgaaagaagcccaagatgtccattgtggcgtccgcccagcctggcggaaaacaatgttggcctgtgggccgcccacaacatatccttccctcactacctgtgtgaccaaggttggcttctgttgacctttaaaaaagaaaccctcaactcaaattgctataattagacacttgcttctgtcttgcctcctgtctgcagctgtgaatagtcatttgactgtgactgttgcccttagccagccagatgcgcctgtgaaccaaagcttcgtgcacatgtgttcccctaaaggttggggagcctcgctgtgtcttgctgttcccaggcaccaccacagcaggtgctgccatactcttgtggtctctgtgcgccccccccccccccacccgtctgccaagcatgggtatgaatcgtgcacacagccatgcttcaaggccggggcaggggagcctgtgctgatgccatccagggcactgggctgtgcctggaaggcgagccttgattgtctgaacacataaagcaaactgtccagaaaaaa

SEQ ID NO: 362342 - DNA, 1197 bp, Homo sapiens
agcctggacaggctttccagatggcagcggcggtcggtcggtgaggctttcccggctgtggtttggctgcgggcggcttgggcagcccgcgggcgcctcaggtagaagaagaaaggtgccactccggcatgaagacagactcgcttagtcgccagtcacttaagctgagtgcattgtgatttccaataattgaggcagtggttctaaaagctgtctacattaatgaaaagagcaatgtggccagcttgactaagccgccagcgcacagcgcggcaggacgcgcccgggtctcagcggacttgtgcatgttagctgtgtagatttatgtgagggcttgtaaaactctggtcttgtaaactagtcttaagcgcttttaatatggagacagatgagagcccctctccgctcccgtgtgggcccgcaggagaagcggtgatggagagccgagctcgccccttccaagcgctgccccgtgagcagtctccaccacctcccctgcaaacgtccagtggtgcagaggtaatggacgttggctctggtggtgatggacagtccgaactccctgctgaggaccccttcaacttctacggagcttctcttctctccaaaggatccttctctaagggccgcctcctcatagacccgaactgtagtggccacagcccgcgcaccgcccggcacgcacctgcggtccggaagttctcccctgaccttaagttgcttaaggatgtaaagattagcgtgagctttaccgagagctgcaggagtaaggacaggaaggtgctgtacacaggagcagagcgcgacgtgcgggcggagtgcggtctgctccttagccctgtcagtggggacgtgcatgcttgtccctttggcgggagtgttggtgacggggtaggcatagggggtgagagtgctgataagaaggatgaggagaatgagctggatcaggaaaagagagtggagtatgcagtgctcgatgagttagaagattttactgacaatttggagctagatgaagaaggagcaggcgggttcacggctaaagcaatcgttcagagagacagagtggatgaagaggccttgaatttcccctacgaggtatgttggcagcccctcctctagagggctcttagcaaaacccaaagagagatttgggaattgcagcatcttttgaaagcagggaaattaaaaaaaaaa

SEQ ID NO: 362343 - DNA, 2166 bp, Homo sapiens
gcggcagccggaagtcggcggcggtggcggaggcggtgagtgcgcggctccggggctggccgactccgctagtggcccggccggcctgggctcgggggctccgggctctgggctctgggtgcgcggaccgggccaggctgcttgaagacctcgcgacctgtgtcagcagagccgccctgcaccaccatgtgcatcatcttctttaagtttgatcctcgccctgtttccaaaaacgcgtacaggctcatcttggcagccaacagggatgaattctacagccgaccctccaagttagctgacttctgggggaacaacaacgagatcctcagtgggctggacatggaggaaggcaaggaaggaggcacatggctgggcatcagcacacgtggcaagctggcagcactcaccaactacctgcagccgcagctggactggcaggcccgagggcgagcacagcaaagggagacgtcatttgctactatgggaaccgaggggagcctgatcctatcgttttgacgccaggcacctacgggctgagcaacgcgctgctggagactccctggaggaagctgtgctttgggaagcagctcttcctggaggctgtggaacggagccaggcgctgcccaaggatgtgctcatcgccagcctcctggatgtgctcaacaatgaagaggcgcagctgccagacccggccatcgaggaccagggtggggagtacgtgcagcccatgctgagcaagtacgcggctgtgtgcgtgcgctgccctggctacggcaccagaaccaacactatcatcctggtagatgcggacggccacgtgaccttcactgagcgtagcatgatggacaaggacctctcccactgggagaccagaacctatgagttcacactgcagagctaaccccacctctgggcctggccagtgggctcctggggggccctgccttgaggggcactgtggacaggaaaccttcctttgccatactgcattgcactgcccgtggcttggccagcatcccccggatcagggccctgtggtttgcgtgttacccatctgtgtccccatgcccagttcagggtctgcctttatgccagtgaggagcagcagagtctgatactaggtctaggaccggccgaggtataccatgaacatgtggatacacctgagcccactcttgcacatgtacacaggcactcacatggcacacacatacactcctgcgtgtgcacaagcacacacatgcaagccatatacatggacaccgacacaggcacatgtacgtgcacaggtgtgctacacatgtgcacacatgcacagttgcacagacacacacacacaggtgcacacacacgatgccgaacaaggcagaagggcgactctcacctctcatgtgcttctggccagtaggtctttgttctggtccaacgacaggagtaggcttgtatttaaaagcggcccctcctctcctgtggccacagaacacaggcgtgcttggactcttgacaagcagacctgctcctgcagaggagacagccacatttggaattgggcaccgagaagacctgagaaaaacccactctctcttttttttttttttgagacggagtcttgctctgtcacccaggctggagtgcagtggcacgatctcggctcactgcaacctccgcctcccaagttcaagcaattctcctgccccagcctcctgattagctgggattacaggcgtgtgccaccatgcccagctaatttttgtgtttttagtagagacggggtttcaccatgttggtcaggctggtcttgaactcctgacgtggtgatccacctgcctcggcctcccaaagtgctgggattacaggcgtgagccaccacgcctggccgaaaaacccactctcataacagaagtgcagactcattgctagattcagtgcccttgagtgtgccagaggtcctctgtgtttgagacaatcctgtgtgtgccaggaggctccgtgtgcaccaggggctctcagaatcccgcttacccagctggagaccatgcctctggcagccccatctcagccagccctgctctctccctcttccctccaggtgaggcaaacttcataggaatctgtacctgaatgtgagctcctgataataaaactctgaggctttggtgagcgca

SEQ ID NO: 362344 - DNA, 2012 bp, Homo sapiens
gcggcagccggaagtcggcggcggtggcggaggcggtgagtgcgcggctccggggctggccgactccgctagtggcccggccggcctgggctcgggggctccgggctctgggctctgggtgcgcggaccgggccaggctgcttgaagacctcgcgacctgtgtcagcagagccgccctgcaccaccatgtgcatcatcttctttaagtttgatcctcgccctgtttccaaaaacgcgtacaggctcatcttggcagccaacagggatgaattctacagccgaccctccaagttagctgacttctgggggaacaacaacgagatcctcagtgggctggacatggaggaaggcaaggaaggaggcacatggctgggcatcagcacacgtggcaagctggcagcactcaccaactacctgcagccgcagctggactggcaggcccgagggcgagcacagcaaagggagacgtcatttgctactatgggaaccgaggggagcctgatcctatcgttttgacgccaggcagctgccagacccggccatcgaggaccagggtggggagtacgtgcagcccatgctgagcaagtacgcggctgtgtgcgtgcgctgccctggctacggcaccagaaccaacactatcatcctggtagatgcggacggccacgtgaccttcactgagcgtagcatgatggacaaggacctctcccactgggagaccagaacctatgagttcacactgcagagctaaccccacctctgggcctggccagtgggctcctggggggccctgccttgaggggcactgtggacaggaaaccttcctttgccatactgcattgcactgcccgtggcttggccagcatcccccggatcagggccctgtggtttgcgtgttacccatctgtgtccccatgcccagttcagggtctgcctttatgccagtgaggagcagcagagtctgatactaggtctaggaccggccgaggtataccatgaacatgtggatacacctgagcccactcttgcacatgtacacaggcactcacatggcacacacatacactcctgcgtgtgcacaagcacacacatgcaagccatatacatggacaccgacacaggcacatgtacgtgcacaggtgtgctacacatgtgcacacatgcacagttgcacagacacacacacacaggtgcacacacacgatgccgaacaaggcagaagggcgactctcacctctcatgtgcttctggccagtaggtctttgttctggtccaacgacaggagtaggcttgtatttaaaagcggcccctcctctcctgtggccacagaacacaggcgtgcttggactcttgacaagcagacctgctcctgcagaggagacagccacatttggaattgggcaccgagaagacctgagaaaaacccactctctcttttttttttttttgagacggagtcttgctctgtcacccaggctggagtgcagtggcacgatctcggctcactgcaacctccgcctcccaagttcaagcaattctcctgccccagcctcctgattagctgggattacaggcgtgtgccaccatgcccagctaatttttgtgtttttagtagagacggggtttcaccatgttggtcaggctggtcttgaactcctgacgtggtgatccacctgcctcggcctcccaaagtgctgggattacaggcgtgagccaccacgcctggccgaaaaacccactctcataacagaagtgcagactcattgctagattcagtgcccttgagtgtgccagaggtcctctgtgtttgagacaatcctgtgtgtgccaggaggctccgtgtgcaccaggggctctcagaatcccgcttacccagctggagaccatgcctctggcagccccatctcagccagccctgctctctccctcttccctccaggtgaggcaaacttcataggaatctgtacctgaatgtgagctcctgataataaaactctgaggctttggtgagcgca

SEQ ID NO: 362345 - DNA, 2246 bp, Homo sapiens
gcggcagccggaagtcggcggcggtggcggaggcgacctcgcgacctgtgtcagcagagccgccctgcaccaccatgtgcatcatcttctttaagtttgatcctcgccctgtttccaaaaacgcgtacaggtaaccccctcgctctgcatctgctgcgccctgcagggtcctgggtgcccagccagttctcatgccacccaagctgctgtgtgcaggaaggtgtgtgggccaggacggggctgcacaggcctggcactgccctccaggacagggtcactcagtgtgggatgctgtcagaatgcctctcggggcggggactccagtcaatgtacaaagacgtgaagactcagccacagaaggcagccacaggctcatcttggcagccaacagggatgaattctacagccgaccctccaagttagctgacttctgggggaacaacaacgagatcctcagtgggctggacatggaggaaggcaaggaaggaggcacatggctgggcatcagcacacgtggcaagctggcagcactcaccaactacctgcagccgcagctggactggcaggcccgagggcgaggcacctacgggctgagcaacgcgctgctggagactccctggaggaagctgtgctttgggaagcagctcttcctggaggctgtggaacggagccaggcgctgcccaaggatgtgctcatcgccagcctcctggatgtgctcaacaatgaagaggcgtgagtgggcgggtcctgctggggcagctgccagacccggccatcgaggaccagggtggggagtacgtgcagcccatgctgagcaagtacgcggctgtgtgcgtgcgctgccctggctacggcaccagaaccaacactatcatcctggtagatgcggacggccacgtgaccttcactgagcgtagcatgatggacaaggacctctcccactgggagaccagaacctatgagttcacactgcagagctaaccccacctctgggcctggccagtgggctcctggggggccctgccttgaggggcactgtggacaggaaaccttcctttgccatactgcattgcactgcccgtggcttggccagcatcccccggatcagggccctgtggtttgcgtgttacccatctgtgtccccatgcccagttcagggtctgcctttatgccagtgaggagcagcagagtctgatactaggtctaggaccggccgaggtataccatgaacatgtggatacacctgagcccactcttgcacatgtacacaggcactcacatggcacacacatacactcctgcgtgtgcacaagcacacacatgcaagccatatacatggacaccgacacaggcacatgtacgtgcacaggtgtgctacacatgtgcacacatgcacagttgcacagacacacacacacaggtgcacacacacgatgccgaacaaggcagaagggcgactctcacctctcatgtgcttctggccagtaggtctttgttctggtccaacgacaggagtaggcttgtatttaaaagcggcccctcctctcctgtggccacagaacacaggcgtgcttggactcttgacaagcagacctgctcctgcagaggagacagccacatttggaattgggcaccgagaagacctgagaaaaacccactctctcttttttttttttttgagacggagtcttgctctgtcacccaggctggagtgcagtggcacgatctcggctcactgcaacctccgcctcccaagttcaagcaattctcctgccccagcctcctgattagctgggattacaggcgtgtgccaccatgcccagctaatttttgtgtttttagtagagacggggtttcaccatgttggtcaggctggtcttgaactcctgacgtggtgatccacctgcctcggcctcccaaagtgctgggattacaggcgtgagccaccacgcctggccgaaaaacccactctcataacagaagtgcagactcattgctagattcagtgcccttgagtgtgccagaggtcctctgtgtttgagacaatcctgtgtgtgccaggaggctccgtgtgcaccaggggctctcagaatcccgcttacccagctggagaccatgcctctggcagccccatctcagccagccctgctctctccctcttccctccaggtgaggcaaacttcataggaatctgtacctgaatgtgagctcctgataataaaactctgaggctttggtgagcgca

SEQ ID NO: 362346 - DNA, 1855 bp, Homo sapiens
gcggcagccggaagtcggcggcggtggcggaggcggtgagtgcgcggctccggggctggccgactccgctagtggcccggccggcctgggctcgggggctccgggctctgggctctgggtgcgcggaccgggccaggctgcttgaagacctcgcgacctgtgtcagcagagccgccctgcaccaccatgtgcatcatcttctttaagtttgatcctcgccctgtttccaaaaacgcgtacaggctcatcttggcagccaacagggatgaattctacagccgaccctccaagttagctgacttctgggggaacaacaacgagatcctcagtgggctggacatggaggaaggcaaggaaggaggcacatggctgggcatcagcacacgtggcaagctggcagcactcaccaactacctgcagccgcagctggactggcaggcccgagggcgaggtgaacttgtcacccactttctgaccactgacgtggacagcttgtcctacctgaagaaggtctctatggagggccatctgtacaatggcttcaacctcatagcagccgacctgagcacagcaaagggagacgtcatttgctactatgggaaccgaggggagcctgatcctatcgttttgacgccaggcacctacgggctgagcaacgcgctgctggagactccctggaggaagctgtgctttgggaagcagctcttcctggaggctgtggaacggagccaggcgctgcccaaggatgtgctcatcgccagcctcctggatgtgctcaacaatgaagaggcgcagctgccagacccggccatcgaggaccagggtggggagtacgtgcagcccatgctgagcaagtacgcggctgtgtgcgtgcgctgccctggctacggcaccagaaccaacactatcatcctggtagatgcggacggccacgtgaccttcactgagcgtagcatgatggacaaggacctctcccactgggagaccagaacctatgagttcacactgcagagctaaccccacctctgggcctggccagtgggctcctggggggccctgccttgaggggcactgtggacaggaaaccttcctttgccatactgcattgcactgcccgtggcttggccagcatcccccggatcagggccctgtggtttgcgtgttacccatctgtgtccccatgcccagttcagggtctgcctttatgccagtgaggagcagcagagtctgatactaggtctaggaccggccgaggtataccatgaacatgtggatacacctgagcccactcttgcacatgtacacaggcactcacatggcacacacatacactcctgcgtgtgcacaagcacacacatgcaagccatatacatggacaccgacacaggcacatgtacgtgcacaggtgtgctacacatgtgcacacatgcacagttgcacagacacacacacacaggtgcacacacacgatgccgaacaaggcagaagggcgactctcacctctcatgtgcttctggccagtaggtctttgttctggtccaacgacaggagtaggcttgtatttaaaagcggcccctcctctcctgtggccacagaacacaggcgtgcttggactcttgacaagcagacctgctcctgcagaggagacagccacatttggaattgggcaccgagaagacctgagaaaaacccactctctcttttttttttttttgagacggagtcttgctctgtcacccaggctggaagttgcagtgagccaagatcgtaccattgcgctctagtctgggcgacaagagtgaaactcctcctcaaaaaaagaaaataagagaaaagagaagagaagaggaaagag

SEQ ID NO: 362347 - DNA, 1723 bp, Homo sapiens
gcggcagccggaagtcggcggcggtggcggaggcggtgagtgcgcggctccggggctggccgactccgctagtggcccggccggcctgggctcgggggctccgggctctgggctctgggtgcgcggaccgggccaggctgcttgaagacctcgcgacctgtgtcagcagagccgccctgcaccaccatgtgcatcatcttctttaagtttgatcctcgccctgtttccaaaaacgcgtacaggctcatcttggcagccaacagggatgaattctacagccgaccctccaagttagctgacttctgggggaacaacaacgagatcctcagtgggctggacatggaggaaggcaaggaaggaggcacatggctgggcatcagcacacgtggcaagctggcagcactcaccaactacctgcagccgcagctggactggcaggcccgagggcgaggtgaacttgtcacccactttctgaccactgacgtggacagcttgtcctacctgaagaaggtctctatggagggccatctgtacaatggcttcaacctcatagcagccgacctgagcacagcaaagggagacgtcatttgctactatgggaaccgaggggagcctgatcctatcgttttgacgccaggcacctacgggctgagcaacgcgctgctggagactccctggaggaagctgtgctttgggaagcagctcttcctggaggctgtggaacggagccaggcgctgcccaaggatgtgctcatcgccagcctcctggatgtgctcaacaatgaagaggcgcagctgccagacccggccatcgaggaccagggtggggagtacgtgcagcccatgctgagcaagtacgcggctgtgtgcgtgcgctgccctggctacggcaccagaaccaacactatcatcctggtagatgcggacggccacgtgaccttcactgagcgtagcatgatggacaaggacctctcccactgggagaccagaacctatgagttcacactgcagagctaaccccacctctgggcctggccagtgggctcctggggggccctgccttgaggggcactgtggacaggaaaccttcctttgccatactgcattgcactgcccgtggcttggccagcatcccccggatcagggccctgtggtttgcgtgttacccatctgtgtccccatgcccagttcagggtctgcctttatgccagtgaggagcagcagagtctgatactaggtctaggaccggccgaggtataccatgaacatgtggatacacctgagcccactcttgcacatgtacacaggcactcacatggcacacacatacactcctgcgtgtgcacaagcacacacatgcaagccatatacatggacaccgacacaggcacatgtacgtgcacaggtgtgctacacatgtgcacacatgcacagttgcacagacacacacacacaggtgcacacacacgatgccgaacaaggcagaagggcgactctcacctctcatgtgcttctggccagtaggtctttgttctggtccaacgacaggagtaggcttgtatttaaaagcggcccctcctctcctgtggccacagaacacaggcgtgcttggactcttgacaagcagacctgctcctgcagaggagacaagcacagagcagacaacagagcagagaagaattcacagagcagacagcacagagcagacagcgcgatccttaga

SEQ ID NO: 362348 - DNA, 2719 bp, Homo sapiens
agcctggacaggctttccagatggcagcggcggtcggtcggtgaggctttcccggctgtggtttggctgcgggcggcttgggcagcccgcgggcgcctcaggtagaagaagaaaggtgccactccggcatgaagacagactcgcttagtcgccagtcacttaagctgagtgcattgtgatttccaataattgaggcagtggttctaaaagctgtctacattaatgaaaagagcaatgtggccagcttgactaagccgccagcgcacagcgcggcaggacgcgcccgggtctcagcggacttgtgcatgttagctgtgtagatttatgtgagggcttgtaaaactctggtcttgtaaactagtcttaagcgcttttaatatggagacagatgagagcccctctccgctcccgtgtgggcccgcaggagaagcggtgatggagagccgagctcgccccttccaagcgctgccccgtgagcagtctccaccacctcccctgcaaacgtccagtggtgcagaggtaatggacgttggctctggtggtgatggacagtccgaactccctgctgaggaccccttcaacttctacggagcttctcttctctccaaaggatccttctctaagggccgcctcctcatagacccgaactgtagtggccacagcccgcgcaccgcccggcacgcacctgcggtccggaagttctcccctgaccttaagttgcttaaggatgtaaagattagcgtgagctttaccgagagctgcaggagtaaggacaggaaggtgctgtacacaggagcagagcgcgacgtgcgggcggagtgcggtctgctccttagccctgtcagtggggacgtgcatgcttgtccctttggcgggagtgttggtgacggggtaggcatagggggtgagagtgctgataagaaggatgaggagaatgagctggatcaggaaaagagagtggagtatgcagtgctcgatgagttagaagattttactgacaatttggagctagatgaagaaggagcaggcgggttcacggctaaagcaatcgttcagagagacagagtggatgaagaggccttgaatttcccctacgaggatgactttgacaacgatgtggatgctctgctggaagaaggcctttgtgcccccaaaaagaggcgaacagaggaaaaatatggcggagacagcgaccatccgtccgatggagagacaagtgtgcagccgatgatgaccaagattaaaacagtgctcaaaagtcgtggccgcccacctacagagccgctgcccgacgggtggatcatgacattccataactctggagtcccggtgtacctacacagagagtctcgggtggtcacctggtccaggccatacttcttgggaacgggaagcatacggaaacacgaccctcctctgagtagcatcccttgtctgcattataagaaaatgaaggacaacgaggaacgggagcaaagcagtgacctcacccctagtggggatgtgtcccccgtcaagcccctgagccgatctgcagagctggagtttcccctggatgagcctgactctatgggtgctgacccggggcccccggacgagaaagacccactaggggctgaggcagcccctggggccctggggcaggtgaaggccaaagtcgaggtgtgcaaagatgaatccgttgatctcgaggaatttcgaagctacctggagaagcgttttgactttgagcaagttactgtgaaaaaattcaggacttgggctgagcggcggcaattcaatcgggaaatgaagcggaagcaggcggagtccgagaggcccatcttgccagccaatcagaagctcattactttatcagtgcaagatgcacccacaaagaaagagtttgttattaaccccaacgggaaatccgaggtctgcatcctgcacgagtacatgcagcgtgtcctcaaggtccgccctgtctataatttctttgaatgtgagaacccaagtgagccttttggtgcctcggtgaccattgatggtgtgacttacggatctggaactgcaagcagcaaaaaacttgcgaagaataaagctgcccgagctacactggaaatcctcatccctgactttgttaaacagacctctgaagagaagcccaaagacagtgaagaactcgagtattttaaccacatcagcatcgaggactcgcgggtctacgagctgaccagcaaggctgggctgttgtctccatatcagatcctccacgagtgccttaaaagaaaccatgggatgggtgacacgtctatcaagtttgaagtggttcctgggaaaaaccagaagagtgaatacgtcatggcgtgtggcaagcacacagtgcgcgggtggtgtaaggactccttctctgctgcctggtggccgctgggcgggcggcccctggtgtggccctgcgcctctgtggcttggtctcagctgttgccctggcattgtccctgagcccagctgtgtgtgctggccaccacacgttcagcctaaggcggactggcagccgtcctgcctgcactttccctgtcttttccctttcccccgctgtcacccctgtctccgtccagcccttgtccctgtggcaggaggaaaggccctcctcctcgaacagccagcagaatcctgctgctccctgtttctggaggtgtgcgtcttcgcgggagggaggctctcgctgcgtggctttgag

SEQ ID NO: 362349 - DNA, 1378 bp, Homo sapiens
agcctggacaggctttccagatggcagcggcggtcggtcggtgaggctttcccggctgtggtttggctgcgggcggcttgggcagcccgcgggcgcctcaggtagaagaagaaaggtgccactccggcatgaagacagactcgcttagtcgccagtcacttaagctgagtgcattgtgatttccaataattgaggcagtggttctaaaagctgtctacattaatgaaaagagcaatgtggccagcttgactaagccgccagcgcacagcgcggcaggacgcgcccgggtctcagcggacttgtgcatgttagctgtgtagatttatgtgagggcttgtaaaactctggtcttgtaaactagtcttaagcgcttttaatatggagacagatgagagcccctctccgctcccgtgtgggcccgcaggagaagcggtgatggagagccgagctcgccccttccaagcgctgccccgtgagcagtctccaccacctcccctgcaaacgtccagtggtgcagaggtaatggacgttggctctggtggtgatggacagtccgaactccctgctgaggaccccttcaacttctacggagcttctcttctctccaaaggatccttctctaagggccgcctcctcatagacccgaactgtagtggccacagcccgcgcaccgcccggcacgcacctgcggtccggaagttctcccctgaccttaagttgcttaaggatgtaaagattagcgtgagctttaccgagagctgcaggagtaaggacaggaaggtgctgtacacaggagcagagcgcgacgtgcgggcggagtgcggtctgctccttagccctgtcagtggggacgtgcatgcttgtccctttggcgggagtgttggtgacggggtaggcatagggggtgagagtgctgataagaaggatgaggagaatgagctggatcaggaaaagagagtggagtatgcagtgctcgatgagttagaagattttactgacaatttggagctagatgaagaaggagcaggcgggttcacggctaaagcaatcgttcagagagacagagtggatgaagaggccttgaatttcccctacgaggatgactttgacaacgatgtggatgctctgctggaagaaggcctttgtgcccccaaaaagaggcgaacagaggaaaaatatggcggagacagcgaccatccgtccgatggagagacaagtgtgcagccgatgatgaccaagattaaaacagtgctcaaaagtcgtggtgacgcatgcctgtaatcccagctgctctggaggctgaggtgggagaatcgctcgagtgagttcactgcactccagcctgggtgacagagccagactctctcaaaaacaatac

SEQ ID NO: 362350 - DNA, 841 bp, Homo sapiens
acagtgtcatctcacccgcgtcgcagcatgttatagaaagcctgttcccgaagtgagggtgtgtccggtgggctctggctataggtctttgttctggtccaacgacaggagtaggcttgtatttaaaagcggcccctcctctcctgtggccacagaacacaggcgtgcttggactcttgacaagcagacctgctcctgcagaggagacagccacatttggaattgggcaccgagaagacctgagaaaaacccactctctcttttttttttttttgagacggagtcttgctctgtcacccaggctggagtgcagtggcacgatctcggctcactgcaacctccgcctcccaagttcaagcaattctcctgccccagcctcctgattagctgggattacaggcgtgtgccaccatgcccagctaatttttgtgtttttagtagagacggggtttcaccatgttggtcaggctggtcttgaactcctgacgtggtgatccacctgcctcggcctcccaaagtgctgggattacaggcgtgagccaccacgcctggccgaaaaacccactctcataacagaagtgcagactcattgctagattcagtgcccttgagtgtgccagaggtcctctgtgtttgagacaatcctgtgtgtgccaggaggctccgtgtgcaccaggggctctcagaatcccgcttacccagctggagaccatgcctctggcagccccatctcagccagccctgctctctccctcttccctccaggtgaggcaaacttcataggaatctgtacctgaatgtgagctcctgataataaaactctgaggctttggtgagcgca

SEQ ID NO: 362351 - DNA, 766 bp, Homo sapiens
gcggcagccggaagtcggcggcggtggcggaggcggtgagtgcgcggctccggggctggccgactccgctagtggcccggccggcctgggctcgggggctccgggctctgggctctgggtgcgcggaccgggccaggctgcttgaagacctcgcgacctgtgtcagcagagccgccctgcaccaccatgtgcatcatcttctttaagtttgatcctcgccctgtttccaaaaacgcgtacaggctcatcttggcagccaacagggatgaattctacagccgaccctccaagttagctgacttctgggggaacaacaacgagatcctcagtgggctggacatggaggaaggcaaggaaggaggcacatggctgggcatcagcacacgtggcaagctggcagcactcaccaactacctgcagccgcagctggactggcaggcccgagggcgaggtgaacttgtcacccactttctgaccactgacgtggacagcttgtcctacctgaagaaggtctctatggagggccatctgtacaatggcttcaacctcatagcagccgacctgagcacaggaagaacaccgtgtaaagactggaattctgctccacgagccaaggcatcaccagaagctgggagaggggcctgcttcagagcctctcttagagccttcagagggagcagacctgctgtcactctgatcatggacttccagcatccagagctgtgtgacaataaatgtctgttatcttaagtggttcaatttgtga

SEQ ID NO: 362352 - DNA, 617 bp, Homo sapiens
gcggcagccggaagtcggcggcggtggcggaggcggtgagtgcgcggctccggggctggccgactccgctagtggcccggccggcctgggctcgggggctccgggctctgggctctgggtgcgcggaccgggccaggctgcttgaagacctcgcgacctgtgtcagcagagccgccctgcaccaccatgtgcatcatcttctttaagtttgatcctcgccctgtttccaaaaacgcgtacaggtaaccccctcgctctgcatctgctgcgccctgcagggtcctgggtgcccagccagttctcatgccacccaagctgctgtgtgcaggaaggtgtgtgggccaggacggggctgcacaggcctggcactgccctccaggacagggtcactcagtgtgggatgctgtcagaatgcctctcggggcggggactccagtcaatgtacaaagacgtgaagactcagccacagaaggcagccacaggctcatcttggcagccaacagggatgaattctacagccgactctccctcttccctccaggtgaggcaaacttcataggaatctgtacctgaatgtgagctcctgataataaaactctgaggctttggtgagcgca

SEQ ID NO: 362353 - DNA, 387 bp, Homo sapiens
ctacagcctgcagtcctgagcgtgaggtgctatacttcccaggagacatcggacaagagtgtgattgagctgcagcagtatgccaagaagaacaagcccaacctgcacatcctcagcaagctccaagaggagatgaagaggctagctgaggaaagggtgagtgccaccctagcgggagggctgccgggccacggccattcctgtggcacctgtggagggacagcagaccccaggacccgtgcctgagctgacaccttggaaatgcttggatcctccttccaaaatcagatacaggcttttctttgagcttcgacatgtgtgatagttttataaatcacttcagttttggttctgttgttagagagctggcaggccagcctgttggtg

SEQ ID NO: 362354 - DNA, 471 bp, Homo sapiens
gaaacagggctgtgagatcaccgggcagtgtcggggaggacgccctatggctgtagtctgacattctctccccttggcctgcagcacagcaaagggagacgtcatttgctactatgggaaccgaggggagcctgatcctatcgttttgacgccaggtgagcctgccctggcagcctgatggggtgggggactgtttctatgcagaggtcacccttgtgctttttagagaccaggcacttgtcatattactcttctgagatgactttgtggccatttaagtgccttatggtctgtgggcaccttgccctgcacctggacacttcagagagccctggctccctgctcaccccctccccatgggcttttcctgctgagcaaggtgcgcccctgttctgggcttcccaccgcagccctgcagcccagccggccacccccagcctcacttcctgtgccgtcccagtgtgccctgtg

SEQ ID NO: 362355 - DNA, 1365 bp, Homo sapiens
ctccggggctggggggcgggccccgggcccaggcgttgccgactctcgtcgctgtccgcccgggtaaagaggctcctctcccggagggcccgaagcctagcatcgccttcaggcgggaaaggtgtggacagggccagtgctcgcctgggaccctgccggctttaacacagtttgggaaatccaagaagtcgcctaagtctttttgtccacagaatgctcacgggttgagtgtcacgtagataattgggatacggttttattgtaacaatgagcatggcggaaataaatggaaggtggcaacctgttgacagtgatgcctgtctggtgtcaaccgatggacttgggtttcttgtggcaggagtctgatttgcctttttgcatgcttgcatgtaccttgttcctgcacggcagtcctgtctttggctgtcgactgttcgaggccaaccaccaggcgaggatccactgtttcctggccagactagactcccagctgtgggagtggcccaaaccctgctgcaggccttcactcacaaaagggagtgaatggccagcccggggtacccagtgttgcctctaagtgcgggatatgaggcctgttggaggatgacaaaaggaacggatgaggtcatactgccgctgggttgggcgggaggctgcagcgggagagacttgaccaaaaggcagcctccatggcgctggcactggtgctggcccgtcacagccagtgcctctgttagccaacacagcaagtgggctaggaggaagggtgctgtccaagtgtacgggttttctccccgtgccaagggtccaggggagcttgccgtgagcccgttcctgtccgatagtcctgttggcaaggcagggtttgcatgcggtgtttggtcagctggagcagtggggaggcctacgggcagagagctcccctttgagccctttgcggccaggcgctgtgtggagcacttcccaggggttgttttgtagtctcaccgtgaccttggggtaggaaatgtgcttctggctggcttgcccagtcttagactctcttgttgtagccctctcctttgtgatgtcacccagcctcctgactttaatgccagctttccttgacatcttcacagctccagccctggcctctcttctgatttccagcctggtgtttctggccacctcttccatatctccatgtgttactttggcgccaagtagccatatccaaaccaaactcaaatcttcacccatgccaaaacattccttggcctatctaaagtccctttgattcctctctttcttacaccttcatgcagtcctaaggagccccgtcagctcacctatttctaagcacagaccatttctcaccaccttcaa

SEQ ID NO: 362356 - DNA, 4467 bp, Homo sapiens
agcctggacaggctttccagatggcagcggcggtcggtcggtgaggctttcccggctgtggtttggctgcgggcggcttgggcagcccgcgggcgcctcaggtagaagaagaaaggtgccactccggcatgaagacagactcgcttagtcgccagtcacttaagctgagtgcattgtgatttccaataattgaggcagtggttctaaaagctgtctacattaatgaaaagagcaatgtggccagcttgactaagccgccagcgcacagcgcggcaggacgcgcccgggtctcagcggacttgtgcatgttagctgtgtagatttatgtgagggcttgtaaaactctggtcttgtaaactagtcttaagcgcttttaatatggagacagatgagagcccctctccgctcccgtgtgggcccgcaggagaagcggtgatggagagccgagctcgccccttccaagcgctgccccgtgagcagtctccaccacctcccctgcaaacgtccagtggtgcagaggtaatggacgttggctctggtggtgatggacagtccgaactccctgctgaggaccccttcaacttctacggagcttctcttctctccaaaggatccttctctaagggccgcctcctcatagacccgaactgtagtggccacagcccgcgcaccgcccggcacgcacctgcggtccggaagttctcccctgaccttaagttgcttaaggatgtaaagattagcgtgagctttaccgagagctgcaggagtaaggacaggaaggtgctgtacacaggagcagagcgcgacgtgcgggcggagtgcggtctgctccttagccctgtcagtggggacgtgcatgcttgtccctttggcgggagtgttggtgacggggtaggcatagggggtgagagtgctgataagaaggatgaggagaatgagctggatcaggaaaagagagtggagtatgcagtgctcgatgagttagaagattttactgacaatttggagctagatgaagaaggagcaggcgggttcacggctaaagcaatcgttcagagagacagagtggatgaagaggccttgaatttcccctacgaggatgactttgacaacgatgtggatgctctgctggaagaaggcctttgtgcccccaaaaagaggcgaacagaggaaaaatatggcggagacagcgaccatccgtccgatggagagacaagtgtgcagccgatgatgaccaagattaaaacagtgctcaaaagtcgtggccgcccacctacagagccgctgcccgacgggtggatcatgacattccataactctggagtcccggtgtacctacacagagagtctcgggtggtcacctggtccaggccatacttcttgggaacgggaagcatacggaaacacgaccctcctctgagtagcatcccttgtctgcattataagaaaatgaaggacaacgaggaacgggagcaaagcagtgacctcacccctagtggggatgtgtcccccgtcaagcccctgagccgatctgcagagctggagtttcccctggatgagcctgactctatgggtgctgacccggggcccccggacgagaaagacccactaggggctgaggcagcccctggggccctggggcaggtgaaggccaaagtcgaggtgtgcaaagatgaatccgttgatctcgaggaatttcgaagctacctggagaagcgttttgactttgagcaagttactgtgaaaaaattcaggacttgggctgagcggcggcaattcaatcgggaaatgaagcggaagcaggcggagtccgagaggcccatcttgccagccaatcagaagctcattactttatcagtgcaagatgcacccacaaagaaagagtttgttattaaccccaacgggaaatccgaggtctgcatcctgcacgagtacatgcagcgtgtcctcaaggtccgccctgtctataatttctttgaatgtgagaacccaagtgagccttttggtgcctcggtgaccattgatggtgtgacttacggatctggaactgcaagcagcaaaaaacttgcgaagaataaagctgcccgagctacactggaaatcctcatccctgactttgttaaacagacctctgaagagaagcccaaagacagtgaagaactcgagtattttaaccacatcagcatcgaggactcgcgggtctacgagctgaccagcaaggctgggctgttgtctccatatcagatcctccacgagtgccttaaaagaaaccatgggatgggtgacacgtctatcaagtttgaagtggttcctgggaaaaaccagaagagtgaatacgtcatggcgtgtggcaagcacacagtgcgcgggtggtgtaagaacaagagagttggaaagcagttagcctcacagaagatccttcagctgctgcacccacatgtcaagaactgggggtctttactgcgcatgtatggccgtgagagcagcaagatggtcaagcaggagacatcggacaagagtgtgattgagctgcagcagtatgccaagaagaacaagcccaacctgcacatcctcagcaagctccaagaggagatgaagaggctagctgaggaaagggaggagactcgaaagaagcccaagatgtccattgtggcgtccgcccagcctggcggtgagcccctgtgcaccgtggacgtgtgagggaggtggcacgggccagggcgcgggggccgccagccgcacttctgaggagaccagcagtcatgcatcgtgcaccacagtgtcaggcctccaacccacgctccttccctgtggccaacctgtgggcccggccttagggtggaggctttagtgtacagggacagccatggccacacagcacacatgtggagcagcggctctccctggaaagctccaggcctgaatggatggactcagcgactgcaccagtggcagctggtgactgtggacagtggtggaccctgcttctgtgcacctgctgcaggctctttttatgaaggctttcatgaattttagtatgtaatacgcactgacgacacatgatgcttggatgacagatgagaggggatggctgagtcctgtggctggcccgtgatgccaggtggcccatgtgcccagggcgcctgcagggctgctacagggacctggtcaggaggtgcacatggtgccctgccctcacccaccctctgtgtttccccttctttgaaaaggtagaagagaaaggaatattttaaacctttttggcttaaacagaattttagcatcagaactagctttctgggattggaggcaaaccatcaaggtggtccctctccagtctggacacgatgccagcaaggatgacgtcctgccacctcctggagttaccctggcctcctagggtccctttttctgatgaagtcttaatgccctaaaagcgcctctttggacactgaggccctctctgcctttcctggcctccggcaacagttttttacaaagattttttgcagtcgaggcacatatatccacacattgatttttaaagcttttgtgatattttagcattttgaaagactttcacagtgagagtagaaggtagatttggaatcatgcattttagcaagtggacttgttgaaacaggaagcaagggccttcagtgtagcccattcttgatccagagctgttgcctgtgacagcggtttctctggatgtcaaaggcagctgcctggtgcccagcttgcttctcgactggtggcccctatgggtgggtgtgcgatggaaatgtgttcctgccggagtctgaggcaccagggtgtgctcaaaggctggccctggtggtggactggcacctgtgcagagtgccgtgtgcttgtggtgcgccatctgaagcaagagtccagcgttctgccgtgtctgtcccccaccatgccccctacaggcggtactgatggcgcttttttttttttttctgtcaggaaaacaatgttggcctgtgggccgcccacaacatatccttccctcactacctgtgtgaccaaggttggcttctgttgacctttaaaaaagaaaccctcaactcaaattgctataattagacacttgcttctgtcttgcctcctgtctgcagctgtgaatagtcatttgactgtgactgttgcccttagccagccagatgcgcctgtgaaccaaagcttcgtgcacatgtgttcccctaaaggttggggagcctcgctgtgtcttgctgttcccaggcaccaccacagcaggtgctgccatactcttgtggtctctgtgcgccccccccccccccacccgtctgccaagcatgggtatgaatcgtgcacacagccatgcttcaaggccggggcaggggagcctgtgctgatgccatccagggcactgggctgtgcctggaaggcgagccttgattgtctgaacacataaagcaaactgtccagaaaaaa

SEQ ID NO: 362357 - DNA, 4432 bp, Homo sapiens
aacttggtaccagggaattggaaggtttctgtcattttgtgacgatatttttaaatttctttgcaggtagaagaagaaaggtgccactccggcatgaagacagactcgcttagtcgccagtcacttaagctgagtgcattgtgatttccaataattgaggcagtggttctaaaagctgtctacattaatgaaaagagcaatgtggccagcttgactaagccgccagcgcacagcgcggcaggacgcgcccgggtctcagcggacttgtgcatgttagctgtgtagatttatgtgagggcttgtaaaactctggtcttgtaaactagtcttaagcgcttttaatatggagacagatgagagcccctctccgctcccgtgtgggcccgcaggagaagcggtgatggagagccgagctcgccccttccaagcgctgccccgtgagcagtctccaccacctcccctgcaaacgtccagtggtgcagaggtaatggacgttggctctggtggtgatggacagtccgaactccctgctgaggaccccttcaacttctacggagcttctcttctctccaaaggatccttctctaagggccgcctcctcatagacccgaactgtagtggccacagcccgcgcaccgcccggcacgcacctgcggtccggaagttctcccctgaccttaagttgcttaaggatgtaaagattagcgtgagctttaccgagagctgcaggagtaaggacaggaaggtgctgtacacaggagcagagcgcgacgtgcgggcggagtgcggtctgctccttagccctgtcagtggggacgtgcatgcttgtccctttggcgggagtgttggtgacggggtaggcatagggggtgagagtgctgataagaaggatgaggagaatgagctggatcaggaaaagagagtggagtatgcagtgctcgatgagttagaagattttactgacaatttggagctagatgaagaaggagcaggcgggttcacggctaaagcaatcgttcagagagacagagtggatgaagaggccttgaatttcccctacgaggatgactttgacaacgatgtggatgctctgctggaagaaggcctttgtgcccccaaaaagaggcgaacagaggaaaaatatggcggagacagcgaccatccgtccgatggagagacaagtgtgcagccgatgatgaccaagattaaaacagtgctcaaaagtcgtggccgcccacctacagagccgctgcccgacgggtggatcatgacattccataactctggagtcccggtgtacctacacagagagtctcgggtggtcacctggtccaggccatacttcttgggaacgggaagcatacggaaacacgaccctcctctgagtagcatcccttgtctgcattataagaaaatgaaggacaacgaggaacgggagcaaagcagtgacctcacccctagtggggatgtgtcccccgtcaagcccctgagccgatctgcagagctggagtttcccctggatgagcctgactctatgggtgctgacccggggcccccggacgagaaagacccactaggggctgaggcagcccctggggccctggggcaggtgaaggccaaagtcgaggtgtgcaaagatgaatccgttgatctcgaggaatttcgaagctacctggagaagcgttttgactttgagcaagttactgtgaaaaaattcaggacttgggctgagcggcggcaattcaatcgggaaatgaagcggaagcaggcggagtccgagaggcccatcttgccagccaatcagaagctcattactttatcagtgcaagatgcacccacaaagaaagagtttgttattaaccccaacgggaaatccgaggtctgcatcctgcacgagtacatgcagcgtgtcctcaaggtccgccctgtctataatttctttgaatgtgagaacccaagtgagccttttggtgcctcggtgaccattgatggtgtgacttacggatctggaactgcaagcagcaaaaaacttgcgaagaataaagctgcccgagctacactggaaatcctcatccctgactttgttaaacagacctctgaagagaagcccaaagacagtgaagaactcgagtattttaaccacatcagcatcgaggactcgcgggtctacgagctgaccagcaaggctgggctgttgtctccatatcagatcctccacgagtgccttaaaagaaaccatgggatgggtgacacgtctatcaagtttgaagtggttcctgggaaaaaccagaagagtgaatacgtcatggcgtgtggcaagcacacagtgcgcgggtggtgtaagaacaagagagttggaaagcagttagcctcacagaagatccttcagctgctgcacccacatgtcaagaactgggggtctttactgcgcatgtatggccgtgagagcagcaagatggtcaagcaggagacatcggacaagagtgtgattgagctgcagcagtatgccaagaagaacaagcccaacctgcacatcctcagcaagctccaagaggagatgaagaggctagctgaggaaagggaggagactcgaaagaagcccaagatgtccattgtggcgtccgcccagcctggcggtgagcccctgtgcaccgtggacgtgtgagggaggtggcacgggccagggcgcgggggccgccagccgcacttctgaggagaccagcagtcatgcatcgtgcaccacagtgtcaggcctccaacccacgctccttccctgtggccaacctgtgggcccggccttagggtggaggctttagtgtacagggacagccatggccacacagcacacatgtggagcagcggctctccctggaaagctccaggcctgaatggatggactcagcgactgcaccagtggcagctggtgactgtggacagtggtggaccctgcttctgtgcacctgctgcaggctctttttatgaaggctttcatgaattttagtatgtaatacgcactgacgacacatgatgcttggatgacagatgagaggggatggctgagtcctgtggctggcccgtgatgccaggtggcccatgtgcccagggcgcctgcagggctgctacagggacctggtcaggaggtgcacatggtgccctgccctcacccaccctctgtgtttccccttctttgaaaaggtagaagagaaaggaatattttaaacctttttggcttaaacagaattttagcatcagaactagctttctgggattggaggcaaaccatcaaggtggtccctctccagtctggacacgatgccagcaaggatgacgtcctgccacctcctggagttaccctggcctcctagggtccctttttctgatgaagtcttaatgccctaaaagcgcctctttggacactgaggccctctctgcctttcctggcctccggcaacagttttttacaaagattttttgcagtcgaggcacatatatccacacattgatttttaaagcttttgtgatattttagcattttgaaagactttcacagtgagagtagaaggtagatttggaatcatgcattttagcaagtggacttgttgaaacaggaagcaagggccttcagtgtagcccattcttgatccagagctgttgcctgtgacagcggtttctctggatgtcaaaggcagctgcctggtgcccagcttgcttctcgactggtggcccctatgggtgggtgtgcgatggaaatgtgttcctgccggagtctgaggcaccagggtgtgctcaaaggctggccctggtggtggactggcacctgtgcagagtgccgtgtgcttgtggtgcgccatctgaagcaagagtccagcgttctgccgtgtctgtcccccaccatgccccctacaggcggtactgatggcgcttttttttttttttctgtcaggaaaacaatgttggcctgtgggccgcccacaacatatccttccctcactacctgtgtgaccaaggttggcttctgttgacctttaaaaaagaaaccctcaactcaaattgctataattagacacttgcttctgtcttgcctcctgtctgcagctgtgaatagtcatttgactgtgactgttgcccttagccagccagatgcgcctgtgaaccaaagcttcgtgcacatgtgttcccctaaaggttggggagcctcgctgtgtcttgctgttcccaggcaccaccacagcaggtgctgccatactcttgtggtctctgtgcgccccccccccccccacccgtctgccaagcatgggtatgaatcgtgcacacagccatgcttcaaggccggggcaggggagcctgtgctgatgccatccagggcactgggctgtgcctggaaggcgagccttgattgtctgaacacataaagcaaactgtccagaaaaaa

SEQ ID NO: 362358 - DNA, 2394 bp, Homo sapiens
agcggagttgtctctgccgctggggaaggtaaagcggcgacggcgtcctcaggagctgtggggtcccctgctagaagtgggggactcggcgggtattttaaccacatcagcatcgaggactcgcgggtctacgagctgaccagcaaggctgggctgttgtctccatatcagatcctccacgagtgccttaaaagaaaccatgggatgggtgacacgtctatcaagtttgaagtggttcctgggaaaaaccagaagagtgaatacgtcatggcgtgtggcaagcacacagtgcgcgggtggtgtaagaacaagagagttggaaagcagttagcctcacagaagatccttcagctgctgcacccacatgtcaagaactgggggtctttactgcgcatgtatggccgtgagagcagcaagatggtcaagcaggagacatcggacaagagtgtgattgagctgcagcagtatgccaagaagaacaagcccaacctgcacatcctcagcaagctccaagaggagatgaagaggctagctgaggaaagggaggagactcgaaagaagcccaagatgtccattgtggcgtccgcccagcctggcggtgagcccctgtgcaccgtggacgtgtgagggaggtggcacgggccagggcgcgggggccgccagccgcacttctgaggagaccagcagtcatgcatcgtgcaccacagtgtcaggcctccaacccacgctccttccctgtggccaacctgtgggcccggccttagggtggaggctttagtgtacagggacagccatggccacacagcacacatgtggagcagcggctctccctggaaagctccaggcctgaatggatggactcagcgactgcaccagtggcagctggtgactgtggacagtggtggaccctgcttctgtgcacctgctgcaggctctttttatgaaggctttcatgaattttagtatgtaatacgcactgacgacacatgatgcttggatgacagatgagaggggatggctgagtcctgtggctggcccgtgatgccaggtggcccatgtgcccagggcgcctgcagggctgctacagggacctggtcaggaggtgcacatggtgccctgccctcacccaccctctgtgtttccccttctttgaaaaggtagaagagaaaggaatattttaaacctttttggcttaaacagaattttagcatcagaactagctttctgggattggaggcaaaccatcaaggtggtccctctccagtctggacacgatgccagcaaggatgacgtcctgccacctcctggagttaccctggcctcctagggtccctttttctgatgaagtcttaatgccctaaaagcgcctctttggacactgaggccctctctgcctttcctggcctccggcaacagttttttacaaagattttttgcagtcgaggcacatatatccacacattgatttttaaagcttttgtgatattttagcattttgaaagactttcacagtgagagtagaaggtagatttggaatcatgcattttagcaagtggacttgttgaaacaggaagcaagggccttcagtgtagcccattcttgatccagagctgttgcctgtgacagcggtttctctggatgtcaaaggcagctgcctggtgcccagcttgcttctcgactggtggcccctatgggtgggtgtgcgatggaaatgtgttcctgccggagtctgaggcaccagggtgtgctcaaaggctggccctggtggtggactggcacctgtgcagagtgccgtgtgcttgtggtgcgccatctgaagcaagagtccagcgttctgccgtgtctgtcccccaccatgccccctacaggcggtactgatggcgcttttttttttttttctgtcaggaaaacaatgttggcctgtgggccgcccacaacatatccttccctcactacctgtgtgaccaaggttggcttctgttgacctttaaaaaagaaaccctcaactcaaattgctataattagacacttgcttctgtcttgcctcctgtctgcagctgtgaatagtcatttgactgtgactgttgcccttagccagccagatgcgcctgtgaaccaaagcttcgtgcacatgtgttcccctaaaggttggggagcctcgctgtgtcttgctgttcccaggcaccaccacagcaggtgctgccatactcttgtggtctctgtgcgccccccccccccccacccgtctgccaagcatgggtatgaatcgtgcacacagccatgcttcaaggccggggcaggggagcctgtgctgatgccatccagggcactgggctgtgcctggaaggcgagccttgattgtctgaacacataaagcaaactgtccagaaaaaa

SEQ ID NO: 362359 - DNA, 2281 bp, Homo sapiens
gcggcagccggaagtcggcggcggtggcggaggcggtgagtgcgcggctccggggctggccgactccgctagtggcccggccggcctgggctcgggggctccgggctctgggctctgggtgcgcggaccgggccaggctgcttgaagacctcgcgacctgtgtcagcagagccgccctgcaccaccatgtgcatcatcttctttaagtttgatcctcgccctgtttccaaaaacgcgtacaggctcatcttggcagccaacagggatgaattctacagccgaccctccaagttagctgacttctgggggaacaacaacgagatcctcagtgggctggacatggaggaaggcaaggaaggaggcacatggctgggcatcagcacacgtggcaagctggcagcactcaccaactacctgcagccgcagctggactggcaggcccgagggcgaggtgaacttgtcacccactttctgaccactgacgtggacagcttgtcctacctgaagaaggtctctatggagggccatctgtacaatggcttcaacctcatagcagccgacctgagcacagcaaagggagacgtcatttgctactatgggaaccgaggggagcctgatcctatcgttttgacgccaggcacctacgggctgagcaacgcgctgctggagactccctggaggaagctgtgctttgggaagcagctcttcctggaggctgtggaacggagccaggcgctgcccaaggatgtgctcatcgccagcctcctggatgtgctcaacaatgaagaggcgcagctgccagacccggccatcgaggaccagggtggggagtacgtgcagcccatgctgagcaagtacgcggctgtgtgcgtgcgctgccctggctacggcaccagaaccaacactatcatcctggtagatgcggacggccacgtgaccttcactgagcgtagcatgatggacaaggacctctcccactgggagaccagaacctatgagttcacactgcagagctaaccccacctctgggcctggccagtgggctcctggggggccctgccttgaggggcactgtggacaggaaaccttcctttgccatactgcattgcactgcccgtggcttggccagcatcccccggatcagggccctgtggtttgcgtgttacccatctgtgtccccatgcccagttcagggtctgcctttatgccagtgaggagcagcagagtctgatactaggtctaggaccggccgaggtataccatgaacatgtggatacacctgagcccactcttgcacatgtacacaggcactcacatggcacacacatacactcctgcgtgtgcacaagcacacacatgcaagccatatacatggacaccgacacaggcacatgtacgtgcacaggtgtgctacacatgtgcacacatgcacagttgcacagacacacacacacaggtgcacacacacgatgccgaacaaggcagaagggcgactctcacctctcatgtgcttctggccagtaggtctttgttctggtccaacgacaggagtaggcttgtatttaaaagcggcccctcctctcctgtggccacagaacacaggcgtgcttggactcttgacaagcagacctgctcctgcagaggagacagccacatttggaattgggcaccgagaagacctgagaaaaacccactctctcttttttttttttttgagacggagtcttgctctgtcacccaggctggagtgcagtggcacgatctcggctcactgcaacctccgcctcccaagttcaagcaattctcctgccccagcctcctgattagctgggattacaggcgtgtgccaccatgcccagctaatttttgtgtttttagtagagacggggtttcaccatgttggtcaggctggtcttgaactcctgacgtggtgatccacctgcctcggcctcccaaagtgctgggattacaggcgtgagccaccacgcctggccgaaaaacccactctcataacagaagtgcagactcattgctagattcagtgcccttgagtgtgccagaggtcctctgtgtttgagacaatcctgtgtgtgccaggaggctccgtgtgcaccaggggctctcagaatcccgcttacccagctggagaccatgcctctggcagccccatctcagccagccctgctctctccctcttccctccaggtgaggcaaacttcataggaatctgtacctgaatgtgagctcctgataataaaactctgaggctttggtgagcgca

SEQ ID NO: 362360 - DNA, 2539 bp, Homo sapiens
gcggcagccggaagtcggcggcggtggcggaggcggtgagtgcgcggctccggggctggccgactccgctagtggcccggccggcctgggctcgggggctccgggctctgggctctgggtgcgcggaccgggccaggctgcttgaagacctcgcgacctgtgtcagcagagccgccctgcaccaccatgtgcatcatcttctttaagtttgatcctcgccctgtttccaaaaacgcgtacaggctcatcttggcagccaacagggatgaattctacagccgaccctccaagttagctgacttctgggggaacaacaacgagatcctcagtgggctggacatggaggaaggcaaggaaggaggcacatggctgggcatcagcacacgtggcaagctggcagcactcaccaactacctgcagccgcagctggactggcaggcccgagggcgaggtgaacttgtcacccactttctgaccactgacgtggacagcttgtcctacctgaagaaggtctctatggagggccatctgtacaatggcttcaacctcatagcagccgacctgagcacagcaaagggagacgtcatttgctactatgggaaccgaggggagcctgatcctatcgttttgacgccaggcacctacgggctgagcaacgcgctgctggagactccctggaggaagctgtgctttgggaagcagctcttcctggaggctgtggaacggagccaggcgctgcccaaggatgtgctcatcgccagcctcctggatgtgctcaacaatgaagaggcgcagctgccagacccggccatcgaggaccagggtggggagtacgtgcagcccatgctgagcaagtacgcggctgtgtgcgtgcgctgccctggctacggcaccagaaccaacactatcatcctggtagatgcggacggccacgtgaccttcactgagcgtagcatgatggacaaggacctctcccactgggagaccagaacctatgagttcacactgcagagctaaccccacctctgggcctggccagtgggctcctggggggccctgccttgaggggcactgtggacaggaaaccttcctttgccatactgcattgcactgcccgtggcttggccagcatcccccggatcagggccctgtggtttgcgtgttacccatctgtgtccccatgcccagttcagggtctgcctttatgccagtgaggagcagcagagtctgatactaggtctaggaccggccgaggtataccatgaacatgtggatacacctgagcccactcttgcacatgtacacaggcactcacatggcacacacatacactcctgcgtgtgcacaagcacacacatgcaagccatatacatggacaccgacacaggcacatgtacgtgcacaggtgtgctacacatgtgcacacatgcacagttgcacagacacacacacacaggtgcacacacacgatgccgaacaaggcagaagggcgactctcacctctcatgtgcttctggccagtaggtctttgttctggtccaacgacaggagtaggcttgtatttaaaagcggcccctcctctcctgtggccacagaacacaggcgtgcttggactcttgacaagcagacctgctcctgcagaggagacagccacatttggaattgggcaccgagaagacctgagaaaaacccactctctcttttttttttttttgagacggagtcttgctctgtcacccaggctggagtgcagtggcacgatctcggctcactgcaacctccgcctcccaagttcaagcaattctcctgccccagcctcctgattagctgggattacaggcgtgtgccaccatgcccagctaatttttgtgtttttagtagagacggggtttcaccatgttggtcaggctggtcttgaactcctgacgtggtgatccacctgcctcggcctcccaaagtgctgggattacaggcgtgagccaccacgcctggccgaaaaacccactctcataacagaagtgcagactcattgctagattcagtgcccttgagtgtgccagaggtcctctgtgtttgagacaatcctgtgtgtgccaggaggctccgtgtgcaccaggggctctcagaatcccgcttacccagctggagaccatgcctctggcagccccatctcagccagccctgctctctccctcttccctccaggtgaggcaaacttcataggaatctgtacctgaatgtgagctcctgataataaaactctgaggctttggtgagcgcatttcgaggcctttcccttgtatgcagggtgccagtgggagctgctatgtctcctgtgcagccagacaccctggacgaggcccttcccacctccccctttcctcacggcttcttcagcaccacatgtggatgcctgtgggtcagtccatctgtccatgggcaggggccgctgtgagagaccccatgcgcgtgggatgtggtagatgctgattatggggccagccacccatacaggtctatcaggtcgcaatggaggccc

SEQ ID NO: 362361 - DNA, 2095 bp, Homo sapiens
gcggcagccggaagtcggcggcggtggcggaggcggtgagtgcgcggctccggggctggccgactccgctagtggcccggccggcctgggctcgggggctccgggctctgggctctgggtgcgcggaccgggccaggctgcttgaagacctcgcgacctgtgtcagcagagccgccctgcaccaccatgtgcatcatcttctttaagtttgatcctcgccctgtttccaaaaacgcgtacaggctcatcttggcagccaacagggatgaattctacagccgaccctccaagttagctgacttctgggggaacaacaacgagatcctcagtgggctggacatggaggaaggcaaggaaggaggcacatggctgggcatcagcacacgtggcaagctggcagcactcaccaactacctgcagccgcagctggactggcaggcccgagggcgaggcacctacgggctgagcaacgcgctgctggagactccctggaggaagctgtgctttgggaagcagctcttcctggaggctgtggaacggagccaggcgctgcccaaggatgtgctcatcgccagcctcctggatgtgctcaacaatgaagaggcgcagctgccagacccggccatcgaggaccagggtggggagtacgtgcagcccatgctgagcaagtacgcggctgtgtgcgtgcgctgccctggctacggcaccagaaccaacactatcatcctggtagatgcggacggccacgtgaccttcactgagcgtagcatgatggacaaggacctctcccactgggagaccagaacctatgagttcacactgcagagctaaccccacctctgggcctggccagtgggctcctggggggccctgccttgaggggcactgtggacaggaaaccttcctttgccatactgcattgcactgcccgtggcttggccagcatcccccggatcagggccctgtggtttgcgtgttacccatctgtgtccccatgcccagttcagggtctgcctttatgccagtgaggagcagcagagtctgatactaggtctaggaccggccgaggtataccatgaacatgtggatacacctgagcccactcttgcacatgtacacaggcactcacatggcacacacatacactcctgcgtgtgcacaagcacacacatgcaagccatatacatggacaccgacacaggcacatgtacgtgcacaggtgtgctacacatgtgcacacatgcacagttgcacagacacacacacacaggtgcacacacacgatgccgaacaaggcagaagggcgactctcacctctcatgtgcttctggccagtaggtctttgttctggtccaacgacaggagtaggcttgtatttaaaagcggcccctcctctcctgtggccacagaacacaggcgtgcttggactcttgacaagcagacctgctcctgcagaggagacagccacatttggaattgggcaccgagaagacctgagaaaaacccactctctcttttttttttttttgagacggagtcttgctctgtcacccaggctggagtgcagtggcacgatctcggctcactgcaacctccgcctcccaagttcaagcaattctcctgccccagcctcctgattagctgggattacaggcgtgtgccaccatgcccagctaatttttgtgtttttagtagagacggggtttcaccatgttggtcaggctggtcttgaactcctgacgtggtgatccacctgcctcggcctcccaaagtgctgggattacaggcgtgagccaccacgcctggccgaaaaacccactctcataacagaagtgcagactcattgctagattcagtgcccttgagtgtgccagaggtcctctgtgtttgagacaatcctgtgtgtgccaggaggctccgtgtgcaccaggggctctcagaatcccgcttacccagctggagaccatgcctctggcagccccatctcagccagccctgctctctccctcttccctccaggtgaggcaaacttcataggaatctgtacctgaatgtgagctcctgataataaaactctgaggctttggtgagcgca

SEQ ID NO: 362362 - DNA, 2056 bp, Homo sapiens
gcggcagccggaagtcggcggcggtggcggaggcggtgagtgcgcggctccggggctggccgactccgctagtggcccggccggcctgggctcgggggctccgggctctgggctctgggtgcgcggaccgggccaggctgcttgaagacctcgcgacctgtgtcagcagagccgccctgcaccaccatgtgcatcatcttctttaagtttgatcctcgccctgtttccaaaaacgcgtacaggctcatcttggcagccaacagggatgaattctacagccgaccctccaagttagctgacttctgggggaacaacaacgagatcctcagtgggctggacatggaggaaggcaaggaaggaggcacatggctgggcatcagcacacgtggcaagctggcagcactcaccaactacctgcagccgcagctggactggcaggcccgagggcgaggtgaacttgtcacccactttctgaccactgacgtggacagcttgtcctacctgaagaaggtctctatggagggccatctgtacaatggcttcaacctcatagcagccgacctgaggcagctgccagacccggccatcgaggaccagggtggggagtacgtgcagcccatgctgagcaagtacgcggctgtgtgcgtgcgctgccctggctacggcaccagaaccaacactatcatcctggtagatgcggacggccacgtgaccttcactgagcgtagcatgatggacaaggacctctcccactgggagaccagaacctatgagttcacactgcagagctaaccccacctctgggcctggccagtgggctcctggggggccctgccttgaggggcactgtggacaggaaaccttcctttgccatactgcattgcactgcccgtggcttggccagcatcccccggatcagggccctgtggtttgcgtgttacccatctgtgtccccatgcccagttcagggtctgcctttatgccagtgaggagcagcagagtctgatactaggtctaggaccggccgaggtataccatgaacatgtggatacacctgagcccactcttgcacatgtacacaggcactcacatggcacacacatacactcctgcgtgtgcacaagcacacacatgcaagccatatacatggacaccgacacaggcacatgtacgtgcacaggtgtgctacacatgtgcacacatgcacagttgcacagacacacacacacaggtgcacacacacgatgccgaacaaggcagaagggcgactctcacctctcatgtgcttctggccagtaggtctttgttctggtccaacgacaggagtaggcttgtatttaaaagcggcccctcctctcctgtggccacagaacacaggcgtgcttggactcttgacaagcagacctgctcctgcagaggagacagccacatttggaattgggcaccgagaagacctgagaaaaacccactctctcttttttttttttttgagacggagtcttgctctgtcacccaggctggagtgcagtggcacgatctcggctcactgcaacctccgcctcccaagttcaagcaattctcctgccccagcctcctgattagctgggattacaggcgtgtgccaccatgcccagctaatttttgtgtttttagtagagacggggtttcaccatgttggtcaggctggtcttgaactcctgacgtggtgatccacctgcctcggcctcccaaagtgctgggattacaggcgtgagccaccacgcctggccgaaaaacccactctcataacagaagtgcagactcattgctagattcagtgcccttgagtgtgccagaggtcctctgtgtttgagacaatcctgtgtgtgccaggaggctccgtgtgcaccaggggctctcagaatcccgcttacccagctggagaccatgcctctggcagccccatctcagccagccctgctctctccctcttccctccaggtgaggcaaacttcataggaatctgtacctgaatgtgagctcctgataataaaactctgaggctttggtgagcgca

SEQ ID NO: 362363 - DNA, 1910 bp, Homo sapiens
cccggaaacaaaaaatagctaggtacgggcgggtgtgtatcggccgaggcgaggccggtgaacttgtcacccactttctgaccactgacgtggacagcttgtcctacctgaagaaggtctctatggagggccatctgtacaatggcttcaacctcatagcagccgacctgagcacagcaaagggagacgtcatttgctactatgggaaccgaggggagcctgatcctatcgttttgacgccaggcacctacgggctgagcaacgcgctgctggagactccctggaggaagctgtgctttgggaagcagctcttcctggaggctgtggaacggagccaggcgctgcccaaggatgtgctcatcgccagcctcctggatgtgctcaacaatgaagaggcgtgagtgggcgggtcctgctggggcagctgccagacccggccatcgaggaccagggtggggagtacgtgcagcccatgctgagcaagtacgcggctgtgtgcgtgcgctgccctggctacggcaccagaaccaacactatcatcctggtagatgcggacggccacgtgaccttcactgagcgtagcatgatggacaaggacctctcccactgggagaccagaacctatgagttcacactgcagagctaaccccacctctgggcctggccagtgggctcctggggggccctgccttgaggggcactgtggacaggaaaccttcctttgccatactgcattgcactgcccgtggcttggccagcatcccccggatcagggccctgtggtttgcgtgttacccatctgtgtccccatgcccagttcagggtctgcctttatgccagtgaggagcagcagagtctgatactaggtctaggaccggccgaggtataccatgaacatgtggatacacctgagcccactcttgcacatgtacacaggcactcacatggcacacacatacactcctgcgtgtgcacaagcacacacatgcaagccatatacatggacaccgacacaggcacatgtacgtgcacaggtgtgctacacatgtgcacacatgcacagttgcacagacacacacacacaggtgcacacacacgatgccgaacaaggcagaagggcgactctcacctctcatgtgcttctggccagtaggtctttgttctggtccaacgacaggagtaggcttgtatttaaaagcggcccctcctctcctgtggccacagaacacaggcgtgcttggactcttgacaagcagacctgctcctgcagaggagacagccacatttggaattgggcaccgagaagacctgagaaaaacccactctctcttttttttttttttgagacggagtcttgctctgtcacccaggctggagtgcagtggcacgatctcggctcactgcaacctccgcctcccaagttcaagcaattctcctgccccagcctcctgattagctgggattacaggcgtgtgccaccatgcccagctaatttttgtgtttttagtagagacggggtttcaccatgttggtcaggctggtcttgaactcctgacgtggtgatccacctgcctcggcctcccaaagtgctgggattacaggcgtgagccaccacgcctggccgaaaaacccactctcataacagaagtgcagactcattgctagattcagtgcccttgagtgtgccagaggtcctctgtgtttgagacaatcctgtgtgtgccaggaggctccgtgtgcaccaggggctctcagaatcccgcttacccagctggagaccatgcctctggcagccccatctcagccagccctgctctctccctcttccctccaggtgaggcaaacttcataggaatctgtacctgaatgtgagctcctgataataaaactctgaggctttggtgagcgca

SEQ ID NO: 362364 - DNA, 2015 bp, Homo sapiens
  misc_feature (1976)..(1976): n is a, c, g, or t
gcggcagccggaagtcggcggcggtggcggaggcggtgagtgcgcggctccggggctggccgactccgctagtggcccggccggcctgggctcgggggctccgggctctgggctctgggtgcgcggaccgggccaggctgcttgaagacctcgcgacctgtgtcagcagagccgccctgcaccaccatgtgcatcatcttctttaagtttgatcctcgccctgtttccaaaaacgcgtacaggctcatcttggcagccaacagggatgaattctacagccgaccctccaagttagctgacttctgggggaacaacaacgagatcctcagtgggctggacatggaggaaggcaaggaaggaggcacatggctgggcatcagcacacgtggcaagctggcagcactcaccaactacctgcagccgcagctggactggcaggcccgagggcgaggtgaacttgtcacccactttctgaccactgacgtggacagcttgtcctacctgaagaaggtctctatggagggccatctgtacaatggcttcaacctcatagcagccgacctgagcacagcaaagggagacgtcatttgctactatgggaaccgaggggagcctgatcctatcgttttgacgccaggcacctacgggctgagcaacgcgctgctggagactccctggaggaagctgtgctttgggaagcagctcttcctggaggctgtggaacggagccaggcgctgcccaaggatgtgctcatcgccagcctcctggatgtgctcaacaatgaagaggcgcagctgccagacccggccatcgaggaccagggtggggagtacgtgcagcccatgctgagcaagtacgcggctgtgtgcgtgcgctgccctggctacggcaccagaaccaacactatcatcctggtagatgcggacggccacgtgaccttcactgagcgtagcatgatggacaaggacctctcccactgggagaccagaacctatgagttcacactgcagagctaaccccacctctgggcctggccagtgggctcctggggggccctgccttgaggggcactgtggacaggaaaccttcctttgccatactgcattgcactgcccgtggcttggccagcatcccccggatcagggccctgtggtttgcgtgttacccatctgtgtccccatgcccagttcagggtctgcctttatgccagtgaggagcagcagagtctgatactaggtctaggaccggccgaggtataccatgaacatgtggatacacctgagcccactcttgcacatgtacacaggcactcacatggcacacacatacactcctgcgtgtgcacaagcacacacatgcaagccatatacatggacaccgacacaggcacatgtacgtgcacaggtgtgctacacatgtgcacacatgcacagttgcacagacacacacacacaggtgcacacacacgatgccgaacaaggcagaagggcgactctcacctctcatgtgcttctggccagtaggtctttgttctggtccaacgacaggagtaggcttgtatttaaaagcggcccctcctctcctgtggccacagaacacaggcgtgcttggactcttgacaagcagacctgctcctgcagaggagacagccacatttggaattgggcaccgagaagacctgagaaaaacccactctctcttttttttttttttgagacggagtcttgctctgtcacccaggctggagtgcagtggcacgatctcggctcactgcaacctccgcctcccaagttcaagcaattctcctgtaatcccagctgacggctggagccccgatgctagctacaatggctggcttgagtggacttctgtcaggagaattgcttgaactcgggaggtggaagttgcagtgagccaagatcgtaccattgcgctctagtctgggcgacaagagtgaaactcctcctcaaaaaangaaaataagagaaaagagaagagaagaggaaaaaaaaaa

SEQ ID NO: 362365 - DNA, 1267 bp, Homo sapiens
gcggcagccggaagtcggcggcggtggcggaggcggtgagtgcgcggctccggggctggccgactccgctagtggcccggccggcctgggctcgggggctccgggctctgggctctgggtgcgcggaccgggccaggctgcttgaagacctcgcgacctgtgtcagcagagccgccctgcaccaccatgtgcatcatcttctttaagtttgatcctcgccctgtttccaaaaacgcgtacaggctcatcttggcagccaacagggatgaattctacagccgaccctccaagttagctgacttctgggggaacaacaacgagatcctcagtgggctggacatggaggaaggcaaggaaggaggcacatggctgggcatcagcacacgtggcaagctggcagcactcaccaactacctgcagccgcagctggactggcaggcccgagggcgaggtgaacttgtcacccactttctgaccactgacgtggacagcttgtcctacctgaagaaggtctctatggagggccatctgtacaatggcttcaacctcatagcagccgacctgagcacagcaaagggagacgtcatttgctactatgggaaccgaggggagcctgatcctatcgttttgacgccaggcacctacgggctgagcaacgcgctgctggagactccctggaggaagctgtgctttgggaagcagctcttcctggaggctgtggaacggagccaggcgctgcccaaggatgtgctcatcgccagcctcctggatgtgctcaacaatgaagaggcgcagctgccagacccggccatcgaggaccagggtggggagtacgtgcagcccatgctgagcaagtacgcggctgtgtgcgtgcgctgccctggctacggcaccagaaccaacactatcatcctggtagatgcggacggccacgtgaccttcactgagcgtagcatgatggacaaggacctctcccactgggagaccagaacctatgagttcacactgcagagctaaccccacctctgggcctggccagtgggctcctggggggccctgccttgaggggcactgtggacaggaaaccttcctttgccatactgcattgcactgcccgtggcttggccagcatcccccggatcagggccctgtggtttgcgtgttacccatctgtgtccccatgcccagaggaggggttagctttacagcgtgaacttataacgtttgctctccacaggggctgaggttcttgatcatcatgctaggc

SEQ ID NO: 362366 - DNA, 1479 bp, Homo sapiens
agcctggacaggctttccagatggcagcggcggtcggtcggtgaggctttcccggctgtggtttggctgcgggcggcttgggcagcccgcgggcgcctcaggtagaagaagaaaggtgccactccggcatgaagacagactcgcttagtcgccagtcacttaagctgagtgcattgtgatttccaataattgaggcagtggttctaaaagctgtctacattaatgaaaagagcaatgtggccagcttgactaagccgccagcgcacagcgcggcaggacgcgcccgggtctcagcggacttgtgcatgttagctgtgtagatttatgtgagggcttgtaaaactctggtcttgtaaactagtcttaagcgcttttaatatggagacagatgagagcccctctccgctcccgtgtgggcccgcaggagaagcggtgatggagagccgagctcgccccttccaagcgctgccccgtgagcagtctccaccacctcccctgcaaacgtccagtggtgcagaggtaatggacgttggctctggtggtgatggacagtccgaactccctgctgaggaccccttcaacttctacggagcttctcttctctccaaaggatccttctctaagggccgcctcctcatagacccgaactgtagtggccacagcccgcgcaccgcccggcacgcacctgcggtccggaagttctcccctgaccttaagttgcttaaggatgtaaagattagcgtgagctttaccgagagctgcaggagtaaggacaggaaggtgctgtacacaggagcagagcgcgacgtgcgggcggagtgcggtctgctccttagccctgtcagtggggacgtgcatgcttgtccctttggcgggagtgttggtgacggggtaggcatagggggtgagagtgctgataagaaggatgaggagaatgagctggatcaggaaaagagagtggagtatgcagtgctcgatgagttagaagattttactgacaatttggagctagatgaagaaggagcaggcgggttcacggctaaagcaatcgttcagagagacagagtggatgaagaggccttgaatttcccctacgaggatgactttgacaacgatgtggatgctctgctggaagaaggcctttgtgcccccaaaaagaggcgaacagaggaaaaatatggcggagacagcgaccatccgtccgatggagagacaagtgtgcagccgatgatgaccaagattaaaacagtgctcaaaagtcgtggccgcccacctacagagccgctgcccgacgggtggatcatgacattccataactctggagtcccggtgtacctacacagagagtctcgggtggtcacctggtccaggccatacttcttgggaacgggaagcatacgggtaggggaggcatcagtcgtgactttaggcttgtaagttctcagaccaaaacgtgcacatccacacacatggcaccgc

SEQ ID NO: 362367 - DNA, 576 bp, Homo sapiens
gcggcagccggaagtcggcggcggtggcggaggcggtgagtgcgcggctccggggctggccgactccgctagtggcccggccggcctgggctcgggggctccgggctctgggctctgggtgcgcggaccgggccaggctgcttgaagacctcgcgacctgtgtcagcagagccgccctgcaccaccatgtgcatcatcttctttaagtttgatcctcgccctgtttccaaaaacgcgtacaggctcatcttggcagccaacagggatgaattctacagccgaccctccaagttagctgacttctgggggaacaacaacgagatcctcagtgggctggacatggaggaaggcaaggaaggaggcacatggctgggcatcagcacacgtggcaagctggcagcactcaccaactacctgcagccgcagctggactggcaggcccgagggcgagcacagcaaagggagacgtcatttgctactatgggaaccgaggggagcctgatcctatcgttttgacgccaggtggccccccaacctggcgtgaggtgaagaggttccctcttggctgtccccttt

SEQ ID NO: 362368 - DNA, 295 bp, Homo sapiens
aggaagctgtgctttgggaagcagctcttcctggaggctgtggaacggagccaggcgctgcccaaggatgtgctcatcgccagcctcctggatgtgctcaacaatgaagaggcgtgagtgggcgggtcctgctggggtgagccccagtgtcccgccaccagggcagagggaaaggcaggccctgctgccccgggaggcccatggaagtggccaggctgggtccccagctgcagggaagctgatggatatcctgtcctccctgcctgtccccttgagccagctgaggtttccaaca

SEQ ID NO: 362369 - DNA, 1019 bp, Homo sapiens
  misc_feature (265)..(265): n is a, c, g, or t
  misc_feature (421)..(421): n is a, c, g, or t
  misc_feature (898)..(898): n is a, c, g, or t
  misc_feature (924)..(924): n is a, c, g, or t
  misc_feature (937)..(937): n is a, c, g, or t
  misc_feature (945)..(945): n is a, c, g, or t
  misc_feature (991)..(991): n is a, c, g, or t
gatcgcccccagctggtggggctcgcggactcaggggagcggggtcctctgcgccgctgcagcgcgagttaataaacagttaagtttggaagactctgcagacacgttgagggggagttaccaagcccaggcagcaaaaacatcctggcacattcctggggagtcctcagctgccagcatctgattagaaccatatctctcgccgggagtggccgcgcggctccgaagctcccggccggcggctatttaagcgaggcccgccgcntccgctgcgctgtagcctggaggctccgggcgcggggaagtcatgctcgcttcacggaggcaatagctagccggtgtctgtgggaggttatgtttatttgagagttctccatcgggatcgcctggtgtcaccaagtgtccactggtactgaggttngctgcctgccttcttgccatgtctaacgaagtagaaacaagtgcaaccaatggtcagcccgaccaacaggccgcaccaaaagcaccctcaaagaaggaaaaaaagaaaggccctgaaaagacagatgaatatctcttagcaaggttcaaaggcgatggtgtaaaatataaggccaagctgattggcattgatgatgtgccagatgcaagaggggataaaatgagccaagactctatgatgaaactaaagggaatggcggcagctggtcggtctcagggacaacacaaacaaaggatctgggtcaacatttccctttctgggataaaaataattgatgagaaaactggggtaatagagcatgaacatccagtaaataagatttctttcattgcccgtgatgtgacagacaaccgggcatttggttacgtgtgtggaggagaaggcagcatcagttttttccataaaaccgggcaacangctgaaccattagttgttgatcttanagacctttttcangttatctntaatgtaaagaaaaaggaagaagaaaagaaaaagatagaggaagcnagcaaagcagttgagaatgggagtgagg

SEQ ID NO: 362370 - DNA, 531 bp, Homo sapiens
ttgtggtgtgattaaaatattactttaaagtatgtgtgtgtgtgtgtgtgtgtgtgtgtatttatgttgaaaatagtaccactgtcagtataaagatatggttataagaatgtttatcaaagtgtggtttgtaagaataaaagctgcaaacaatctaaatatctaatagtagaaaatagcttaaataatagtatgaccatatactacaacattatgcagccattaaaaattatattgtaggccggacacggtgactcacgcctgtaatcctagcactttgggaggccgaggcgggcagatcacgaggtcaagagattgagatcatcctggccaacatggtgaaaccccgtctctactaaaaatacaaaaattagctgggtgtggtggtgtgcacctgtagtcccagctactcaggagactgaggcaggagaatcggttgaacccgggaggcagaggttgcagtgagccgagatctcgccattgcactccagcctgatgactgagtgaaaccccatctcaaaaaaaaaaaaa

SEQ ID NO: 362371 - DNA, 350 bp, Homo sapiens
ataattatttaaatttatctacatgtacttagcagctaggacttagaaaatacacttgcaaatattcttttctgtggcacatttgtacatggagatgatggggtatgattcatgaaatgttttaaaaatgaaaatgtaacatactgtggcaaaggttctactttcttggttccaatttaagtctcttgaaagcaaatcctattttcttattattgtccatatatttactgtcagagattttgaaattttgaagaattagaagcatcaataacttagagtgctgttagacacttacttttttcctggagtaatcatcctgcctctgaaaccttccttttgtctttagcatt

SEQ ID NO: 362372 - DNA, 329 bp, Homo sapiens
atacagatgtggtcctttacacaggaggtcatatgccctaacggttttcttagctgcaggctgtgctgatattccatctttgcccaagtcctcttgcctttctctgacccctaccccaagcacagcgatggtgaccggccttttcctcccgcctcccagtttcctggagctggaaagccctgggctcagtaaggtcctccgcacaggagccttcgcctatccattcctgttcgacaacctcccactcttttatcggtgtgtaaaggaccgcatctgtatgtggggataaagggtctgacagaggaagtcctcagtacatggtcccgatg

SEQ ID NO: 362373 - DNA, 2049 bp, Homo sapiens
agcggactccccgcccaggcctggcccgcctgcctagcggactcttcctccatcagcctggctggcagcagccttggactccgcccgtggagccctgggcctgttgacccaccagcttaggagcacccaccaagctctgggtcaacgtggaggtaccaggccaccatgctcagtctcaagctgccccaacttcttcaagtccaccaggtcccccgggtgttctgggaagatggcatcatgtctggctaccgccgccccaccagctcggctttggactgtgtcctcagctccttccagatgaccaacgagacggtcaacatctggactcacttcctgcccacctggtgaggggaggctccgccccaggccgcggccttgagctcagagggggtacccaggcgggcagggaccgtccaggcccacgggctgcagcggcagtcgcgggggtccgcggcggcctgagcacgcgcccgccgcaggtacttcctgtggcggctcctggcgctggcgggcggccccggcttccgtgcggagccgtaccactggccgctgctggtcttcctgctgcccgcctgcctctaccccttcgcgtcgtgctgcgcgcacaccttcagctccatgtcgccccgcatgcgccacatctgctacttcctcgactacggcgcgctcagcctctacagtctgggctgcgccttcccctatgccgcctactccatgccggcctcctggctgcacggccacctgcaccagttctttgtgcctgccgccgcactcaactccttcctgtgcaccggcctctcctgctactcccgtttcctggagctggaaagccctgggctcagtaaggtcctccgcacaggagccttcgcctatccattcctgttcgacaacctcccactcttttatcggctcgggctgtgctggggcaggggccacggctgtgggcaggaggccctgagcaccagccatggctaccatctcttctgcgcgctgctcactggcttcctcttcgcctcccacctgcctgaaaggctggcaccaggacgctttgattacatcggccacagccaccagttattccacatctgtgcagtgctgggcacccacttccagctggaggcagtgctggctgatatgggatcacgcagagcctggctggccacacaggaacctgccctgggcctggcaggcacagtggccacactggtcttggctgcagctgggaacctactcattattgctgctttcacagccaccctgcttcgggcccccagtacatgccctctgctgcagggtggcccactggaggggggtacccaggccaaacaacagtgaggccccatccctgaccctgtcctggagggggcagaggccaggccccagtgctgacgaggagcccagatttgggcctaatcaggtggggacgcatctcagcctggaaccaacaggggctgaggagagagggcacaggagagagggcagagaagaggaggggtgtctagggggactggcagagtgtgagagggaccgtgagggggctcttgatgggagtggaagaagtgctgagggtctgagaggggagatgcatgcgtgtccaggctgaagatgcccctatattctgtcaaaggttggcggggggaggtgttggggtcctttcatctggctccgtttctggtgcttctggaagtctctgctcagcacagggaagaactaacacgactaacctaggcctaccctgaatgcttcttgctaaccaggccgagaggccacacacttgcccccccatccccacaaaccaggtaatgccagtttgccagcagctatttgcctatagagatgagtctgtcctggtcataactgtgtgctcaaggtgtccaggcttttgggggtgggcctatctgggtgcattatggatggtttggtggattgaggtgtggggaggagggtcctaggctagagggggtatccctagttagactttgggaagccaccttcaatgttttctggaacaaggcaggtacaaataaaaaaataaaactttggaaagca

SEQ ID NO: 362374 - DNA, 1838 bp, Homo sapiens
agcggactccccgcccaggcctggcccgcctgcctagcggactcttcctccatcagcctggctggcagcagccttggactccgcccgtggagccctgggcctgttgacccaccagcttaggagcacccaccaagctctgggtgttctgggaagatggcatcatgtctggctaccgccgccccaccagctcggctttggactgtgtcctcagctccttccagatgaccaacgagacggtcaacatctggactcacttcctgcccacctggtacttcctgtggcggctcctggcgctggcgggcggccccggcttccgtgcggagccgtaccactggccgctgctggtcttcctgctgcccgcctgcctctaccccttcgcgtcgtgctgcgcgcacaccttcagctccatgtcgccccgcatgcgccacatctgctacttcctcgactacggcgcgctcagcctctacagtctgggctgcgccttcccctatgccgcctactccatgccggcctcctggctgcacggccacctgcaccagttctttgtgcctgccgccgcactcaactccttcctgtgcaccggcctctcctgctactcccgtttcctggagctggaaagccctgggctcagtaaggtcctccgcacaggagccttcgcctatccattcctgttcgacaacctcccactcttttatcggctcgggctgtgctggggcaggggccacggctgtgggcaggaggccctgagcaccagccatggctaccatctcttctgcgcgctgctcactggcttcctcttcgcctcccacctgcctgaaaggctggcaccaggacgctttgattacatcggccacagccaccagttattccacatctgtgcagtgctgggcacccacttccagctggaggcagtgctggctgatatgggatcacgcagagcctggctggccacacaggaacctgccctgggcctggcaggcacagtggccacactggtcttggctgcagctgggaacctactcattattgctgctttcacagccaccctgcttcgggcccccagtacatgccctctgctgcagggtggcccactggaggggggtacccaggccaaacaacagtgaggccccatccctgaccctgtcctggagggggcagaggccaggccccagtgctgacgaggagcccagatttgggcctaatcaggtggggacgcatctcagcctggaaccaacaggggctgaggagagagggcacaggagagagggcagagaagaggaggggtgtctagggggactggcagagtgtgagagggaccgtgagggggctcttgatgggagtggaagaagtgctgagggtctgagaggggagatgcatgcgtgtccaggctgaagatgcccctatattctgtcaaaggttggcggggggaggtgttggggtcctttcatctggctccgtttctggtgcttctggaagtctctgctcagcacagggaagaactaacacgactaacctaggcctaccctgaatgcttcttgctaaccaggccgagaggccacacacttgcccccccatccccacaaaccaggtaatgccagtttgccagcagctatttgcctatagagatgagtctgtcctggtcataactgtgtgctcaaggtgtccaggcttttgggggtgggcctatctgggtgcattatggatggtttggtggattgaggtgtggggaggagggtcctaggctagagggggtatccctagttagactttgggaagccaccttcaatgttttctggaacaaggcaggtacaaataaaaaaataaaactttggaaagca

SEQ ID NO: 362375 - DNA, 1952 bp, Homo sapiens
agcggactccccgcccaggcctggcccgcctgcctagcggactcttcctccatcagcctggctggcagcagccttggactccgcccgtggagccctgggcctgttgacccaccagcttaggagcacccaccaagctctgggtcaacgtggaggtaccaggccaccatgctcagtctcaagctgccccaacttcttcaagtccaccaggtcccccgggtgttctgggaagatggcatcatgtctggctaccgccgccccaccagctcggctttggactgtgtcctcagctccttccagatgaccaacgagacggtcaacatctggactcacttcctgcccacctggtgaggggaggctccgccccaggccgcggccttgagctcagagggggtacccaggcgggcagggaccgtccaggcccacgggctgcagcggcagtcgcgggggtccgcggcggcctgagcacgcgcccgccgcaggtacttcctgtggcggctcctggcgctggcgggcggccccggcttccgtgcggagccgtaccactggccgctgctggtcttcctgctgcccgcctgcctctaccccttcgcgtcgtgctgcgcgcacaccttcagctccatgtcgccccgcatgcgccacatctgctacttcctcgactacggcgcgctcagcctctacagtctgggctgcgccttcccctatgccgcctactccatgccggcctcctggctgcacggccacctgcaccagttctttgtgcctgccgccgcactcaactccttcctgtgcaccggcctctcctgctactcccgctcgggctgtgctggggcaggggccacggctgtgggcaggaggccctgagcaccagccatggctaccatctcttctgcgcgctgctcactggcttcctcttcgcctcccacctgcctgaaaggctggcaccaggacgctttgattacatcggccacagccaccagttattccacatctgtgcagtgctgggcacccacttccagctggaggcagtgctggctgatatgggatcacgcagagcctggctggccacacaggaacctgccctgggcctggcaggcacagtggccacactggtcttggctgcagctgggaacctactcattattgctgctttcacagccaccctgcttcgggcccccagtacatgccctctgctgcagggtggcccactggaggggggtacccaggccaaacaacagtgaggccccatccctgaccctgtcctggagggggcagaggccaggccccagtgctgacgaggagcccagatttgggcctaatcaggtggggacgcatctcagcctggaaccaacaggggctgaggagagagggcacaggagagagggcagagaagaggaggggtgtctagggggactggcagagtgtgagagggaccgtgagggggctcttgatgggagtggaagaagtgctgagggtctgagaggggagatgcatgcgtgtccaggctgaagatgcccctatattctgtcaaaggttggcggggggaggtgttggggtcctttcatctggctccgtttctggtgcttctggaagtctctgctcagcacagggaagaactaacacgactaacctaggcctaccctgaatgcttcttgctaaccaggccgagaggccacacacttgcccccccatccccacaaaccaggtaatgccagtttgccagcagctatttgcctatagagatgagtctgtcctggtcataactgtgtgctcaaggtgtccaggcttttgggggtgggcctatctgggtgcattatggatggtttggtggattgaggtgtggggaggagggtcctaggctagagggggtatccctagttagactttgggaagccaccttcaatgttttctggaacaaggcaggtacaaataaaaaaataaaactttggaaagca

SEQ ID NO: 362376 - DNA, 1787 bp, Homo sapiens
agcggactccccgcccaggcctggcccgcctgcctagcggactcttcctccatcagcctggctggcagcagccttggactccgcccgtggagccctgggcctgttgacccaccagcttaggagcacccaccaagctctgggtcaacgtggaggtaccaggccaccatgctcagtctcaagctgccccaacttcttcaagtccaccaggtcccccgggtgttctgggaagatggcatcatgtctggctaccgccgccccaccagctcggctttggactgtgtcctcagctccttccagatgaccaacgagacggtcaacatctggactcacttcctgcccacctggtacttcctgtggcggctcctggcgctggcgggcggccccggcttccgtgcggagccgtaccactggccgctgctggtcttcctgctgcccgcctgcctctaccccttcgcgtcgtgctgcgcgcacaccttcagctccatgtcgccccgcatgcgccacatctgctacttcctcgactacggcgcgctcagcctctacagtctggtttcctggagctggaaagccctgggctcagtaaggtcctccgcacaggagccttcgcctatccattcctgttcgacaacctcccactcttttatcggctcgggctgtgctggggcaggggccacggctgtgggcaggaggccctgagcaccagccatggctaccatctcttctgcgcgctgctcactggcttcctcttcgcctcccacctgcctgaaaggctggcaccaggacgctttgattacatcggccacagccaccagttattccacatctgtgcagtgctgggcacccacttccagctggaggcagtgctggctgatatgggatcacgcagagcctggctggccacacaggaacctgccctgggcctggcaggcacagtggccacactggtcttggctgcagctgggaacctactcattattgctgctttcacagccaccctgcttcgggcccccagtacatgccctctgctgcagggtggcccactggaggggggtacccaggccaaacaacagtgaggccccatccctgaccctgtcctggagggggcagaggccaggccccagtgctgacgaggagcccagatttgggcctaatcaggtggggacgcatctcagcctggaaccaacaggggctgaggagagagggcacaggagagagggcagagaagaggaggggtgtctagggggactggcagagtgtgagagggaccgtgagggggctcttgatgggagtggaagaagtgctgagggtctgagaggggagatgcatgcgtgtccaggctgaagatgcccctatattctgtcaaaggttggcggggggaggtgttggggtcctttcatctggctccgtttctggtgcttctggaagtctctgctcagcacagggaagaactaacacgactaacctaggcctaccctgaatgcttcttgctaaccaggccgagaggccacacacttgcccccccatccccacaaaccaggtaatgccagtttgccagcagctatttgcctatagagatgagtctgtcctggtcataactgtgtgctcaaggtgtccaggcttttgggggtgggcctatctgggtgcattatggatggtttggtggattgaggtgtggggaggagggtcctaggctagagggggtatccctagttagactttgggaagccaccttcaatgttttctggaacaaggcaggtacaaataaaaaaataaaactttggaaagca

SEQ ID NO: 362377 - DNA, 1674 bp, Homo sapiens
agcggactccccgcccaggcctggcccgcctgcctagcggactcttcctccatcagcctggctggcagcagccttggactccgcccgtggagccctgggcctgttgacccaccagcttaggagcacccaccaagctctgggtcaacgtggaggtaccaggccaccatgctcagtctcaagctgccccaacttcttcaagtccaccaggtcccccgggtgttctgggaagatggcatcatgtctggctaccgccgccccaccagctcggctttggactgtgtcctcagctccttccagatgaccaacgagacggtcaacatctggactcacttcctgcccacctggtgaggggaggctccgccccaggccgcggccttgagctcagagggggtacccaggcgggcagggaccgtccaggcccacgggctgcagcggcagtcgcgggggtccgcggcggcctgagcacgcgcccgccgcaggtacttcctgtggcggctcctggcgctggcgggcggccccggcttccgtgcggagccgtaccactggccgctgctggtcttcctgctgcccgcctgcctctaccccttcgcgtcgtgctgcgcgcacaccttcagctccatgtcgccccgcatgcgccacatctgctacttcctcgactacggcgcgctcagcctctacagtctgggccacagccaccagttattccacatctgtgcagtgctgggcacccacttccagctggaggcagtgctggctgatatgggatcacgcagagcctggctggccacacaggaacctgccctgggcctggcaggcacagtggccacactggtcttggctgcagctgggaacctactcattattgctgctttcacagccaccctgcttcgggcccccagtacatgccctctgctgcagggtggcccactggaggggggtacccaggccaaacaacagtgaggccccatccctgaccctgtcctggagggggcagaggccaggccccagtgctgacgaggagcccagatttgggcctaatcaggtggggacgcatctcagcctggaaccaacaggggctgaggagagagggcacaggagagagggcagagaagaggaggggtgtctagggggactggcagagtgtgagagggaccgtgagggggctcttgatgggagtggaagaagtgctgagggtctgagaggggagatgcatgcgtgtccaggctgaagatgcccctatattctgtcaaaggttggcggggggaggtgttggggtcctttcatctggctccgtttctggtgcttctggaagtctctgctcagcacagggaagaactaacacgactaacctaggcctaccctgaatgcttcttgctaaccaggccgagaggccacacacttgcccccccatccccacaaaccaggtaatgccagtttgccagcagctatttgcctatagagatgagtctgtcctggtcataactgtgtgctcaaggtgtccaggcttttgggggtgggcctatctgggtgcattatggatggtttggtggattgaggtgtggggaggagggtcctaggctagagggggtatccctagttagactttgggaagccaccttcaatgttttctggaacaaggcaggtacaaataaaaaaataaaactttggaaagca

SEQ ID NO: 362378 - DNA, 1953 bp, Homo sapiens
agcggactccccgcccaggcctggcccgcctgcctagcggactcttcctccatcagcctggctggcagcagccttggactccgcccgtggagccctgggcctgttgacccaccagcttaggagcacccaccaagctctgggtcaacgtggaggtaccaggccaccatgctcagtctcaagctgccccaacttcttcaagtccaccaggtcccccgggtgttctgggaagatggcatcatgtctggctaccgccgccccaccagctcggctttggactgtgtcctcagctccttccagatgaccaacgagacggtcaacatctggactcacttcctgcccacctggtacttcctgtggcggctcctggcgctggcgggcggccccggcttccgtgcggagccgtaccactggccgctgctggtcttcctgctgcccgcctgcctctaccccttcgcgtcgtgctgcgcgcacaccttcagctccatgtcgccccgcatgcgccacatctgctacttcctcgactacggcgcgctcagcctctacagtctgggctgcgccttcccctatgccgcctactccatgccggcctcctggctgcacggccacctgcaccagttctttgtgcctgccgccgcactcaactccttcctgtgcaccggcctctcctgctactcccgcacagcgatggtgaccggccttttcctcccgcctcccagtttcctggagctggaaagccctgggctcagtaaggtcctccgcacaggagccttcgcctatccattcctgttcgacaacctcccactcttttatcggctcgggctgtgctggggcaggggccacggctgtgggcaggaggccctgagcaccagccatggctaccatctcttctgcgcgctgctcactggcttcctcttcgcctcccacctgcctgaaaggctggcaccaggacgctttgattacatcggccacagccaccagttattccacatctgtgcagtgctgggcacccacttccagctggaggcagtgctggctgatatgggatcacgcagagcctggctggccacacaggaacctgccctgggcctggcaggcacagtggccacactggtcttggctgcagctgggaacctactcattattgctgctttcacagccaccctgcttcgggcccccagtacatgccctctgctgcagggtggcccactggaggggggtacccaggccaaacaacagtgaggccccatccctgaccctgtcctggagggggcagaggccaggccccagtgctgacgaggagcccagatttgggcctaatcaggtggggacgcatctcagcctggaaccaacaggggctgaggagagagggcacaggagagagggcagagaagaggaggggtgtctagggggactggcagagtgtgagagggaccgtgagggggctcttgatgggagtggaagaagtgctgagggtctgagaggggagatgcatgcgtgtccaggctgaagatgcccctatattctgtcaaaggttggcggggggaggtgttggggtcctttcatctggctccgtttctggtgcttctggaagtctctgctcagcacagggaagaactaacacgactaacctaggcctaccctgaatgcttcttgctaaccaggccgagaggccacacacttgcccccccatccccacaaaccaggtaatgccagtttgccagcagctatttgcctatagagatgagtctgtcctggtcataactgtgtgctcaaggtgtccaggcttttgggggtgggcctatctgggtgcattatggatggtttggtggattgaggtgtggggaggagggtcctaggctagagggggtatccctagttagactttgggaagccaccttcaatgttttctggaacaaggcaggtacaaataaaaaaataaaactttggaaagca

SEQ ID NO: 362379 - DNA, 1817 bp, Homo sapiens
agcggactccccgcccaggcctggcccgcctgcctagcggactcttcctccatcagcctggctggcagcagccttggactccgcccgtggagccctgggcctgttgacccaccagcttaggagcacccaccaagctctgggtcaacgtggaggtaccaggccaccatgctcagtctcaagctgccccaacttcttcaagtccaccaggtcccccgggtgttctgggaagatggcatcatgtctggctaccgccgccccaccagctcggctttggactgtgtcctcagctccttccagatgaccaacgagacggtcaacatctggactcacttcctgcccacctggtacttcctgtggcggctcctggcgctggcgggcggccccggcttccgtgcggagccgtaccactggccgctgctggtcttcctgctgcccgcctgcctctaccccttcgcgtcgtgctgcgcgcacaccttcagctccatgtcgccccgcatgcgccacatctgctacttcctcgactacggcgcgctcagcctctacagtctgggctgcgccttcccctatgccgcctactccatgccggcctcctggctgcacggccacctgcaccagttctttgtgcctgccgccgcactcaactccttcctgtgcaccggcctctcctgctactcccgctcgggctgtgctggggcaggggccacggctgtgggcaggaggccctgagcaccagccatggctaccatctcttctgcgcgctgctcactggcttcctcttcgcctcccacctgcctgaaaggctggcaccaggacgctttgattacatcggccacagccaccagttattccacatctgtgcagtgctgggcacccacttccagctggaggcagtgctggctgatatgggatcacgcagagcctggctggccacacaggaacctgccctgggcctggcaggcacagtggccacactggtcttggctgcagctgggaacctactcattattgctgctttcacagccaccctgcttcgggcccccagtacatgccctctgctgcagggtggcccactggaggggggtacccaggccaaacaacagtgaggccccatccctgaccctgtcctggagggggcagaggccaggccccagtgctgacgaggagcccagatttgggcctaatcaggtggggacgcatctcagcctggaaccaacaggggctgaggagagagggcacaggagagagggcagagaagaggaggggtgtctagggggactggcagagtgtgagagggaccgtgagggggctcttgatgggagtggaagaagtgctgagggtctgagaggggagatgcatgcgtgtccaggctgaagatgcccctatattctgtcaaaggttggcggggggaggtgttggggtcctttcatctggctccgtttctggtgcttctggaagtctctgctcagcacagggaagaactaacacgactaacctaggcctaccctgaatgcttcttgctaaccaggccgagaggccacacacttgcccccccatccccacaaaccaggtaatgccagtttgccagcagctatttgcctatagagatgagtctgtcctggtcataactgtgtgctcaaggtgtccaggcttttgggggtgggcctatctgggtgcattatggatggtttggtggattgaggtgtggggaggagggtcctaggctagagggggtatccctagttagactttgggaagccaccttcaatgttttctggaacaaggcaggtacaaataaaaaaataaaactttggaaagca

SEQ ID NO: 362380 - DNA, 1614 bp, Homo sapiens
agcggactccccgcccaggcctggcccgcctgcctagcggactcttcctccatcagcctggctggcagcagccttggactccgcccgtggagccctgggcctgttgacccaccagcttaggagcacccaccaagctctgggtgttctgggaagatggcatcatgtctggctaccgccgccccaccagctcggctttggactgtgtcctcagctccttccagatgaccaacgagacggtcaacatctggactcacttcctgcccacctggtacttcctgtggcggctcctggcgctggcgggcggccccggcttccgtgcggagccgtaccactggccgctgctggtcttcctgctgcccgcctgcctctaccccttcgcgtcgtgctgcgcgcacaccttcagctccatgtcgccccgcatgcgccacatctgctacttcctcgactacggcgcgctcagcctctacagtctggctcgggctgtgctggggcaggggccacggctgtgggcaggaggccctgagcaccagccatggctaccatctcttctgcgcgctgctcactggcttcctcttcgcctcccacctgcctgaaaggctggcaccaggacgctttgattacatcggccacagccaccagttattccacatctgtgcagtgctgggcacccacttccagctggaggcagtgctggctgatatgggatcacgcagagcctggctggccacacaggaacctgccctgggcctggcaggcacagtggccacactggtcttggctgcagctgggaacctactcattattgctgctttcacagccaccctgcttcgggcccccagtacatgccctctgctgcagggtggcccactggaggggggtacccaggccaaacaacagtgaggccccatccctgaccctgtcctggagggggcagaggccaggccccagtgctgacgaggagcccagatttgggcctaatcaggtggggacgcatctcagcctggaaccaacaggggctgaggagagagggcacaggagagagggcagagaagaggaggggtgtctagggggactggcagagtgtgagagggaccgtgagggggctcttgatgggagtggaagaagtgctgagggtctgagaggggagatgcatgcgtgtccaggctgaagatgcccctatattctgtcaaaggttggcggggggaggtgttggggtcctttcatctggctccgtttctggtgcttctggaagtctctgctcagcacagggaagaactaacacgactaacctaggcctaccctgaatgcttcttgctaaccaggccgagaggccacacacttgcccccccatccccacaaaccaggtaatgccagtttgccagcagctatttgcctatagagatgagtctgtcctggtcataactgtgtgctcaaggtgtccaggcttttgggggtgggcctatctgggtgcattatggatggtttggtggattgaggtgtggggaggagggtcctaggctagagggggtatccctagttagactttgggaagccaccttcaatgttttctggaacaaggcaggtacaaataaaaaaataaaactttggaaagca

SEQ ID NO: 362381 - DNA, 1150 bp, Homo sapiens
agcggactccccgcccaggcctggcccgcctgcctagcggactcttcctccatcagcctggctggcagcagccttggactccgcccgtggagccctgggcctgttgacccaccagcttaggagcacccaccaagctctgggtgttctgggaagatggcatcatgtctggctaccgccgccccaccagctcggctttggactgtgtcctcagctccttccagatgaccaacgagacggtcaacatctggactcacttcctgcccacctggtacttcctgtggcggctcctggcgctggcgggcggccccggcttccgtgcggagccgtaccactggccgctgctggtcttcctgctgcccgcctgcctctaccccttcgcgtcgtgctgcgcgcacaccttcagctccatgtcgccccgcatgcgccacatctgctacttcctcgactacggcgcgctcagcctctacagtctgggctgcgccttcccctatgccgcctactccatgccggcctcctggctgcacggccacctgcaccagttctttgtgcctgccgccgcactcaactccttcctgtgcaccggcctctcctgctactcccgtttcctggagctggaaagccctgggctcagtaaggtcctccgcacaggagccttcgcctatccattcctgttcgacaacctcccactcttttatcggctcgggctgtgctggggcaggggccacggctgtgggcaggaggccctgagcaccagccatggctaccatctcttctgcgcgctgctcactggcttcctcttcgcctcccacctgcctgaaaggctggcaccaggacgctttgattacatcggctaaccaggccgagaggccacacacttgcccccccatccccacaaaccaggtaatgccagtttgccagcagctatttgcctatagagatgagtctgtcctggtcataactgtgtgctcaaggtgtccaggcttttgggggtgggcctatctgggtgcattatggatggtttggtggattgaggtgtggggaggagggtcctaggctagagggggtatccctagttagactttgggaagccaccttcaatgttttctggaacaaggcaggtacaaataaaaaaataaaactttggaaagca

SEQ ID NO: 362382 - DNA, 376 bp, Homo sapiens
cacacacttgcccccccatccccacaaaccaggtaatgccagtttgccagcagctatttgcctatagagatgagtctgtcctggtcataactgtgtgctcaaggtgtccaggcttttgggggtgggcctatctgggtgcattatggatggtttggtggattgaggtgtggggaggagggtcctaggctagagggggtatccctagttagactttgggaagccaccttcaatgttttctggaacaaggcaggtacaaataaaaaaataaaactttggaaagcactttctagaactgaagaaggtaaaacctcctcacccccatcctcctgacacctccctcccacactccataaactggacagactcacaggcccac

SEQ ID NO: 362383 - DNA, 952 bp, Homo sapiens
agcggactccccgcccaggcctggcccgcctgcctagcggactcttcctccatcagcctggctggcagcagccttggactccgcccgtggagccctgggcctgttgacccaccagcttaggagcacccaccaagctctgggtcaacgtggaggtaccaggccaccatgctcagtctcaagctgccccaacttcttcaagtccaccaggtcccccgggtgttctgggaagatggcatcatgtctggctaccgccgccccaccagctcggctttggactgtgtcctcagctccttccagatgaccaacgagacggtcaacatctggactcacttcctgcccacctggtacttcctgtggcggctcctggcgctggcgggcggccccggcttccgtgcggagccgtaccactggccgctgctggtcttcctgctgcccgcctgcctctaccccttcgcgtcgtgctgcgcgcacaccttcagctccatgtcgccccgcatgcgccacatctgctacttcctcgactacggcgcgctcagcctctacagtctgggctgcgccttcccctatgccgcctactccatgccggcctcctggctgcacggccacctgcaccagttctttgtgcctgccgccgcactcaactccttcctgtgcaccggcctctcctgctactcccgtttcctggagctggaaagccctgggctcagtaaggtcctccgcacaggagccttcgcctatccattcctgttcgacaacctcccactcttttatcggctcgggctgtgctggggcaggggccacggctgtgggcaggaggccctgagcaccagccatggctaccatctcttctgcgcgctgctcactggcttcctcttcgcctcccacctgcctgaaaggctggcaccaggacgctttgattacatcggcacagccaacagttaattcacatctg

SEQ ID NO: 362384 - DNA, 1914 bp, Homo sapiens
agcggactccccgcccaggcctggcccgcctgcctagcggactcttcctccatcagcctggctggcagcagccttggactccgcccgtggagccctgggcctgttgacccaccagcttaggagcacccaccaagctctgggtcaacgtggaggtaccaggccaccatgctcagtctcaagctgccccaacttcttcaagtccaccaggtcccccgggtgttctgggaagatggcatcatgtctggctaccgccgccccaccagctcggctttggactgtgtcctcagctccttccagatgaccaacgagacggtcaacatctggactcacttcctgcccacctggtacttcctgtggcggctcctggcgctggcgggcggccccggcttccgtgcggagccgtaccactggccgctgctggtcttcctgctgcccgcctgcctctaccccttcgcgtcgtgctgcgcgcacaccttcagctccatgtcgccccgcatgcgccacatctgctacttcctcgactacggcgcgctcagcctctacagtctgggctgcgccttcccctatgccgcctactccatgccggcctcctggctgcacggccacctgcaccagttctttgtgcctgccgccgcactcaactccttcctgtgcaccggcctctcctgctactcccgtttcctggagctggaaagccctgggctcagtaaggtcctccgcacaggagccttcgcctatccattcctgttcgacaacctcccactcttttatcggctcgggctgtgctggggcaggggccacggctgtgggcaggaggccctgagcaccagccatggctaccatctcttctgcgcgctgctcactggcttcctcttcgcctcccacctgcctgaaaggctggcaccaggacgctttgattacatcggccacagccaccagttattccacatctgtgcagtgctgggcacccacttccagctggaggcagtgctggctgatatgggatcacgcagagcctggctggccacacaggaacctgccctgggcctggcaggcacagtggccacactggtcttggctgcagctgggaacctactcattattgctgctttcacagccaccctgcttcgggcccccagtacatgccctctgctgcagggtggcccactggaggggggtacccaggccaaacaacagtgaggccccatccctgaccctgtcctggagggggcagaggccaggccccagtgctgacgaggagcccagatttgggcctaatcaggtggggacgcatctcagcctggaaccaacaggggctgaggagagagggcacaggagagagggcagagaagaggaggggtgtctagggggactggcagagtgtgagagggaccgtgagggggctcttgatgggagtggaagaagtgctgagggtctgagaggggagatgcatgcgtgtccaggctgaagatgcccctatattctgtcaaaggttggcggggggaggtgttggggtcctttcatctggctccgtttctggtgcttctggaagtctctgctcagcacagggaagaactaacacgactaacctaggcctaccctgaatgcttcttgctaaccaggccgagaggccacacacttgcccccccatccccacaaaccaggtaatgccagtttgccagcagctatttgcctatagagatgagtctgtcctggtcataactgtgtgctcaaggtgtccaggcttttgggggtgggcctatctgggtgcattatggatggtttggtggattgaggtgtggggaggagggtcctaggctagagggggtatccctagttagactttgggaagccaccttcaatgttttctggaacaaggcaggtacaaataaaaaaataaaactttggaaagca

SEQ ID NO: 362385 - DNA, 2091 bp, Homo sapiens
agcggactccccgcccaggcctggcccgcctgcctagcggactcttcctccatcagcctggctggcagcagccttggactccgcccgtggagccctgggcctgttgacccaccagcttaggagcacccaccaagctctgggtaaggaagctcaccttctggggctcttctgggaaaatagaggtcaacgtggaggtaccaggccaccatgctcagtctcaagctgccccaacttcttcaagtccaccaggtcccccgggtgttctgggaagatggcatcatgtctggctaccgccgccccaccagctcggctttggactgtgtcctcagctccttccagatgaccaacgagacggtcaacatctggactcacttcctgcccacctggtgaggggaggctccgccccaggccgcggccttgagctcagagggggtacccaggcgggcagggaccgtccaggcccacgggctgcagcggcagtcgcgggggtccgcggcggcctgagcacgcgcccgccgcaggtacttcctgtggcggctcctggcgctggcgggcggccccggcttccgtgcggagccgtaccactggccgctgctggtcttcctgctgcccgcctgcctctaccccttcgcgtcgtgctgcgcgcacaccttcagctccatgtcgccccgcatgcgccacatctgctacttcctcgactacggcgcgctcagcctctacagtctgggctgcgccttcccctatgccgcctactccatgccggcctcctggctgcacggccacctgcaccagttctttgtgcctgccgccgcactcaactccttcctgtgcaccggcctctcctgctactcccgtttcctggagctggaaagccctgggctcagtaaggtcctccgcacaggagccttcgcctatccattcctgttcgacaacctcccactcttttatcggctcgggctgtgctggggcaggggccacggctgtgggcaggaggccctgagcaccagccatggctaccatctcttctgcgcgctgctcactggcttcctcttcgcctcccacctgcctgaaaggctggcaccaggacgctttgattacatcggccacagccaccagttattccacatctgtgcagtgctgggcacccacttccagctggaggcagtgctggctgatatgggatcacgcagagcctggctggccacacaggaacctgccctgggcctggcaggcacagtggccacactggtcttggctgcagctgggaacctactcattattgctgctttcacagccaccctgcttcgggcccccagtacatgccctctgctgcagggtggcccactggaggggggtacccaggccaaacaacagtgaggccccatccctgaccctgtcctggagggggcagaggccaggccccagtgctgacgaggagcccagatttgggcctaatcaggtggggacgcatctcagcctggaaccaacaggggctgaggagagagggcacaggagagagggcagagaagaggaggggtgtctagggggactggcagagtgtgagagggaccgtgagggggctcttgatgggagtggaagaagtgctgagggtctgagaggggagatgcatgcgtgtccaggctgaagatgcccctatattctgtcaaaggttggcggggggaggtgttggggtcctttcatctggctccgtttctggtgcttctggaagtctctgctcagcacagggaagaactaacacgactaacctaggcctaccctgaatgcttcttgctaaccaggccgagaggccacacacttgcccccccatccccacaaaccaggtaatgccagtttgccagcagctatttgcctatagagatgagtctgtcctggtcataactgtgtgctcaaggtgtccaggcttttgggggtgggcctatctgggtgcattatggatggtttggtggattgaggtgtggggaggagggtcctaggctagagggggtatccctagttagactttgggaagccaccttcaatgttttctggaacaaggcaggtacaaataaaaaaataaaactttggaaagca

SEQ ID NO: 362386 - DNA, 1922 bp, Homo sapiens
agcggactccccgcccaggcctggcccgcctgcctagcggactcttcctccatcagcctggctggcagcagccttggactccgcccgtggagccctgggcctgttgacccaccagcttaggagcacccaccaagctctgggtcaacgtggaggtaccaggccaccatgctcagtctcaagctgccccaacttcttcaagtccaccaggtcccccgggtgttctgggaagatggcatcatgtctggctaccgccgccccaccagctcggctttggactgtgtcctcagctccttccagatgaccaacgagacggtcaacatctggactcacttcctgcccacctggtgaggggaggctccgccccaggccgcggccttgagctcagagggggtacccaggcgggcagggaccgtccaggcccacgggctgcagcggcagtcgcgggggtccgcggcggcctgagcacgcgcccgccgcaggtacttcctgtggcggctcctggcgctggcgggcggccccggcttccgtgcggagccgtaccactggccgctgctggtcttcctgctgcccgcctgcctctaccccttcgcgtcgtgctgcgcgcacaccttcagctccatgtcgccccgcatgcgccacatctgctacttcctcgactacggcgcgctcagcctctacagtctggtttcctggagctggaaagccctgggctcagtaaggtcctccgcacaggagccttcgcctatccattcctgttcgacaacctcccactcttttatcggctcgggctgtgctggggcaggggccacggctgtgggcaggaggccctgagcaccagccatggctaccatctcttctgcgcgctgctcactggcttcctcttcgcctcccacctgcctgaaaggctggcaccaggacgctttgattacatcggccacagccaccagttattccacatctgtgcagtgctgggcacccacttccagctggaggcagtgctggctgatatgggatcacgcagagcctggctggccacacaggaacctgccctgggcctggcaggcacagtggccacactggtcttggctgcagctgggaacctactcattattgctgctttcacagccaccctgcttcgggcccccagtacatgccctctgctgcagggtggcccactggaggggggtacccaggccaaacaacagtgaggccccatccctgaccctgtcctggagggggcagaggccaggccccagtgctgacgaggagcccagatttgggcctaatcaggtggggacgcatctcagcctggaaccaacaggggctgaggagagagggcacaggagagagggcagagaagaggaggggtgtctagggggactggcagagtgtgagagggaccgtgagggggctcttgatgggagtggaagaagtgctgagggtctgagaggggagatgcatgcgtgtccaggctgaagatgcccctatattctgtcaaaggttggcggggggaggtgttggggtcctttcatctggctccgtttctggtgcttctggaagtctctgctcagcacagggaagaactaacacgactaacctaggcctaccctgaatgcttcttgctaaccaggccgagaggccacacacttgcccccccatccccacaaaccaggtaatgccagtttgccagcagctatttgcctatagagatgagtctgtcctggtcataactgtgtgctcaaggtgtccaggcttttgggggtgggcctatctgggtgcattatggatggtttggtggattgaggtgtggggaggagggtcctaggctagagggggtatccctagttagactttgggaagccaccttcaatgttttctggaacaaggcaggtacaaataaaaaaataaaactttggaaagca

SEQ ID NO: 362387 - DNA, 1984 bp, Homo sapiens
agcggactccccgcccaggcctggcccgcctgcctagcggactcttcctccatcagcctggctggcagcagccttggactccgcccgtggagccctgggcctgttgacccaccagcttaggagcacccaccaagctctgggtcaacgtggaggtaccaggccaccatgctcagtctcaagctgccccaacttcttcaagtccaccaggtcccccgggtgttctgggaagatggcatcatgtctggctaccgccgccccaccagctcggctttggactgtgtcctcagctccttccagatgaccaacgagacggtcaacatctggactcacttcctgcccacctggtacttcctgtggcggctcctggcgctggcgggcggccccggcttccgtgcggagccgtaccactggccgctgctggtcttcctgctgcccgcctgcctctaccccttcgcgtcgtgctgcgcgcacaccttcagctccatgtcgccccgcatgcgccacatctgctacttcctcgactacggcgcgctcagcctctacagtctgggctgcgccttcccctatgccgcctactccatgccggcctcctggctgcacggccacctgcaccagttctttgtgcctgccgccgcactcaactccttcctgtgcaccggcctctcctgctactcccgtttcctggagctggaaagccctgggctcagtaaggtcctccgcacaggagccttcgcctatccattcctgttcgacaacctcccactcttttatcggctcgggctgtgctggggcaggggccacggctgtgggcaggaggccctgagcaccagccatggctaccatctcttctgcgcgctgctcactggcttcctcttcgcctcccacctgcctgaaaggctggcaccaggacgctttgattacatcggccacagccaccagttattccacatctgtgcagtgctgggcacccacttccagctggaggcagtgctggctgatatgggatcacgcagagcctggctggccacacaggaacctgccctgggcctggcaggcacagtggccacactggtcttggctgcagctgggaacctactcattattgctgctttcacagccaccctgcttcgggcccccagtacatgccctctgctgcagggtggcccactggaggggggtacccaggccaaacaacagtgaggccccatccctgaccctgtcctggagggggcagaggccaggccccagtgctgacgaggagcccagatttgggcctaatcaggtggggacgcatctcagcctggaaccaacaggggctgaggagagagggcacaggagagagggcagagaagaggaggggtgtctagggggactggcagagtgtgagagggaccgtgagggggctcttgatgggagtggaagaagtgctgagggtctgagaggggagatgcatgcgtgtccaggctgaagatgcccctatattctgtcaaaggttggcggggggaggtgttggggtcctttcatctggctccgtttctggtgcttctggaagtctctgctcagcacagggaagaactaacacgactaacctaggcctaccctgaatgcttcttgctaaccaggccgagaggccacacacttgcccccccatccccacaaaccaggtaatgccagtttgccagcagctatttgcctatagagatgagtctgtcctggtcataactgtgtgctcaaggtgtccaggcttttgggggtgggcctatctgggtgcattatggatggtttggtggattgaggtgtggggaggagggtcctaggctagagggggtatccctagttagactttgggaagccaccttcaatgttttctggaacaaggcaggtacaaataaaaaaataaaactttggaaagcaaaaaaaaaaaagaaagggatacagataaaagaacaaagaagaaaacaagggggaggccatagaaagaacc

SEQ ID NO: 362388 - DNA, 1846 bp, Homo sapiens
agcggactccccgcccaggcctggcccgcctgcctagcggactcttcctccatcagcctggctggcagcagccttggactccgcccgtggagccctgggcctgttgacccaccagcttaggagcacccaccaagctctgggtgttctgggaagatggcatcatgtctggctaccgccgccccaccagctcggctttggactgtgtcctcagctccttccagatgaccaacgagacggtcaacatctggactcacttcctgcccacctggtgaggggaggctccgccccaggccgcggccttgagctcagagggggtacccaggcgggcagggaccgtccaggcccacgggctgcagcggcagtcgcgggggtccgcggcggcctgagcacgcgcccgccgcaggtacttcctgtggcggctcctggcgctggcgggcggccccggcttccgtgcggagccgtaccactggccgctgctggtcttcctgctgcccgcctgcctctaccccttcgcgtcgtgctgcgcgcacaccttcagctccatgtcgccccgcatgcgccacatctgctacttcctcgactacggcgcgctcagcctctacagtctggtttcctggagctggaaagccctgggctcagtaaggtcctccgcacaggagccttcgcctatccattcctgttcgacaacctcccactcttttatcggctcgggctgtgctggggcaggggccacggctgtgggcaggaggccctgagcaccagccatggctaccatctcttctgcgcgctgctcactggcttcctcttcgcctcccacctgcctgaaaggctggcaccaggacgctttgattacatcggccacagccaccagttattccacatctgtgcagtgctgggcacccacttccagctggaggcagtgctggctgatatgggatcacgcagagcctggctggccacacaggaacctgccctgggcctggcaggcacagtggccacactggtcttggctgcagctgggaacctactcattattgctgctttcacagccaccctgcttcgggcccccagtacatgccctctgctgcagggtggcccactggaggggggtacccaggccaaacaacagtgaggccccatccctgaccctgtcctggagggggcagaggccaggccccagtgctgacgaggagcccagatttgggcctaatcaggtggggacgcatctcagcctggaaccaacaggggctgaggagagagggcacaggagagagggcagagaagaggaggggtgtctagggggactggcagagtgtgagagggaccgtgagggggctcttgatgggagtggaagaagtgctgagggtctgagaggggagatgcatgcgtgtccaggctgaagatgcccctatattctgtcaaaggttggcggggggaggtgttggggtcctttcatctggctccgtttctggtgcttctggaagtctctgctcagcacagggaagaactaacacgactaacctaggcctaccctgaatgcttcttgctaaccaggccgagaggccacacacttgcccccccatccccacaaaccaggtaatgccagtttgccagcagctatttgcctatagagatgagtctgtcctggtcataactgtgtgctcaaggtgtccaggcttttgggggtgggcctatctgggtgcattatggatggtttggtggattgaggtgtggggaggagggtcctaggctagagggggtatccctagttagactttgggaagccaccttcaatgttttctggaacaaggcaggtacaaataaaaaaataaaactttggaaagca

SEQ ID NO: 362389 - DNA, 1980 bp, Homo sapiens
agcggactccccgcccaggcctggcccgcctgcctagcggactcttcctccatcagcctggctggcagcagccttggactccgcccgtggagccctgggcctgttgacccaccagcttaggagcacccaccaagctctgggtcaacgtggaggtaccaggccaccatgctcagtctcaagctgccccaacttcttcaagtccaccaggtcccccgggtgttctgggaagatggcatcatgtctggctaccgccgccccaccagctcggctttggactgtgtcctcagctccttccagatgaccaacgagacggtcaacatctggactcacttcctgcccacctggtacttcctgtggcggctcctggcgctggcgggcggccccggcttccgtgcggagccgtaccactggccgctgctggtcttcctgctgcccgcctgcctctaccccttcgcgtcgtgctgcgcgcacaccttcagctccatgtcgccccgcatgcgccacatctgctacttcctcgactacggcgcgctcagcctctacagtctgggctgcgccttcccctatgccgcctactccatgccggcctcctggctgcacggccacctgcaccagttctttgtgcctgccgccgcactcaactccttcctgtgcaccggcctctcctgctactcccgtttcctggagctggaaagccctgggctcagtaaggtcctccgcacaggagccttcgcctatccattcctgttcgacaacctcccactcttttatcggctcgggctgtgctggggcaggggccacggctgtgggcaggaggccctgagcaccagccatggctaccatctcttctgcgcgctgctcactggcttcctcttcgcctcccacctgcctgaaaggctggcaccaggacgctttgattacatcggccacagccaccagttattccacatctgtgcagtgctgggcacccacttccagctggaggcagtgctggctgatatgggatcacgcagagcctggctggccacacaggaacctgccctgggcctggcaggcacagtggccacactggtcttggctgcagctgggaacctactcattattgctgctttcacagccaccctgcttcgggcccccagtacatgccctctgctgcagggtggcccactggaggggggtacccaggccaaacaacagtgaggccccatccctgaccctgtcctggagggggcagaggccaggccccagtgctgacgaggagcccagatttgggcctaatcaggtggggacgcatctcagcctggaaccaacaggggctgaggagagagggcacaggagagagggcagagaagaggaggggtgtctagggggactggcagagtgtgagagggaccgtgagggggctcttgatgggagtggaagaagtgctgagggtctgagaggggagatgcatgcgtgtccaggctgaagatgcccctatattctgtcaaaggttggcggggggaggtgttggggtcctttcatctggctccgtttctggtgcttctggaagtctctgctcagcacagggaagaactaacacgactaacctaggcctaccctgaatgcttcttgctaaccaggccgagaggccacacacttgcccccccatccccacaaaccaggtaatgccagtttgccagcagctatttgcctatagagatgagtctgtcctggtcataactgtgtgctcaaggtgtccaggcttttgggggtgggcctatctgggtgcattatggatggtttggtggattgaggtgtggggaggagggtcctaggctagagggggtatccctagttagactttgggaagccaccttcaatgttttctggaacaaggcaggtacattttttaaaatttaaattttggcaaaaagtatttctaaaaacttgtagggggggcccgtttccaaaattggacgtttgggtagatctctttcc

SEQ ID NO: 362390 - DNA, 1226 bp, Homo sapiens
agcggactccccgcccaggcctggcccgcctgcctagcggactcttcctccatcagcctggctggcagcagccttggactccgcccgtggagccctgggcctgttgacccaccagcttaggagcacccaccaagctctgggtcaacgtggaggtaccaggccaccatgctcagtctcaagctgccccaacttcttcaagtccaccaggtcccccgggtgttctgggaagatggcatcatgtctggctaccgccgccccaccagctcggctttggactgtgtcctcagctccttccagatgaccaacgagacggtcaacatctggactcacttcctgcccacctggtacttcctgtggcggctcctggcgctggcgggcggccccggcttccgtgcggagccgtaccactggccgctgctggtcttcctgctgcccgcctgcctctaccccttcgcgtcgtgctgcgcgcacaccttcagctccatgtcgccccgcatgcgccacatctgctacttcctcgactacggcgcgctcagcctctacagtctgggctgcgccttcccctatgccgcctactccatgccggcctcctggctgcacggccacctgcaccagttctttgtgcctgccgccgcactcaactccttcctgtgcaccggcctctcctgctactcccgtttcctggagctggaaagccctgggctcagtaaggtcctccgcacaggagccttcgcctatccattcctgttcgacaacctcccactcttttatcggctcgggctgtgctggggcaggggccacggctgtgggcaggaggccctgagcaccagccatggctaccatctcttctgcgcgctgctcactggcttcctcttcgcctcccacctgcctgaaaggctggcaccaggacgctttgattacatcggctaaccaggccgagaggccacacacttgcccccccatccccacaaaccaggtaatgccagtttgccagcagctatttgcctatagagatgagtctgtcctggtcataactgtgtgctcaaggtgtccaggcttttgggggtgggcctatctgggtgcattatggatggtttggtggattgaggtgtggggaggagggtcctaggctagagggggtatccctagttagactttgggaagccaccttcaatgttttctggaacaaggcaggtacaaataaaaaaataaaactttggaaagca

SEQ ID NO: 362391 - DNA, 518 bp, Homo sapiens
agaaaggggaaaaggaggaggcagcctgctctgtgagagagcaggcccttaatgctttgttggttttccttggaggcaagagttcttttgggatctgttctgaaggccatttgtttagctcatctgaaaacatggtgttctaagcaggcttgacaacactggcttgaacctgaaatatgtttcttttcatattggccctatgtcctctttgtgggacatatatgtcagctcagctggtgggcaaaagttaggactggtaatgaccctaattaatgtggtataccctgccaatgagagaacgctctgggaatgtgagaggcatgtagatcatggggcaatatccaacattctcctctttgctctgtcctgtgtcctatccagcttcaaaaccctatacaaaagtttcagactgatggcccaatgagtgattggcataatgtttttaaaacatctaaatgtgaatgcctttaggaggattatgtactctagttttccatagcccccactacccactatca

SEQ ID NO: 362392 - DNA, 450 bp, Homo sapiens
gacaccaaatctgctagcacctagatcttgaacttccaagcctccagaactgtgagcaatacatatcttttgtacataaattacccagtctaaggtattttgttatagcaacccaaacagactatacaatcacttaagttttatatgtcaactgcattaggcatagtacttctccatagtaaaacctaaatttatactgagagtgttgatataaagacatccagttaagtatggtaactgaacatactgatttacttcaactccttccccaaaatcctgctaaagtacagtaagaattttaaaaaggcttaacctccaaagagagaagggcaatagaaaataagagacagcaataaaattttggaaatagaaagtagatgaaagagtcataactgactcaaaagatctgagaaatcagtaagaagcacatcaattccctccaaataacta

SEQ ID NO: 362393 - DNA, 1266 bp, Homo sapiens
aggctcagcaggcgactcctcggcgccatcgctgtcgctggaatcagccgcgcgctgccgaaaagtccttttcggcctgtgagccatggccgaggcccgagcgcccggcgccctagaacccgctgaaccgcaagccgcagcttcagtgcccgccccctagggcgcgctcccgccgcgcctggccgccgagtgcgcgcgcccgtcccgcctgccttctgctcaccgctactctgtctgcgcctgcgtgctttggctccctggatctgatggagtcttgctctgttgcccaggctggagtgcagtggcatgatctcagctcactgcaacctctgcctcccagggttcaagcgattctcctgtctcagcctcctgagtagctgggattaggtgtgcaccaccatgcctggctaagttttgtatttttagtagagatggggtttcaccatgttggttaggctggtctcaaactcctgacctcaggagatccacctgcctcagccttccaaagtgctgggattacaggtgtgagccaccacgctcagctgacatttggttatatttgatttttttgttatattacaaataatgttattaaagcacttgtgatacaagtgtctctttgggtcatgggcacacaattcagttgggtataaacctaagaatggaatcattaggtcatagggtaagcatatcttcaacttcactggaaaatatcagttcccaaagtagtaattgcctaaatttacattctcatcagcagtgtattaaagtttccatggctcctcatacttgctaacacttggtattgtcagctgtctttgttttagccatctgggtgtatgtccttattctttgaatacgaatttccttgattactaatgaggataaaccctttttcattacatatatgtgaatacacatatacataaatatatacagtatacatactgtatatgtgtatatgaaaacatatatatacataaatatatatgtatatatactgtacatattaggctatctggagttcttcttttctgaattgcctgttcaagtctcttgctcatttttctattgagttgtctgttttttcttaatggtgcatagctctcctgtatgtattttgtatttaactgatagctgttttgcaaatatattctcccagttgtggtttgctttttcactctattaatgattgtttttggtaaagagaaattcttaaatgtttaatgctaatataataaaatctatttaacctttctttaccat

SEQ ID NO: 362394 - DNA, 661 bp, Homo sapiens
atccattagggagaacctgaaaggtccttttttggccctccaaggtgaatgcctgcaaaagcaagcgaagcacgctatctgcctgcatgagccccatgtacctggcgtggcctgtgctcctcaccgtgtgtcccacttctgctgccccttcgccttgccaggtggagtctgactgattttttgccactgctgccaccacaggccacctggagccccagccagtttgaggaaagtggctctgcttgattttccttttttcttttttttcctctttttttctccatttctgacttcagcaggtgggacttggagcttctgcttctgcagccacagaagactccccagtttggagggctgtggttgtgggctccctaagcatctctctgcagagcctctttgttttccattttacccaccatgtcaataatttaacacagtggcggaggagttcatgtctcttcctatttgtcattactcttctaactttcacagctgtactcggctactggtcagaataagagaaaaagcagtggaaccaggaggatcctacaagaaatattccatttcacttttgtttgtgcatataccttttctgtttaaatgtggacttcgatttgatatgcttccagtgcagacacagatcccatatgtaagagagtat

SEQ ID NO: 362395 - DNA, 300 bp, Homo sapiens
gttaaatgattgttatattgttttaggattatctatgatacactttgacatctcacacacacacatgaacttttctttttacaatgcaaaagtttaaacaatagcttaaatttagactgcaagaatattataatctcaatatggtatttggtactagagatagatttcttttataaaatcttaaaaacaggacgttctcttccttttgaacctttatcccagaggtgaaaatatccaatatgttgttttctgcatatattgaagtagtagtttcactttaataaagatggattaaaagtt

SEQ ID NO: 362396 - DNA, 524 bp, Homo sapiens
cttagttttacttcaaaatccattataaatatgtgcacttctctcaaaatccattgctactgttctagtctgaccaccatcatctcttgactggtccatatcaataggcttctaactggtccctttgcctccatttttgcccatctcaaattcattctacacagaatagccaaaattatttttattaatttattttaaaaatcagattatgctacttacctgcataaatttccaatggctttgtacgcttaaaatccaagcttcttatcatgactttcatcacccaacatagtgcagctcctgtctaactctgtggctttttaaaattctatttatatcagtcagggttccctcagagaagcagaaccaataggcaggacatagactttaaaagatttattgtaaggccaggtgctgtggctcttgcctgtaatcccaatactttgggaggccaaggtaggtagattgcttgagctcaggagtttgaaatcagcctgggcaacttggagaaaccctgtctctac

SEQ ID NO: 362397 - DNA, 1867 bp, Homo sapiens
gtagatagtcagatgtcttttgaaaatgtgttttcggtgtggaatattaacccaatctttgataactcttccagaaccttcggctcgcgtgcttctgagctgctgtggatggcctcggctctctggactgtccttccgagtaggatgtcactgagatccctcaaatggagcctcctgctgctgtcactcctgagtttctttgtgatgtggtacctcagccttccccactacaatgtgatagaacgcgtgaactggatgtacttctatgagtatgagccgatttacagacaagactttcacttcacacttcgagagcattcaaactgctctcatcaaaatccatttctggtcattctggtgacctcccacccttcagatgtgaaagccaggcaggccattagagttacttggggtgaaaaaaagtcttggtggggatatgaggttcttacatttttcttattaggccaagaggctgaaaaggaagacaaaatgttggcattgtccttagaggatgaacaccttctttatggtgacataatccgacaagattttttagacacatataataacctgaccttgaaaaccattatggcattcaggtgggtaactgagttttgccccaatgccaagtacgtaatgaagacagacactgatgttttcatcaatactggcaatttagtgaagtatcttttaaacctaaaccactcagagaagtttttcacaggttatcctctaattgataattattcctatagaggattttaccaaaaaacccatatttcttaccaggagtatcctttcaaggtgttccctccatactgcagtgggttgggttatataatgtccagagatttggtgccaaggatctatgaaatgatgggtcacgtaaaacccatcaagtttgaagatgtttatgtcgggatctgtttgaatttattaaaagtgaacattcatattccagaagacacaaatcttttctttctatatagaatccatttggatgtctgtcaactgagacgtgtgattgcagcccatggcttttcttccaaggagatcatcactttttggcaggtcatgctaaggaacaccacatgccattattaacttcacattctacaaaaagcctagaaggacaggatactttgtggaaagtgttaaataaagtaggtactgtggaaaattcatggggaggtcagtgtgctggcttacactgaactgaaactcatgaaaaacccagactggagactggagggttacacttgtgatttattagtcaggcccttcaaagatgatatgtggaggaattaaatataaaggaattggaggtttttgctaaagaaattaataggaccaaacaatttggacatgtcattctgtagactagaatttcttaaaagggtgttactgagttataagctcactaggctgtaaaaacaaaacaatgtagagttttatttattgaacaatgtagtcacttgaaggttttgtgtatatcttatgtggattaccaatttaaaaatatatgtagttctgtgtcaaaaaacttcttcactgaagttatactgaacaaaattttacctgtttttggtcatttataaagtacttcaagatgttgcagtatttcacagttattattatttaaaattacttcaactttgtgtttttaaatgttttgacgatttcaatacaagataaaaaggatagtgaatcattctttacatgcaaacattttccagttacttaactgatcagtttattattgatacatcactccattaatgtaaagtcataggtcattattgcatatcagtaatctcttggactttgttaaatattttactgtggtaatatagagaagaattaaagc

SEQ ID NO: 362398 - DNA, 3279 bp, Homo sapiens
gcgtgcggatgcggggaggctgcgtgtgtgcgcagggagagaacgccggccaccttcccgcttccgagctgggtgcgcgccgagcacaggagattgcctgcgtttaggaggtggctgcgttgtgggaaaagctatcaaggaagaaattgccaaaccatgtctttttttctgttttcagagtagttcacaacagatctgagtgttttaattaagcatggaatacagaaaacaacaaaaaacttaagctttaatttcatctggaattccacagttttcttagctccctggacccggttgacctgttggctcttcccgctggctgctctatcacgtggtgctctccgactactcaccccgagtgtaaagaaccttcggctcgcgtgcttctgagctgctgtggatggcctcggctctctggactgtccttccgagtaggatgtcactgagatccctcaaatggagcctcctgctgctgtcactcctgagtttctttgtgatgtggtacctcagccttccccactacaatgtgatagaacgcgtgaactggatgtacttctatgagtatgagccgatttacagacaagactttcacttcacacttcgagagcattcaaactgctctcatcaaaatccatttctggtcattctggtgacctcccacccttcagatgtgaaagccaggcaggccattagagttacttggggtgaaaaaaagtcttggtggggatatgaggttcttacatttttcttattaggccaagaggctgaaaaggaagacaaaatgttggcattgtccttagaggatgaacaccttctttatggtgacataatccgacaagattttttagacacatataataacctgaccttgaaaaccattatggcattcaggtgggtaactgagttttgccccaatgccaagtacgtaatgaagacagacactgatgttttcatcaatactggcaatttagtgaagtatcttttaaacctaaaccactcagagaagtttttcacaggttatcctctaattgataattattcctatagaggattttaccaaaaaacccatatttcttaccaggagtatcctttcaaggtgttccctccatactgcagtgggttgggttatataatgtccagagatttggtgccaaggatctatgaaatgatgggtcacgtaaaacccatcaagtttgaagatgtttatgtcgggatctgtttgaatttattaaaagtgaacattcatattccagaagacacaaatcttttctttctatatagaatccatttggatgtctgtcaactgagacgtgtgattgcagcccatggcttttcttccaaggagatcatcactttttggcaggtcatgctaaggaacaccacatgccattattaacttcacattctacaaaaagcctagaaggacaggatactttgtggaaagtgttaaataaagtaggtactgtggaaaattcatggggaggtcagtgtgctggcttacactgaactgaaactcatgaaaaacccagactggagactggagggttacacttgtgatttattagtcaggcccttcaaagatgatatgtggaggaattaaatataaaggaattggaggtttttgctaaagaaattaataggaccaaacaatttggacatgtcattctgtagactagaatttcttaaaagggtgttactgagttataagctcactaggctgtaaaaacaaaacaatgtagagttttatttattgaacaatgtagtcacttgaaggttttgtgtatatcttatgtggattaccaatttaaaaatatatgtagttctgtgtcaaaaaacttcttcactgaagttatactgaacaaaattttacctgtttttggtcatttataaagtacttcaagatgttgcagtatttcacagttattattatttaaaattacttcaactttgtgtttttaaatgttttgacgatttcaatacaagataaaaaggatagtgaatcattctttacatgcaaacattttccagttacttaactgatcagtttattattgatacatcactccattaatgtaaagtcataggtcattattgcatatcagtaatctcttggactttgttaaatattttactgtggtaatatagagaagaattaaagcaagaaaatctgaagtattgtcttgtttttaaaaaatacagttcctagtgtttttagaagtcacttaatttgtctcatttttccacctggaaattaggaataatgtagaatgcaaggcagtaatttccttttggaaaggactctgaaggcagaaaagaagggagagaacctcatgggcagaatattataaaaagagtgtcatattccagcatttgaattggaaagagaagagtgaagatccaagttgcattattaatctgccctgtgttttttccttttaacaatcagtttgagctgctgctgttatgagtttctcatcaagatgaaagccctaatatgtaaagtcaaatccgatttaaattttgtgcttttatagaaagaaatttcttcatagacgtggtgatatatcatttgttggacctgctaatagtaggtcaaaggggagcactccttgccccctgttcctgggtttatgcagttttctttttagagtttatatagggcaagtggttctttttctctgaattacaggatggaaaaaggtcatatcctttgtcaggaaatataaacttgaaagtatgtagtcagctcttgtaatactcatatttatgattgtcctatatgaaaaacaacttcagttaaaactataatgtgtgattctgtataacaaggtgatgtctgtttcccagggctcagacctaatccagttataataaaatcaattaaatgaaatattctatagaatcgatctatgcccttgttaatctccatccatataggagtcacgttctttaagacagatggtggtagttatttttgtggcatggttagatttgactggttttgcagaagattacagttatgtactgcataatgacatatacaatagtggtcccataaaattataatggagcagaaaatctattgcctcatgatgttttagccgttttaatgtcatagcctagtgcattactcacgtgtctgtggagatgctggtgtaaacaaacctactacactgccagttgtataaaagtacagcacattcagttatgtacagtatgtaatactgataatgacaataaatgacaccggtttgtgtatttactttttataaaaaaaaa

SEQ ID NO: 362399 - DNA, 3225 bp, Homo sapiens
gcgtgcggatgcggggaggctgcgtgtgtgcgcagggagagaacgccggccaccttcccgcttccgagctgggtgcgcgccgagcacaggagattgcctgcgtttaggaggtggctgcgttgtgggaaaagctatcaaggaagaaattgccaaaccatgtctttttttctgttttcagagtagttcacaacagatctgagtgttttaattaagcatggaatacagaaaacaacaaaaaacttaagctttaatttcatctggaattccacagttttcttagctccctggacccggttgacctgttggctcttcccgctggctgctctatcacgtggtgctctccgactactcaccccgagtgtaaagaaccttcggctcgcgtgcttctgagctgctgtggatggcctcggctctctggactgtccttccgagtaggatgtcactgagatccctcaaatggagcctcctgctgctgtcactcctgagtttctttgtgatgtggtacctcagccttccccactacaatgtgatagaacgcgtgaactggatgtacttctatgagtatgagccgatttacagacaagactttcacttcacacttcgagagcattcaaactgctctcatcaaaatccatttctggtcattctggtgacctcccacccttcagatgtgaaagccaggcaggccattagagttacttggggtgaaaaaaagtcttggtggggatatgaggttcttacatttttcttattaggccaagaggctgaaaaggaagacaaaatgttggcattgtccttagaggatgaacaccttctttatggtgacataatccgacaagattttttagacacatataataacctgaccttgaaaaccattatggcattcaggtgggtaactgagttttgccccaatgccaagtacgtaatgaagacagacactgatgttttcatcaatactggcaatttagtgaagtatcttttaaacctaaaccactcagagaagtttttcacaggttatcctctaattgataattattcctatagaggattttaccaaaaaacccatatttcttaccaggagtatcctttcaaggtgttccctccatactgcagtgggttgggttatataatgtccagagatttggtgccaaggatctatgaaatgatgggtcacgtaaaacccatcaagtttgaagatgtttatgtcgggatctgtttgaatttattaaaagtgaacattcatattccagaagacacaaatcttttctttctatatagaatccatttggatgtctgtcaactgagacgtgtgattgcagcccatggcttttcttccaaggagatcatcactttttggcaggtcatgctaaggaacaccacatgccattattaacttcacattctacaaaaagcctagaaggacaggatactttgtggaaagtgttaaataaagtaggtactgtggaaaattcatggggaggtcagtgtgctggcttacactgaactgaaactcatgaaaaacccagactggagactggagggttacacttgtgatttattagtcaggcccttcaaagatgatatgtggaggaattaaatataaaggaattggaggtttttgctaaagaaattaataggaccaaacaatttggacatgtcattctgtagactagaatttcttaaaagggtgttactgagttataagctcactaggctgtaaaaacaaaacaatgtagagttttatttattgaacaatgtagtcacttgaaggttttgtgtatatcttatgtggattaccaatttaaaaatatatgtagttctgtgtcaaaaaacttcttcactgaagttatactgaacaaaattttacctgtttttggtcatttataaagtacttcaagatgttgcagtatttcacagttattattatttaaaattacttcaactttgtgtttttaaatgttttgacgatttcaatacaagataaaaaggatagtgaatcattctttacatgcaaacattttccagttacttaactgatcagtttattattgatacatcactccattaatgtaaagtcataggtcattattgcatatcagtaatctcttggactttgttaaatattttactgtggtaatatagagaagaattaaagcaagaaaatctgaagtattgtcttgtttttaaaaaatacagttcctagtgtttttagaagtcacttaatttgtctcatttttccacctggaaattaggaataatgtagaatgcaaggcagtaatttccttttggaaaggactctgaaggcagaaaagaagggagagaacctcatgggcagaatattataaaaagagtgtcatattccagcatttgaattggaaagagaagagtgaagatccaagttgcattattaatctgccctgtgttttttccttttaacaatcagtttgagctgctgctgttatgagtttctcatcaagatgaaagccctaatatgtaaagtcaaatccgatttaaattttgtgcttttatagaaagaaatttcttcatagacgtggtgatatatcatttgttggacctgctaatagtaggtcaaaggggagcactccttgccccctgttcctgggtttatgcagttttctttttagagtttatatagggcaagtggttctttttctctgaattacaggatggaaaaaggtcatatcctttgtcaggaaatataaacttgaaagtatgtagtcagctcttgtaatactcatatttatgattgtcctatatgaaaaacaacttcagttaaaactataatgtgtgattctgtataacaaggtgatgtctgtttcccagggctcagacctaatccagttataatcatccatataggagtcacgttctttaagacagatggtggtagttatttttgtggcatggttagatttgactggttttgcagaagattacagttatgtactgcataatgacatatacaatagtggtcccataaaattataatggagcagaaaatctattgcctcatgatgttttagccgttttaatgtcatagcctagtgcattactcacgtgtctgtggagatgctggtgtaaacaaacctactacactgccagttgtataaaagtacagcacattcagttatgtacagtatgtaatactgataatgacaataaatgacaccggtttgtgtatttactttttataaaaaaaaa

SEQ ID NO: 362400 - DNA, 3423 bp, Homo sapiens
gcgtgcggatgcggggaggctgcgtgtgtgcgcagggagagaacgccggccaccttcccgcttccgagctgggtgcgcgccgagcacaggagggtgcaatacctgccttgcgtcgcccgtgccgctccagccaccgtcaaatccgggtagcgacccggggcgtttgcagcggtgccgaggaagaggacgggaacggtgttacgattgcctgcgtttaggaggtggctgcgttgtgggaaaagctatcaaggaagaaattgccaaaccatgtctttttttctgttttcagagtagttcacaacagatctgagtgttttaattaagcatggaatacagaaaacaacaaaaaacttaagctttaatttcatctggaattccacagagacaaggccactttatgtttcccaggctggactggaacccctgggctcaaatgatcctcctacctaagcctgcagagtagcgaggacttcagttttcttagctccctggacccggttgacctgttggctcttcccgctggctgctctatcacgtggtgctctccgactactcaccccgagtgtaaagaaccttcggctcgcgtgcttctgagctgctgtggatggcctcggctctctggactgtccttccgagtaggatgtcactgagatccctcaaatggagcctcctgctgctgtcactcctgagtttctttgtgatgtggtacctcagccttccccactacaatgtgatagaacgcgtgaactggatgtacttctatgagtatgagccgatttacagacaagactttcacttcacacttcgagagcattcaaactgctctcatcaaaatccatttctggtcattctggtgacctcccacccttcagatgtgaaagccaggcaggccattagagttacttggggtgaaaaaaagtcttggtggggatatgaggttcttacatttttcttattaggccaagaggctgaaaaggaagacaaaatgttggcattgtccttagaggatgaacaccttctttatggtgacataatccgacaagattttttagacacatataataacctgaccttgaaaaccattatggcattcaggtgggtaactgagttttgccccaatgccaagtacgtaatgaagacagacactgatgttttcatcaatactggcaatttagtgaagtatcttttaaacctaaaccactcagagaagtttttcacaggttatcctctaattgataattattcctatagaggattttaccaaaaaacccatatttcttaccaggagtatcctttcaaggtgttccctccatactgcagtgggttgggttatataatgtccagagatttggtgccaaggatctatgaaatgatgggtcacgtaaaacccatcaagtttgaagatgtttatgtcgggatctgtttgaatttattaaaagtgaacattcatattccagaagacacaaatcttttctttctatatagaatccatttggatgtctgtcaactgagacgtgtgattgcagcccatggcttttcttccaaggagatcatcactttttggcaggtcatgctaaggaacaccacatgccattattaacttcacattctacaaaaagcctagaaggacaggatactttgtggaaagtgttaaataaagtaggtactgtggaaaattcatggggaggtcagtgtgctggcttacactgaactgaaactcatgaaaaacccagactggagactggagggttacacttgtgatttattagtcaggcccttcaaagatgatatgtggaggaattaaatataaaggaattggaggtttttgctaaagaaattaataggaccaaacaatttggacatgtcattctgtagactagaatttcttaaaagggtgttactgagttataagctcactaggctgtaaaaacaaaacaatgtagagttttatttattgaacaatgtagtcacttgaaggttttgtgtatatcttatgtggattaccaatttaaaaatatatgtagttctgtgtcaaaaaacttcttcactgaagttatactgaacaaaatattatttaaaattacttcaactttgtgtttttaaatgttttgacgatttcaatacaagataaaaaggatagtgaatcattctttacatgcaaacattttccagttacttaactgatcagtttattattgatacatcactccattaatgtaaagtcataggtcattattgcatatcagtaatctcttggactttgttaaatattttactgtggtaatatagagaagaattaaagcaagaaaatctgaagtattgtcttgtttttaaaaaatacagttcctagtgtttttagaagtcacttaatttgtctcatttttccacctggaaattaggaataatgtagaatgcaaggcagtaatttccttttggaaaggactctgaaggcagaaaagaagggagagaacctcatgggcagaatattataaaaagagtgtcatattccagcatttgaattggaaagagaagagtgaagatccaagttgcattattaatctgccctgtgttttttccttttaacaatcagtttgagctgctgctgttatgagtttctcatcaagatgaaagccctaatatgtaaagtcaaatccgatttaaattttgtgcttttatagaaagaaatttcttcatagacgtggtgatatatcatttgttggacctgctaatagtaggtcaaaggggagcactccttgccccctgttcctgggtttatgcagttttctttttagagtttatatagggcaagtggttctttttctctgaattacaggatggaaaaaggtcatatcctttgtcaggaaatataaacttgaaagtatgtagtcagctcttgtaatactcatatttatgattgtcctatatgaaaaacaacttcagttaaaactataatgtgtgattctgtataacaaggtgatgtctgtttcccagggctcagacctaatccagttataataaaatcaattaaatgaaatattctatagaatcgatctatgcccttgttaatctccatccatataggagtcacgttctttaagacagatggtggtagttatttttgtggcatggttagatttgactggttttgcagaagattacagttatgtactgcataatgacatatacaatagtggtcccataaaattataatggagcagaaaatctattgcctcatgatgttttagccgttttaatgtcatagcctagtgcattactcacgtgtctgtggagatgctggtgtaaacaaacctactacactgccagttgtataaaagtacagcacattcagttatgtacagtatgtaatactgataatgacaataaatgacaccggtttgtgtatttactttttataaaaaaaaa

SEQ ID NO: 362401 - DNA, 3624 bp, Homo sapiens
acacattaccacgcatttccggaagaacatgggagcttgccgcgccgagcacaggagggtgcaatacctgccttgcgtcgcccgtgccgctccagccaccgtcaaatccgggtagcgacccggggcgtttgcagcggtgccgaggaagaggacgggaacggtgttacgattgcctgcgtttaggaggtggctgcgttgtgggaaaagctatcaaggaagaaattgccaaaccatgtctttttttctgttttcagagactaaaatgttcgttcaaatgaatggccattggataactccagacctgaaaataaacactgttgtcaaaacagcatccaggccgggcgcggtggctcacgccagtaattccagcactttgggaggccgaggcgggcagatcacctcagtagttcacaacagatctgagtgttttaattaagcatggaatacagaaaacaacaaaaaacttaagctttaatttcatctggaattccacagttttcttagctccctggacccggttgacctgttggctcttcccgctggctgctctatcacgtggtgctctccgactactcaccccgagtgtaaagagtcttgctgctctgttgcccaggctggagtacagtggcaggatctcagctcactgcaatctccgtctctcaggtttaagcagttctcctgcctcagcctcccaagtaggtgggactacagaaccttcggctcgcgtgcttctgagctgctgtggatggcctcggctctctggactgtccttccgagtaggatgtcactgagatccctcaaatggagcctcctgctgctgtcactcctgagtttctttgtgatgtggtacctcagccttccccactacaatgtgatagaacgcgtgaactggatgtacttctatgagtatgagccgatttacagacaagactttcacttcacacttcgagagcattcaaactgctctcatcaaaatccatttctggtcattctggtgacctcccacccttcagatgtgaaagccaggcaggccattagagttacttggggtgaaaaaaagtcttggtggggatatgaggttcttacatttttcttattaggccaagaggctgaaaaggaagacaaaatgttggcattgtccttagaggatgaacaccttctttatggtgacataatccgacaagattttttagacacatataataacctgaccttgaaaaccattatggcattcaggtgggtaactgagttttgccccaatgccaagtacgtaatgaagacagacactgatgttttcatcaatactggcaatttagtgaagtatcttttaaacctaaaccactcagagaagtttttcacaggttatcctctaattgataattattcctatagaggattttaccaaaaaacccatatttcttaccaggagtatcctttcaaggtgttccctccatactgcagtgggttgggttatataatgtccagagatttggtgccaaggatctatgaaatgatgggtcacgtaaaacccatcaagtttgaagatgtttatgtcgggatctgtttgaatttattaaaagtgaacattcatattccagaagacacaaatcttttctttctatatagaatccatttggatgtctgtcaactgagacgtgtgattgcagcccatggcttttcttccaaggagatcatcactttttggcaggtcatgctaaggaacaccacatgccattattaacttcacattctacaaaaagcctagaaggacaggatactttgtggaaagtgttaaataaagtaggtactgtggaaaattcatggggaggtcagtgtgctggcttacactgaactgaaactcatgaaaaacccagactggagactggagggttacacttgtgatttattagtcaggcccttcaaagatgatatgtggaggaattaaatataaaggaattggaggtttttgctaaagaaattaataggaccaaacaatttggacatgtcattctgtagactagaatttcttaaaagggtgttactgagttataagctcactaggctgtaaaaacaaaacaatgtagagttttatttattgaacaatgtagtcacttgaaggttttgtgtatatcttatgtggattaccaatttaaaaatatatgtagttctgtgtcaaaaaacttcttcactgaagttatactgaacaaaattttacctgtttttggtcatttataaagtacttcaagatgttgcagtatttcacagttattattatttaaaattacttcaactttgtgtttttaaatgttttgacgatttcaatacaagataaaaaggatagtgaatcattctttacatgcaaacattttccagttacttaactgatcagtttattattgatacatcactccattaatgtaaagtcataggtcattattgcatatcagtaatctcttggactttgttaaatattttactgtggtaatatagagaagaattaaagcaagaaaatctgaagtattgtcttgtttttaaaaaatacagttcctagtgtttttagaagtcacttaatttgtctcatttttccacctggaaattaggaataatgtagaatgcaaggcagtaatttccttttggaaaggactctgaaggcagaaaagaagggagagaacctcatgggcagaatattataaaaagagtgtcatattccagcatttgaattggaaagagaagagtgaagatccaagttgcattattaatctgccctgtgttttttccttttaacaatcagtttgagctgctgctgttatgagtttctcatcaagatgaaagccctaatatgtaaagtcaaatccgatttaaattttgtgcttttatagaaagaaatttcttcatagacgtggtgatatatcatttgttggacctgctaatagtaggtcaaaggggagcactccttgccccctgttcctgggtttatgcagttttctttttagagtttatatagggcaagtggttctttttctctgaattacaggatggaaaaaggtcatatcctttgtcaggaaatataaacttgaaagtatgtagtcagctcttgtaatactcatatttatgattgtcctatatgaaaaacaacttcagttaaaactataatgtgtgattctgtataacaaggtgatgtctgtttcccagggctcagacctaatccagttataataaaatcaattaaatgaaatattctatagaatcgatctatgcccttgttaatctccatccatataggagtcacgttctttaagacagatggtggtagttatttttgtggcatggttagatttgactggttttgcagaagattacagttatgtactgcataatgacatatacaatagtggtcccataaaattataatggagcagaaaatctattgcctcatgatgttttagccgttttaatgtcatagcctagtgcattactcacgtgtctgtggagatgctggtgtaaacaaacctactacactgccagttgtataaaagtacagcacattcagttatgtacagtatgtaatactgataatgacaataaatgacaccggtttgtgtatttactttttataaaaaaaaa

SEQ ID NO: 362402 - DNA, 3219 bp, Homo sapiens
gcgtgcggatgcggggaggctgcgtgtgtgcgcagggagagaacgccggccaccttcccgcttccgagctgggtgcgcgccgagcacaggagattgcctgcgtttaggaggtggctgcgttgtgggaaaagctatcaaggaagaaattgccaaaccatgtctttttttctgttttcagagtagttcacaacagatctgagtgttttaattaagcatggaatacagaaaacaacaaaaaacttaagctttaatttcatctggaattccacagttttcttagctccctggacccggttgacctgttggctcttcccgctggctgctctatcacgtggtgctctccgactactcaccccgagtgtaaagaaccttcggctcgcgtgcttctgagctgctgtggatggcctcggctctctggactgtccttccgagtaggatgtcactgagatccctcaaatggagcctcctgctgctgtcactcctgagtttctttgtgatgtggtacctcagccttccccactacaatgtgatagaacgcgtgaactggatgtacttctatgagtatgagccgatttacagacaagactttcacttcacacttcgagagcattcaaactgctctcatcaaaatccatttctggtcattctggtgacctcccacccttcagatgtgaaagccaggcaggccattagagttacttggggtgaaaaaaagtcttggtggggatatgaggttcttacatttttcttattaggccaagaggctgaaaaggaagacaaaatgttggcattgtccttagaggatgaacaccttctttatggtgacataatccgacaagattttttagacacatataataacctgaccttgaaaaccattatggcattcaggtgggtaactgagttttgccccaatgccaagtacgtaatgaagacagacactgatgttttcatcaatactggcaatttagtgaagtatcttttaaacctaaaccactcagagaagtttttcacaggttatcctctaattgataattattcctatagaggattttaccaaaaaacccatatttcttaccaggagtatcctttcaaggtgttccctccatactgcagtgggttgggttatataatgtccagagatttggtgccaaggatctatgaaatgatgggtcacgtaaaacccatcaagtttgaagatgtttatgtcgggatctgtttgaatttattaaaagtgaacattcatattccagaagacacaaatcttttctttctatatagaatccatttggatgtctgtcaactgagacgtgtgattgcagcccatggcttttcttccaaggagatcatcactttttggcaggtcatgctaaggaacaccacatgccattattaacttcacattctacaaaaagcctagaaggacaggatactttgtggaaagtgttaaataaagtaggtactgtggaaaattcatggggaggtcagtgtgctggcttacactgaactgaaactcatgaaaaacccagactggagactggagggttacacttgtgatttattagtcaggcccttcaaagatgatatgtggaggaattaaatataaaggaattggaggtttttgctaaagaaattaataggaccaaacaatttggacatgtcattctgtagactagaatttcttaaaagggtgttactgagttataagctcactaggctgtaaaaacaaaacaatgtagagttttatttattgaacaatgtagtcacttgaaggttttgtgtatatcttatgtggattaccaatttaaaaatatatgtagttctgtgtcaaaaaacttcttcactgaagttatactgaacaaaatattatttaaaattacttcaactttgtgtttttaaatgttttgacgatttcaatacaagataaaaaggatagtgaatcattctttacatgcaaacattttccagttacttaactgatcagtttattattgatacatcactccattaatgtaaagtcataggtcattattgcatatcagtaatctcttggactttgttaaatattttactgtggtaatatagagaagaattaaagcaagaaaatctgaagtattgtcttgtttttaaaaaatacagttcctagtgtttttagaagtcacttaatttgtctcatttttccacctggaaattaggaataatgtagaatgcaaggcagtaatttccttttggaaaggactctgaaggcagaaaagaagggagagaacctcatgggcagaatattataaaaagagtgtcatattccagcatttgaattggaaagagaagagtgaagatccaagttgcattattaatctgccctgtgttttttccttttaacaatcagtttgagctgctgctgttatgagtttctcatcaagatgaaagccctaatatgtaaagtcaaatccgatttaaattttgtgcttttatagaaagaaatttcttcatagacgtggtgatatatcatttgttggacctgctaatagtaggtcaaaggggagcactccttgccccctgttcctgggtttatgcagttttctttttagagtttatatagggcaagtggttctttttctctgaattacaggatggaaaaaggtcatatcctttgtcaggaaatataaacttgaaagtatgtagtcagctcttgtaatactcatatttatgattgtcctatatgaaaaacaacttcagttaaaactataatgtgtgattctgtataacaaggtgatgtctgtttcccagggctcagacctaatccagttataataaaatcaattaaatgaaatattctatagaatcgatctatgcccttgttaatctccatccatataggagtcacgttctttaagacagatggtggtagttatttttgtggcatggttagatttgactggttttgcagaagattacagttatgtactgcataatgacatatacaatagtggtcccataaaattataatggagcagaaaatctattgcctcatgatgttttagccgttttaatgtcatagcctagtgcattactcacgtgtctgtggagatgctggtgtaaacaaacctactacactgccagttgtataaaagtacagcacattcagttatgtacagtatgtaatactgataatgacaataaatgacaccggtttgtgtatttactttttataaaaaaaaa

SEQ ID NO: 362403 - DNA, 3385 bp, Homo sapiens
tgggtctcgggtctcggtgacgagcagctgcccgcctccggtgagcgcgggagaaggggcccagtggggcagtgggcgacgcggagggcccaggcccaggccgcggccgcgccgcatccgctggttgtccaccttgccttgccccagggtgcaatacctgccttgcgtcgcccgtgccgctccagccaccgtcaaatccgggtagcgacccggggcgtttgcagcggtgccgaggaagaggacgggaacggtgttacgattgcctgcgtttaggaggtggctgcgttgtgggaaaagctatcaaggaagaaattgccaaaccatgtctttttttctgttttcagagtagttcacaacagatctgagtgttttaattaagcatggaatacagaaaacaacaaaaaacttaagctttaatttcatctggaattccacagttttcttagctccctggacccggttgacctgttggctcttcccgctggctgctctatcacgtggtgctctccgactactcaccccgagtgtaaagaaccttcggctcgcgtgcttctgagctgctgtggatggcctcggctctctggactgtccttccgagtaggatgtcactgagatccctcaaatggagcctcctgctgctgtcactcctgagtttctttgtgatgtggtacctcagccttccccactacaatgtgatagaacgcgtgaactggatgtacttctatgagtatgagccgatttacagacaagactttcacttcacacttcgagagcattcaaactgctctcatcaaaatccatttctggtcattctggtgacctcccacccttcagatgtgaaagccaggcaggccattagagttacttggggtgaaaaaaagtcttggtggggatatgaggttcttacatttttcttattaggccaagaggctgaaaaggaagacaaaatgttggcattgtccttagaggatgaacaccttctttatggtgacataatccgacaagattttttagacacatataataacctgaccttgaaaaccattatggcattcaggtgggtaactgagttttgccccaatgccaagtacgtaatgaagacagacactgatgttttcatcaatactggcaatttagtgaagtatcttttaaacctaaaccactcagagaagtttttcacaggttatcctctaattgataattattcctatagaggattttaccaaaaaacccatatttcttaccaggagtatcctttcaaggtgttccctccatactgcagtgggttgggttatataatgtccagagatttggtgccaaggatctatgaaatgatgggtcacgtaaaacccatcaagtttgaagatgtttatgtcgggatctgtttgaatttattaaaagtgaacattcatattccagaagacacaaatcttttctttctatatagaatccatttggatgtctgtcaactgagacgtgtgattgcagcccatggcttttcttccaaggagatcatcactttttggcaggtcatgctaaggaacaccacatgccattattaacttcacattctacaaaaagcctagaaggacaggatactttgtggaaagtgttaaataaagtaggtactgtggaaaattcatggggaggtcagtgtgctggcttacactgaactgaaactcatgaaaaacccagactggagactggagggttacacttgtgatttattagtcaggcccttcaaagatgatatgtggaggaattaaatataaaggaattggaggtttttgctaaagaaattaataggaccaaacaatttggacatgtcattctgtagactagaatttcttaaaagggtgttactgagttataagctcactaggctgtaaaaacaaaacaatgtagagttttatttattgaacaatgtagtcacttgaaggttttgtgtatatcttatgtggattaccaatttaaaaatatatgtagttctgtgtcaaaaaacttcttcactgaagttatactgaacaaaatattatttaaaattacttcaactttgtgtttttaaatgttttgacgatttcaatacaagataaaaaggatagtgaatcattctttacatgcaaacattttccagttacttaactgatcagtttattattgatacatcactccattaatgtaaagtcataggtcattattgcatatcagtaatctcttggactttgttaaatattttactgtggtaatatagagaagaattaaagcaagaaaatctgaagtattgtcttgtttttaaaaaatacagttcctagtgtttttagaagtcacttaatttgtctcatttttccacctggaaattaggaataatgtagaatgcaaggcagtaatttccttttggaaaggactctgaaggcagaaaagaagggagagaacctcatgggcagaatattataaaaagagtgtcatattccagcatttgaattggaaagagaagagtgaagatccaagttgcattattaatctgccctgtgttttttccttttaacaatcagtttgagctgctgctgttatgagtttctcatcaagatgaaagccctaatatgtaaagtcaaatccgatttaaattttgtgcttttatagaaagaaatttcttcatagacgtggtgatatatcatttgttggacctgctaatagtaggtcaaaggggagcactccttgccccctgttcctgggtttatgcagttttctttttagagtttatatagggcaagtggttctttttctctgaattacaggatggaaaaaggtcatatcctttgtcaggaaatataaacttgaaagtatgtagtcagctcttgtaatactcatatttatgattgtcctatatgaaaaacaacttcagttaaaactataatgtgtgattctgtataacaaggtgatgtctgtttcccagggctcagacctaatccagttataataaaatcaattaaatgaaatattctatagaatcgatctatgcccttgttaatctccatccatataggagtcacgttctttaagacagatggtggtagttatttttgtggcatggttagatttgactggttttgcagaagattacagttatgtactgcataatgacatatacaatagtggtcccataaaattataatggagcagaaaatctattgcctcatgatgttttagccgttttaatgtcatagcctagtgcattactcacgtgtctgtggagatgctggtgtaaacaaacctactacactgccagttgtataaaagtacagcacattcagttatgtacagtatgtaatactgataatgacaataaatgacaccggtttgtgtatttactttttataaaaaaaaa

SEQ ID NO: 362404 - DNA, 2532 bp, Homo sapiens
gcgtgcggatgcggggaggctgcgtgtgtgcgcagggagagaacgccggccaccttcccgcttccgagctgggtgcgcgccgagcacaggagattgcctgcgtttaggaggtggctgcgttgtgggaaaagctatcaaggaagaaattgccaaaccatgtctttttttctgttttcagagtagttcacaacagatctgagtgttttaattaagcatggaatacagaaaacaacaaaaaacttaagctttaatttcatctggaattccacagttttcttagctccctggacccggttgacctgttggctcttcccgctggctgctctatcacgtggtgctctccgactactcaccccgagtgtaaagaaccttcggctcgcgtgcttctgagctgctgtggatggcctcggctctctggactgtccttccgagtaggatgtcactgagatccctcaaatggagcctcctgctgctgtcactcctgagtttctttgtgatgtggtacctcagccttccccactacaatgtgatagaacgcgtgaactggatgtacttctatgagtatgagccgatttacagacaagactttcacttcacacttcgagagcattcaaactgctctcatcaaaatccatttctggtcattctggtgacctcccacccttcagatgtgaaagccaggcaggccattagagttacttggggtgaaaaaaagtcttggtggggatatgaggttcttacatttttcttattaggccaagaggctgaaaaggaagacaaaatgttggcattgtccttagaggatgaacaccttctttatggtgacataatccgacaagattttttagacacatataataacctgaccttgaaaaccattatggcattcaggtgggtaactgagttttgccccaatgccaagtacgtaatgaagacagacactgatgttttcatcaatactggcaatttagtgaagtatcttttaaacctaaaccactcagagaagtttttcacaggttatcctctaattgataattattcctatagaggattttaccaaaaaacccatatttcttaccaggagtatcctttcaaggtgttccctccatactgcagtgggttgggttatataatgtccagagatttggtgccaaggatctatgaaatgatgggtcacgtaaaacccatcaagtttgaagatgtttatgtcgggatctgtttgaatttattaaaagtgaacattcatattccagaagacacaaatcttttctttctatatagaatccatttggatgtctgtcaactgagacgtgtgattgcagcccatggcttttcttccaaggagatcatcactttttggcaggtcatgctaaggaacaccacatgccattattaacttcacattctacaaaaagcctagaaggacaggatactttgtggaaagtgttaaataaagtaggtactgtggaaaattcatggggaggtcagtgtgctggcttacactgaactgaaactcatgaaaaacccagactggagactggagggttacacttgtgatttattagtcaggcccttcaaagatgatatgtggaggaattaaatataaaggaattggaggtttttgctaaagaaattaataggaccaaacaatttggacatgtcattctgtagactagaatttcttaaaagggtgttactgagttataagctcactaggctgtaaaaacaaaacaatgtagagttttatttattgaacaatgtagtcacttgaaggttttgtgtatatcttatgtggattaccaatttaaaaatatatgtagttctgtgtcaaaaaacttcttcactgaagttatactgaacaaaattttacctgtttttggtcatttataaagtacttcaagatgttgcagtatttcacagttattattatttaaaattacttcaactttgtgtttttaaatgttttgacgatttcaatacaagataaaaaggatagtgaatcattctttacatgcaaacattttccagttacttaactgatcagtttattattgatacatcactccattaatgtaaagtcataggtcattattgcatatcagtaatctcttggactttgttaaatattttactgtggtaatatagagaagaattaaagcaagaaaatctgaagtattgtcttgtttttaaaaaatacagttcctagtgtttagagtcaaaaacaaaaaaaaaaaaaacaaaaacaacaaaacacaacacacacacacaccaacaaagccagcagacccacacacgaagcaaagacgacgggcggacaacgcacggtcccaactgcagaaacagaaaaacaacacaaacgacaaaaccacggaaaacagacgaagcagagaacaaaagagacacaccgagcgaaaaaccgaaaaaagagcagaaacaccaacacaaagcaaagacagaacagcgcaaagaagaaaaaataggagagacacaaccagaaagaatataaagaaaagaaaaaaagaaaaggagaga

SEQ ID NO: 362405 - DNA, 3604 bp, Homo sapiens
gcgtgcggatgcggggaggctgcgtgtgtgcgcagggagagaacgccggccaccttcccgcttccgagctgggtgcgcgccgagcacaggagggtgcaatacctgccttgcgtcgcccgtgccgctccagccaccgtcaaatccgggtagcgacccggggcgtttgcagcggtgccgaggaagaggacgggaacggtgttacgattgcctgcgtttaggaggtggctgcgttgtgggaaaagctatcaaggaagaaattgccaaaccatgtctttttttctgttttcagagtagttcacaacagatctgagtgttttaattaagcatggaatacagaaaacaacaaaaaacttaagctttaatttcatctggaattccacagagacaaggccactttatgtttcccaggctggactggaacccctgggctcaaatgatcctcctacctaagcctgcagagtagcgaggacttcagttttcttagctccctggacccggttgacctgttggctcttcccgctggctgctctatcacgtggtgctctccgactactcaccccgagtgtaaagagtcttgctgctctgttgcccaggctggagtacagtggcaggatctcagctcactgcaatctccgtctctcaggtttaagcagttctcctgcctcagcctcccaagtaggtgggactacagaaccttcggctcgcgtgcttctgagctgctgtggatggcctcggctctctggactgtccttccgagtaggatgtcactgagatccctcaaatggagcctcctgctgctgtcactcctgagtttctttgtgatgtggtacctcagccttccccactacaatgtgatagaacgcgtgaactggatgtacttctatgagtatgagccgatttacagacaagactttcacttcacacttcgagagcattcaaactgctctcatcaaaatccatttctggtcattctggtgacctcccacccttcagatgtgaaagccaggcaggccattagagttacttggggtgaaaaaaagtcttggtggggatatgaggttcttacatttttcttattaggccaagaggctgaaaaggaagacaaaatgttggcattgtccttagaggatgaacaccttctttatggtgacataatccgacaagattttttagacacatataataacctgaccttgaaaaccattatggcattcaggtgggtaactgagttttgccccaatgccaagtacgtaatgaagacagacactgatgttttcatcaatactggcaatttagtgaagtatcttttaaacctaaaccactcagagaagtttttcacaggttatcctctaattgataattattcctatagaggattttaccaaaaaacccatatttcttaccaggagtatcctttcaaggtgttccctccatactgcagtgggttgggttatataatgtccagagatttggtgccaaggatctatgaaatgatgggtcacgtaaaacccatcaagtttgaagatgtttatgtcgggatctgtttgaatttattaaaagtgaacattcatattccagaagacacaaatcttttctttctatatagaatccatttggatgtctgtcaactgagacgtgtgattgcagcccatggcttttcttccaaggagatcatcactttttggcaggtcatgctaaggaacaccacatgccattattaacttcacattctacaaaaagcctagaaggacaggatactttgtggaaagtgttaaataaagtaggtactgtggaaaattcatggggaggtcagtgtgctggcttacactgaactgaaactcatgaaaaacccagactggagactggagggttacacttgtgatttattagtcaggcccttcaaagatgatatgtggaggaattaaatataaaggaattggaggtttttgctaaagaaattaataggaccaaacaatttggacatgtcattctgtagactagaatttcttaaaagggtgttactgagttataagctcactaggctgtaaaaacaaaacaatgtagagttttatttattgaacaatgtagtcacttgaaggttttgtgtatatcttatgtggattaccaatttaaaaatatatgtagttctgtgtcaaaaaacttcttcactgaagttatactgaacaaaattttacctgtttttggtcatttataaagtacttcaagatgttgcagtatttcacagttattattatttaaaattacttcaactttgtgtttttaaatgttttgacgatttcaatacaagataaaaaggatagtgaatcattctttacatgcaaacattttccagttacttaactgatcagtttattattgatacatcactccattaatgtaaagtcataggtcattattgcatatcagtaatctcttggactttgttaaatattttactgtggtaatatagagaagaattaaagcaagaaaatctgaagtattgtcttgtttttaaaaaatacagttcctagtgtttttagaagtcacttaatttgtctcatttttccacctggaaattaggaataatgtagaatgcaaggcagtaatttccttttggaaaggactctgaaggcagaaaagaagggagagaacctcatgggcagaatattataaaaagagtgtcatattccagcatttgaattggaaagagaagagtgaagatccaagttgcattattaatctgccctgtgttttttccttttaacaatcagtttgagctgctgctgttatgagtttctcatcaagatgaaagccctaatatgtaaagtcaaatccgatttaaattttgtgcttttatagaaagaaatttcttcatagacgtggtgatatatcatttgttggacctgctaatagtaggtcaaaggggagcactccttgccccctgttcctgggtttatgcagttttctttttagagtttatatagggcaagtggttctttttctctgaattacaggatggaaaaaggtcatatcctttgtcaggaaatataaacttgaaagtatgtagtcagctcttgtaatactcatatttatgattgtcctatatgaaaaacaacttcagttaaaactataatgtgtgattctgtataacaaggtgatgtctgtttcccagggctcagacctaatccagttataataaaatcaattaaatgaaatattctatagaatcgatctatgcccttgttaatctccatccatataggagtcacgttctttaagacagatggtggtagttatttttgtggcatggttagatttgactggttttgcagaagattacagttatgtactgcataatgacatatacaatagtggtcccataaaattataatggagcagaaaatctattgcctcatgatgttttagccgttttaatgtcatagcctagtgcattactcacgtgtctgtggagatgctggtgtaaacaaacctactacactgccagttgtataaaagtacagcacattcagttatgtacagtatgtaatactgataatgacaataaatgacaccggtttgtgtatttactttttataaaaaaaaa

SEQ ID NO: 362406 - DNA, 735 bp, Homo sapiens
ggcaagtcagaaagagaacatggtcacccagcaaggatccacctctgttctgtagctgcagccacgtgactgttgtggacagagcagtgaccatcacagaccttcgatgagcgtttgagtccaacaccttccaagaacaacaaaaccatatcagtgtactgtagccccttaatttaagctttctagaaagctttggaagtttttgtagatagtagaaaggggggcatcacctgagaaagagctgattttgtatttcaggtttgaaaagaaataactgaacatattttttaggcaagtcagaaagagaacatggtcacccaaaagcaactgtaactcagaaattaagttactcagaaattaagtagctcagaaattaagaaagaatggtataatgaacccccatatacccttccttctggattcaccaattgttaacatttttttcctctcagctatccttctaatttctctctaatttcaatttgtttatatttacctctgggctcaataagggcatctgtgcagaaatttggaagccatttagaaaatcttttggattttcctgtggtttatggcaatatgaatggagcttattactggggtgagggacagcttactccatttgaccagattgtttggctaacacatcccgaagaatgattttgtcaggaattattgttatttaataaatatttcaggatatttttcctctacaataaagtaacaattaactta

SEQ ID NO: 362407 - DNA, 517 bp, Homo sapiens
ttcattgccccttcaatgtgggaatccagccagaccctattcttggacagcatcagtgaaaggggcttgggaaagctcttgggcgtagcagcagaggcatgtcatatatggaaaccttccatgagggtgacctcaccactggaacccgttcaacataaaccttgctgcaagaactagcagagctctttggacaaaacgtgctcaccaagatggaggaacagagcccatggcccacttactacatggattcccactttacagtggagaaggagcttgcagtaaccacaaaagtttctgtataagcaaatttagggaattgaacttcagacagtgtggttgtctccttacttatgaacttgggaatacttacttaggtaacaactaacatcagaggtttttgatctgtagcctttctttctgtccataattagctaatagcttctgctgtacaaacacaaaccattccctgtccaagaaaattaaactatatcatcagaataagaaagaatcgtccgtt

SEQ ID NO: 362408 - DNA, 482 bp, Homo sapiens
agcattcatttccaaagaagaatggtggtggcagaatggggaagtagatgctgggcaggcaaaggcaacagatgtccaccatgcatgcctagaagaaaaaagtgctgttagctttagataatagcagctggacgatggggtagtgaccttctcactcccaaaaagctcaccaagatggaggaacagagcccatggcccacttactacatggattcccactttacagtggagaaggagcttgcagtaaccacaaaagtttctgtataagcaaatttagggaattgaacttcagacagtgtggttgtctccttacttatgaacttgggaatacttacttaggtaacaactaacatcagaggtttttgatctgtagcctttctttctgtccataattagctaatagcttctgctgtacaaacacaaaccattccctgtccaagaaaattaaactatatcatcagaataagaaagaatcgtccgtt

SEQ ID NO: 362409 - DNA, 954 bp, Homo sapiens
aggagcttccttacttattaggaacctcaggtggacctctcatggttgcagatggcttctcacttacaaaggagattgtgaccagctgttgagaactgtttggctttacttccttcagagaccagacttggttgtatgtcagagtagtcccccccttatcctcaggggatatgagcccagaccccccaatggatgcctgaaatcacagatagtaccaaaccctatatatgctatgtttttttcctatacatgcatacttgcgataaagtttaatttataaattaggcacaggaagagattaacaacaactataataaaacagaacagttataaaaatacagtgtaataaaagttatgtggaagatgatctctctttctccaaagtatgttattcgtatgtaatattttcagattgccagttggatatgggatagctttaaacctccggaaagggaatcgcaaataaggagggattaccatatatcctcgctaagagtcctctgactctttttctctcctcagactcaccccacacagaccgcgtttctctccagtgtcgacctacacactcactgctcttaccagatgatgttgccagagtcagtagccattgtttgctcccccaagttccaggagtgagtatagagggcatggttctgggtgtttcaagggggtagtagggaagaaagcctcaggggaaaaggtctctattcttgtggacttgtcctttgtaaaatacatagattataatgtaagttggttattctaaagggcttccttttaagccccatatcatgatttatctatcatgcttgttcaaaaagatatccaagtaacaacttagttgcttttctaagaaaagtctacaagaaatttgaagtgtttgacttgaagcgataggaatgtcaagagttttatgttggattagaaagtttcaaaatcataaaatataaa

SEQ ID NO: 362410 - DNA, 384 bp, Homo sapiens
tcccatagaaatgatggaatctcactaaagcacaagatatggtaaatgtaattctactggaactgtgctcaccaagatggaggaacagagcccatggcccacttactacatggattcccactttacagtggagaaggagcttgcagtaaccacaaaagtttctgtataagcaaatttagggaattgaacttcagacagtgtggttgtctccttacttatgaacttgggaatacttacttaggtaacaactaacatcagaggtttttgatctgtagcctttctttctgtccataattagctaatagcttctgctgtacaaacacaaaccattccctgtccaagaaaattaaactatatcatcagaataagaaagaatcgtccgtt

SEQ ID NO: 362411 - DNA, 358 bp, Homo sapiens
tcccatagaaatgatggaatctcactaaagcacaagatatgctcaccaagatggaggaacagagcccatggcccacttactacatggattcccactttacagtggagaaggagcttgcagtaaccacaaaagtttctgtataagcaaatttagggaattgaacttcagacagtgtggttgtctccttacttatgaacttgggaatacttacttaggtaacaactaacatcagaggtttttgatctgtagcctttctttctgtccataattagctaatagcttctgctgtacaaacacaaaccattccctgtccaagaaaattaaactatatcatcagaataagaaagaatcgtccgtt

SEQ ID NO: 362412 - DNA, 2088 bp, Homo sapiens
ggaagggtcccgggaacgtggtggggcagggcctccgagcgtggttggactttgaaggggatcggccgccatgctgcatcccctttttggaattgctcaaccaggtggtaaccggcgccgcttcctggccttgggaggtggttcctttcttaacccacaagaacctctcccaagagaacttggtcctgatgtctgaccatggagatgtgagcctcccgcccgaagaccgggtgagggctctctcccagctgggtagtgcggtagaggtgaatgaagacattccaccccgtcggtacttccgctctggagttgagattatccgaatggcatccatttactctgaggaaggcaacattgaacatgccttcatcctctataacaagtatatcacgctctttattgagaaactaccaaaacatcgagattacaaatctgctgtcattcctgaaaagaaagacacagtaaagaaattaaaggagattgcatttcccaaagcagaagagctgaaggcagagctgttaaaacgatataccaaagaatatacagaatataatgaagaaaagaagaaggaagcagaggaattggcccggaacatggccatccagcaagagctggaaaaggaaaaacagagggtagcacaacagaagcagcagcaattggaacaggaacagttccatgccttcgaggagatgatccggaaccaggagctagaaaaagagcgactgaaaattgtacaggagtttgggaaggtagaccctggcctaggtggcccgctagtgcctgacttggagaagccctccttagatgtgttccccaccttaacagtctcatccatacagccttcagactgtcacacaactgtaaggccagctaagccacctgtggtggacaggtccttgaaacctggagcactgagcaactcagaaagtattcccacaatcgatggattgcgccatgtggtggtgcctgggcggctgtgcccacagtttctccagttagccagtgccaacactgcccggggagtggagacatgtggaattctctgtggaaaactgatgaggaatgaatttaccattacccatgttctcatccccaagcaaagtgctgggtctgattactgcaacacagagaacgaagaagaacttttcctcatacaggatcagcagggcctcatcacactgggctggattcatactcaccccacacagaccgcgtttctctccagtgtcgacctacacactcactgctcttaccagatgatgttgccagagtcagtagccattgtttgctcccccaagttccaggaaactggattctttaaactaactgaccatggactagaggagatttcttcctgtcgccagaaaggatttcatccacacagcaaggatccacctctgttctgtagctgcagccacgtgactgttgtggacagagcagtgaccatcacagaccttcgatgagcgtttgagtccaacaccttccaagaacaacaaaaccatatcagtgtactgtagccccttaatttaagctttctagaaagctttggaagtttttgtagatagtagaaaggggggcatcacctgagaaagagctgattttgtatttcaggtttgaaaagaaataactgaacatattttttaggcaagtcagaaagagaacatggtcacccaaaagcaactgtaactcagaaattaagttactcagaaattaagtagctcagaaattaagaaagaatggtataatgaacccccatatacccttccttctggattcaccaattgttaacatttttttcctctcagctatccttctaatttctctctaatttcaatttgtttatatttacctctgggctcaataagggcatctgtgcagaaatttggaagccatttagaaaatcttttggattttcctgtggtttatggcaatatgaatggagcttattactggggtgagggacagcttactccatttgaccagattgtttggctaacacatcccgaagaatgattttgtcaggaattattgttatttaataaatatttcaggatatttttcctctacaataaagtaacaattaactta

SEQ ID NO: 362413 - DNA, 2012 bp, Homo sapiens
gtgagcgggtttccggaacctccgggtgtcatccgcggggaaagaacttggtcctgatgtctgaccatggagatgtgagcctcccgcccgaagaccgggtgagggctctctcccagctgggtagtgcggtagaggtgaatgaagacattccaccccgtcggtacttccgctctggagttgagattatccgaatggcatccatttactctgaggaaggcaacattgaacatgccttcatcctctataacaagtatatcacgctctttattgagaaactaccaaaacatcgagattacaaatctgctgtcattcctgaaaagaaagacacagtaaagaaattaaaggagattgcatttcccaaagcagaagagctgaaggcagagctgttaaaacgatataccaaagaatatacagaatataatgaagaaaagaagaaggaagcagaggaattggcccggaacatggccatccagcaagagctggaaaaggaaaaacagagggtagcacaacagaagcagcagcaattggaacaggaacagttccatgccttcgaggagatgatccggaaccaggagctagaaaaagagcgactgaaaattgtacaggagtttgggaaggtagaccctggcctaggtggcccgctagtgcctgacttggagaagccctccttagatgtgttccccaccttaacagtctcatccatacagccttcagactgtcacacaactgtaaggccagctaagccacctgtggtggacaggtccttgaaacctggagcactgagcaactcagaaagtattcccacaatcgatggattgcgccatgtggtggtgcctgggcggctgtgcccacagtttctccagttagccagtgccaacactgcccggggagtggagacatgtggaattctctgtggaaaactgatgaggaatgaatttaccattacccatgttctcatccccaagcaaagtgctgggtctgattactgcaacacagagaacgaagaagaacttttcctcatacaggatcagcagggcctcatcacactgggctggattcatactcaccccacacagaccgcgtttctctccagtgtcgacctacacactcactgctcttaccagatgatgttgccagagtcagtagccattgtttgctcccccaagttccaggaaactggattctttaaactaactgaccatggactagaggagatttcttcctgtcgccagaaaggatttcatccacacagcaaggatccacctctgttctgtcctgtacttcaataagagatttgaaggcaaaggaaaagagaagccacttcagatagagctgcagccacgtgactgttgtggacagagcagtgaccatcacagaccttcgatgagcgtttgagtccaacaccttccaagaacaacaaaaccatatcagtgtactgtagccccttaatttaagctttctagaaagctttggaagtttttgtagatagtagaaaggggggcatcacctgagaaagagctgattttgtatttcaggtttgaaaagaaataactgaacatattttttaggcaagtcagaaagagaacatggtcacccaaaagcaactgtaactcagaaattaagttactcagaaattaagtagctcagaaattaagaaagaatggtataatgaacccccatatacccttccttctggattcaccaattgttaacatttttttcctctcagctatccttctaatttctctctaatttcaatttgtttatatttacctctgggctcaataagggcatctgtgcagaaatttggaagccatttagaaaatcttttggattttcctgtggtttatggcaatatgaatggagcttattactggggtgagggacagcttactccatttgaccagattgtttggctaacacatcccgaagaatgattttgtcaggaattattgttatttaataaatatttcaggatatttttcctctacaataaagtaacaattaactta

SEQ ID NO: 362414 - DNA, 2236 bp, Homo sapiens
ggaagggtcccgggaacgtggtggggcagggcctccgagcgtggttggactttgaaggggatcggccgccatgctgcatcccctttttggaattgctcaaccaggtggtaaccggcgccgcttcctggccttgggaggtggttcctttcttaacccacaagaacctctcccaagagaacttggtcctgatgtctgaccatggagatgtgagcctcccgcccgaagaccgggtgagggctctctcccagctgggtagtgcggtagaggtgaatgaagacattccaccccgtcggtacttccgctctggagttgagattatccgaatggcatccatttactctgaggaaggcaacattgaacatgccttcatcctctataacaagtatatcacgctctttattgagaaactaccaaaacatcgagattacaaatctgctgtcattcctgaaaagaaagacacagtaaaggtgggtcttcactttcattgttgcccatctaaaagcttcagagcagcacagactgacttcaagataaaagtagtagtctctgcatctgagtaccagatcctgcaataggagataaggccatttcaccacaacagttctgaagtagcagaaattaaaggagattgcatttcccaaagcagaagagctgaaggcagagctgttaaaacgatataccaaagaatatacagaatataatgaagaaaagaagaaggaagcagaggaattggcccggaacatggccatccagcaagagctggaaaaggaaaaacagagggtagcacaacagaagcagcagcaattggaacaggaacagttccatgccttcgaggagatgatccggaaccaggagctagaaaaagagcgactgaaaattgtacaggagtttgggaaggtagaccctggcctaggtggcccgctagtgcctgacttggagaagccctccttagatgtgttccccaccttaacagtctcatccatacagccttcagactgtcacacaactgtaaggccagctaagccacctgtggtggacaggtccttgaaacctggagcactgagcaactcagaaagtattcccacaatcgatggattgcgccatgtggtggtgcctgggcggctgtgcccacagtttctccagttagccagtgccaacactgcccggggagtggagacatgtggaattctctgtggaaaactgatgaggaatgaatttaccattacccatgttctcatccccaagcaaagtgctgggtctgattactgcaacacagagaacgaagaagaacttttcctcatacaggatcagcagggcctcatcacactgggctggattcatactcaccccacacagaccgcgtttctctccagtgtcgacctacacactcactgctcttaccagatgatgttgccagagtcagtagccattgtttgctcccccaagttccaggaaactggattctttaaactaactgaccatggactagaggagatttcttcctgtcgccagaaaggatttcatccacacagcaaggatccacctctgttctgtagctgcagccacgtgactgttgtggacagagcagtgaccatcacagaccttcgatgagcgtttgagtccaacaccttccaagaacaacaaaaccatatcagtgtactgtagccccttaatttaagctttctagaaagctttggaagtttttgtagatagtagaaaggggggcatcacctgagaaagagctgattttgtatttcaggtttgaaaagaaataactgaacatattttttaggcaagtcagaaagagaacatggtcacccaaaagcaactgtaactcagaaattaagttactcagaaattaagtagctcagaaattaagaaagaatggtataatgaacccccatatacccttccttctggattcaccaattgttaacatttttttcctctcagctatccttctaatttctctctaatttcaatttgtttatatttacctctgggctcaataagggcatctgtgcagaaatttggaagccatttagaaaatcttttggattttcctgtggtttatggcaatatgaatggagcttattactggggtgagggacagcttactccatttgaccagattgtttggctaacacatcccgaagaatgattttgtcaggaattattgttatttaataaatatttcaggatatttttcctctacaataaagtaacaattaactta

SEQ ID NO: 362415 - DNA, 1844 bp, Homo sapiens
ccatctgttttttctgtctcagaacttggtcctgatgtctgaccatggagatgtgagcctcccgcccgaagaccgggtgagggctctctcccagctgggtagtgcggtagaggtgaatgaagacattccaccccgtcggtacttccgctctggagttgagattatccgaatggcatccatttactctgaggaaggcaacattgaacatgccttcatcctctataacaagtatatcacgctctttattgagaaactaccaaaacatcgagattacaaatctgctgtcattcctgaaaagaaagacacagtaaagaaattaaaggagattgcatttcccaaagcagaagagctgaaggcagagctgttaaaacgatataccaaagaatatacagaatataatgaagaaaagaagaaggaagcagaggaattggcccggaacatggccatccagcaagagctggaaaaggaaaaacagagggtagcacaacagaagcagcagcaattggaacaggaacagttccatgccttcgaggagatgatccggaaccaggagctagaaaaagagcgactgaaaattgtacaggagtttgggaagccttcagactgtcacacaactgtaaggccagctaagccacctgtggtggacaggtccttgaaacctggagcactgagcaactcagaaagtattcccacaatcgatggattgcgccatgtggtggtgcctgggcggctgtgcccacagtttctccagttagccagtgccaacactgcccggggagtggagacatgtggaattctctgtggaaaactgatgaggaatgaatttaccattacccatgttctcatccccaagcaaagtgctgggtctgattactgcaacacagagaacgaagaagaacttttcctcatacaggatcagcagggcctcatcacactgggctggattcatactcaccccacacagaccgcgtttctctccagtgtcgacctacacactcactgctcttaccagatgatgttgccagagtcagtagccattgtttgctcccccaagttccaggaaactggattctttaaactaactgaccatggactagaggagatttcttcctgtcgccagaaaggatttcatccacacagcaaggatccacctctgttctgtagctgcagccacgtgactgttgtggacagagcagtgaccatcacagaccttcgatgagcgtttgagtccaacaccttccaagaacaacaaaaccatatcagtgtactgtagccccttaatttaagctttctagaaagctttggaagtttttgtagatagtagaaaggggggcatcacctgagaaagagctgattttgtatttcaggtttgaaaagaaataactgaacatattttttaggcaagtcagaaagagaacatggtcacccaaaagcaactgtaactcagaaattaagttactcagaaattaagtagctcagaaattaagaaagaatggtataatgaacccccatatacccttccttctggattcaccaattgttaacatttttttcctctcagctatccttctaatttctctctaatttcaatttgtttatatttacctctgggctcaataagggcatctgtgcagaaatttggaagccatttagaaaatcttttggattttcctgtggtttatggcaatatgaatggagcttattactggggtgagggacagcttactccatttgaccagattgtttggctaacacatcccgaagaatgattttgtcaggaattattgttatttaataaatatttcaggatatttttcctctacaataaagtaacaattaactta

SEQ ID NO: 362416 - DNA, 1417 bp, Homo sapiens
aggagcttccttacttattaggaacctcaggtggacctctcatggttgcagatggcttctcacttacaaaggagattgtgaccagctgttgagaactgtttggctttacttccttcagagaccagacttggttgtatgtcagagtagtcccccccttatcctcaggggatatgagcccagaccccccaatggatgcctgaaatcacagatagtaccaaaccctatatatgctatgtttttttcctatacatgcatacttgcgataaagtttaatttataaattaggcacaggaagagattaacaacaactataataaaacagaacagttataaaaatacagtgtaataaaagttatgtggaagatgatctctctttctccaaagtatgttattcgtatgtaatattttcagattgccagttggatatgggatagctttaaacctccggaaagggaatcgcaaataaggagggattaccatatatcctcgctaagagtcctctgactctttttctctcctcagactcaccccacacagaccgcgtttctctccagtgtcgacctacacactcactgctcttaccagatgatgttgccagagtcagtagccattgtttgctcccccaagttccaggaaactggattctttaaactaactgaccatggactagaggagatttcttcctgtcgccagaaaggatttcatccacacagcaaggatccacctctgttctgtagctgcagccacgtgactgttgtggacagagcagtgaccatcacagaccttcgatgagcgtttgagtccaacaccttccaagaacaacaaaaccatatcagtgtactgtagccccttaatttaagctttctagaaagctttggaagtttttgtagatagtagaaaggggggcatcacctgagaaagagctgattttgtatttcaggtttgaaaagaaataactgaacatattttttaggcaagtcagaaagagaacatggtcacccaaaagcaactgtaactcagaaattaagttactcagaaattaagtagctcagaaattaagaaagaatggtataatgaacccccatatacccttccttctggattcaccaattgttaacatttttttcctctcagctatccttctaatttctctctaatttcaatttgtttatatttacctctgggctcaataagggcatctgtgcagaaatttggaagccatttagaaaatcttttggattttcctgtggtttatggcaatatgaatggagcttattactggggtgagggacagcttactccatttgaccagattgtttggctaacacatcccgaagaatgattttgtcaggaattattgttatttaataaatatttcaggatatttttcctctacaataaagtaacaattaactta

SEQ ID NO: 362417 - DNA, 3298 bp, Homo sapiens
ggaagggtcccgggaacgtggtggggcagggcctccgagcgtggttggactttgaaggggatcggccgccatgctgcatcccctttttggaattgctcaaccaggtggtaaccggcgccgcttcctggccttgggaggtggttcctttcttaacccacaagaacctctcccaagagaacttggtcctgatgtctgaccatggagatgtgagcctcccgcccgaagaccgggtgagggctctctcccagctgggtagtgcggtagaggtgaatgaagacattccaccccgtcggtacttccgctctggagttgagattatccgaatggcatccatttactctgaggaaggcaacattgaacatgccttcatcctctataacaagtatatcacgctctttattgagaaactaccaaaacatcgagattacaaatctgctgtcattcctgaaaagaaagacacagtaaagaaattaaaggagattgcatttcccaaagcagaagagctgaaggcagagctgttaaaacgatataccaaagaatatacagaatataatgaagaaaagaagaaggaagcagaggaattggcccggaacatggccatccagcaagagctggaaaaggaaaaacagagggtagcacaacagaagcagcagcaattggaacaggaacagttccatgccttcgaggagatgatccggaaccaggagctagaaaaagagcgactgaaaattgtacaggagtttgggaaggtagaccctggcctaggtggcccgctagtgcctgacttggagaagccctccttagatgtgttccccaccttaacagtctcatccatacagccttcagactgtcacacaactgtaaggccagctaagccacctgtggtggacaggtccttgaaacctggagcactgagcaactcagaaagtattcccacaatcgatggattgcgccatgtggtggtgcctgggcggctgtgcccacagtttctccagttagccagtgccaacactgcccggggagtggagacatgtggaattctctgtggaaaactgatgaggaatgaatttaccattacccatgttctcatccccaagcaaagtgctgggtctgattactgcaacacagagaacgaagaagaacttttcctcatacaggatcagcagggcctcatcacactgggctggattcatactcaccccacacagaccgcgtttctctccagtgtcgacctacacactcactgctcttaccagatgatgttgccagagtcagtagccattgtttgctcccccaagttccaggaaactggattctttaaactaactgaccatggactagaggagatttcttcctgtcgccagaaaggatttcatccacacagcaaggatccacctctgttctgtagctgcagccacgtgactgttgtggacagagcagtgaccatcacagaccttcgatgagcgtttgagtccaacaccttccaagaacaacaaaaccatatcagtgtactgtagccccttaatttaagctttctagaaagctttggaagtttttgtagatagtagaaaggggggcatcacctgagaaagagctgattttgtatttcaggtttgaaaagaaataactgaacatattttttaggcaagtcagaaagagaacatggtcacccaaaagcaactgtaactcagaaattaagttactcagaaattaagtagctcagaaattaagaaagaatggtataatgaacccccatatacccttccttctggattcaccaattgttaacatttttttcctctcagctatccttctaatttctctctaatttcaatttgtttatatttacctctgggctcaataagggcatctgtgcagaaatttggaagccatttagaaaatcttttggattttcctgtggtttatggcaatatgaatggagcttattactggggtgagggacagcttactccatttgaccagattgtttggctaacacatcccgaagaatgattttgtcaggaattattgttatttaataaatatttcaggatatttttcctctacaataaagtaacaattaacttaaaaaaaaaaaaaaaaaaaaaaaaaaaaaaaaaaaaaaaaaaaaaaaaaaaaaaaaaaaaaaaaaaaaaaaaaaacacacaaacacaacaaaaacaaaaaacaaccacaacagcaaaaacaaacaaaaaacgaaaaagcaagaccacacgcagccgaaacaaaacaccagacaccggcaccccgagcagacacaggcaacacccccgcaccagagcaccacaacacaccgagagacgagacacaccagtggtggccacagcactcccagccacgacagccagtccgcgacccaccaggggacgacgagagccgcaccacaagagcaaaaagtgcgccacacagaaaagagacaaagacaacacccagccaacaagccacgcatccgcggacaaaaccaccacaacacccgcacacgagcacacaccacacacccgaccaagacggaggggaggacgggcgaaggtcgcaaggagaagaagaactaggagtgggcagagaggcagagacaaacgcaaaacgaggggggccgaagagaacgagagggagcacgagaaagaagagcggagggaagggagcgagagagaagggggcgagtgaggggcgacgaagtagagagacgggagagaagaagagaaaaagggaagaagagggcggaagggtgaaagacacagagaaagcggggaccgaaccagcacaagagaggaagcggaaggaggggcagcggggagaagagcacaggagaccaacgaaagaacaagggacggaggaagacgacgcaaaggaggacggaggaagaaggccgacagcagagaggaagcgggagcgtagaggagcgcaaagaggggaagacggagggaggaggggaagggaaggacgcaagaagaaagaaaacgaagcacagagagagggacaagggcaggaggggcgaccggggcaaagagggaagagagagaggggaaagagggcggaagcagcgagggaggggcgaagagggcaagaggcgggggggagaccggacagccgagcgagagggaagagaaggagaacgagaagaggacgcaagactacagacggagacgaaagaagcgagagcaaaggacgagacgatcagaagacgacgacggagagagggggcgacacagaaactgagaggagagggcgagtaggaatgaggacagcaaacagagcacacagacaacacgcaggcccg

SEQ ID NO: 362418 - DNA, 4403 bp, Homo sapiens
  misc_feature (173)..(173): n is a, c, g, or t
  misc_feature (548)..(548): n is a, c, g, or t
  misc_feature (1258)..(1258): n is a, c, g, or t
tcttttggtgctgtctcaaatgggtcaaccattcacttcctccttatgccctccatgcttttggctgaggataatgaagcctttgtttggagtaccaggttacactccaataaatgattacatttcccagccaccccaccctaccaatttcattgtgttggctgttcttttcngactaaggcaatacctaggaaaacgcttgaagcagcaattgttactgcaattttctgtgagctgagcctggtgttctaggtggcctagaaataatggtgtcatttgtgacacctcgagtgagggcaggagagtaaatactttggctaggagaagagtgatttattctttatcagaattctaggtgggggagggagaatctgtgaatgcataaagttttcttcatttttaaattttgtctcagtctttattgcttaggttagtggtccttgaacttgtcccctgaaagagcccagttctctatattctttttcttctcttgggttcttaattccccatatagtggaaattccttctttgctgttttggtatgggtnggtctgggggccagctgggcttggacaagccatttcctgctgcagcccagagcagcctggctgttccaccttgctctaaacagtcctgaaattgcccagtcctctgcttttgggaaatccatccccttcttcccattctttgtctaccacttagcttagggctttcttaccttttatttcgactgtagccgttggcttttaccaagtctctttgtttttagcatttcttcattccagtctgttctgcacactttgatcaggagaagcttctcacattccagccatgttcatgttttctctcttgctcaaaaacctgcaatagcttcccattgctgaaaatctaaatttagcttttagtcagaactttccacttaaagttcttacccctggctatatattcaaatatctagggagcaatttaaaaaatactgatgcctgtgttctaccccccaccaattaaagctgaatctctagggtggagcctcagatgttgtttctgcatttgtctttcaagctgctagaattctcaagtacaaccagggttgacaaccactgcattggtccttgatacctaagaattgtgagctctcttatccgtctctgcccaccaaagacattcagccaggtcaacaacatatcatacgttgcaaccacattgatcacagactgatcaccaaactgctatattttcttttctcttcctctaggcncaagatatcttagtggctagatgggtgcaggaaatcagtctgtagatccctcttcatatctgctgcagcctagccactgcagaggcactctgcataggatggtctaagtgtctctgtcttcatcttacctctgtggaggagacgtggaatcaagccagcccacaagccctgagactggataggccggagagaaagaggagtagccagagcggtcgggaaaagaggaaaggaatactgtgggtaaaagggacaaagaccacgcaacctgaggaaagacattgtattgaaagggtaatgactatttggctaaagggactgactcctgggttcccgaggctcaaagaccaggagacttttccactcttgcaagctgcacaagtaccatacttagtgttctgggctgagaggggagacaaaagcatcgtcaggttgccaaacaatgtcccagttgccctgggaggcacaaacctaccaaagtgccataggccaggtgcagagagaatcagaggagctgatttgcttggggtcagagcagagctgggttttttcagatgatcactttcacatactccttgttaaatgggaccaaaggggaagaagaagaaacccttaagcttttgtaatattgtcttgggtaccagataccataaaaggcagcatgagagaaacattcccttgggccagtgtcatggtggattttcttgcttgagaggcaaggatttcagctttcatttggtaccacagaatttaaaattgtaagtgcctatcccttttgactgttgatggcttctttggggttttagttaccccagttgaaagagaaatttttcatattggggttgagaagaatggaggctattaggagcaaagctttaatgagtgaaagtctggtgaatcctgcaattttgatatgtttccagtggattttgagaacacagttttaggaccagagtagatgttgttccctagaaaatagagtcagctattgatattgtgcctcccatccctcatatctcagtgttttaaccccacctgagtttggagaccagtttgtccaaggatctttcaaacatgtgagcccagagtagaacttctgagtcaaggatcatgtctttttctgaggagctttgcttggggcactggaaatcctgtttagatcaggactattggaatattatcctctccaggggaagtgccaggttgaacatttaaggctttgcttctaggcccagctatacattcaccagcaaatcacttaacttcctaaatttctttaaaatctgtaaaatgggatcagtctaatatgcctacctcaaatgatgacagaatgacatctatatgcatatgaggcctacgttagttgaaagatgctataaagatataagggatttgttacttgtctttcttgaaatgttacagttggggtgcggttgcttctatcttctggacctctgcccattcagcatacagctagaggaatctttgggcagatccacattctttagcactagctaggctttgactccaaagctatctggtctaccttgatgttctgagcaggaaaactgaggacctcaagaaccattccaaatttctactcattctccctaagacccagagcagacccaggacctaaagaaattacatcatctctattttcccttggctccagcccactcttgtttgaacctcccacttttgttgttccaactacttcttgagatgaaggaagggcagaacattggccctcttcactgaagtcttcaccccttaatccagggttcaatttttagttcaccttagcctgtttgagattagaagctgggccttaacttacaggtgtgtccggcatcattcaatcagcctgttagatccagaatccagcactgtgacgctacataaccatgggctctgtccttccagttcctttagtgccttccctcactggtaggttcactctgagggcttccttccttgaactccagtggcaactatagtctgtttcccacaatttgttgtgtgtgttttttgttgttttgcagcgttttcatattgtcttttatgtaagtcatgtttctgaactatcgtataaatttcattagggtaagaatcatgtttgctttatgcactgtgtaacatgccttgcagtcagtataggcacttaaccttattgatcagttgttccttggtgttgaataatgtgttaggtagccaggtggacctgtgtcctagcctggagaagctctatgtcaccttgtaggaagccatctgaatttgactcagcatcatatgctgggcctgtgctgcacttgagctttctttccagccgccaggagggatggttgtcctggccaacagcgaatttaatgggtggtcaaaagaagatgtgcctgcatagaaggctgaaagagggagctggaagtaggaggagacaaggagatagtgacaccagtatcttgtcacagaaatcaaggaaggcaacagtttaaaggaggggagggagatcagtggtgccaactggctcagaagaggtttgctgggttaaatctcaagatgagcccatgagatctggtggttagcagaggcctttcctgacaaccccattttaagcacctcttccccatcactctatctcatcactgttactgtctgtgtagccctgtcatgagctaaaatcatcctgtttgtttattgctagcttatgtgtctaaagtatactccttgagaacagcaactttgtctttttcacctttgtactgagtcccctgacatggaataagatatgaataaatgcacagacttgtccaaaatcatccaattaataaatgctcaccaagatggaggaacagagcccatggcccacttactacatggattcccactttacagtggagaaggagcttgcagtaaccacaaaagtttctgtataagcaaatttagggaattgaacttcagacagtgtggttgtctccttacttatgaacttgggaatacttacttaggtaacaactaacatcagaggtttttgatctgtagcctttctttctgtccataattagctaatagcttctgctgtacaaacacaaaccattccctgtccaagaaaattaaactatatcatcagaataagaaagaatcgtccgtt

SEQ ID NO: 362419 - DNA, 1493 bp, Homo sapiens
gtgagcgggtttccggaacctccgggtgtcatccgcggggaaagaacttggtcctgatgtctgaccatggagatgtgagcctcccgcccgaagaccgggtgagggctctctcccagctgggtagtgcggtagaggtgaatgaagacattccaccccgtcggtacttccgctctggagttgagattatccgaatggcatccatttactctgaggaaggcaacattgaacatgccttcatcctctataacaagtatatcacgctctttattgagaaactaccaaaacatcgagattacaaatctgctgtcattcctgaaaagaaagacacagtaaagaaattaaaggagattgcatttcccaaagcagaagagctgaaggcagagctgttaaaacgatataccaaagaatatacagaatataatgaagaaaagaagaaggaagcagaggaattggcccggaacatggccatccagcaagagctggaaaaggaaaaacagagggtagcacaacagaagcagcagcaattggaacaggaacagttccatgccttcgaggagatgatccggaaccaggagctagaaaaagagcgactgaaaattgtacaggagtttgggaaggtagaccctggcctaggtggcccgctagtgcctgacttggagaagccctccttagatgtgttccccaccttaacagtctcatccatacagccttcagactgtcacacaactgtaaggccagctaagccacctgtggtggacaggtccttgaaacctggagcactgagcaactcagaaagtattcccacaatcgatggattgcgccatgtggtggtgcctgggcggctgtgcccacagtttctccagttagccagtgccaacactgcccggggagtggagacatgtggaattctctgtggaaaactgatgaggaatgaatttaccattacccatgttctcatccccaagcaaagtgctgggtctgattactgcaacacagagaacgaagaagaacttttcctcatacaggatcagcagggcctcatcacactgggctggattcatactcaccccacacagaccgcgtttctctccagtgtcgacctacacactcactgctcttaccagatgatgttgccagagtcagtagccattgtttgctcccccaagttccaggagtgagtatagagggcatggttctgggtgtttcaagggggtagtagggaagaaagcctcaggggaaaaggtctctattcttgtggacttgtcctttgtaaaatacatagattataatgtaagttggttattctaaagggcttccttttaagccccatatcatgatttatctatcatgcttgttcaaaaagatatccaagtaacaacttagttgcttttctaagaaaagtctacaagaaatttgaagtgtttgacttgaagcgataggaatgtcaagagttttatgttggattagaaagtttcaaaatcataaaatataaa

SEQ ID NO: 362420 - DNA, 679 bp, Homo sapiens
cgacctcggaccccggaactcttcggatgggagggagatcagtggtgccaactggctcagaagaggtttgctgggttaaatctcaagatgagcccatgagatctggtggttagcagaggcctttcctgacaaccccattttaagcacctcttccccatcactctatctcatcactgttactgtctgtgtagccctgtcatgagctaaaatcatcctgtttgtttattgctagcttatgtgtctaaagtatactccttgagaacagcaactttgtctttttcacctttgtactgagtcccctgacatggaataagatatgaataaatgcacagacttgtccaaaatcatccaattaataaatgctcaccaagatggaggaacagagcccatggcccacttactacatggattcccactttacagtggagaaggagcttgcagtaaccacaaaagtttctgtataagcaaatttagggaattgaacttcagacagtgtggttgtctccttacttatgaacttgggaatacttacttaggtaacaactaacatcagaggtttttgatctgtagcctttctttctgtccataattagctaatagcttctgctgtacaaacacaaaccattccctgtccaagaaaattaaactatatcatcagaataagaaagaatcgtccgtt

SEQ ID NO: 362421 - DNA, 460 bp, Homo sapiens
aacacgaatcccaaaggaaaaaagccaaagttaaaggttacataagagctagaaggagtaaggaaacatggttttctcttgcttcctgcccatggctgccaaacggttctctgaagactgctatgtgacagaagccctttcctttgaaaacctgtcacgtcacaacaagaaaaagatctctttctttggaggtacatttttgggcacaagaaaggctttttaaaatttttttggccatctttttcattgtaggagtctggtgcttgctgcctagtttgggagtagaggaaaagactctggctctttagggggatagagatgggaaaggagcatggcccagctgggtgtattagctctccctccgctgcacttctggaacctttcatataagggcttcaggataagggggttgcatagctttagggtcttatggacatttggaccatttgcttcataatca

SEQ ID NO: 362422 - DNA, 451 bp, Homo sapiens
ttttttaggcaagtcagaaagagaacatggtcacccaaaagcaactgtaactcagaaattaagttactcagaaattaagtagctcagaaattaagaaagaatggtataatgaacccccatatacccttccttctggattcaccaattgttaacatttttttcctctcagctatccttctaatttctctctaatttcaatttgtttatatttacctctgggctcaataagggcatctgtgcagaaatttggaagccatttagaaaatcttttggattttcctgtggtttatggcaatatgaatggagcttattactggggtgagggacagcttactccatttgaccagattgtttggctaacacatcccgaagaatgattttgtcaggaattattgttatttaataaatatttcaggatatttttcctctacaataaagtaacaattaactt

SEQ ID NO: 362423 - DNA, 470 bp, Homo sapiens
caactctgggttgttttctgcactgacattttaataaatatttagtgacagtgagctcagaatcgtatctttggcaagtgcctggggtgcagctgccattctttattgatggctgagtaagatatgaggcgcttaacttttaactcatttttgttttgttttaacacagcctcaccaagatggaggaacagagcccatggcccacttactacatggattcccactttacagtggagaaggagcttgcagtaaccacaaaagtttctgtataagcaaatttagggaattgaacttcagacagtgtggttgtctccttacttatgaacttgggaatacttacttaggtaacaactaacatcagaggtttttgatctgtagcctttctttctgtccataattagctaatagcttctgctgtacaaacacaaaccattccctgtccaagaaaattaaactatatcatcagaata

SEQ ID NO: 362424 - DNA, 1956 bp, Homo sapiens
gtgagcgggtttccggaacctccgggtgtcatccgcggggaaagaacttggtcctgatgtctgaccatggagatgtgagcctcccgcccgaagaccgggtgagggctctctcccagctgggtagtgcggtagaggtgaatgaagacattccaccccgtcggtacttccgctctggagttgagattatccgaatggcatccatttactctgaggaaggcaacattgaacatgccttcatcctctataacaagtatatcacgctctttattgagaaactaccaaaacatcgagattacaaatctgctgtcattcctgaaaagaaagacacagtaaagaaattaaaggagattgcatttcccaaagcagaagagctgaaggcagagctgttaaaacgatataccaaagaatatacagaatataatgaagaaaagaagaaggaagcagaggaattggcccggaacatggccatccagcaagagctggaaaaggaaaaacagagggtagcacaacagaagcagcagcaattggaacaggaacagttccatgccttcgaggagatgatccggaaccaggagctagaaaaagagcgactgaaaattgtacaggagtttgggaaggtagaccctggcctaggtggcccgctagtgcctgacttggagaagccctccttagatgtgttccccaccttaacagtctcatccatacagccttcagactgtcacacaactgtaaggccagctaagccacctgtggtggacaggtccttgaaacctggagcactgagcaactcagaaagtattcccacaatcgatggattgcgccatgtggtggtgcctgggcggctgtgcccacagtttctccagttagccagtgccaacactgcccggggagtggagacatgtggaattctctgtggaaaactgatgaggaatgaatttaccattacccatgttctcatccccaagcaaagtgctgggtctgattactgcaacacagagaacgaagaagaacttttcctcatacaggatcagcagggcctcatcacactgggctggattcatactcaccccacacagaccgcgtttctctccagtgtcgacctacacactcactgctcttaccagatgatgttgccagagtcagtagccattgtttgctcccccaagttccaggaaactggattctttaaactaactgaccatggactagaggagatttcttcctgtcgccagaaaggatttcatccacacagcaaggatccacctctgttctgtagctgcagccacgtgactgttgtggacagagcagtgaccatcacagaccttcgatgagcgtttgagtccaacaccttccaagaacaacaaaaccatatcagtgtactgtagccccttaatttaagctttctagaaagctttggaagtttttgtagatagtagaaaggggggcatcacctgagaaagagctgattttgtatttcaggtttgaaaagaaataactgaacatattttttaggcaagtcagaaagagaacatggtcacccaaaagcaactgtaactcagaaattaagttactcagaaattaagtagctcagaaattaagaaagaatggtataatgaacccccatatacccttccttctggattcaccaattgttaacatttttttcctctcagctatccttctaatttctctctaatttcaatttgtttatatttacctctgggctcaataagggcatctgtgcagaaatttggaagccatttagaaaatcttttggattttcctgtggtttatggcaatatgaatggagcttattactggggtgagggacagcttactccatttgaccagattgtttggctaacacatcccgaagaatgattttgtcaggaattattgttatttaataaatatttcaggatatttttcctctacaataaagtaacaattaactta

SEQ ID NO: 362425 - DNA, 1741 bp, Homo sapiens
gtgagcgggtttccggaacctccgggtgtcatccgcggggaaaggctctttattgagaaactaccaaaacatcgagattacaaatctgctgtcattcctgaaaagaaagacacagtaaagaaattaaaggagattgcatttcccaaagcagaagagctgaaggcagagctgttaaaacgatataccaaagaatatacagaatataatgaagaaaagaagaaggaagcagaggaattggcccggaacatggccatccagcaagagctggaaaaggaaaaacagagggtagcacaacagaagcagcagcaattggaacaggaacagttccatgccttcgaggagatgatccggaaccaggagctagaaaaagagcgactgaaaattgtacaggagtttgggaaggtagaccctggcctaggtggcccgctagtgcctgacttggagaagccctccttagatgtgttccccaccttaacagtctcatccatacagccttcagactgtcacacaactgtaaggccagctaagccacctgtggtggacaggtccttgaaacctggagcactgagcaactcagaaagtattcccacaatcgatggattgcgccatgtggtggtgcctgggcggctgtgcccacagtttctccagttagccagtgccaacactgcccggggagtggagacatgtggaattctctgtggaaaactgatgaggaatgaatttaccattacccatgttctcatccccaagcaaagtgctgggtctgattactgcaacacagagaacgaagaagaacttttcctcatacaggatcagcagggcctcatcacactgggctggattcatactcaccccacacagaccgcgtttctctccagtgtcgacctacacactcactgctcttaccagatgatgttgccagagtcagtagccattgtttgctcccccaagttccaggaaactggattctttaaactaactgaccatggactagaggagatttcttcctgtcgccagaaaggatttcatccacacagcaaggatccacctctgttctgtagctgcagccacgtgactgttgtggacagagcagtgaccatcacagaccttcgatgagcgtttgagtccaacaccttccaagaacaacaaaaccatatcagtgtactgtagccccttaatttaagctttctagaaagctttggaagtttttgtagatagtagaaaggggggcatcacctgagaaagagctgattttgtatttcaggtttgaaaagaaataactgaacatattttttaggcaagtcagaaagagaacatggtcacccaaaagcaactgtaactcagaaattaagttactcagaaattaagtagctcagaaattaagaaagaatggtataatgaacccccatatacccttccttctggattcaccaattgttaacatttttttcctctcagctatccttctaatttctctctaatttcaatttgtttatatttacctctgggctcaataagggcatctgtgcagaaatttggaagccatttagaaaatcttttggattttcctgtggtttatggcaatatgaatggagcttattactggggtgagggacagcttactccatttgaccagattgtttggctaacacatcccgaagaatgattttgtcaggaattattgttatttaataaatatttcaggatatttttcctctacaataaagtaacaattaactta

SEQ ID NO: 362426 - DNA, 2006 bp, Homo sapiens
atgggaaaggagcatggcccagctgggtgtattagctctccctccgctgcacttctggaacctttcatataagggcttcaggataagggggttgcatagctttagggtcttatggacatttggaccatttgcttcataatcattttgaactgtttccttaggctctttattgagaaactaccaaaacatcgagattacaaatctgctgtcattcctgaaaagaaagacacagtaaaggtgggtcttcactttcattgttgcccatctaaaagcttcagagcagcacagactgacttcaagataaaagtagtagtctctgcatctgagtaccagatcctgcaataggagataaggccatttcaccacaacagttctgaagtagcagaaattaaaggagattgcatttcccaaagcagaagagctgaaggcagagctgttaaaacgatataccaaagaatatacagaatataatgaagaaaagaagaaggaagcagaggaattggcccggaacatggccatccagcaagagctggaaaaggaaaaacagagggtagcacaacagaagcagcagcaattggaacaggaacagttccatgccttcgaggagatgatccggaaccaggagctagaaaaagagcgactgaaaattgtacaggagtttgggaaggtagaccctggcctaggtggcccgctagtgcctgacttggagaagccctccttagatgtgttccccaccttaacagtctcatccatacagccttcagactgtcacacaactgtaaggccagctaagccacctgtggtggacaggtccttgaaacctggagcactgagcaactcagaaagtattcccacaatcgatggattgcgccatgtggtggtgcctgggcggctgtgcccacagtttctccagttagccagtgccaacactgcccggggagtggagacatgtggaattctctgtggaaaactgatgaggaatgaatttaccattacccatgttctcatccccaagcaaagtgctgggtctgattactgcaacacagagaacgaagaagaacttttcctcatacaggatcagcagggcctcatcacactgggctggattcatactcaccccacacagaccgcgtttctctccagtgtcgacctacacactcactgctcttaccagatgatgttgccagagtcagtagccattgtttgctcccccaagttccaggaaactggattctttaaactaactgaccatggactagaggagatttcttcctgtcgccagaaaggatttcatccacacagcaaggatccacctctgttctgtagctgcagccacgtgactgttgtggacagagcagtgaccatcacagaccttcgatgagcgtttgagtccaacaccttccaagaacaacaaaaccatatcagtgtactgtagccccttaatttaagctttctagaaagctttggaagtttttgtagatagtagaaaggggggcatcacctgagaaagagctgattttgtatttcaggtttgaaaagaaataactgaacatattttttaggcaagtcagaaagagaacatggtcacccaaaagcaactgtaactcagaaattaagttactcagaaattaagtagctcagaaattaagaaagaatggtataatgaacccccatatacccttccttctggattcaccaattgttaacatttttttcctctcagctatccttctaatttctctctaatttcaatttgtttatatttacctctgggctcaataagggcatctgtgcagaaatttggaagccatttagaaaatcttttggattttcctgtggtttatggcaatatgaatggagcttattactggggtgagggacagcttactccatttgaccagattgtttggctaacacatcccgaagaatgattttgtcaggaattattgttatttaataaatatttcaggatatttttcctctacaataaagtaacaattaactta

SEQ ID NO: 362427 - DNA, 1693 bp, Homo sapiens
gtgagcgggtttccggaacctccgggtgtcatccgcggggaaagaacttggtcctgatgtctgaccatggagatgtgagcctcccgcccgaagaccgggtgagggctctctcccagctgggtagtgcggtagaggtgaatgaagacattccaccccgtcggtacttccgctctggagttgagattatccgaatggcatccatttactctgaggaaggcaacattgaacatgccttcatcctctataacaagtatatcacgctctttattgagaaactaccaaaacatcgagattacaaatctgctgtcattcctgaaaagaaagacacagtaaagaaattaaaggagattgcatttcccaaagcagaagagctgaaggcagagctgttaaaacgatataccaaagaatatacagaatataatgaagaaaagaagaaggaagcagaggaattggcccggaacatggccatccagcaagagctggaaaaggaaaaacagagggtagcacaacagaagcagcagcaattggaacaggaacagttccatgccttcgaggagatgatccggaaccaggagctagaaaaagagcgactgaaaattgtacaggagtttgggaaggtagaccctggcctaggtggcccgctagtgcctgacttggagaagccctccttagatgtgttccccaccttaacagtctcatccatacagccttcagactgtcacacaactgtaaggccagctaagccacctgtggtggacaggtccttgaaacctggagcactgagcaactcagaaagtattcccacaatcgatggattgcgccatgtggtggtgcctgggcggctgtgcccacagtttctccagttagccagtgccaacactgcccggggagtggagacatgtggaattctctgtggaaaactgatgaggaatgaatttaccattacccatgttctcatccccaagcaaagtgctgggtctgattactgcaacacagagaacgaagaagaacttttcctcatacaggatcagcagggcctcatcacactgggctggattcatactcaccccacacagaccgcgtttctctccagtgtcgacctacacactcactgctcttaccagatgatgttgccagagtcagtagccattgtttgctcccccaagttccaggaaactggattctttaaactaactgaccatggactagaggagatttcttcctgtcgccagaaaggatttcatccacacagcaaggatccacctctgttctgtagctgcagccacgtgactgttgtggacagagcagtgaccatcacagaccttcgatgagcgtttgagtccaacaccttccaagaacaacaaaaccatatcagtctcaccaagatggaggaacagagcccatggcccacttactacatggattcccactttacagtggagaaggagcttgcagtaaccacaaaagtttctgtataagcaaatttagggaattgaacttcagacagtgtggttgtctccttacttatgaacttgggaatacttacttaggtaacaactaacatcagaggtttttgatctgtagcctttctttctgtccataattagctaatagcttctgctgtacaaacacaaaccattccctgtccaagaaaattaaactatatcatcagaataagaaagaatcgtccgtt

SEQ ID NO: 362428 - DNA, 631 bp, Homo sapiens
  misc_feature (603)..(603): n is a, c, g, or t
ggaagggtcccgggaacgtggtggggcagggcctccgagcgtggttggactttgaaggggatcggccgccatgctgcatcccctttttggaattgctcaaccaggtggtaaccggcgccgcttcctggccttgggaggtggttcctttcttaacccacaagaacctctcccaagagaacttggtcctgatgtctgaccatggagatgtgagcctcccgcccgaagaccgggtgagggctctctcccagctgggtagtgcggtagaggtgaatgaagacattccaccccgtcggtacttccgctctggagttgagattatccgaatggcatccatttactctgaggaaggcaacattgaacatgccttcatcctctataacaagtatatcacgctctttattgagaaactaccaaaacatcgagattacaaatctgctgtcattcctgaaaagaaagacacagtaaagaaattaaaggagattgcatttcccaaagcagaagagctgaaggcagagctgttaaaacgatataccaaagaatatacagaatataatgaagaaaagaagaaggagcaggagtcgccagacagaagtcaccagacanaagtcgacgggatcctctagatcaccac

SEQ ID NO: 362429 - DNA, 604 bp, Homo sapiens
cttttgtgtatacatttctgttcccccatatatatagactttttatatttcagctgggcagcatttacttgctcttaatgtctccccataatttcccttcaggtgtggtactgcatgtgctttttcaaagccttgataatttaaatggcagaaatgctattattaactccatataaggtggttatgggtttgtcactcaggccatgtgtaacttgaatttttgtctaagcctcagaaaaacctgtttgtgaggccacttttcagaatttcttgggctttttggaaaattgaacgtctgtcttggatattggcttgagcttagatatggcaattccaccagtgattatttcagtgattgtgtgaattgttagaattaagataatttggtgttaattgcagtgattatttcaagttataagattgtaatctattataaacgtgttaaggatggaaggcacaaaacccaactatttttccatagtgaataatcttttttaatgcccaactcataggaagcctagcttctgttattgctactagtcttttgttgcatgaaagatttttgtttttgcatcagaattttgccatgatatttcagagagta

SEQ ID NO: 362430 - DNA, 898 bp, Homo sapiens
ctcacagcggccgggcgggccgggcgtcatgggcggcctcttctggcgctccgcgctgcgggggctgcgctgcggcccgcgggccccgggcccgagcctgctagtgcgccacggctcgggagggccctcctggacccgggagcggaccctggtggcggtgaagcccgatggcgtgcaacggcggctcgttggggacgtgatccagcgctttgagaggcggggcttcacgctggtggggatgaagatgctgcaggcaccagagagcgtccttgccgagcactaccaggacctgcggaggaagcccttctaccctgccctcatccgctacatgagctctgggcctgtggtggccatggtctgggaagggtacaatgtcgtccgcgcctcgagggccatgattggacacaccgactcggctgaggctgccccaggaaccataaggggtgacttcagcgtccacatcagcaggaatgtcatccacgccagcgactccgtggagggggcccagcgggagatccagctgtggttccagagcagtgagctggtgagctgggcagacgggggccagcacagcagcatccacccagcctgaggctcaagctgcccttaccaccccatcccccacgcaggaccaactacctccgtcagcaagaacccaagcccacatccaaacctgcctgtcccaaaccacttacttccctgttcacctctgccccaccccagcccagaggagtttgagccaccaacttcagtgcctttctgtaccccaagccagcacaagattggaccaatcctttttgcaccaaagtgccggacaacctttgtggtgggggggggtcttcacattatcataacctctcctctaaaggggaggcattaaaattcactgtgcccagca

SEQ ID NO: 362431 - DNA, 935 bp, Homo sapiens
  misc_feature (861)..(861): n is a, c, g, or t
ctcacagcggccgggcgggccgggcgtcatgggcggcctcttctggcgctccgcgctgcgggggctgcgctgcggcccgcgggccccgggcccgagcctgctagtgcgccacggctcgggagggccctcctggacccgggagcggaccctggtggcggtgaagcccgatggcgtgcaacggcggctcgttggggacgtgatccagcgctttgagaggcggggcttcacgctggtggggatgaagatgctgcaggcaccagagagcgtccttgccgagcactaccaggacctgcggaggaagcccttctaccctgccctcatccgctacatgagctctgggcctgtggtggccatggtctgggaagggtacaatgtcgtccgcgcctcgagggccatgattggacacaccgactcggctgaggctgccccaggaaccataaggggtgacttcagcgtccacatcagcaggaatgtcatccacgccagcgactccgtggagggggcccagcgggagatccagctgtggttccagagcagtgagctggtgagctgggcagacgggggccagcacagcagcatccacccagcctgaggctcaagctgcccttaccaccccatcccccacgcaggaccaactacctccgtcagcaagaacccaagcccacatccaaacctgcctgtcccaaaccacttacttccctgttcacctctgccccaccccagcccagaggagtttgagccaccaacttcagtgcctttctgtaccccaagccagcacaagattggaccaatcctttttgcaccaaagtgccggacaacctttgtggtgggggggggtcttcacattatcataacctctcntaaggagggtaaatcctggccgcagtgggacaatttatcccgctggaaaaccttatgtgggagaaggggggccc

SEQ ID NO: 362432 - DNA, 1099 bp, Homo sapiens
tcaccctccattggagggggctcagaccagggcttctagacctccttttggtccgtgaatttatttttgagacagagtcttgctctattgctcaggctggagtgcagcggtgcagtcacagctcactgcagcctcaatctcctgggctcacgcgatcctcctgcctcagcctcccgagtgggccttcctccgtgggaaagcgttaaaacgatagttaacggttgcgtcggtgtaaagacgaatgcaattcgagaaggattcattattattttgttttttcttctgatttttaacagaaattggcgttgaacatttcccccgagggccctcctggacccgggagcggaccctggtggcggtgaagcccgatggcgtgcaacggcggctcgttggggacgtgatccagcgctttgagaggcggggcttcacgctggtggggatgaagatgctgcaggcaccagagagcgtccttgccgagcactaccaggacctgcggaggaagcccttctaccctgccctcatccgctacatgagctctgggcctgtggtggccatggtctgggaagggtacaatgtcgtccgcgcctcgagggccatgattggacacaccgactcggctgaggctgccccaggaaccataaggggtgacttcagcgtccacatcagcaggaatgtcatccacgccagcgactccgtggagggggcccagcgggagatccagctgtggttccagagcagtgagctggtgagctgggcagacgggggccagcacagcagcatccacccagcctgaggctcaagctgcccttaccaccccatcccccacgcaggaccaactacctccgtcagcaagaacccaagcccacatccaaacctgcctgtcccaaaccacttacttccctgttcacctctgccccaccccagcccagaggagtttgagccaccaacttcagtgcctttctgtaccccaagccagcacaagattggaccaatcctttttgcaccaaagtgccggacaacctttgtggtgggggggggtcttcacattatcataacctctcctctaaaggggaggcattaaaattcactgtgcccagca

SEQ ID NO: 362433 - DNA, 895 bp, Homo sapiens
ctcacagcggccgggcgggccgggcgtcatgggcggcctcttctggcgctccgcgctgcgggggctgcgctgcggcccgcgggccccgggcccgagcctgctagtgcgccacggctcggcgtcccctccagaggaggacggctggggcggagctcagcgctgaccctgggtctggaagcgacaggccttgaaactccacagcagcacaggccccgtctcctggctcggacagaaccctgctaccttccctcttcaatcttcaggcccctttttgtccgtgtttccaggctcaccgcctggtggggaaagtgtgtttctccctggttccctgccactcattcacctcagacacagggtgggctctgggttcttcctcatgtggaaagtcggggcttcagaccatgtctgtcgtcatccagaagggatggagtcaaaagtgaggctggagttttgcaggatctccagacttccctgaggccactgagctgggctgtgcctctgtggacctcagggtggtcgctgagctgggctgtccctccctggaccttgaggtggtccctgagctggctctgcctctatggaccttgcggtggtggtccctgagctgggcagtgcctccctgaacctcggggcgatctcaggcagcctctgcctctgctgggaggagccatggcccctgggagaggctagaagccctggggacacattgccttgggtgtccctgacagggactatcatgggggtgtttgtggctgtgggcaccatccctgtcccttccagagtgccctgcatagaggcagacaccctgaagcctggtgaccctgggctctggctgggaaacccgggtcgtggggacgtgaaagggtgaggtggcagtgcctctgacctcttgcct

SEQ ID NO: 362434 - DNA, 240 bp, Homo sapiens
  misc_feature (34)..(34): n is a, c, g, or t
ggaggtgattctagaggatcccattaggcgcgtnctgcgtccacatcagcgaatgtcatccacgccagcgactccgtggagggggcccagcgggagatccagctgtggttccagagcagtgagctggtgagctgggcagacgggggccagcacagcagcatccacccagcctgaggctcaagctgcccttaccaccccatcccccacgcagaacgcgcctaatggggatcctcctagagg

SEQ ID NO: 362435 - DNA, 1320 bp, Homo sapiens
ctcacagcggccgggcgggccgggcgtcatgggcggcctcttctggcgctccgcgctgcgggggctgcgctgcggcccgcgggccccgggcccgagcctgctagtgcgccacggctcgggagggccctcctggacccgggagcggaccctggtggcggtgaagcccgatggcgtgcaacggcggctcgttggggacgtgatccagcgctttgagaggcggggcttcacgctggtggggatgaagatgctgcaggcaccagagagcgtccttgccgagcactaccaggacctgcggaggaagcccttctaccctgccctcatccgctacatgagctctgggcctgtggtggccatggtctgggaagggtacaatgtcgtccgcgcctcgagggccatgattggacacaccgactcggctgaggctgccccaggaaccataaggggtgacttcagcgtccacatcagcaggaatgtcatccacgccagcgactccgtggagggggcccagcgggagatccagctgtggttccagagcagtgagctggtgagctgggcagacgggggccagcacagcagcatccacccagcctgaggctcaagctgcccttaccaccccatcccccacgcaggaccaactacctccgtcagcaagaacccaagcccacatccaaacctgcctgtcccaaaccacttacttccctgttcacctctgccccaccccagcccagaggagtttgagccaccaacttcagtgcctttctgtaccccaagccagcacaagattggaccaatcctttttgcaccaaagtgccggacaacctttgtggtgggggggggtcttcacattatcataacctctcctctaaaggggaggcattaaaattcactgtgcccagcacatgggtggtacactaattatgacttcccccagctctgaggtagaaatgacgcctttatgcaagttgtaaggagttgaacagtaaagaggaagttttgcacacccaaaaaaaaaaaaaaaaaaaaaaaaaaaaaaaaaaaaaaaaaaaaaaaaaaaaaaaaaaaaaaaaaaaaaaaaaaaaaaaaaaggaaaaaaaaaaaaaaaaaaaaaaaaaaaaaaaaatgtgggccgcttgggccaagtgaattttaaatttgacaaagtttatgaatggggccgaaattggggttaatttggcaaattccccttaaagggggccgattaaaaattaatgggccggggtttaaaaacgtcggaattggaaaaaccttggggttaccaaattaaatcgctttgaagatccccttttggcgttggggagc

SEQ ID NO: 362436 - DNA, 1145 bp, Homo sapiens
ctcacagcggccgggcgggccgggcgtcatgggcggcctcttctggcgctccgcgctgcgggggctgcgctgcggcccgcgggccccgggcccgagcctgctagtgcgccacggctcgggagggccctcctggacccgggagcggaccctggtggcggtgaagcccgatggcgtgcaacggcggctcgttggggacgtgatccagcgctttgagaggcggggcttcacgctggtggggatgaagatgctgcaggcaccagagagcgtccttgccgagcactaccaggacctgcggaggaagcccttctaccctgccctcatccgctacatgagctctgggcctgtggtggccatggtctgggaagggtacaatgtcgtccgcgcctcgagggccatgattggacacaccgactcggctgaggctgccccaggaaccataaggggtgacttcagcgtccacatcagcaggaatgtcatccacgccagcgactccgtggagggggcccagcgggagatccagctgtggttccagagcagtgagctggtgagctgggcagacgggggccagcacagcagcatccacccagcctgaggctcaagctgcccttaccaccccatcccccacgcaggaccaactacctccgtcagcaagaacccaagcccacatccaaacctgcctgtcccaaaccacttacttccctgttcacctctgccccaccccagcccagaggagtttgagccaccaacttcagtgcctttctgtaccccaagccagcacaagattggaccaatcctttttgcaccaaagtgccggacaacctttgtggtgggggggggtcttcacattatcataacctctcctctaaaggggaggcattaaaattcactgtgcccagcaaaaaaaaaaaaaggaaaaaaaaaaaaaaaaaaaaaaaaaaaaaaaaatgtgggccgcttgggccaagtgaattttaaatttgacaaagtttatgaatggggccgaaattggggttaatttggcaaattccccttaaagggggccgattaaaaattaatgggccggggtttaaaaacgtcggaattggaaaaaccttggggttaccaaattaaatcgctttgaagatccccttttggcgttggggagc

SEQ ID NO: 362437 - DNA, 1205 bp, Homo sapiens
tcaccctccattggagggggctcagaccagggcttctagacctccttttggtccgtgaatttatttttgagacagagtcttgctctattgctcaggctggagtgcagcggtgcagtcacagctcactgcagcctcaatctcctgggctcacgcgatcctcctgcctcagcctcccgagtgggccttcctccgtgggaaagcgttaaaacgatagttaacggttgcgtcggtgtaaagacgaatgcaattcgagaaggattcattattattttgttttttcttctgatttttaacagaaattggcgttgaacatttcccccgagggccctcctggacccgggagcggaccctggtggcggtgaagcccgatggcgtgcaacggcggctcgttggggacgtgatccagcgctttgagaggcggggcttcacgctggtggggatgaagatgctgcaggcaccagagagcgtccttgccgagcactaccaggacctgcggaggaagcccttctaccctgccctcatccgctacatgagctctgggcctgtggtggccatggtctgggaagggtacaatgtcgtccgcgcctcgagggccatgattggacacaccgactcggctgaggctgccccaggaaccataaggggtgacttcagcgtccacatcagcaggaatgtcatccacgccagcgactccgtggagggggcccagcgggagatccagctgtggttccagagcagtgagctggtgagctgggcagacgggggccagcacagcagcatccacccagcctgaggctcaagctgcccttaccaccccatcccccacgcaggaccaactacctccgtcagcaagaacccaagcccacatccaaacctgcctgtcccaaaccacttacttccctgttcacctctgccccaccccagcccagaggagtttgagccaccaacttcagtgcctttctgtaccccaagccagcacaagattggaccaatcctttttgcaccaaagtgccggacaacctttgtggtgggggggggtcttcacattatcataacctctcctctaaaggggaggcattaaaattcactgtgcccagcacatgggtggtacactaattatgacttcccccagctctgaggtagaaatgacgcctttatgcaagttgtaaggagttgaacagtaaagaggaagttttgcacaccca

SEQ ID NO: 362438 - DNA, 1381 bp, Homo sapiens
tcaccctccattggagggggctcagaccagggcttctagacctccttttggtccgtgaatttatttttgagacagagtcttgctctattgctcaggctggagtgcagcggtgcagtcacagctcactgcagcctcaatctcctgggctcacgcgatcctcctgcctcagcctcccgagtgggccttcctccgtgggaaagcgttaaaacgatagttaacggttgcgtcggtgtaaagacgaatgcaattcgagaaggattcattattattttgttttttcttctgatttttaacagaaattggcgttgaacatttccccccgtcccctccagaggaggacggctggggcggagctcagcgctgaccctgggtctggaagcgacaggccttgaaactccacagcagcacaggccccgtctcctggctcggacagaaccctgctaccttccctcttcaatcttcaggcccctttttgtccgtgtttccaggctcaccggagggccctcctggacccgggagcggaccctggtggcggtgaagcccgatggcgtgcaacggcggctcgttggggacgtgatccagcgctttgagaggcggggcttcacgctggtggggatgaagatgctgcaggcaccagagagcgtccttgccgagcactaccaggacctgcggaggaagcccttctaccctgccctcatccgctacatgagctctgggcctgtggtggccatggtctgggaagggtacaatgtcgtccgcgcctcgagggccatgattggacacaccgactcggctgaggctgccccaggaaccataaggggtgacttcagcgtccacatcagcaggaatgtcatccacgccagcgactccgtggagggggcccagcgggagatccagctgtggttccagagcagtgagctggtgagctgggcagacgggggccagcacagcagcatccacccagcctgaggctcaagctgcccttaccaccccatcccccacgcaggaccaactacctccgtcagcaagaacccaagcccacatccaaacctgcctgtcccaaaccacttacttccctgttcacctctgccccaccccagcccagaggagtttgagccaccaacttcagtgcctttctgtaccccaagccagcacaagattggaccaatcctttttgcaccaaagtgccggacaacctttgtggtgggggggggtcttcacattatcataacctctcctctaaaggggaggcattaaaattcactgtgcccagcacatgggtggtacactaattatgacttcccccagctctgaggtagaaatgacgcctttatgcaagttgtaaggagttgaacagtaaagaggaagttttgcacaccca

SEQ ID NO: 362439 - DNA, 1423 bp, Homo sapiens
ggggggtgggggtggggggagccgctccgctggggcgttcgctgaaggccaagttaggccagaatctgactgggacgtcaggccccaagtccccggccccgccgctgcccggcccccccagctgccacctcacaggacgatccatgtcccagggctccctccatcggctctgaaaagtgagccgccgcctgcaatgcccgcaccagccagcagcagagccccaggctacacaaggcgccctgcaaactgggttttgggggaacaaaccaaccagggggtcttcctcccgtgggcttcagccgcctgctggggttaacttttcctcctggcctggcggagcccctttggctctgtccagattctgtgggacatacagggtctgggctcctctggaaaccagggacccgatgccggagggtagcttggctctggagcagcctgggactataggaaggagggccctcctggacccgggagcggaccctggtggcggtgaagcccgatggcgtgcaacggcggctcgttggggacgtgatccagcgctttgagaggcggggcttcacgctggtggggatgaagatgctgcaggtgcctgaggtcagggcatcacagctgctgtgctagtgcccacgtttactgtctgcggctcctccttacctcaatgccacccaggcaccagagagcgtccttgccgagcactaccaggacctgcggaggaagcccttctaccctgccctcatccgctacatgagctctgggcctgtggtggccatggtctgggaagggtacaatgtcgtccgcgcctcgagggccatgattggacacaccgactcggctgaggctgccccaggaaccataaggggtgacttcagcgtccacatcagcaggaatgtcatccacgccagcgactccgtggagggggcccagcgggagatccagctgtggttccagagcagtgagctggtgagctgggcagacgggggccagcacagcagcatccacccagcctgaggctcaagctgcccttaccaccccatcccccacgcaggaccaactacctccgtcagcaagaacccaagcccacatccaaacctgcctgtcccaaaccacttacttccctgttcacctctgccccaccccagcccagaggagtttgagccaccaacttcagtgcctttctgtaccccaagccagcacaagattggaccaatcctttttgcaccaaagtgccggacaacctttgtggtgggggggggtcttcacattatcataacctctcctctaaaggggaggcattaaaattcactgtgcccagcacatgggtggtacactaattatgacttcccccagctctgaggtagaaatgacgcctttatgcaagttgtaaggagttgaacagtaaagaggaagttttgcacaccca

SEQ ID NO: 362440 - DNA, 1342 bp, Homo sapiens
ggggggtgggggtggggggagccgctccgctggggcgttcgctgaaggccaagttaggccagaatctgactgggacgtcaggccccaagtccccggccccgccgctgcccggcccccccagctgccacctcacaggacgatccatgtcccagggctccctccatcggctctgaaaagtgagccgccgcctgcaatgcccgcaccagccagcagcagagccccaggctacacaaggcgccctgcaaactgggttttgggggaacaaaccaaccagggggtcttcctcccgtgggcttcagccgcctgctggggttaacttttcctcctggcctggcggagcccctttggctctgtccagattctgtgggacatacagggtctgggctcctctggaaaccagggacccgatgccggagggtagcttggctctggagcagcctgggactataggaaggagggccctcctggacccgggagcggaccctggtggcggtgaagcccgatggcgtgcaacggcggctcgttggggacgtgatccagcgctttgagaggcggggcttcacgctggtggggatgaagatgctgcaggcaccagagagcgtccttgccgagcactaccaggacctgcggaggaagcccttctaccctgccctcatccgctacatgagctctgggcctgtggtggccatggtctgggaagggtacaatgtcgtccgcgcctcgagggccatgattggacacaccgactcggctgaggctgccccaggaaccataaggggtgacttcagcgtccacatcagcagtcacaggcttgctcccctagacagagggcaacgggagcagcagatggtccctgggattcctcagggtgcacatgaagcctgagcctcacattgctcctgtcctggcacagaatgtcatccacgccagcgactccgtggagggggcccagcgggagatccagctgtggttccagagcagtgagctggtgagctgggcagacgggggccagcacagcagcatccacccagcctgaggctcaagctgcccttaccaccccatcccccacgcaggaccaactacctccgtcagcaagaacccaagcccacatccaaacctgcctgtcccaaaccacttacttccctgttcacctctgccccaccccagcccagaggagtttgagccaccaacttcagtgcctttctgtaccccaagccagcacaagattggaccaatcctttttgcaccaaagtgccggacaacctttgtggtgggggggggtcttcacattatcataacctctcctctaaaggggaggcattaaaattcactgtgcccagca

SEQ ID NO: 362441 - DNA, 564 bp, Homo sapiens
cccgctacagttagcgctcctggcgcatacgtggagacaccttgcatgtacctggggggggggcccagcgggagatccagctgtggttccagagcagtgagctggtgagctgggcagacgggggccagcacagcagcatccacccagcctgaggctcaagctgcccttaccaccccatcccccacgcaggaccaactacctccgtcagcaagaacccaagcccacatccaaacctgcctgtcccaaaccacttacttccctgttcacctctgccccaccccagcccagaggagtttgagccaccaacttcagtgcctttctgtaccccaagccagcacaagattggaccaatcctttttgcaccaaagtgccggacaacctttgtggtgggggggggtcttcacattatcataacctctcctctaaaggggaggcattaaaattcactgtgcccagcacatgggtggtacactaattatgacttcccccagctctgaggtagaaatgacgcctttatgcaagttgtaaggagttgaacagtaaagaggaagttttgcacaccca

SEQ ID NO: 362442 - DNA, 1254 bp, Homo sapiens
ggggggtgggggtggggggagccgctccgctggggcgttcgctgaaggccaagttaggccagaatctgactgggacgtcaggccccaagtccccggccccgccgctgcccggcccccccagctgccacctcacaggacgatccatgtcccagggctccctccatcggctctgaaaagtgagccgccgcctgcaatgcccgcaccagccagcagcagagccccaggctacacaaggcgccctgcaaactgggttttgggggaacaaaccaaccagggggtcttcctcccgtgggcttcagccgcctgctggggttaacttttcctcctggcctggcggagcccctttggctctgtccagattctgtgggacatacagggtctgggctcctctggaaaccagggacccgatgccggagggtagcttggctctggagcagcctgggactataggaaggagggccctcctggacccgggagcggaccctggtggcggtgaagcccgatggcgtgcaacggcggctcgttggggacgtgatccagcgctttgagaggcggggcttcacgctggtggggatgaagatgctgcaggcaccagagagcgtccttgccgagcactaccaggacctgcggaggaagcccttctaccctgccctcatccgctacatgagctctgggcctgtggtggccatggtctgggaagggtacaatgtcgtccgcgcctcgagggccatgattggacacaccgactcggctgaggctgccccaggaaccataaggggtgacttcagcgtccacatcagcaggaatgtcatccacgccagcgactccgtggagggggcccagcgggagatccagctgtggttccagagcagtgagctggaccaactacctccgtcagcaagaacccaagcccacatccaaacctgcctgtcccaaaccacttacttccctgttcacctctgccccaccccagcccagaggagtttgagccaccaacttcagtgcctttctgtaccccaagccagcacaagattggaccaatcctttttgcaccaaagtgccggacaacctttgtggtgggggggggtcttcacattatcataacctctcctctaaaggggaggcattaaaattcactgtgcccagcacatgggtggtacactaattatgacttcccccagctctgaggtagaaatgacgcctttatgcaagttgtaaggagttgaacagtaaagaggaagttttgcacaccca

SEQ ID NO: 362443 - DNA, 1372 bp, Homo sapiens
ggggggtgggggtggggggagccgctccgctggggcgttcgctgaaggccaagttaggccagaatctgactgggacgtcaggccccaagtccccggccccgccgctgcccggcccccccagctgccacctcacaggacgatccatgtcccagggctccctccatcggctctgaaaagtgagccgccgcctgcaatgcccgcaccagccagcagcagagccccaggctacacaaggcgccctgcaaactgggttttgggggaacaaaccaaccagggggtcttcctcccgtgggcttcagccgcctgctggggttaacttttcctcctggcctggcggagcccctttggctctgtccagattctgtgggacatacagggtctgggctcctctggaaaccagggacccgatgccggagggtagcttggctctggagcagcctgggactataggaaggagggccctcctggacccgggagcggaccctggtggcggtgaagcccgatggcgtgcaacggcggctcgttggggacgtgatccagcgctttgagaggcggggcttcacgctggtggggatgaagatgctgcaggcaccagagagcgtccttgccgagcactaccaggacctgcggaggaagcccttctaccctgccctcatccgctacatgagctctgggcctgtggtggccatggtctgggaagggtacaatgtcgtccgcgcctcgagggccatgattggacacaccgactcggctgaggctgccccaggaaccataaggggtgacttcagcgtccacatcagcaggaatgtcatccacgccagcgactccgtggagggggcccagcgggagatccagctgtggttccagagcagtgagctgggacaaagtggccttcatcacaggaggcggctctgggattgggttccggattgctgagattttcatgcggcacggctgccatacggtgattgccagtaggagcctgccgcgagtgctgacgagatgggttttcaccacgttgaccaggctggtctcgaattcctgacctcaggtgatccgcccacctcagcctcccaaagtgccaggattacaggtgtgaaccactgtgcccggccggcacctcagcctcccaaagtgccaggattacaggtgtgaatcactgtgcccggccggcacctcagcctcccaaagtgccaggattacaggtgtgaaccactgtgcccagccggcaccaaaacttgcacctatcctaaatatggagcttcagtgtaagtggcctcccagagacatctttgactttttaaaaaatctagttattgggttctgggagggaccttcctgtttgggggtaatgtggccccaagaaagacct

SEQ ID NO: 362444 - DNA, 599 bp, Homo sapiens
cagaatctgactgggacgtcaggccccaagtccccggccccgccgctgcccggcccccccagctgccacctcacaggacgatccatgtcccagggctccctccatcggctctgaaaagtgagccgccgcctgcaatgcccgcaccagccagcagcagagccccaggctacacaaggcgccctgcaaactgggttttgggggaacaaaccaaccagggggtcttcctcccgtgggcttcagccgcctgctggggttaacttttcctcctggcctggcggagcccctttggctctgtccagattctgtgggacatacagggtctgggctcctctggaaaccagggacccgatgccggagggtagcttggctctggagcagcctgggactataggaaggtgaggacgtcttctgtttccctggcagcgtcccctccagaggaggacggctggggcggagctcagcgctgaccctgggtctggaagcgacaggccttgaaactccacagcagcacaggccccgtctcctggctcggacagaaccctgctaccttccctcttcaatcttcaggcccctttttgtccgtgtttccaggctcaccg

SEQ ID NO: 362445 - DNA, 1004 bp, Homo sapiens
ctcacagcggccgggcgggccgggcgtcatgggcggcctcttctggcgctccgcgctgcgggggctgcgctgcggcccgcgggccccgggcccgagcctgctagtgcgccacggctcgggagggccctcctggacccgggagcggaccctggtggcggtgaagcccgatggcgtgcaacggcggctcgttggggacgtgatccagcgctttgagaggcggggcttcacgctggtggggatgaagatgctgcaggcaccagagagcgtccttgccgagcactaccaggacctgcggaggaagcccttctaccctgccctcatccgctacatgagctctgggcctgtggtggccatggtctgggaagggtacaatgtcgtccgcgcctcgagggccatgattggacacaccgactcggctgaggctgccccaggaaccataaggggtgacttcagcgtccacatcagcaggaatgtcatccacgccagcgactccgtggagggggcccagcgggagatccagctgtggttccagagcagtgagctggtgagctgggcagacgggggccagcacagcagcatccacccagcctgaggctcaagctgcccttaccaccccatcccccacgcaggaccaactacctccgtcagcaagaacccaagcccacatccaaacctgcctgtcccaaaccacttacttccctgttcacctctgccccaccccagcccagaggagtttgagccaccaacttcagtgcctttctgtaccccaagccagcacaagattggaccaatcctttttgcaccaaagtgccggacaacctttgtggtgggggggggtcttcacattatcataacctctcctctaaaggggaggcattaaaattcactgtgcccagcacatgggtggtacactaattatgacttcccccagctctgaggtagaaatgacgcctttatgcaagttgtaaggagttgaacagtaaagaggaagttttgcacaccca

SEQ ID NO: 362446 - DNA, 1069 bp, Homo sapiens
ctcacagcggccgggcgggccgggcgtcatgggcggcctcttctggcgctccgcgctgcgggggctgcgctgcggcccgcgggccccgggcccgagcctgctagtgcgccacggctcgggagggccctcctggacccgggagcggaccctggtggcggtgaagcccgatggcgtgcaacggcggctcgttggggacgtgatccagcgctttgagaggcggggcttcacgctggtggggatgaagatgctgcaggcaccagagagcgtccttgccgagcactaccaggacctgcggaggaagcccttctaccctgccctcatccgctacatgagctctgggcctgtggtggccatggtctgggaagggtacaatgtcgtccgcgcctcgagggccatgattggacacaccgactcggctgaggctgccccaggaaccataaggggtgacttcagcgtccacatcagcaggaatgtcatccacgccagcgactccgtggagggggcccagcgggagatccagctgtggttccagagcagtgagctgtccccgacgggagcgccatggcccagccgccgcccgacgtggagggggacgactgtctccccgcgtaccgccacctcttctgcccggacctgctgcgggacaaagtggccttcatcacaggaggcggctctgggattgggttccggattgctgagattttcatgcggcacggctgccatacggtgattgccagtaggagcctgccgcgagtgctgacgagatgggttttcaccacgttgaccaggctggtctcgaattcctgacctcaggtgatccgcccacctcagcctcccaaagtgccaggattacaggccgccaggaagctggctggggccaccggccggcgctgcctccctctctctatggacgtccgagcgcccccagctgtcatggccgccgtggaccaggctctgaaggagtttggcagaatcgacattctcattaactgtgcggccgggaacttcctgtgccccgctggcgccttgtccttcaacgccttcaagaccgtgatggacatcgatacca

SEQ ID NO: 362447 - DNA, 676 bp, Homo sapiens
gccgaggccgctcccgcccgttgtccccgcagtccccgacgggagcgccatggcccagccgccgcccgacgtggagggggacgactgtctccccgcgtaccgccacctcttctgcccggacctgctgcgggacaaagtggccttcatcacaggaggcggctctgggattgggttccggattgctgagattttcatgcggcacggctgccatacggtgattgccagtaggagcctgccgcgagtgctgacgagatgggttttcaccacgttgaccaggctggtctcgaattcctgacctcaggtgatccgcccacctcagcctcccaaagtgccaggattacaggtgtgaaccactgtgcccggccggcacctcagcctcccaaagtgccaggattacaggtgtgaaccactgtgcccagccggcaccaaaacttgcacctatcctaaatatggagcttcagtgccgccaggaagctggctggggccaccggccggcgctgcctccctctctctatggacgtccgagcgcccccagctgtcatggccgccgtggaccaggctctgaaggagtttggcagaatcgacattctcattaactgtgcggccgggaacttcctgtgccccgctggcgccttgtccttcaacgccttcaagaccgtgatggacatcgatacca

SEQ ID NO: 362448 - DNA, 973 bp, Homo sapiens
  misc_feature (880)..(880): n is a, c, g, or t
  misc_feature (883)..(883): n is a, c, g, or t
  misc_feature (891)..(891): n is a, c, g, or t
  misc_feature (898)..(898): n is a, c, g, or t
  misc_feature (906)..(906): n is a, c, g, or t
  misc_feature (908)..(908): n is a, c, g, or t
ctcacagcggccgggcgggccgggcgtcatgggcggcctcttctggcgctccgcgctgcgggggctgcgctgcggcccgcgggccccgggcccgagcctgctagtgcgccacggctcgggagggccctcctggacccgggagcggaccctggtggcggtgaagcccgatggcgtgcaacggcggctcgttggggacgtgatccagcgctttgagaggcggggcttcacgctggtggggatgaagatgctgcaggcaccagagagcgtccttgccgagcactaccaggacctgcggaggaagcccttctaccctgccctcatccgctacatgagctctgggcctgtggtggccatggtctgggaagggtacaatgtcgtccgcgcctcgagggccatgattggacacaccgactcggctgaggctgccccaggaaccataaggggtgacttcagcgtccacatcagcaggaatgtcatccacgccagcgactccgtggagggggcccagcgggagatccagctgtggttccagagcagtgagctggtgagctgggcagacgggggccagcacagcagcatccacccagcctgaggctcaagctgcccttaccaccccatcccccacgcaggaccaactacctccgtcagcaagaacccaagcccacatccaaacctgcctgtcccaaaccacttacttccctgttcacctctgccccaccccagcccagaggagtttgagccaccaacttcagtgcctttctgtaccccaagccagcacaagattggaccaatcctttttgcaccaaagtgccggacaacctttgtggtgggggggggtcttcacattatcataacctcttaaggggggtaatctggccanggnggatattnatcccgntggaaaancnttatgggtgcaaagagtggcacaacaacaaaaaaaaacacttttcgagaaggaggtgtagggcaa

SEQ ID NO: 362449 - DNA, 1180 bp, Homo sapiens
ctcacagcggccgggcgggccgggcgtcatgggcggcctcttctggcgctccgcgctgcgggggctgcgctgcggcccgcgggccccgggcccgagcctgctagtgcgccacggctcggcgtcccctccagaggaggacggctggggcggagctcagcgctgaccctgggtctggaagcgacaggccttgaaactccacagcagcacaggccccgtctcctggctcggacagaaccctgctaccttccctcttcaatcttcaggcccctttttgtccgtgtttccaggctcaccggagggccctcctggacccgggagcggaccctggtggcggtgaagcccgatggcgtgcaacggcggctcgttggggacgtgatccagcgctttgagaggcggggcttcacgctggtggggatgaagatgctgcaggcaccagagagcgtccttgccgagcactaccaggacctgcggaggaagcccttctaccctgccctcatccgctacatgagctctgggcctgtggtggccatggtctgggaagggtacaatgtcgtccgcgcctcgagggccatgattggacacaccgactcggctgaggctgccccaggaaccataaggggtgacttcagcgtccacatcagcaggaatgtcatccacgccagcgactccgtggagggggcccagcgggagatccagctgtggttccagagcagtgagctggtgagctgggcagacgggggccagcacagcagcatccacccagcctgaggctcaagctgcccttaccaccccatcccccacgcaggaccaactacctccgtcagcaagaacccaagcccacatccaaacctgcctgtcccaaaccacttacttccctgttcacctctgccccaccccagcccagaggagtttgagccaccaacttcagtgcctttctgtaccccaagccagcacaagattggaccaatcctttttgcaccaaagtgccggacaacctttgtggtgggggggggtcttcacattatcataacctctcctctaaaggggaggcattaaaattcactgtgcccagcacatgggtggtacactaattatgacttcccccagctctgaggtagaaatgacgcctttatgcaagttgtaaggagttgaacagtaaagaggaagttttgcacaccca

SEQ ID NO: 362450 - DNA, 1339 bp, Homo sapiens
ggggggtgggggtggggggagccgctccgctggggcgttcgctgaaggccaagttaggccagaatctgactgggacgtcaggccccaagtccccggccccgccgctgcccggcccccccagctgccacctcacaggacgatccatgtcccagggctccctccatcggctctgaaaagtgagccgccgcctgcaatgcccgcaccagccagcagcagagccccaggctacacaaggcgccctgcaaactgggttttgggggaacaaaccaaccagggggtcttcctcccgtgggcttcagccgcctgctggggttaacttttcctcctggcctggcggagcccctttggctctgtccagattctgtgggacatacagggtctgggctcctctggaaaccagggacccgatgccggagggtagcttggctctggagcagcctgggactataggaaggagggccctcctggacccgggagcggaccctggtggcggtgaagcccgatggcgtgcaacggcggctcgttggggacgtgatccagcgctttgagaggcggggcttcacgctggtggggatgaagatgctgcaggcaccagagagcgtccttgccgagcactaccaggacctgcggaggaagcccttctaccctgccctcatccgctacatgagctctgggcctgtggtggccatggtctgggaagggtacaatgtcgtccgcgcctcgagggccatgattggacacaccgactcggctgaggctgccccaggaaccataaggggtgacttcagcgtccacatcagcaggaatgtcatccacgccagcgactccgtggagggggcccagcgggagatccagctgtggttccagagcagtgagctggtgagctgggcagacgggggccagcacagcagcatccacccagcctgaggctcaagctgcccttaccaccccatcccccacgcaggaccaactacctccgtcagcaagaacccaagcccacatccaaacctgcctgtcccaaaccacttacttccctgttcacctctgccccaccccagcccagaggagtttgagccaccaacttcagtgcctttctgtaccccaagccagcacaagattggaccaatcctttttgcaccaaagtgccggacaacctttgtggtgggggggggtcttcacattatcataacctctcctctaaaggggaggcattaaaattcactgtgcccagcacatgggtggtacactaattatgacttcccccagctctgaggtagaaatgacgcctttatgcaagttgtaaggagttgaacagtaaagaggaagttttgcacaccca

SEQ ID NO: 362451 - DNA, 1113 bp, Homo sapiens
ctcacagcggccgggcgggccgggcgtcatgggcggcctcttctggcgctccgcgctgcgggggctgcgctgcggcccgcgggccccgggcccgagcctgctagtgcgccacggctcgggagggccctcctggacccgggagcggaccctggtggcggtgaagcccgatggcgtgcaacggcggctcgttggggacgtgatccagcgctttgagaggcggggcttcacgctggtggggatgaagatgctgcaggcaccagagagcgtccttgccgagcactaccaggacctgcggaggaagcccttctaccctgccctcatccgctacatgagctctgggcctgtggtggccatggtctgggaagggtacaatgtcgtccgcgcctcgagggccatgattggacacaccgactcggctgaggctgccccaggaaccataaggggtgacttcagcgtccacatcagcagtcacaggcttgctcccctagacagagggcaacgggagcagcagatggtccctgggattcctcagggtgcacatgaagcctgagcctcacattgctcctgtcctggcacagaatgtcatccacgccagcgactccgtggagggggcccagcgggagatccagctgtggttccagagcagtgagctggtgagctgggcagacgggggccagcacagcagcatccacccagcctgaggctcaagctgcccttaccaccccatcccccacgcaggaccaactacctccgtcagcaagaacccaagcccacatccaaacctgcctgtcccaaaccacttacttccctgttcacctctgccccaccccagcccagaggagtttgagccaccaacttcagtgcctttctgtaccccaagccagcacaagattggaccaatcctttttgcaccaaagtgccggacaacctttgtggtgggggggggtcttcacattatcataacctctcctctaaaggggaggcattaaaattcactgtgcccagcacatgggtggtacactaattatgacttcccccagctctgaggtagaaatgacgcctttatgcaagttgtaaggagttgaacagtaaagaggaagttttgcacaccca

SEQ ID NO: 362452 - DNA, 1066 bp, Homo sapiens
ggggggtgggggtggggggagccgctccgctggggcgttcgctgaaggccaagttaggccagaatctgactgggacgtcaggccccaagtccccggccccgccgctgcccggcccccccagctgccacctcacaggacgatccatgtcccagggctccctccatcggctctgaaaagtgagccgccgcctgcaatgcccgcaccagccagcagcagagccccaggctacacaaggcgccctgcaaactgggttttgggggaacaaaccaaccagggggtcttcctcccgtgggcttcagccgcctgctggggttaacttttcctcctggcctggcggagcccctttggctctgtccagattctgtgggacatacagggtctgggctcctctggaaaccagggacccgatgccggagggtagcttggctctggagcagcctgggactataggaaggagggccctcctggacccgggagcggaccctggtggcggtgaagcccgatggcgtgcaacggcggctcgttggggacgtgatccagcgctttgagaggcggggcttcacgctggtggggatgaagatgctgcaggcaccagagagcgtccttgccgagcactaccaggacctgcggaggaagcccttctaccctgccctcatccgctacatgagctctgggcctgtggtggccatggtctgggaagggtacaatgtcgtccgcgcctcgagggccatgattggacacaccgactcggctgaggctgccccaggaaccataaggggtgacttcagcgtccacatcagcaggaatgtcatccacgccagcgactccgtggagggggcccagcgggagatccagctgtggttccagagcagtgagctggtgagctgggcagacgggggccagcacagcagcaactccatgcaaaccatccaaaagaccaccacccgccggatagtggatggcaaagtggtgtctgagaccaatgacaccaaagttttgaggcattaagccagcagaagcagggtaccctttggggagcaggaggccaataaaaagtaaagagttc

SEQ ID NO: 362453 - DNA, 1049 bp, Homo sapiens
ggggggtgggggtggggggagccgctccgctggggcgttcgctgaaggccaagttaggccagaatctgactgggacgtcaggccccaagtccccggccccgccgctgcccggcccccccagctgccacctcacaggacgatccatgtcccagggctccctccatcggctctgaaaagtgagccgccgcctgcaatgcccgcaccagccagcagcagagccccaggctacacaaggcgccctgcaaactgggttttgggggaacaaaccaaccagggggtcttcctcccgtgggcttcagccgcctgctggggttaacttttcctcctggcctggcggagcccctttggctctgtccagattctgtgggacatacagggtctgggctcctctggaaaccagggacccgatgccggagggtagcttggctctggagcagcctgggactataggaaggagggccctcctggacccgggagcggaccctggtggcggtgaagcccgatggcgtgcaacggcggctcgttggggacgtgatccagcgctttgagaggcggggcttcacgctggtggggatgaagatgctgcaggcaccagagagcgtccttgccgagcactaccaggacctgcggaggaagcccttctaccctgccctcatccgctacatgagctctgggcctgtggtggccatggtctgggaagggtacaatgtcgtccgcgcctcgagggccatgattggacacaccgactcggctgaggctgccccaggaaccataaggggtgacttcagcgtccacatcagcagaacccaagcccacatccaaacctgcctgtcccaaaccacttacttccctgttcacctctgccccaccccagcccagaggagtttgagccaccaacttcagtgcctttctgtaccccaagccagcacaagattggaccaatcctttttgcaccaaagtgccggacaacctttgtggtgggggggggtcttcacattatcataacctctcctctaaaggggaggcattaaaattcactgtgcccagca

SEQ ID NO: 362454 - DNA, 279 bp, Homo sapiens
aatgtgataggtgttagcataaaattcctaccaaataatcaaatgaaaatattttcacacgagctaaaaaaaaaaaaaaatctattaataggattaaaaaccaaaacaaaacttccatatgtaagtgtgttcttcacataagaaagagcatctctgcaataggaatacataccaaaataccatcttctgttatccaaaaaaaacaactaagttacggctcacatgcaaattccaacccacctttggtaactaaatgggctttggtcacatgctaaatac

SEQ ID NO: 362455 - DNA, 392 bp, Homo sapiens
ggaataatgacaaaaagcagtctatccatgttcagtgtagaggcagccatcctaggcctaactacatagtacatgtcagcaacaatgtagcattttcttaaaatttttttttgcagcccggtgctcatgcctgtaatcccagcactttgggaggctgagtggggcggatcatgaggtcaggagatcgagaccatcctggctaacacagtgaaaccccttctctactaaaaatagaaaaaattagctgggcgctgtggcgggcgcccgtagtcccagctactatcgggaggctgaggcaggagaatggcgtgaacccgggaggtggagcttgcagtgagccaagatcgcaccactgcactccagcctgggcgatagagcgagaccccgtctca

SEQ ID NO: 362456 - DNA, 839 bp, Homo sapiens
tccgggcgtcggggcttcggcgggcattagcagcagctgagaggcctgtgagaggttctggggcgccaccgcagtcattctgttcagcgggtatagggttcttggataaacaagctctgacgatcattcccaaacaagagttcaaaaatgttttccgcaatagcaatgatatggacggaaaggatgccctcctgcaccgatgcctctggaggaccacattttccattcagagacacgctcagcactcaactcatgctgcacacccggccgaccccagtaccgacactcacagaatgcaggttggagagagatgccgacttccgaggaggtgtcttcttcggactgaacgtattcccaaagaaaggcatctttggcctgatgaaagcaaagccagtgctcccttctcctagggtcagaaaaagtcaggggtacaagcagctggatcactgaccttatgccattgtcttcaaatcttgaagacatacattttatcatgtggctactaacgatcctggtgctatggtttgaatgtccccaccaaaactcatgttgaaattgaattgccattgtttaacagtataaggggtgactgggccatgtgagctctgctctcatgaatggattaatgccattgtcatggagtaggttagttttctctggcgtgggctcctggcaaaaggatgagttctgctgccatgctgtctgtctcatgcacttgctcaccatgtgagccttctgcctcacacaggatgaccctcaccagatacttgcaccatgctcttggacttcccagtctccagaactgtgagccaaataaacttcttttctttataaattac

SEQ ID NO: 362457 - DNA, 897 bp, Homo sapiens
tccgggcgtcggggcttcggcgggcattagcagcagctgagaggcctgtgagaggttctggggcgccaccgcagtcattctgttcagcgggtatagggctcctctaggcccagtgggttgctggatttttaacagccacaagaaaccaacactaatgcagtgtgagcccctcagctggtctgtactgggcactgattaatgcctacttggtatgagacacttccaagccatgagccggctctacccctcttcctggaatgccttcatctaacctctattcctgccattatccttccacattcagctcagatatcccttcctctgggaagctctcccgacttgacagaaataacttctccctcgtgtgctgtgcagatcctgtgcagactccaactgggtccttatgtaattatgcttacggtcggtccacctgcctctacactgtgagggcaggaactgtgtcttgttccttgcgtgtggctttggatgcaaagcaacgtacctggccaaactggcattgaggagatatctgttggattaagtgactcgaggtggagcctccccaaaaggagaagctaggcctctcttccccatcacctgcctcaccatgtctaataagatgtccactttcagccgcaagagattgttctcttcctccaactgctggttccgcctgcgaaggcgctgaacctccctccggtccacaccgccactaacccctgtctctggaggaaggacagaaccagttaaagggggatttcctcctacaatcttgtttgacaaaatggcaggaagtgcagctcacctgctatccactggccattttcaaacttcaggctttgccctgccaggttcatagtcggggatccgtattccaagcccagctccacctcccgg

SEQ ID NO: 362458 - DNA, 1231 bp, Homo sapiens
ggtttgtttgttttctgagacacggtctcgctctgtcggccaggctgggtgcttttcttgtactaactcactatgaggtagatactacgattatgctcatttttaaaaaaaaacatccaggccgggcgtggtggctcatgcccagcctagtccttttttaaaaaaaaaaaaaagatggcatcttactttgcagccaaggctgctctcaaactcctgaggttaagccatcctcctgtcttagcctcccaagtagctgggactacaggggtgcaccaccacaattagctattatgccatttattgctgaagaaattaagttacagagcagttagtcagtagcagagctgggtgaggaacccaggccattttgctctggagtgtgtgctcttaaccactacagtgtatgctctcctgcctctgaaccttcacaggctcctctaggcccagtgggttgctggatttttaacagccacaagaaaccaacactaatgcagtgtgagcccctcagctggtctgtactgggcactgattaatgcctacttggtatgagacacttccaagccatgagccggctctacccctcttcctggaatgccttcatctaacctctattcctgccattatccttccacattcagctcagatatcccttcctctgggaagctctcccgacttgacagaaataacttctccctcgtgtgctgtgcagatcctgtgcagactccaactgggtccttatgtaattatgcttacggtcggtccacctgcctctacactgtgagggcaggaactgtgtcttgttccttgcgtgtggctttggatgcaaagcaacgtacctggccaaactggcattgaggagatatctgttggattaagtgactcgaggtggagcctccccaaaaggagaagctaggcctctcttccccatcacctgcctcaccatgtctaataagatgtccactttcagccgcaagagattgttctcttcctccaactgctggttccgcctgcgaaggcgctgaacctccctccggtccacaccgccactaacccctgtctctggaggaaggacagaaccagttaaagggggatttcctcctacaatcttgtttgacaaaatggcaggaagtgcagctcacctgctatccactggccattttcaaacttcaggctttgccctgccaggttcatagtcggggatccgtattccaagcccagctccacctcccgg

SEQ ID NO: 362459 - DNA, 2180 bp, Homo sapiens
ttctagccagtgacacttgggggcgggggtgacagctgagttggtgttccccttcattcgtttagttcagcgcgttgaagcgctcactgtgtcctaggcagacaccgtgctgtgcgcggggatcacagttatctagttcctctcgcgaggactccgagggacaggcagggtgctgcggagcgcacaggaaaggacctgaccctgtcgcagggaaggaaggtgatgcttaagctgagctctgaggaatgatgaagaatgagctcggcgaagggggtgctggtgtttgatgcagggctcagagatggcctgatatgaaggagtcacgcctcccgcctcccggagctgcccagtggctgccttgtccttcaagtgcaggagctggttcaaatgtcaggaatggaagccactgtgaccatcccaatctggcaaaacaagccacatggggctgctcgaagtgtagtaagaagaattgggaccaacctacccttgaagccgtgtgcccgggcgtcctttgagaccctgcccaacatctctgacctgtgtttgagagatgtgcccccagtccctaccctggctgacatcgcctggattgctgcggatgaagaggagacatatgcccgggtcaggagtgatacgcgccccctgaggcacacctggaaacccagccctctgattgtcatgcagcgcaatgcctctgttcccaacctgcgtgggtccgaggagaggcttctggccctgaagaagccagctctgccagccctaagccgcactactgagctgcaggacgagctgagccacttgcgcagccagattgcaaagatagtggcagctgatgcagcttcggcttcattaacgccagatttcttatctccaggaagttcaaatgtctcttctcccttaccttgttttggatcctcattccactctacaacttcctttgtcattagtgacatcaccgaggagacagaggtggaggtccctgagcttccatcagtccccctgctttgttctgccagccctgaatgttgcaaaccagaacacaaagctgcctgcagttcgtctgaagaggatgactgcgtctctttgtccaaggccagcagctttgcagacatgatgggtatcctgaaggactttcaccgaatgaaacagagtcaagatctgaaccggagtttattgaaggaggaagaccctgctgtgcttatctctgaggtcctaaggaggaagtttgctctaaaggaagaagatatcagtagaaaaggaaattgacaaccctcagctctgcaaactcagtctcatgctcctggaataccttcaatagctgccttcctcaccgcagatgtttctgcctcttaaggatagatcttctgcaacagtcttgctgacaagctagagcttggactgaaagagaagagctggattatatatttcccagacttcaaaccctagcagaagctaaggcttgtgatttgacctgagacatttgtttcaggtaatcgtgtagaatgaagtatcttagtttaaagggtaagagagaagttgtttctggtttttccttgcccctgtgtgaaaataggtcctaaatgactgacttcactgcattagaccctatagctggtctcacaagacactttgtgcccagctgtcactcactctcagcagcttccttgcagcagagcagggctgaggggaaggggctatgaatgtttgtatacgtgttcacagggcacggaaaatcttatgctgctccgtcataaacctacaccaatgcccagcaatcaccctcctcacttccttgtctagatgtagaggtcaggctgctgaaccagccaacacatgggctactgctgggaagcctgggctgttttttttcttaaacacattttatattactgaacaaccaaatctaccctccacggccctgaggccttatcagttccactgattaaaaactttctcttccacggactttaagcccggtaggaaagagagaggaggagggggaaagagcaaaccatctttcttccaggcccttgactgctcctttgggctgggccaaggtttgtatgtaccacaccatgcatgactcagatgccctcaggtccctttctctatggtatgtatactgcttgtgtttgggttgaagcactacctgacattaaaggaaggacttggagagagaa

SEQ ID NO: 362460 - DNA, 2103 bp, Homo sapiens
  misc_feature (1)..(2): n is a, c, g, or t
  misc_feature (203)..(203): n is a, c, g, or t
nngagtccccgaagggtagttgctcgtcggagttccccagcaaacagtgaccaagccagacctcaggcttctagtttcggcttcgctgcttgacgggccgggctgccccgccgcgcattctgagacctggccgcggctcggaggcttccgcgcactcgggtccgggtcctgtgggtccaagggccgctgggcaggcggcgagnacttggccgaccttggcccagatggcctgatatgaaggagtcacgcctcccgcctcccggagctgcccagtggctgccttgtccttcaagtgcaggagctggttcaaatgtcaggaatggaagccactgtgaccatcccaatctggcaaaacaagccacatggggctgctcgaagtgtagtaagaagaattgggaccaacctacccttgaagccgtgtgcccgggcgtcctttgagaccctgcccaacatctctgacctgtgtttgagagatgtgcccccagtccctaccctggctgacatcgcctggattgctgcggatgaagaggagacatatgcccgggtcaggagtgatacgcgccccctgaggcacacctggaaacccagccctctgattgtcatgcagcgcaatgcctctgttcccaacctgcgtgggtccgaggagaggcttctggccctgaagaagccagctctgccagccctaagccgcactactgagctgcaggacgagctgagccacttgcgcagccagattgcaaagatagtggcagctgatgcagcttcggcttcattaacgccagatttcttatctccaggaagttcaaatgtctcttctcccttaccttgttttggatcctcattccactctacaacttcctttgtcattagtgacatcaccgaggagacagaggtggaggtccctgagcttccatcagtccccctgctttgttctgccagccctgaatgttgcaaaccagaacacaaagctgcctgcagttcgtctgaagaggatgactgcgtctctttgtccaaggccagcagctttgcagacatgatgggtatcctgaaggactttcaccgaatgaaacagagtcaagatctgaaccggagtttattgaaggaggaagaccctgctgtgcttatctctgaggtcctaaggaggaagtttgctctaaaggaagaagatatcagtagaaaaggaaattgacaaccctcagctctgcaaactcagtctcatgctcctggaataccttcaatagctgccttcctcaccgcagatgtttctgcctcttaaggatagatcttctgcaacagtcttgctgacaagctagagcttggactgaaagagaagagctggattatatatttcccagacttcaaaccctagcagaagctaaggcttgtgatttgacctgagacatttgtttcaggtaatcgtgtagaatgaagtatcttagtttaaagggtaagagagaagttgtttctggtttttccttgcccctgtgtgaaaataggtcctaaatgactgacttcactgcattagaccctatagctggtctcacaagacactttgtgcccagctgtcactcactctcagcagcttccttgcagcagagcagggctgaggggaaggggctatgaatgtttgtatacgtgttcacagggcacggaaaatcttatgctgctccgtcataaacctacaccaatgcccagcaatcaccctcctcacttccttgtctagatgtagaggtcaggctgctgaaccagccaacacatgggctactgctgggaagcctgggctgttttttttcttaaacacattttatattactgaacaaccaaatctaccctccacggccctgaggccttatcagttccactgattaaaaactttctcttccacggactttaagcccggtaggaaagagagaggaggagggggaaagagcaaaccatctttcttccaggcccttgactgctcctttgggctgggccaaggtttgtatgtaccacaccatgcatgactcagatgccctcaggtccctttctctatggtatgtatactgcttgtgtttgggttgaagcactacctgacattaaaggaaggacttggagagagaa

SEQ ID NO: 362461 - DNA, 399 bp, Homo sapiens
ttctagccagtgacacttgggggcgggggtgacagctgagttggtgttccccttcattcgtttagttcagcgcgttgaagcgctcactgtgtcctaggcagacaccgtgctgtgcgcggggatcacagttatctagttcctctcgcgaggactccgagggacaggcagggtgctgcggagcgcacaggaaaggacctgaccctgtcgcagggaaggaaggtgatgcttaagctgagctctgaggaatgatgaagaatgagctcggcgaagggggtgctggtgtttgatgcagggctcagaggtgggcccagtgttgggggttgagggccagtgtggctggagggcaagggggagagcaggagggctggctgcgaagcgtgcaggccttggtgctcagtg

SEQ ID NO: 362462 - DNA, 4164 bp, Homo sapiens
ccccgccccgctctttcgcttcccgggccgccggcagccgccgccagccgcagccatgggccgggcccggccgggccaacgcgggccgcccagccccggccccgccgcgcagcctcccgcgccaccgcgccgccgcgcccgttccctggcgctgctcggagccctgctggccgccgccgctgccgccgccgtccgggtctgcgcccgccacgccgaggcccaggcggccgcgcggcaggaactggcgctgaagaccctggggacagatggcctttttctcttttcctccttggacactgacggggatatgtacatcagccctgaggagttcaaacccattgctgagaagctaacagggtcaactcccgcggccagctacgaggaggaggagttgccccctgaccctagcgaggagacgctcaccatagaagcccgattccagcctctgctcccggagaccatgaccaagagcaaagatggcttcctaggggtctcccgcctcgccctgtccggcctccgaaactggacagccgccgcctcaccaagtgcagtgtttgccacccgccacttccagcccttccttcccccgccaggccaggagctgggtgagccctggtggatcatccccagtgagctgagcatgttcactggctacctgtccaacaaccgcttctatccaccgccgcccaagggcaaggagggagctgtggcctgcctgactgccatcagcgacttctactacactgtgatgttccggatccatgccgagttccagctcagtgagccgcccgacttccccttttggttctcccctgctcagttcaccggccacatcatcctctccaaagacgccacccacgtccgcgacttccggctcttcgtgcccaaccacaggtctctgaatgtggacatggagtggctttacggggccagtgaaagcagcaacatggaggtggacatcggctacataccccagatggagctggaggccacgggcccctctgtgccctccgtgatcctggatgaggatggcagcatgatcgacagccacctgccttcaggggagcccctgcagtttgtgtttgaggagatcaagtggcagcaggagctgagctgggaggaggctgcccggcgcctggaggtggccatgtaccccttcaagaaggtctcctacttgccgttcactgaggccttcgaccgagccaaggctgagaacaagctggtgcactcaatcctgctgtggggggccctggatgaccagtcctgctgaggttcagggcggactctccgggagactgtcctggaaagttcgcccatcctcaccctgctcaacgagagcttcatcagcacctggtccctggtgaaggagctggaggaactgcagaacaaacaggagaactcgtcccaccagaagctggctggcctgcacctggagaagtacagcttccccgtggagatgatgatctgcctgcccaatggcaccgtggtccatcacatcaatgccaactacttcttggacatcacctccgtgaagcccgaggaaatcgagagcaatctcttcagcttctcatccacctttgaagacccgtccacggccacctacatgcagttcctgaaggagggactccggcgtggcctgcccctcctccagccctagagtgcctggacgggatctgatgcacaggcccccacgcctcagagccagagtggtcctcagcccatttcagactgcagatgccgcccactcccaccccactcctaggctgccttggagggtacaagatccactgagggtggccaccacagccttggctccatggtggcgggtagacaagggatgcctgggctgactgggcagaggaacctctagctctgactgtcactcggctctccctacccatttggctctggaagctgcttggcccccccagatcagggcctgggtgaactccctggacctttcctagccagccgcacagtctaggcccttgtggggtgaagaatggagggaggagcaggctaggaagacggggccaccaccctctccttgctttcagcccttcccacaggaaacatcaagaagccccagccaggaggggccaggctgccaaggcggctcccctgtttatctagagccttcgttcctggccataccccggactgccctcctgtgcctgatgtccccagctggggtcagtctcaacaggagccagtcttctggagcctctgggcagaaccctccatcagagtggaaatcagacgggaccccctgcagcttccctgaccacgccactgaccagctatctggggaagtttactgtgaaggggtttctgcctttagcaatggggttcactaagggggttcccgaggcccagggccaaggcactcccaccgcctaccttagcacagggtctctgcaggactgcgggagccagcgctcctgccgcccctcttgcccctcagaccttgcatccacagaagcacaacccagccaaacaccacagccttctccagagccggcactgtcccggcaaccaggggtgccccaggctagctcttctacctctggggcaccacggactccccttggccactcttgggactttggtccacgtcctgagccactgaccacggccagtctctctttttatatgtgcagaaaagtgtttttacacaaactttctcatggtttgtaggtatttttttataaccccagtgctgaggagaaaggaggggcagtggcttccccggcagcagccccatgatggctgaatccgaaatcctcgatgggtccagcttgatgtctttgcagctgcacctatgggaagaagtagtcctctcttccttctcctcttcagctttttaaaaacagtcctcagaggatccatgatccccagcactgtcccatcctccacaaaggcccacaggcatgcctgtactctctttcattaaggtcttgaagtcaggctgccccctccccagcccccagttctctccccaccccctcaccccacccggggctcactcagcctggcagaggaagaaggaaggcagacatctccgcagccactcctgggccttttatgtgccgagttaccccacttgccttgggcgtgtccactgagccttccccagccagtcttgttctcaattttgttttgttttgttttgttttgagacggagtcttgctctgtcacccaggctggagtgctatggctcgatcttggctcactgcaacctccacctcccaggttcaagcaattctcttgccccagcctcccgagtagctgggattacaggtgcatgccaccatggctggctaatttttgtatttttagtagagatggggtttcaccatattggtcaggctgatctggaactcctgacctcaggtgatccacctgcctcagcctcccaaagtgctgggattacaggcgtgagcaatcgtgcccagccttgttcttaattttgtatcatccagtcatcgctaatattacacgcaccttctcacttaatcctcacgacaagcctgtgaggcagatgctcattgttcccatcttgatgaaacttgagtctcagggaagtgaagtgacttgcccagggtcactcaggtagagttgagattcaaacccacatgtggctccaaagtctgcatctggatttgggggtgttttttggcatggcaccctcacctctctccctgcctgttttccccaaagtggaaaggaaggcctttcaaaccagagtgtctcactcccctctgacctccagaccagatggggcatgagccagccagctcagccaggctccctgtgtcctgggaggaagtgtccccatcccccatgccccttatggggagggagggcgtctgatgctctctctctgcctcccccccatcctgtcaggcacaggtgacgggggcagcccatgcgagcccttctcctgctgctctgggagggccagttccacattgagccagcctggtcccatggaaaatgatggcctgggctttctgaggccttatctgatgcctctgcagttcatgtcccccaccaggcctcgaggctcagggtgggagagggccccgggctgccctgtcactcctctaacacttccctcccctgtccccaacatgccctgtaataaaattagagaagactaa

SEQ ID NO: 362463 - DNA, 3550 bp, Homo sapiens
  misc_feature (219)..(219): n is a, c, g, or t
gggctaagacgtaaatcgcggagctgtcgacgcttggactttgtgaagacccgctttgcccctcaggtagctgggggctggctgattgaccatcagcgacttctactacacggtgatgtccggatcgatgccgagtccagttcagctgagtccgtccgagttccccttaggttctcctccatgagtcatgttacagccggccagatcatgcctcttacncagctaggacgcgcaagccacgtgcggtacttgctgggttcttctgtgcccaaggcactaggtctctgaatgtggacatggagtggctttacggggccagtgaaagcagcaacatggaggtggacatcggctacataccccagatggagctggaggccacgggcccctctgtgccctccgtgatcctggatgaggatggcagcatgatcgacagccacctgccttcaggggagcccctgcagtttgtgtttgaggagatcaagtggcagcaggagctgagctgggaggaggctgcccggcgcctggaggtggccatgtaccccttcaagaaggtctcctacttgccgttcactgaggccttcgaccgagccaaggctgagaacaagctggtgcactcaatcctgctgtggggggccctggatgaccagtcctgctgaggttcagggcggactctccgggagactgtcctggaaagttcgcccatcctcaccctgctcaacgagagcttcatcagcacctggtccctggtgaaggagctggaggaactgcagaacaaacaggagaactcgtcccaccagaagctggctggcctgcacctggagaagtacagcttccccgtggagatgatgatctgcctgcccaatggcaccgtggtccatcacatcaatgccaactacttcttggacatcacctccgtgaagcccgaggaaatcgagagcaatctcttcagcttctcatccacctttgaagacccgtccacggccacctacatgcagttcctgaaggagggactccggcgtggcctgcccctcctccagccctagagtgcctggacgggatctgatgcacaggcccccacgcctcagagccagagtggtcctcagcccatttcagactgcagatgccgcccactcccaccccactcctaggctgccttggagggtacaagatccactgagggtggccaccacagccttggctccatggtggcgggtagacaagggatgcctgggctgactgggcagaggaacctctagctctgactgtcactcggctctccctacccatttggctctggaagctgcttggcccccccagatcagggcctgggtgaactccctggacctttcctagccagccgcacagtctaggcccttgtggggtgaagaatggagggaggagcaggctaggaagacggggccaccaccctctccttgctttcagcccttcccacaggaaacatcaagaagccccagccaggaggggccaggctgccaaggcggctcccctgtttatctagagccttcgttcctggccataccccggactgccctcctgtgcctgatgtccccagctggggtcagtctcaacaggagccagtcttctggagcctctgggcagaaccctccatcagagtggaaatcagacgggaccccctgcagcttccctgaccacgccactgaccagctatctggggaagtttactgtgaaggggtttctgcctttagcaatggggttcactaagggggttcccgaggcccagggccaaggcactcccaccgcctaccttagcacagggtctctgcaggactgcgggagccagcgctcctgccgcccctcttgcccctcagaccttgcatccacagaagcacaacccagccaaacaccacagccttctccagagccggcactgtcccggcaaccaggggtgccccaggctagctcttctacctctggggcaccacggactccccttggccactcttgggactttggtccacgtcctgagccactgaccacggccagtctctctttttatatgtgcagaaaagtgtttttacacaaactttctcatggtttgtaggtatttttttataaccccagtgctgaggagaaaggaggggcagtggcttccccggcagcagccccatgatggctgaatccgaaatcctcgatgggtccagcttgatgtctttgcagctgcacctatgggaagaagtagtcctctcttccttctcctcttcagctttttaaaaacagtcctcagaggatccatgatccccagcactgtcccatcctccacaaaggcccacaggcatgcctgtactctctttcattaaggtcttgaagtcaggctgccccctccccagcccccagttctctccccaccccctcaccccacccggggctcactcagcctggcagaggaagaaggaaggcagacatctccgcagccactcctgggccttttatgtgccgagttaccccacttgccttgggcgtgtccactgagccttccccagccagtcttgttctcaattttgttttgttttgttttgttttgagacggagtcttgctctgtcacccaggctggagtgctatggctcgatcttggctcactgcaacctccacctcccaggttcaagcaattctcttgccccagcctcccgagtagctgggattacaggtgcatgccaccatggctggctaatttttgtatttttagtagagatggggtttcaccatattggtcaggctgatctggaactcctgacctcaggtgatccacctgcctcagcctcccaaagtgctgggattacaggcgtgagcaatcgtgcccagccttgttcttaattttgtatcatccagtcatcgctaatattacacgcaccttctcacttaatcctcacgacaagcctgtgaggcagatgctcattgttcccatcttgatgaaacttgagtctcagggaagtgaagtgacttgcccagggtcactcaggtagagttgagattcaaacccacatgtggctccaaagtctgcatctggatttgggggtgttttttggcatggcaccctcacctctctccctgcctgttttccccaaagtggaaaggaaggcctttcaaaccagagtgtctcactcccctctgacctccagaccagatggggcatgagccagccagctcagccaggctccctgtgtcctgggaggaagtgtccccatcccccatgccccttatggggagggagggcgtctgatgctctctctctgcctcccccccatcctgtcaggcacaggtgacgggggcagcccatgcgagcccttctcctgctgctctgggagggccagttccacattgagccagcctggtcccatggaaaatgatggcctgggctttctgaggccttatctgatgcctctgcagttcatgtcccccaccaggcctcgaggctcagggtgggagagggccccgggctgccctgtcactcctctaacacttccctcccctgtccccaacatgccctgtaataaaattagagaagactaa

SEQ ID NO: 362464 - DNA, 1985 bp, Homo sapiens
agcggtccggggggcgggtcagcggaagtgagggcggttgaggctgggcggcccaaggtggaaggaggggccgtgaggtgagagagtccgggagcccgagcttgagatggcctgatatgaaggagtcacgcctcccgcctcccggagctgcccagtggctgccttgtccttcaagtgcaggagctggttcaaatgtcaggaatggaagccactgtgaccatcccaatctggcaaaacaagccacatggggctgctcgaagtgtagtaagaagaattgggaccaacctacccttgaagccgtgtgcccgggcgtcctttgagaccctgcccaacatctctgacctgtgtttgagagatgtgcccccagtccctaccctggctgacatcgcctggattgctgcggatgaagaggagacatatgcccgggtcaggagtgatacgcgccccctgaggcacacctggaaacccagccctctgattgtcatgcagcgcaatgcctctgttcccaacctgcgtgggtccgaggagaggcttctggccctgaagaagccagctctgccagccctaagccgcactactgagctgcaggacgagctgagccacttgcgcagccagattgcaaagatagtggcagctgatgcagcttcggcttcattaacgccagatttcttatctccaggaagttcaaatgtctcttctcccttaccttgttttggatcctcattccactctacaacttcctttgtcattagtgacatcaccgaggagacagaggtggaggtccctgagcttccatcagtccccctgctttgttctgccagccctgaatgttgcaaaccagaacacaaagctgcctgcagttcgtctgaagaggatgactgcgtctctttgtccaaggccagcagctttgcagacatgatgggtatcctgaaggactttcaccgaatgaaacagagtcaagatctgaaccggagtttattgaaggaggaagaccctgctgtgcttatctctgaggtcctaaggaggaagtttgctctaaaggaagaagatatcagtagaaaaggaaattgacaaccctcagctctgcaaactcagtctcatgctcctggaataccttcaatagctgccttcctcaccgcagatgtttctgcctcttaaggatagatcttctgcaacagtcttgctgacaagctagagcttggactgaaagagaagagctggattatatatttcccagacttcaaaccctagcagaagctaaggcttgtgatttgacctgagacatttgtttcaggtaatcgtgtagaatgaagtatcttagtttaaagggtaagagagaagttgtttctggtttttccttgcccctgtgtgaaaataggtcctaaatgactgacttcactgcattagaccctatagctggtctcacaagacactttgtgcccagctgtcactcactctcagcagcttccttgcagcagagcagggctgaggggaaggggctatgaatgtttgtatacgtgttcacagggcacggaaaatcttatgctgctccgtcataaacctacaccaatgcccagcaatcaccctcctcacttccttgtctagatgtagaggtcaggctgctgaaccagccaacacatgggctactgctgggaagcctgggctgttttttttcttaaacacattttatattactgaacaaccaaatctaccctccacggccctgaggccttatcagttccactgattaaaaactttctcttccacggactttaagcccggtaggaaagagagaggaggagggggaaagagcaaaccatctttcttccaggcccttgactgctcctttgggctgggccaaggtttgtatgtaccacaccatgcatgactcagatgccctcaggtccctttctctatggtatgtatactgcttgtgtttgggttgaagcactacctgacattaaaggaaggacttggagagagaa

SEQ ID NO: 362465 - DNA, 2339 bp, Homo sapiens
agcggtccggggggcgggtcagcggaagtgagggcggttgaggctgggcggcccaaggtggaaggaggggccgtgaggtgagagagtccgggagcccgagcttgagatggcctgatatgaaggagtcacgcctcccgcctcccggagctgcccagtggctgccttgtccttcaagtgcaggagctggttcaaatgtcaggaatggaagccactgtgaccatcccaatctggcaaaacaagccacatggggctgctcgaagtgtagtaagaagaattgggaccaacctacccttgaagccgtgtgcccgggcgtcctttgagaccctgcccaacatctctgacctgtgtttgagagatgtgcccccagtccctaccctggctgacatcgcctggattgctgcggatgaagaggagacatatgcccgggtcaggagtgatacgcgccccctgaggcacacctggaaacccagccctctgattgtcatgcagcgcaatgcctctgttcccaacctgcgtgggtccgaggagaggcttctggccctgaagaagccagctctgccagccctaagccgcactactgagctgcaggacgagctgagccacttgcgcagccagattgcaaagatagtggcagctgatgcagcttcggcttcattaacgccagatttcttatctccaggaagttcaaatgtctcttctcccttaccttgttttggatcctcattccactctacaacttcctttgtcattagtgacatcaccgaggagacagaggtggaggtccctgagcttccatcagtccccctgctttgttctgccagccctgaatgttgcaaaccagaacacaaagctgcctgcagttcgtctgaagaggatgactgcgtctctttgtccaaggccagcagctttgcagacatgatgggtatcctgaaggactttcaccgaatgaaacagagtcaagatctgaaccggagtttattgaaggaggaagaccctgctgtgcttatctctgaggtcctaaggaggaagtttgctctaaaggaagaagatatcagtagaaaaggaaattgacaaccctcagctctgcaaactcagtctcatgctcctggaataccttcaatagctgccttcctcaccgcagatgtttctgcctcttaaggatagatcttctgcaacagtcttgctgacaagctagagcttggactgaaagagaagagctggattatatatttcccagacttcaaaccctagcagaagctaaggcttgtgatttgacctgagacatttgtttcaggtaatcgtgtagaatgaagtatcttagtttaaagggtaagagagaagttgtttctggtttttccttgcccctgtgtgaaaataggtcctaaatgactgacttcactgcattagaccctatagctggtctcacaagacactttgtgcccagctgtcactcactctcagcagcttccttgcagcagagcagggctgaggggaaggggctatgaatgtttgtatacgtgttcacagggcacggaaaatcttatgctgctccgtcataaacctacaccaatgcccagcaatcaccctcctcacttccttgtctagatgtagaggtcaggctgctgaaccagccaacacatgggctactgctgggaagcctgggctgttttttttcttaaacacattttatattactgaacaaccaaatctaccctccacggccctgaggccttatcagttccactgattaaaaactttctcttccacggactttaagcccggtaggaaagagagaggaggagggggaaagagcaaaccatctttcttccaggcccttgactgctcctttgggctgggccaaggtttgtatgtaccacaccatgcatgactcagatgccctcaggtccctttctctatggtatgtatactgcttgtgtttgggttgaagcactacctgacattaaaggaaggacttggagagagaaaaaaaaaaaaaaaaaaaaaaacaaaaaaaaaaaaaaaaaagggggggccccaaaaaattcccccgcagggggccccaagtctaggcgcgcgttacccccagtttttgtgttgtcaacaagggggccccccccataagagggagggaggcgccgaattaaaaagcgacccagagagccacgcgggccgcaggggtttttcacaccaacgggctcgggagcggggggaaacacttcggctcaccggggagacaaccttgggggagaagagaaccccataactcgcgggggggggaggccacataggtggggcacaaagctccctcacggaggtttaacgagccccagggggaaatt

SEQ ID NO: 362466 - DNA, 3434 bp, Homo sapiens
ccccgccccgctctttcgcttcccgggccgccggcagccgccgccagccgcagccatgggccgggcccggccgggccaacgcgggccgcccagccccggccccgccgcgcagcctcccgcgccaccgcgccgccgcgcccgttccctggcgctgctcggagccctgctggccgccgccgctgccgccgccgtccgggtctgcgcccgccacgccgaggcccaggcggccgcgcggcaggaactggcgctgaagaccctggggacagatggcctttttctcttttcctccttggacactgacggggatatgtacatcagccctgaggagttcaaacccattgctgagaagctaacagggtcaactcccgcggccagctacgaggaggaggagttgccccctgaccctagcgaggagacgctcaccatagaagcccgattccagcctctgctcccggagaccatgaccaagagcaaagatggcttcctaggggtctcccgcctcgccctgtccggcctccgaaactggacagccgccgcctcaccaagtgcagtgtttgccacccgccacttccagcccttccttcccccgccaggccaggagctgggtgagccctggtggatcatccccagtgagctgagcatgttcactggctacctgtccaacaaccgcttctatccaccgccgcccaagggcaaggaggtcatcatccaccggctcctgagcatgttccaccctcggccctttgtgaagacccgctttgcccctcagggagctgtggcctgcctgactgccatcagcgacttctactacactgtgatgttccggatccatgccgagttccagctcagtgagccgcccgacttccccttttggttctcccctgctcagttcaccggccacatcatcctctccaaagacgccacccacgtccgcgacttccggctcttcgtgcccaaccacaggtctctgaatgtggacatggagtggctttacggggccagtgaaagcagcaacatggaggtggacatcggctacataccccagatggagctggaggccacgggcccctctgtgccctccgtgatcctggatgaggatggcagcatgatcgacagccacctgccttcaggggagcccctgcagtttgtgtttgaggagatcaagtggcagcaggagctgagctgggaggaggctgcccggcgcctggaggtggccatgtaccccttcaagaaggtctcctacttgccgttcactgaggccttcgaccgagccaaggctgagaacaagctggtgcactcaatcctgctgtggggggccctggatgaccagtcctgctgaggttcagggcggactctccgggagactgtcctggaaagttcgcccatcctcaccctgctcaacgagagcttcatcagcacctggtccctggtgaaggagctggaggaactgcagaacaaacaggagaactcgtcccaccagaagctggctggcctgcacctggagaagtacagcttccccgtggagatgatgatctgcctgcccaatggcaccgtgatggcctgatatgaaggagtcacgcctcccgcctcccggagctgcccagtggctgccttgtccttcaagtgcaggagctggttcaaatgtcaggaatggaagccactgtgaccatcccaatctggcaaaacaagccacatggggctgctcgaagtgtagtaagaagaattgggaccaacctacccttgaagccgtgtgcccgggcgtcctttgagaccctgcccaacatctctgacctgtgtttgagagatgtgcccccagtccctaccctggctgacatcgcctggattgctgcggatgaagaggagacatatgcccgggtcaggagtgatacgcgccccctgaggcacacctggaaacccagccctctgattgtcatgcagcgcaatgcctctgttcccaacctgcgtgggtccgaggagaggcttctggccctgaagaagccagctctgccagccctaagccgcactactgagctgcaggacgagctgagccacttgcgcagccagattgcaaagatagtggcagctgatgcagcttcggcttcattaacgccagatttcttatctccaggaagttcaaatgtctcttctcccttaccttgttttggatcctcattccactctacaacttcctttgtcattagtgacatcaccgaggagacagaggtggaggtccctgagcttccatcagtccccctgctttgttctgccagccctgaatgttgcaaaccagaacacaaagctgcctgcagttcgtctgaagaggatgactgcgtctctttgtccaaggccagcagctttgcagacatgatgggtatcctgaaggactttcaccgaatgaaacagagtcaagatctgaaccggagtttattgaaggaggaagaccctgctgtgcttatctctgaggtcctaaggaggaagtttgctctaaaggaagaagatatcagtagaaaaggaaattgacaaccctcagctctgcaaactcagtctcatgctcctggaataccttcaatagctgccttcctcaccgcagatgtttctgcctcttaaggatagatcttctgcaacagtcttgctgacaagctagagcttggactgaaagagaagagctggattatatatttcccagacttcaaaccctagcagaagctaaggcttgtgatttgacctgagacatttgtttcaggtaatcgtgtagaatgaagtatcttagtttaaagggtaagagagaagttgtttctggtttttccttgcccctgtgtgaaaataggtcctaaatgactgacttcactgcattagaccctatagctggtctcacaagacactttgtgcccagctgtcactcactctcagcagcttccttgcagcagagcagggctgaggggaaggggctatgaatgtttgtatacgtgttcacagggcacggaaaatcttatgctgctccgtcataaacctacaccaatgcccagcaatcaccctcctcacttccttgtctagatgtagaggtcaggctgctgaaccagccaacacatgggctactgctgggaagcctgggctgttttttttcttaaacacattttatattactgaacaaccaaatctaccctccacggccctgaggccttatcagttccactgattaaaaactttctcttccacggactttaagcccggtaggaaagagagaggaggagggggaaagagcaaaccatctttcttccaggcccttgactgctcctttgggctgggccaaggtttgtatgtaccacaccatgcatgactcagatgccctcaggtccctttctctatggtatgtatactgcttgtgtttgggttgaagcactacctgacattaaaggaaggacttggagagagaa

SEQ ID NO: 362467 - DNA, 2167 bp, Homo sapiens
ttagccaggatggtctcgctctcctgacctcgtgatccgcccacctcggcctcccaaagtgctgggattacagatgtgagccactgcgcctggccgcagatctttaacagaacctttaagagtctggacttagagctaagtgttgggtgagggcagcctcttgggctggttttctcccctgtgaagtcatggctctgcagggcctggttttttggggcttgtgtggtgaccattaaatccccactgtggggggttgtttcacaagagggaaatctggtgctcctccagatggcctgatatgaaggagtcacgcctcccgcctcccggagctgcccagtggctgccttgtccttcaagtgcaggagctggttcaaatgtcaggaatggaagccactgtgaccatcccaatctggcaaaacaagccacatggggctgctcgaagtgtagtaagaagaattgggaccaacctacccttgaagccgtgtgcccgggcgtcctttgagaccctgcccaacatctctgacctgtgtttgagagatgtgcccccagtccctaccctggctgacatcgcctggattgctgcggatgaagaggagacatatgcccgggtcaggagtgatacgcgccccctgaggcacacctggaaacccagccctctgattgtcatgcagcgcaatgcctctgttcccaacctgcgtgggtccgaggagaggcttctggccctgaagaagccagctctgccagccctaagccgcactactgagctgcaggacgagctgagccacttgcgcagccagattgcaaagatagtggcagctgatgcagcttcggcttcattaacgccagatttcttatctccaggaagttcaaatgtctcttctcccttaccttgttttggatcctcattccactctacaacttcctttgtcattagtgacatcaccgaggagacagaggtggaggtccctgagcttccatcagtccccctgctttgttctgccagccctgaatgttgcaaaccagaacacaaagctgcctgcagttcgtctgaagaggatgactgcgtctctttgtccaaggccagcagctttgcagacatgatgggtatcctgaaggactttcaccgaatgaaacagagtcaagatctgaaccggagtttattgaaggaggaagaccctgctgtgcttatctctgaggtcctaaggaggaagtttgctctaaaggaagaagatatcagtagaaaaggaaattgacaaccctcagctctgcaaactcagtctcatgctcctggaataccttcaatagctgccttcctcaccgcagatgtttctgcctcttaaggatagatcttctgcaacagtcttgctgacaagctagagcttggactgaaagagaagagctggattatatatttcccagacttcaaaccctagcagaagctaaggcttgtgatttgacctgagacatttgtttcaggtaatcgtgtagaatgaagtatcttagtttaaagggtaagagagaagttgtttctggtttttccttgcccctgtgtgaaaataggtcctaaatgactgacttcactgcattagaccctatagctggtctcacaagacactttgtgcccagctgtcactcactctcagcagcttccttgcagcagagcagggctgaggggaaggggctatgaatgtttgtatacgtgttcacagggcacggaaaatcttatgctgctccgtcataaacctacaccaatgcccagcaatcaccctcctcacttccttgtctagatgtagaggtcaggctgctgaaccagccaacacatgggctactgctgggaagcctgggctgttttttttcttaaacacattttatattactgaacaaccaaatctaccctccacggccctgaggccttatcagttccactgattaaaaactttctcttccacggactttaagcccggtaggaaagagagaggaggagggggaaagagcaaaccatctttcttccaggcccttgactgctcctttgggctgggccaaggtttgtatgtaccacaccatgcatgactcagatgccctcaggtccctttctctatggtatgtatactgcttgtgtttgggttgaagcactacctgacattaaaggaaggacttggagagagaa

SEQ ID NO: 362468 - DNA, 2109 bp, Homo sapiens
agcggtccggggggcgggtcagcggaagtgagggcggttgaggctgggcggcccaaggtggaaggaggggccgtgaggtgagagagtccgggagcccgagcttgagatggcctgatatgaaggagtcacgcctcccgcctcccggagctgcccagtggctgccttgtccttcaagtgcaggagctggttcaaatgtcaggaatggaagccactgtgaccatcccaatctggcaaaacaagccacatggggctgctcgaagtgtagtaagaagaattgggaccaacctacccttgaagccgtgtgcccgggcgtcctttgagaccctgcccaacatctctgacctgtgtttgagagatgtgcccccagtccctaccctggctgacatcgcctggattgctgcggatgaagaggagacatatgcccgggtcaggagtgatacgcgccccctgaggcacacctggaaacccagccctctgattgtcatgcagcgcaatgcctctgttcccaacctgcgtgggtccgaggagaggcttctggccctgaagaagccagctctgccagccctaagccgcactactgagctgcaggacgagctgagccacttgcgcagccagattgcaaagatagtggcagctgatgcagcttcggcttcattaacgccagatttcttatctccaggaagttcaaatgtctcttctcccttaccttgttttggatcctcattccactctacaacttcctttgtcattagtgacatcaccgaggagacagaggtggaggtccctgagcttccatcagtccccctgctttgttctgccagccctgaatgttgcaaaccagaacacaaagctgcctgcagttcgtctgaagaggatgactgcgtctctttgtccaaggccagcagctttgcagacatgatgggtatcctgaaggactttcaccgaatgaaacagagtcaagatctgaaccggagtttattgaaggaggaagaccctgctgtgcttatctctgaggtcctaaggaggaagtttgctctaaaggaagaagatatcagtagaaaaggaaattgacaaccctcagctctgcaaactcagtctcatgctcctggaataccttcaatagctgccttcctcaccgcagatgtttctgcctcttaaggatagatcttctgcaacagtcttgctgacaagctagagcttggactgaaagagaagagctggattatatatttcccagacttcaaaccctagcagaagctaaggcttgtgatttgacctgagacatttgtttcaggtaatcgtgtagaatgaagtatcttagtttaaagggtaagagagaagttgtttctggtttttccttgcccctgtgtgaaaataggtcctaaatgactgacttcactgcattagaccctatagctggtctcacaagacactttgtgcccagctgtcactcactctcagcagcttccttgcagcagagcagggctgaggggaaggggctatgaatgtttgtatacgtgttcacagggcacggaaaatcttatgctgctccgtcataaacctacaccaatgcccagcaatcaccctcctcacttccttgtctagatgtagaggtcaggctgctgaaccagccaacacatgggctactgctgggaagcctgggctgttttttttcttaaacacattttatattactgaacaaccaaatctaccctccacggccctgaggccttatcagttccactgattaaaaactttctcttccacggactttaagcccggtaggaaagagagaggaggagggggaaagagcaaaccatctttcttccaggcccttgactgctcctttgggctgggccaaggtttgtatgtaccacaccatgcatgactcagatgccctcaggtccctttctctatggtatgtatactgcttgtgtttgggttgaagcactacctgacattaaaggaaggacttggagagagaaaaaacagaccacacaaccagaaacaaaaaaaaagtgggccgccccgggcacaaaagaaacccccacggcgggccccgccttaagggaaaccgcagcgttcccggcgaaaaacagggggccccaa

SEQ ID NO: 362469 - DNA, 1876 bp, Homo sapiens
agcggtccggggggcgggtcagcggaagtgagggcggttgaggctgggcggcccaaggtggaaggaggggccgtgaggtgagagagtccgggagcccgagcttgagatggcctgatatgaaggagtcacgcctcccgcctcccggagctgcccagtggctgccttgtccttcaagtgcaggagctggttcaaatgtcaggaatggaagccactgtgaccatcccaatctggcaaaacaagccacatggggctgctcgaagtgtagtaagaagaattgggaccaacctacccttgaagccgtgtgcccgggcgtcctttgagaccctgcccaacatctctgacctgtgtttgagagatgtgcccccagtccctaccctggctgacatcgcctggattgctgcggatgaagaggagacatatgcccgggtcaggagtgatacgcgccccctgaggcacacctggaaacccagccctctgattgtcatgcagcgcaatgcctctgttcccaacctgcgtgggtccgaggagaggcttctggccctgaagaagccagctctgccagccctaagccgcactactgagctgcaggacgagctgagccacttgcgcagccagattgcaaagatagtggcagctgatgcagtgacatcaccgaggagacagaggtggaggtccctgagcttccatcagtccccctgctttgttctgccagccctgaatgttgcaaaccagaacacaaagctgcctgcagttcgtctgaagaggatgactgcgtctctttgtccaaggccagcagctttgcagacatgatgggtatcctgaaggactttcaccgaatgaaacagagtcaagatctgaaccggagtttattgaaggaggaagaccctgctgtgcttatctctgaggtcctaaggaggaagtttgctctaaaggaagaagatatcagtagaaaaggaaattgacaaccctcagctctgcaaactcagtctcatgctcctggaataccttcaatagctgccttcctcaccgcagatgtttctgcctcttaaggatagatcttctgcaacagtcttgctgacaagctagagcttggactgaaagagaagagctggattatatatttcccagacttcaaaccctagcagaagctaaggcttgtgatttgacctgagacatttgtttcaggtaatcgtgtagaatgaagtatcttagtttaaagggtaagagagaagttgtttctggtttttccttgcccctgtgtgaaaataggtcctaaatgactgacttcactgcattagaccctatagctggtctcacaagacactttgtgcccagctgtcactcactctcagcagcttccttgcagcagagcagggctgaggggaaggggctatgaatgtttgtatacgtgttcacagggcacggaaaatcttatgctgctccgtcataaacctacaccaatgcccagcaatcaccctcctcacttccttgtctagatgtagaggtcaggctgctgaaccagccaacacatgggctactgctgggaagcctgggctgttttttttcttaaacacattttatattactgaacaaccaaatctaccctccacggccctgaggccttatcagttccactgattaaaaactttctcttccacggactttaagcccggtaggaaagagagaggaggagggggaaagagcaaaccatctttcttccaggcccttgactgctcctttgggctgggccaaggtttgtatgtaccacaccatgcatgactcagatgccctcaggtccctttctctatggtatgtatactgcttgtgtttgggttgaagcactacctgacattaaaggaaggacttggagagagaa

SEQ ID NO: 362470 - DNA, 2500 bp, Homo sapiens
agcggtccggggggcgggtcagcggaagtgagggcggttgaggctgggcggcccaaggtggaaggaggggccgtgaggtgagagagtccgggagcccgagcttgagatggcctgatatgaaggagtcacgcctcccgcctcccggagctgcccagtggctgccttgtccttcaagtgcaggagctggttcaaatgtcaggaatggaagccactgtggtaaggggcattcccagggcaggggtatggtggggaaggttgggtgctgggcctgctgaagtactgtaaaaggttctgagactctccagttgagcactcctttctccagaggcctggaattggagcaaggccaccgtttcactccctccccctaagaagaaccaactatgatcctggggcacttcaggagtcagtgtatgtctgcctttctgtacagaggacgggaaggaaagcctggataatctctacactcagctacttcctctccccttccctgaccctcccaacattgactgccttagcagcagcaggtattcccttgggtggctggccagggtgtaggctggcaactggggaacctgccctcactataattgagagttgacttgcccctagagagtgccctgtccctaggtttgtggaattcagtctccacaaacctagagaggagaggacaaggacagtagttggattcattctctggggttgtagctgtctccgtctctttgctccagaccatcccaatctggcaaaacaagccacatggggctgctcgaagtgtagtaagaagaattgggaccaacctacccttgaagccgtgtgcccgggcgtcctttgagaccctgcccaacatctctgacctgtgtttgagagatgtgcccccagtccctaccctggctgacatcgcctggattgctgcggatgaagaggagacatatgcccgggtcaggagtgatacgcgccccctgaggcacacctggaaacccagccctctgattgtcatgcagcgcaatgcctctgttcccaacctgcgtgggtccgaggagaggcttctggccctgaagaagccagctctgccagccctaagccgcactactgagctgcaggacgagctgagccacttgcgcagccagattgcaaagatagtggcagctgatgcagcttcggcttcattaacgccagatttcttatctccaggaagttcaaatgtctcttctcccttaccttgttttggatcctcattccactctacaacttcctttgtcattagtgacatcaccgaggagacagaggtggaggtccctgagcttccatcagtccccctgctttgttctgccagccctgaatgttgcaaaccagaacacaaagctgcctgcagttcgtctgaagaggatgactgcgtctctttgtccaaggccagcagctttgcagacatgatgggtatcctgaaggactttcaccgaatgaaacagagtcaagatctgaaccggagtttattgaaggaggaagaccctgctgtgcttatctctgaggtcctaaggaggaagtttgctctaaaggaagaagatatcagtagaaaaggaaattgacaaccctcagctctgcaaactcagtctcatgctcctggaataccttcaatagctgccttcctcaccgcagatgtttctgcctcttaaggatagatcttctgcaacagtcttgctgacaagctagagcttggactgaaagagaagagctggattatatatttcccagacttcaaaccctagcagaagctaaggcttgtgatttgacctgagacatttgtttcaggtaatcgtgtagaatgaagtatcttagtttaaagggtaagagagaagttgtttctggtttttccttgcccctgtgtgaaaataggtcctaaatgactgacttcactgcattagaccctatagctggtctcacaagacactttgtgcccagctgtcactcactctcagcagcttccttgcagcagagcagggctgaggggaaggggctatgaatgtttgtatacgtgttcacagggcacggaaaatcttatgctgctccgtcataaacctacaccaatgcccagcaatcaccctcctcacttccttgtctagatgtagaggtcaggctgctgaaccagccaacacatgggctactgctgggaagcctgggctgttttttttcttaaacacattttatattactgaacaaccaaatctaccctccacggccctgaggccttatcagttccactgattaaaaactttctcttccacggactttaagcccggtaggaaagagagaggaggagggggaaagagcaaaccatctttcttccaggcccttgactgctcctttgggctgggccaaggtttgtatgtaccacaccatgcatgactcagatgccctcaggtccctttctctatggtatgtatactgcttgtgtttgggttgaagcactacctgacattaaaggaaggacttggagagagaa

SEQ ID NO: 362471 - DNA, 1922 bp, Homo sapiens
agcggtccggggggcgggtcagcggaagtgagggcggttgaggctgggcggcccaaggtggaaggaggggccgtgaggtgagagagtccgggagcccgagcttgagatggcctgatatgaaggagtcacgcctcccgcctcccggagctgcccagtggctgccttgtccttcaagtgcaggagctggttcaaatgtcaggaatggaagccactgtgaccatcccaatctggcaaaacaagccacatggggctgctcgaagtgtagtaagaagaattgggaccaacctacccttgaagccgtgtgcccgggcgtcctttgagaccctgcccaacatctctgacctgtgtttgagagatgtgcccccagtccctaccctggctgacatcgcctggattgctgcggatgaagaggagacatatgcccgggtcaggagtgatacgcgccccctgaggcacacctggaaacccagccctctgattgtcatgcagcgcaatgcctctgttcccaacctgcgtgggtccgaggagaggcttctggccctgaagaagccagctctgccagccctaagccgcactactgagctgcaggacgagctgagccacttgcgcagccagattgcaaagatagtggcagctgatgcagcttcggcttcattaacgccagatttcttatctccaggaagttcaaatgtctcttctcccttaccttgttttggatcctcattccactctacaacttcctttgtcattagtgacatcaccgaggagacagaggtggaggtccctgagcttccatcagtccccctgctttgttctgccagccctgaatgttgcaaaccagaacacaaagctgcctgcagttcgtctgaagaggatgactgcgtctctttgtccaaggccagcagctttgcagacatgatgggtatcctgaaggactttcaccgaatgaaacagagtcaagatctgaaccggagtttattgaaggaggaagaccctgctgtgcttatctctgaggtcctaaggaggaagtttgctctaaaggaagaagatatcagtagaaaaggaaattgacaaccctcagctctgcaaactcagtctcatgctcctggaataccttcaatagctgccttcctcaccgcagatgtttctgcctcttaaggatagatcttctgcaacagtcttgctgacaagctagagcttggactgaaagagaagagctggattatatatttcccagacttcaaaccctagcagaagctaaggcttgtgatttgacctgagacatttgtttcaggtaatcgtgtagaatgaagtatcttagtttaaagggtaagagagaagttgtttctggtttttccttgcccctgtgtgaaaataggtcctaaatgactgacttcactgcattagaccctatagctggtctcacaagacactttgtgcccagctgtcactcactctcagcagcttccttgcagcagagcagggctgaggggaaggggctatgaatgtttgtatacgtgttcacagggcacggaaaatcttatgctgctccgtcataaacctacaccaatgcccagcaatcaccctcctcacttccttgtctagatgtagaggtcaggctgctgatattactgaacaaccaaatctaccctccacggccctgaggccttatcagttccactgattaaaaactttctcttccacggactttaagcccggtaggaaagagagaggaggagggggaaagagcaaaccatctttcttccaggcccttgactgctcctttgggctgggccaaggtttgtatgtaccacaccatgcatgactcagatgccctcaggtccctttctctatggtatgtatactgcttgtgtttgggttgaagcactacctgacattaaaggaaggacttggagagagaa

SEQ ID NO: 362472 - DNA, 1875 bp, Homo sapiens
agcggtccggggggcgggtcagcggaagtgagggcggttgaggctgggcggcccaaggtggaaggaggggccgtgaggtgagagagtccgggagcccgagcttgagaccatcccaatctggcaaaacaagccacatggggctgctcgaagtgtagtaagaagaattgggaccaacctacccttgaagccgtgtgcccgggcgtcctttgagaccctgcccaacatctctgacctgtgtttgagagatgtgcccccagtccctaccctggctgacatcgcctggattgctgcggatgaagaggagacatatgcccgggtcaggagtgatacgcgccccctgaggcacacctggaaacccagccctctgattgtcatgcagcgcaatgcctctgttcccaacctgcgtgggtccgaggagaggcttctggccctgaagaagccagctctgccagccctaagccgcactactgagctgcaggacgagctgagccacttgcgcagccagattgcaaagatagtggcagctgatgcagcttcggcttcattaacgccagatttcttatctccaggaagttcaaatgtctcttctcccttaccttgttttggatcctcattccactctacaacttcctttgtcattagtgacatcaccgaggagacagaggtggaggtccctgagcttccatcagtccccctgctttgttctgccagccctgaatgttgcaaaccagaacacaaagctgcctgcagttcgtctgaagaggatgactgcgtctctttgtccaaggccagcagctttgcagacatgatgggtatcctgaaggactttcaccgaatgaaacagagtcaagatctgaaccggagtttattgaaggaggaagaccctgctgtgcttatctctgaggtcctaaggaggaagtttgctctaaaggaagaagatatcagtagaaaaggaaattgacaaccctcagctctgcaaactcagtctcatgctcctggaataccttcaatagctgccttcctcaccgcagatgtttctgcctcttaaggatagatcttctgcaacagtcttgctgacaagctagagcttggactgaaagagaagagctggattatatatttcccagacttcaaaccctagcagaagctaaggcttgtgatttgacctgagacatttgtttcaggtaatcgtgtagaatgaagtatcttagtttaaagggtaagagagaagttgtttctggtttttccttgcccctgtgtgaaaataggtcctaaatgactgacttcactgcattagaccctatagctggtctcacaagacactttgtgcccagctgtcactcactctcagcagcttccttgcagcagagcagggctgaggggaaggggctatgaatgtttgtatacgtgttcacagggcacggaaaatcttatgctgctccgtcataaacctacaccaatgcccagcaatcaccctcctcacttccttgtctagatgtagaggtcaggctgctgaaccagccaacacatgggctactgctgggaagcctgggctgttttttttcttaaacacattttatattactgaacaaccaaatctaccctccacggccctgaggccttatcagttccactgattaaaaactttctcttccacggactttaagcccggtaggaaagagagaggaggagggggaaagagcaaaccatctttcttccaggcccttgactgctcctttgggctgggccaaggtttgtatgtaccacaccatgcatgactcagatgccctcaggtccctttctctatggtatgtatactgcttgtgtttgggttgaagcactacctgacattaaaggaaggacttggagagagaa

SEQ ID NO: 362473 - DNA, 2079 bp, Homo sapiens
agcggtccggggggcgggtcagcggaagtgagggcggttgaggctgggcggcccaaggtggaaggaggggccgtgaggtgagagagtccgggagcccgagcttgagatggcctgatatgaaggagtcacgcctcccgcctcccggagctgcccagtggctgccttgtccttcaagtgcaggagctggttcaaatgtcaggaatggaagccactgtgaggacgggaaggaaagcctggataatctctacactcagctacttcctctccccttccctgaccctcccaacattgactgccttagcagcagcagaccatcccaatctggcaaaacaagccacatggggctgctcgaagtgtagtaagaagaattgggaccaacctacccttgaagccgtgtgcccgggcgtcctttgagaccctgcccaacatctctgacctgtgtttgagagatgtgcccccagtccctaccctggctgacatcgcctggattgctgcggatgaagaggagacatatgcccgggtcaggagtgatacgcgccccctgaggcacacctggaaacccagccctctgattgtcatgcagcgcaatgcctctgttcccaacctgcgtgggtccgaggagaggcttctggccctgaagaagccagctctgccagccctaagccgcactactgagctgcaggacgagctgagccacttgcgcagccagattgcaaagatagtggcagctgatgcagcttcggcttcattaacgccagatttcttatctccaggaagttcaaatgtctcttctcccttaccttgttttggatcctcattccactctacaacttcctttgtcattagtgacatcaccgaggagacagaggtggaggtccctgagcttccatcagtccccctgctttgttctgccagccctgaatgttgcaaaccagaacacaaagctgcctgcagttcgtctgaagaggatgactgcgtctctttgtccaaggccagcagctttgcagacatgatgggtatcctgaaggactttcaccgaatgaaacagagtcaagatctgaaccggagtttattgaaggaggaagaccctgctgtgcttatctctgaggtcctaaggaggaagtttgctctaaaggaagaagatatcagtagaaaaggaaattgacaaccctcagctctgcaaactcagtctcatgctcctggaataccttcaatagctgccttcctcaccgcagatgtttctgcctcttaaggatagatcttctgcaacagtcttgctgacaagctagagcttggactgaaagagaagagctggattatatatttcccagacttcaaaccctagcagaagctaaggcttgtgatttgacctgagacatttgtttcaggtaatcgtgtagaatgaagtatcttagtttaaagggtaagagagaagttgtttctggtttttccttgcccctgtgtgaaaataggtcctaaatgactgacttcactgcattagaccctatagctggtctcacaagacactttgtgcccagctgtcactcactctcagcagcttccttgcagcagagcagggctgaggggaaggggctatgaatgtttgtatacgtgttcacagggcacggaaaatcttatgctgctccgtcataaacctacaccaatgcccagcaatcaccctcctcacttccttgtctagatgtagaggtcaggctgctgaaccagccaacacatgggctactgctgggaagcctgggctgttttttttcttaaacacattttatattactgaacaaccaaatctaccctccacggccctgaggccttatcagttccactgattaaaaactttctcttccacggactttaagcccggtaggaaagagagaggaggagggggaaagagcaaaccatctttcttccaggcccttgactgctcctttgggctgggccaaggtttgtatgtaccacaccatgcatgactcagatgccctcaggtccctttctctatggtatgtatactgcttgtgtttgggttgaagcactacctgacattaaaggaaggacttggagagagaa

SEQ ID NO: 362474 - DNA, 1553 bp, Homo sapiens
agcggtccggggggcgggtcagcggaagtgagggcggttgaggctgggcggcccaaggtggaaggaggggccgtgaggtgagagagtccgggagcccgagcttgagaccatcccaatctggcaaaacaagccacatggggctgctcgaagtgtagtaagaagaattgggaccaacctacccttgaagccgtgtgcccgggcgtcctttgagcttcggcttcattaacgccagatttcttatctccaggaagttcaaatgtctcttctcccttaccttgttttggatcctcattccactctacaacttcctttgtcattagtgacatcaccgaggagacagaggtggaggtccctgagcttccatcagtccccctgctttgttctgccagccctgaatgttgcaaaccagaacacaaagctgcctgcagttcgtctgaagaggatgactgcgtctctttgtccaaggccagcagctttgcagacatgatgggtatcctgaaggactttcaccgaatgaaacagagtcaagatctgaaccggagtttattgaaggaggaagaccctgctgtgcttatctctgaggtcctaaggaggaagtttgctctaaaggaagaagatatcagtagaaaaggaaattgacaaccctcagctctgcaaactcagtctcatgctcctggaataccttcaatagctgccttcctcaccgcagatgtttctgcctcttaaggatagatcttctgcaacagtcttgctgacaagctagagcttggactgaaagagaagagctggattatatatttcccagacttcaaaccctagcagaagctaaggcttgtgatttgacctgagacatttgtttcaggtaatcgtgtagaatgaagtatcttagtttaaagggtaagagagaagttgtttctggtttttccttgcccctgtgtgaaaataggtcctaaatgactgacttcactgcattagaccctatagctggtctcacaagacactttgtgcccagctgtcactcactctcagcagcttccttgcagcagagcagggctgaggggaaggggctatgaatgtttgtatacgtgttcacagggcacggaaaatcttatgctgctccgtcataaacctacaccaatgcccagcaatcaccctcctcacttccttgtctagatgtagaggtcaggctgctgaaccagccaacacatgggctactgctgggaagcctgggctgttttttttcttaaacacattttatattactgaacaaccaaatctaccctccacggccctgaggccttatcagttccactgattaaaaactttctcttccacggactttaagcccggtaggaaagagagaggaggagggggaaagagcaaaccatctttcttccaggcccttgactgctcctttgggctgggccaaggtttgtatgtaccacaccatgcatgactcagatgccctcaggtccctttctctatggtatgtatactgcttgtgtttgggttgaagcactacctgacattaaaggaaggacttggagagagaa

SEQ ID NO: 362475 - DNA, 1372 bp, Homo sapiens
ctattttcacacaggggcaaggaaaaaccagaaacaacttctctcttaccctttaaactaagatacttcattctacacgattacctgaaacaaatgtctcaggtcaaatcacaagccttagcttctgctagggtttgaagtctgggaaatatataatccagctctttccccctcctcctctctctttcctaccgggcttaaagtccgtggaagagaaagtttttaatcagtggaactgataaggcctcagggccgaagaggatgactgcgtctctttgtccaaggccagcagctttgcagacatgatgggtatcctgaaggactttcaccgaatgaaacagagtcaagatctgaaccggagtttattgaaggaggaagaccctgctgtgcttatctctgaggtcctaaggaggaagtttgctctaaaggaagaagatatcagtagaaaaggaaattgacaaccctcagctctgcaaactcagtctcatgctcctggaataccttcaatagctgccttcctcaccgcagatgtttctgcctcttaaggatagatcttctgcaacagtcttgctgacaagctagagcttggactgaaagagaagagctggattatatatttcccagacttcaaaccctagcagaagctaaggcttgtgatttgacctgagacatttgtttcaggtaatcgtgtagaatgaagtatcttagtttaaagggtaagagagaagttgtttctggtttttccttgcccctgtgtgaaaataggtcctaaatgactgacttcactgcattagaccctatagctggtctcacaagacactttgtgcccagctgtcactcactctcagcagcttccttgcagcagagcagggctgaggggaaggggctatgaatgtttgtatacgtgttcacagggcacggaaaatcttatgctgctccgtcataaacctacaccaatgcccagcaatcaccctcctcacttccttgtctagatgtagaggtcaggctgctgaaccagccaacacatgggctactgctgggaagcctgggctgttttttttcttaaacacattttatattactgaacaaccaaatctaccctccacggccctgaggccttatcagttccactgattaaaaactttctcttccacggactttaagcccggtaggaaagagagaggaggagggggaaagagcaaaccatctttcttccaggcccttgactgctcctttgggctgggccaaggtttgtatgtaccacaccatgcatgactcagatgccctcaggtccctttctctatggtatgtatactgcttgtgtttgggttgaagcactacctgacattaaaggaaggacttggagagagaa

SEQ ID NO: 362476 - DNA, 3116 bp, Homo sapiens
ccccgccccgctctttcgcttcccgggccgccggcagccgccgccagccgcagccatgggccgggcccggccgggccaacgcgggccgcccagccccggccccgccgcgcagcctcccgcgccaccgcgccgccgcgcccgttccctggcgctgctcggagccctgctggccgccgccgctgccgccgccgtccgggtctgcgcccgccacgccgaggcccaggcggccgcgcggcaggaactggcgctgaagaccctggggacagatggcctttttctcttttcctccttggacactgacggggatatgtacatcagccctgaggagttcaaacccattgctgagaagctaacagggtcaactcccgcggccagctacgaggaggaggagttgccccctgaccctagcgaggagacgctcaccatagaagcccgattccagcctctgctcccggagaccatgaccaagagcaaagatggcttcctaggggtctcccgcctcgccctgtccggcctccgaaactggacagccgccgcctcaccaagtgcagtgtttgccacccgccacttccagcccttccttcccccgccaggccaggagctgggtgagccctggtggatcatccccagtgagctgagcatgttcactggctacctgtccaacaaccgcttctatccaccgccgcccaagggcaaggaggtcatcatccaccggctcctgagcatgttccaccctcggccctttgtgaagacccgctttgcccctcagggagctgtggcctgcctgactgccatcagcgacttctactacactgtgatgttccggatccatgccgagttccagctcagtgagccgcccgacttccccttttggttctcccctgctcagttcaccggccacatcatcctctccaaagacgccacccacgtccgcgacttccggctcttcgtgcccaaccacaggtctctgaatgtggacatggagtggctttacggggccagtgaaagcagcaacatggaggtggacatcggctacataccccagatggagctggaggccacgggcccctctgtgccctccgtgatcctggatgaggatggcagcatgatcgacagccacctgccttcaggggagcccctgcagtttgtgtttgaggagatcaagtggcagcaggagctgagctgggaggaggctgcccggcgcctggaggtggccatgtaccccttcaagaaggtctcctacttgccgttcactgaggccttcgaccgagccaaggctgagaacaagctggtgcactcaatcctgctgtggggggccctggatgaccagtcctgctgaggttcagggcggactctccgggagactgtcctggaaagttcgcccatcctcaccctgctcaacgagagcttcatcagcacctggtccctggtgaaggagctggaggaactgcagaacaaacaggagaactcgtcccaccagaagctggctggcctgcacctggagaagtacagcttccccgtggagatgatgatctgcctgcccaatggcaccgtggtccatcacatcaatgccaactacttcttggacatcacctccgtgaagcccgaggaaatcgagagcaatctcttcagcttctcatccacctttgaagacccgtccacggccacctacatgcagttcctgaaggagggactccggcgtggcctgcccctcctccagccctagagtgcctggacgggatctgatgcacaggcccccacgcctcagagccagagtggtcctcagcccatttcagactgcagatgccgcccactcccaccccactcctaggctgccttggagggtacaagatccactgagggtggccaccacagccttggctccatggtggcgggtagacaagggatgcctgggctgactgggcagaggaacctctagctctgactgtcactcggctctccctacccatttggctctggaagctgcttggcccccccagatcagggcctgggtgaactccctggacctttcctagccagccgcacagtctaggcccttgtggggtgaagaatggagggaggagcaggctaggaagacggggccaccaccctctccttgctttcagcccttcccacaggaaacatcaagaagccccagccaggaggggccaggctgccaaggcggctcccctgtttatctagagccttcgttcctggccataccccggactgccctcctgtgcctgatgtccccagctggggtcagtctcaacaggagccagtcttctggagcctctgggcagaaccctccatcagagtggaaatcagacgggaccccctgcagcttccctgaccacgccactgaccagctatctggggaagtttactgtgaaggggtttctgcctttagcaatggggttcactaagggggttcccgaggcccagggccaaggcactcccaccgcctaccttagcacagggtctctgcaggactgcgggagccagcgctcctgccgcccctcttgcccctcagaccttgcatccacagaagcacaacccagccaaacaccacagccttctccagagccggcactgtcccggcaaccaggggtgccccaggctagctcttctacctctggggcaccacggactccccttggccactcttgggactttggtccacgtcctgagccactgaccacggccagtctctctttttatatgtgcagaaaagtgtttttacacaaactttctcatggtttgtaggtatttttttataaccccagtgctgaggagaaaggaggggcagtggcttccccggcagcagccccatgatggctgaatccgaaatcctcgatgggtccagcttgatgtctttgcagctgcacctatgggaagaagtagtcctctcttccttctcctcttcagctttttaaaaacagtcctcagaggatccatgatccccagcactgtcccatcctccacaaaggcccacaggcatgcctgtactctctttcattaaggtcttgaagtcaggctgcccctgccctgtcactcctctaacacttccctcccctgtccccaacatgccctgtaataaaattagagaagactaa

SEQ ID NO: 362477 - DNA, 1843 bp, Homo sapiens
ccccgccccgctctttcgcttcccgggccgccggcagccgccgccagccgcagccatgggccgggcccggccgggccaacgcgggccgcccagccccggccccgccgcgcagcctcccgcgccaccgcgccgccgcgcccgttccctggcgctgctcggagccctgctggccgccgccgctgccgccgccgtccgggtctgcgcccgccacgccgaggcccaggcggccgcgcggcaggaactggcgctgaagaccctggggacagatggcctttttctcttttcctccttggacactgacggggatatgtacatcagccctgaggagttcaaacccattgctgagaagctaacagggtcaactcccgcggccagctacgaggaggaggagttgccccctgaccctagcgaggagacgctcaccatagaagcccgattccagcctctgctcccggagaccatgaccaagagcaaagatggcttcctaggggtctcccgcctcgccctgtccggcctccgaaactggacagccgccgcctcaccaagtgcagtgtttgccacccgccacttccagcccttccttcccccgccaggccaggagctgggtgagccctggtggatcatccccagtgagctgagcatgttcactggctacctgtccaacaaccgcttctatccaccgccgcccaagggcaaggaggtcatcatccaccggctcctgagcatgttccaccctcggccctttgtgaagacccgctttgcccctcagggagctgtggcctgcctgactgccatcagcgacttctactacactgtgatgttccggatccatgccgagttccagctcagtgagccgcccgacttccccttttggttctcccctgctcagttcaccggccacatcatcctctccaaagacgccacccacgtccgcgacttccggctcttcgtgcccaaccacaggtctctgaatgtggacatggagtggctttacggggccagtgaaagcagcaacatggaggtggacatcggctacataccccagatggagctggaggccacgggcccctctgtgccctccgtgatcctggatgaggatggcagcatgatcgacagccacctgccttcaggggagcccctgcagtttgtgtttgaggagatcaagtggcagcaggagctgagctgggaggaggctgcccggcgcctggaggtggccatgtaccccttcaagaaggtctcctacttgccgttcactgaggccttcgaccgagccaaggctgagaacaagctggtgcactcaatcctgctgtggggggccctggatgaccagtcctgctgaggttcagggcggactctccgggagactgtcctggaaagttcgcccatcctcaccctgctcaacgagagcttcatcagcacctggtccctggtgaaggagctggaggaactgcagaacaaacaggagaactcgtcccaccagaagctggctggcctgcacctggagaagtacagcttccccgtggagatgatgatctgcctgcccaatggcaccgtggtccatcacatcaatgccaactacttcttggacatcacctccgtgaagcccgaggaaatcgagagcaatctcttcagcttctcatccacctttgaagacccgtccacggccacctacatgcagttcctgaaggagggactccggcgtggcctgcccctcctccagccctagagtgcctggacgggatctgatgcatccgtactggcccgggaactaccatactgttttctatatcagttgcatcattttacattcctattaacatgtagaaagattccagtttctcca

SEQ ID NO: 362478 - DNA, 399 bp, Homo sapiens
agcggtccggggggcgggtcagcggaagtgagggcggttgaggctgggcggcccaaggtggaaggaggggccgtgaggtgagagagtccgggagcccgagcttgagatggcctgatatgaaggagtcacgcctcccgcctcccggagctgcccagtggctgccttgtccttcaagtgcaggagctggttcaaatgtcaggaatggaagccactgtgaccatcccaatctggcaaaacaagccacatggggctgctcgaagtgtagtaagaagaattgtttgtatgtaccacaccatgcatgactcagatgccctcaggtccctttctctatggtatgtatactgcttgtgtttgggttgaagcactacctgacattaaaggaaggacttggagagagaa

SEQ ID NO: 362479 - DNA, 290 bp, Homo sapiens
gtgtattctgcagtttctgattggctcatcatggcatctgtaaatgttgatgacttttgcttctccatagaccctgcccaacatctctgacctgtgtttgagagatgtgcccccagtccctaccctggctgacatcgcctggattgctgcggatgaagaggagacatatgcccgggtcaggtagttgaggcagtagctggtctgctaaggaatggagaacttcccagaagaggtggcaggcagcaaggagagaggaatgagaactgtgggctcagagaggagcagaacct

SEQ ID NO: 362480 - DNA, 529 bp, Homo sapiens
tgggggaaggaaccttaggagcacagtggcctgctgtctctaactgatctacttggttttccctggtccaggagtgatacgcgccccctgaggcacacctggaaacccagccctctgattgtcatgcagcgcaatgcctctgttcccaacctgcgtgggtccgaggagaggcttctggccctgaagaagccagctctgccagccctaagccgcactactgagctgcaggacgagctgagccacttgcgcagccagattgcaaagatagtggcagctgatgcaggtaggagcccctgtgccagggccagaacgtaacaggctgttcctttcccctggctcttgggcaggataggggtaaagaaagtggtaatccttggtttgcaggtacttaggttccgggccctggggttgtcctgaagcctggctagccagtagtgcctcttagatggtttctaccagccattttgggctgaatggtttggttaagaacaaaatattaacctgtgaccccaggcagagtccctccctt

SEQ ID NO: 362481 - DNA, 4335 bp, Homo sapiens
ccccgccccgctctttcgcttcccgggccgccggcagccgccgccagccgcagccatgggccgggcccggccgggccaacgcgggccgcccagccccggccccgccgcgcagcctcccgcgccaccgcgccgccgcgcccgttccctggcgctgctcggagccctgctggccgccgccgctgccgccgccgtccgggtctgcgcccgccacgccgaggcccaggcggccgcgcggcaggaactggcgctgaagaccctggggacagatggcctttttctcttttcctccttggacactgacggggatatgtacatcagccctgaggagttcaaacccattgctgagaagctaacagggtcttgttctgtcacccagactggagtgcagtggtgcagtcacagctcactgcagcctcaacttccctggctcaattgatcctcctgcctcagcctcctgaggtcaactcccgcggccagctacgaggaggaggagttgccccctgaccctagcgaggagacgctcaccatagaagcccgattccagcctctgctcccggagaccatgaccaagagcaaagatggcttcctaggggtctcccgcctcgccctgtccggcctccgaaactggacagccgccgcctcaccaagtgcagtgtttgccacccgccacttccagcccttccttcccccgccaggccaggagctgggtgagccctggtggatcatccccagtgagctgagcatgttcactggctacctgtccaacaaccgcttctatccaccgccgcccaagggcaaggaggtcatcatccaccggctcctgagcatgttccaccctcggccctttgtgaagacccgctttgcccctcagggagctgtggcctgcctgactgccatcagcgacttctactacactgtgatgttccggatccatgccgagttccagctcagtgagccgcccgacttccccttttggttctcccctgctcagttcaccggccacatcatcctctccaaagacgccacccacgtccgcgacttccggctcttcgtgcccaaccacaggtctctgaatgtggacatggagtggctttacggggccagtgaaagcagcaacatggaggtggacatcggctacataccccagatggagctggaggccacgggcccctctgtgccctccgtgatcctggatgaggatggcagcatgatcgacagccacctgccttcaggggagcccctgcagtttgtgtttgaggagatcaagtggcagcaggagctgagctgggaggaggctgcccggcgcctggaggtggccatgtaccccttcaagaaggtctcctacttgccgttcactgaggccttcgaccgagccaaggctgagaacaagctggtgcactcaatcctgctgtggggggccctggatgaccagtcctgctgaggttcagggcggactctccgggagactgtcctggaaagttcgcccatcctcaccctgctcaacgagagcttcatcagcacctggtccctggtgaaggagctggaggaactgcagaacaaacaggagaactcgtcccaccagaagctggctggcctgcacctggagaagtacagcttccccgtggagatgatgatctgcctgcccaatggcaccgtggtccatcacatcaatgccaactacttcttggacatcacctccgtgaagcccgaggaaatcgagagcaatctcttcagcttctcatccacctttgaagacccgtccacggccacctacatgcagttcctgaaggagggactccggcgtggcctgcccctcctccagccctagagtgcctggacgggatctgatgcacaggcccccacgcctcagagccagagtggtcctcagcccatttcagactgcagatgccgcccactcccaccccactcctaggctgccttggagggtacaagatccactgagggtggccaccacagccttggctccatggtggcgggtagacaagggatgcctgggctgactgggcagaggaacctctagctctgactgtcactcggctctccctacccatttggctctggaagctgcttggcccccccagatcagggcctgggtgaactccctggacctttcctagccagccgcacagtctaggcccttgtggggtgaagaatggagggaggagcaggctaggaagacggggccaccaccctctccttgctttcagcccttcccacaggaaacatcaagaagccccagccaggaggggccaggctgccaaggcggctcccctgtttatctagagccttcgttcctggccataccccggactgccctcctgtgcctgatgtccccagctggggtcagtctcaacaggagccagtcttctggagcctctgggcagaaccctccatcagagtggaaatcagacgggaccccctgcagcttccctgaccacgccactgaccagctatctggggaagtttactgtgaaggggtttctgcctttagcaatggggttcactaagggggttcccgaggcccagggccaaggcactcccaccgcctaccttagcacagggtctctgcaggactgcgggagccagcgctcctgccgcccctcttgcccctcagaccttgcatccacagaagcacaacccagccaaacaccacagccttctccagagccggcactgtcccggcaaccaggggtgccccaggctagctcttctacctctggggcaccacggactccccttggccactcttgggactttggtccacgtcctgagccactgaccacggccagtctctctttttatatgtgcagaaaagtgtttttacacaaactttctcatggtttgtaggtatttttttataaccccagtgctgaggagaaaggaggggcagtggcttccccggcagcagccccatgatggctgaatccgaaatcctcgatgggtccagcttgatgtctttgcagctgcacctatgggaagaagtagtcctctcttccttctcctcttcagctttttaaaaacagtcctcagaggatccatgatccccagcactgtcccatcctccacaaaggcccacaggcatgcctgtactctctttcattaaggtcttgaagtcaggctgccccctccccagcccccagttctctccccaccccctcaccccacccggggctcactcagcctggcagaggaagaaggaaggcagacatctccgcagccactcctgggccttttatgtgccgagttaccccacttgccttgggcgtgtccactgagccttccccagccagtcttgttctcaattttgttttgttttgttttgttttgagacggagtcttgctctgtcacccaggctggagtgctatggctcgatcttggctcactgcaacctccacctcccaggttcaagcaattctcttgccccagcctcccgagtagctgggattacaggtgcatgccaccatggctggctaatttttgtatttttagtagagatggggtttcaccatattggtcaggctgatctggaactcctgacctcaggtgatccacctgcctcagcctcccaaagtgctgggattacaggcgtgagcaatcgtgcccagccttgttcttaattttgtatcatccagtcatcgctaatattacacgcaccttctcacttaatcctcacgacaagcctgtgaggcagatgctcattgttcccatcttgatgaaacttgagtctcagggaagtgaagtgacttgcccagggtcactcaggtagagttgagattcaaacccacatgtggctccaaagtctgcatctggatttgggggtgttttttggcatggcaccctcacctctctccctgcctgttttccccaaagtggaaaggaaggcctttcaaaccagagtgtctcactcccctctgacctccagaccagatggggcatgagccagccagctcagccaggctccctgtgtcctgggaggaagtgtccccatcccccatgccccttatggggagggagggcgtctgatgctctctctctgcctcccccccatcctgtcaggcacaggtgacgggggcagcccatgcgagcccttctcctgctgctctgggagggccagttccacattgagccagcctggtcccatggaaaatgatggcctgggctttctgaggccttatctgatgcctctgcagttcatgtcccccaccaggcctcgaggctcagggtgggagagggccccgggctgccctgtcactcctctaacacttccctcccctgtccccaacatgccctgtaataaaattagagaagactaa

SEQ ID NO: 362482 - DNA, 4233 bp, Homo sapiens
ccccgccccgctctttcgcttcccgggccgccggcagccgccgccagccgcagccatgggccgggcccggccgggccaacgcgggccgcccagccccggccccgccgcgcagcctcccgcgccaccgcgccgccgcgcccgttccctggcgctgctcggagccctgctggccgccgccgctgccgccgccgtccgggtctgcgcccgccacgccgaggcccaggcggccgcgcggcaggaactggcgctgaagaccctggggacagatggcctttttctcttttcctccttggacactgacggggatatgtacatcagccctgaggagttcaaacccattgctgagaagctaacagggtcaactcccgcggccagctacgaggaggaggagttgccccctgaccctagcgaggagacgctcaccatagaagcccgattccagcctctgctcccggagaccatgaccaagagcaaagatggcttcctaggggtctcccgcctcgccctgtccggcctccgaaactggacagccgccgcctcaccaagtgcagtgtttgccacccgccacttccagcccttccttcccccgccaggccaggagctgggtgagccctggtggatcatccccagtgagctgagcatgttcactggctacctgtccaacaaccgcttctatccaccgccgcccaagggcaaggaggtcatcatccaccggctcctgagcatgttccaccctcggccctttgtgaagacccgctttgcccctcagggagctgtggcctgcctgactgccatcagcgacttctactacactgtgatgttccggatccatgccgagttccagctcagtgagccgcccgacttccccttttggttctcccctgctcagttcaccggccacatcatcctctccaaagacgccacccacgtccgcgacttccggctcttcgtgcccaaccacaggtctctgaatgtggacatggagtggctttacggggccagtgaaagcagcaacatggaggtggacatcggctacataccccagatggagctggaggccacgggcccctctgtgccctccgtgatcctggatgaggatggcagcatgatcgacagccacctgccttcaggggagcccctgcagtttgtgtttgaggagatcaagtggcagcaggagctgagctgggaggaggctgcccggcgcctggaggtggccatgtaccccttcaagaaggtctcctacttgccgttcactgaggccttcgaccgagccaaggctgagaacaagctggtgcactcaatcctgctgtggggggccctggatgaccagtcctgctgaggttcagggcggactctccgggagactgtcctggaaagttcgcccatcctcaccctgctcaacgagagcttcatcagcacctggtccctggtgaaggagctggaggaactgcagaacaaacaggagaactcgtcccaccagaagctggctggcctgcacctggagaagtacagcttccccgtggagatgatgatctgcctgcccaatggcaccgtggtccatcacatcaatgccaactacttcttggacatcacctccgtgaagcccgaggaaatcgagagcaatctcttcagcttctcatccacctttgaagacccgtccacggccacctacatgcagttcctgaaggagggactccggcgtggcctgcccctcctccagccctagagtgcctggacgggatctgatgcacaggcccccacgcctcagagccagagtggtcctcagcccatttcagactgcagatgccgcccactcccaccccactcctaggctgccttggagggtacaagatccactgagggtggccaccacagccttggctccatggtggcgggtagacaagggatgcctgggctgactgggcagaggaacctctagctctgactgtcactcggctctccctacccatttggctctggaagctgcttggcccccccagatcagggcctgggtgaactccctggacctttcctagccagccgcacagtctaggcccttgtggggtgaagaatggagggaggagcaggctaggaagacggggccaccaccctctccttgctttcagcccttcccacaggaaacatcaagaagccccagccaggaggggccaggctgccaaggcggctcccctgtttatctagagccttcgttcctggccataccccggactgccctcctgtgcctgatgtccccagctggggtcagtctcaacaggagccagtcttctggagcctctgggcagaaccctccatcagagtggaaatcagacgggaccccctgcagcttccctgaccacgccactgaccagctatctggggaagtttactgtgaaggggtttctgcctttagcaatggggttcactaagggggttcccgaggcccagggccaaggcactcccaccgcctaccttagcacagggtctctgcaggactgcgggagccagcgctcctgccgcccctcttgcccctcagaccttgcatccacagaagcacaacccagccaaacaccacagccttctccagagccggcactgtcccggcaaccaggggtgccccaggctagctcttctacctctggggcaccacggactccccttggccactcttgggactttggtccacgtcctgagccactgaccacggccagtctctctttttatatgtgcagaaaagtgtttttacacaaactttctcatggtttgtaggtatttttttataaccccagtgctgaggagaaaggaggggcagtggcttccccggcagcagccccatgatggctgaatccgaaatcctcgatgggtccagcttgatgtctttgcagctgcacctatgggaagaagtagtcctctcttccttctcctcttcagctttttaaaaacagtcctcagaggatccatgatccccagcactgtcccatcctccacaaaggcccacaggcatgcctgtactctctttcattaaggtcttgaagtcaggctgccccctccccagcccccagttctctccccaccccctcaccccacccggggctcactcagcctggcagaggaagaaggaaggcagacatctccgcagccactcctgggccttttatgtgccgagttaccccacttgccttgggcgtgtccactgagccttccccagccagtcttgttctcaattttgttttgttttgttttgttttgagacggagtcttgctctgtcacccaggctggagtgctatggctcgatcttggctcactgcaacctccacctcccaggttcaagcaattctcttgccccagcctcccgagtagctgggattacaggtgcatgccaccatggctggctaatttttgtatttttagtagagatggggtttcaccatattggtcaggctgatctggaactcctgacctcaggtgatccacctgcctcagcctcccaaagtgctgggattacaggcgtgagcaatcgtgcccagccttgttcttaattttgtatcatccagtcatcgctaatattacacgcaccttctcacttaatcctcacgacaagcctgtgaggcagatgctcattgttcccatcttgatgaaacttgagtctcagggaagtgaagtgacttgcccagggtcactcaggtagagttgagattcaaacccacatgtggctccaaagtctgcatctggatttgggggtgttttttggcatggcaccctcacctctctccctgcctgttttccccaaagtggaaaggaaggcctttcaaaccagagtgtctcactcccctctgacctccagaccagatggggcatgagccagccagctcagccaggctccctgtgtcctgggaggaagtgtccccatcccccatgccccttatggggagggagggcgtctgatgctctctctctgcctcccccccatcctgtcaggcacaggtgacgggggcagcccatgcgagcccttctcctgctgctctgggagggccagttccacattgagccagcctggtcccatggaaaatgatggcctgggctttctgaggccttatctgatgcctctgcagttcatgtcccccaccaggcctcgaggctcagggtgggagagggccccgggctgccctgtcactcctctaacacttccctcccctgtccccaacatgccctgtaataaaattagagaagactaa

SEQ ID NO: 362483 - DNA, 4247 bp, Homo sapiens
cccttgactgagttcctctcagtcccagaagacctagaaaagggtcgtggttggtcatgggtttcgagtaaacaggcctgggtttcaatcccgattcccccaccatctagctgtgtgacctggggaggtgactttacctctctgaacactttctcatttgtcaaatggagttggtaatgttattatctgcctccctaggctatcctgaaactaaaatgcgatacactggttgttactttggtgactgttaacaccccagctacccccaccccctgcctggctccgttaatcaccagctagtgtggatgatgagggagaggtgagccctgtagcataagggcagtgcctctccgatgtctgtgtctcatagggtcaactcccgcggccagctacgaggaggaggagttgccccctgaccctagcgaggagacgctcaccatagaagcccgattccagcctctgctcccggagaccatgaccaagagcaaagatggcttcctaggggtctcccgcctcgccctgtccggcctccgaaactggacagccgccgcctcaccaagtgcagtgtttgccacccgccacttccagcccttccttcccccgccaggccaggagctgggtgagccctggtggatcatccccagtgagctgagcatgttcactggctacctgtccaacaaccgcttctatccaccgccgcccaagggcaaggaggtcatcatccaccggctcctgagcatgttccaccctcggccctttgtgaagacccgctttgcccctcagggagctgtggcctgcctgactgccatcagcgacttctactacactgtgatgttccggatccatgccgagttccagctcagtgagccgcccgacttccccttttggttctcccctgctcagttcaccggccacatcatcctctccaaagacgccacccacgtccgcgacttccggctcttcgtgcccaaccacaggtctctgaatgtggacatggagtggctttacggggccagtgaaagcagcaacatggaggtggacatcggctacataccccagatggagctggaggccacgggcccctctgtgccctccgtgatcctggatgaggatggcagcatgatcgacagccacctgccttcaggggagcccctgcagtttgtgtttgaggagatcaagtggcagcaggagctgagctgggaggaggctgcccggcgcctggaggtggccatgtaccccttcaagaaggtctcctacttgccgttcactgaggccttcgaccgagccaaggctgagaacaagctggtgcactcaatcctgctgtggggggccctggatgaccagtcctgctgaggttcagggcggactctccgggagactgtcctggaaagttcgcccatcctcaccctgctcaacgagagcttcatcagcacctggtccctggtgaaggagctggaggaactgcagaacaaacaggagaactcgtcccaccagaagctggctggcctgcacctggagaagtacagcttccccgtggagatgatgatctgcctgcccaatggcaccgtggtccatcacatcaatgccaactacttcttggacatcacctccgtgaagcccgaggaaatcgagagcaatctcttcagcttctcatccacctttgaagacccgtccacggccacctacatgcagttcctgaaggagggactccggcgtggcctgcccctcctccagccctagagtgcctggacgggatctgatgcacaggcccccacgcctcagagccagagtggtcctcagcccatttcagactgcagatgccgcccactcccaccccactcctaggctgccttggagggtacaagatccactgagggtggccaccacagccttggctccatggtggcgggtagacaagggatgcctgggctgactgggcagaggaacctctagctctgactgtcactcggctctccctacccatttggctctggaagctgcttggcccccccagatcagggcctgggtgaactccctggacctttcctagccagccgcacagtctaggcccttgtggggtgaagaatggagggaggagcaggctaggaagacggggccaccaccctctccttgctttcagcccttcccacaggaaacatcaagaagccccagccaggaggggccaggctgccaaggcggctcccctgtttatctagagccttcgttcctggccataccccggactgccctcctgtgcctgatgtccccagctggggtcagtctcaacaggagccagtcttctggagcctctgggcagaaccctccatcagagtggaaatcagacgggaccccctgcagcttccctgaccacgccactgaccagctatctggggaagtttactgtgaaggggtttctgcctttagcaatggggttcactaagggggttcccgaggcccagggccaaggcactcccaccgcctaccttagcacagggtctctgcaggactgcgggagccagcgctcctgccgcccctcttgcccctcagaccttgcatccacagaagcacaacccagccaaacaccacagccttctccagagccggcactgtcccggcaaccaggggtgccccaggctagctcttctacctctggggcaccacggactccccttggccactcttgggactttggtccacgtcctgagccactgaccacggccagtctctctttttatatgtgcagaaaagtgtttttacacaaactttctcatggtttgtaggtatttttttataaccccagtgctgaggagaaaggaggggcagtggcttccccggcagcagccccatgatggctgaatccgaaatcctcgatgggtccagcttgatgtctttgcagctgcacctatgggaagaagtagtcctctcttccttctcctcttcagctttttaaaaacagtcctcagaggatccatgatccccagcactgtcccatcctccacaaaggcccacaggcatgcctgtactctctttcattaaggtcttgaagtcaggctgccccctccccagcccccagttctctccccaccccctcaccccacccggggctcactcagcctggcagaggaagaaggaaggcagacatctccgcagccactcctgggccttttatgtgccgagttaccccacttgccttgggcgtgtccactgagccttccccagccagtcttgttctcaattttgttttgttttgttttgttttgagacggagtcttgctctgtcacccaggctggagtgctatggctcgatcttggctcactgcaacctccacctcccaggttcaagcaattctcttgccccagcctcccgagtagctgggattacaggtgcatgccaccatggctggctaatttttgtatttttagtagagatggggtttcaccatattggtcaggctgatctggaactcctgacctcaggtgatccacctgcctcagcctcccaaagtgctgggattacaggcgtgagcaatcgtgcccagccttgttcttaattttgtatcatccagtcatcgctaatattacacgcaccttctcacttaatcctcacgacaagcctgtgaggcagatgctcattgttcccatcttgatgaaacttgagtctcagggaagtgaagtgacttgcccagggtcactcaggtagagttgagattcaaacccacatgtggctccaaagtctgcatctggatttgggggtgttttttggcatggcaccctcacctctctccctgcctgttttccccaaagtggaaaggaaggcctttcaaaccagagtgtctcactcccctctgacctccagaccagatggggcatgagccagccagctcagccaggctccctgtgtcctgggaggaagtgtccccatcccccatgccccttatggggagggagggcgtctgatgctctctctctgcctcccccccatcctgtcaggcacaggtgacgggggcagcccatgcgagcccttctcctgctgctctgggagggccagttccacattgagccagcctggtcccatggaaaatgatggcctgggctttctgaggccttatctgatgcctctgcagttcatgtcccccaccaggcctcgaggctcagggtgggagagggccccgggctgccctgtcactcctctaacacttccctcccctgtccccaacatgccctgtaataaaattagagaagactaa

SEQ ID NO: 362484 - DNA, 2171 bp, Homo sapiens
agcggtccggggggcgggtcagcggaagtgagggcggttgaggctgggcggcccaaggtggaaggaggggccgtgaggtgagagagtccgggagcccgagcttgagatggcctgatatgaaggagtcacgcctcccgcctcccggagctgcccagtggctgccttgtccttcaagtgcaggagctggttcaaatgtcaggaatggaagccactgtgaccatcccaatctggcaaaacaagccacatggggctgctcgaagtgtagtaagaagaattgggaccaacctacccttgaagccgtgtgcccgggcgtcctttgagaccctgcccaacatctctgacctgtgtttgagagatgtgcccccagtccctaccctggctgacatcgcctggattgctgcggatgaagaggagacatatgcccgggtcaggagtgatacgcgccccctgaggcacacctggaaacccagccctctgattgtcatgcagcgcaatgcctctgttcccaacctgcgtgggtccgaggagaggcttctggccctgaagaagccagctctgccagccctaagccgcactactgagctgcaggacgagctgagccacttgcgcagccagattgcaaagatagtggcagctgatgcagcttcggcttcattaacgccagatttcttatctccaggaagttcaaatgtctcttctcccttaccttgttttggatcctcattccactctacaacttcctttgtcattagtgacatcaccgaggagacagaggtggaggtccctgagcttccatcagtccccctgctttgttctgccagccctgaatgttgcaaaccagaacacaaagctgcctgcagttcgtctgaagaggatgactgcgtctctttgtccaaggccagcagctttgcagacatgatgggtatcctgaaggactttcaccgaatgaaacagagtcaagatctgaaccggagtttattgaaggaggaagaccctgctgtgcttatctctgaggtcctaaggaggaagtttgctctaaaggaagaagatatcagtagaaaaggaaattgacaaccctcagctctgcaaactcagtctcatgctcctggaataccttcaatagctgccttcctcaccgcagatgtttctgcctcttaaggatagatcttctgcaacagtcttgctgacaagctagagcttggactgaaagagaagagctggattatatatttcccagacttcaaaccctagcagaagctaaggcttgtgatttgacctgagacatttgtttcaggtaatcgtgtagaatgaagtatcttagtttaaagggtaagagagaagttgtttctggtttttccttgcccctgtgtgaaaataggtcctaaatgactgacttcactgcattagaccctatagctggtctcacaagacactttgtgcccagctgtcactcactctcagcagcttccttgcagcagagcagggctgaggggaaggggctatgaatgtttgtatacgtgttcacagggcacggaaaatcttatgctgctccgtcataaacctacaccaatgcccagcaatcaccctcctcacttccttgtctagatgtagaggtcaggctgctgaaccagccaacacatgggctactgctgggaagcctgggctgttttttttcttaaacacattttatattactgaacaaccaaatctaccctccacggccctgaggccttatcagttccactgattaaaaactttctcttccacggactttaagcccggtaggaaagagagaggaggagggggaaagagcaaaccatctttcttccaggcccttgactgctcctttgggctgggccaaggtttgtatgtaccacaccatgcatgactcagatgccctcaggtccctttctctatggtatgtatactgcttgtgtttgggttgaagcactacctgacattaaaggaaggacttggagagagaaaaaaaaaaaaaaaaaaaaaaacgtttgcggccgccgcagccggccccggcccttgggcagcttggcgggccgcacgggctgcgggaactcgtcggccaggcacacgaagtgcggcatcaccgcctggtaactggagcagatgcccatcagctcgccgggcttggcggccatggcgcctccggcgtc

SEQ ID NO: 362485 - DNA, 4301 bp, Homo sapiens
ccccgccccgctctttcgcttcccgggccgccggcagccgccgccagccgcagccatgggccgggcccggccgggccaacgcgggccgcccagccccggccccgccgcgcagcctcccgcgccaccgcgccgccgcgcccgttccctggcgctgctcggagccctgctggccgccgccgctgccgccgccgtccgggtctgcgcccgccacgccgaggcccaggcggccgcgcggcaggaactggcgctgaagaccctggggacagatggcctttttctcttttcctccttggacactgacggggatatgtacatcagccctgaggagttcaaacccattgctgagaagctaacagggtcaactcccgcggccagctacgaggaggaggagttgccccctgaccctagcgaggagacgctcaccatagaagcccgattccagcctctgctcccggagaccatgaccaagagcaaagatggcttcctaggggtctcccgcctcgccctgtccggcctccgaaactggacagccgccgcctcaccaagtgcagtgtttgccacccgccacttccagcccttccttcccccgccaggccaggagctgggtgagccctggtggatcatccccagtgagctgagcatgttcactggctacctgtccaacaaccgcttctatccaccgccgcccaagggcaaggaggtcatcatccaccggctcctgagcatgttccaccctcggccctttgtgaagacccgctttgcccctcagggagctgtggcctgcctgactgccatcagcgacttctactacactgtgatgttccggatccatgccgagttccagctcagtgagccgcccgacttccccttttggttctcccctgctcagttcaccggccacatcatcctctccaaagacgccacccacgtccgcgacttccggctcttcgtgcccaaccacaggtctctgaatgtggacatggagtggctttacggggccagtgaaagcagcaacatggaggtggacatcggctacataccccagatggagctggaggccacgggcccctctgtgccctccgtgatcctggatgaggatggcagcatgatcgacagccacctgccttcaggggagcccctgcagtttgtgtttgaggagatcaagtggcagcaggagctgagctgggaggaggctgcccggcgcctggaggtggccatgtaccccttcaagaaggtctcctacttgccgttcactgaggccttcgaccgagccaaggctgagaacaagctggtgcactcaatcctgctgtggggggccctggatgaccagtcctgctgaggttcagggcggactctccgggagactgtcctggaaagttcgcccatcctcaccctgctcaacgagagcttcatcagcacctggtccctggtgaaggagctggaggaactgcagaacaaacaggagaactcgtcccaccagaagctggctggcctgcacctggagaagtacagcttccccgtggagatgatgatctgcctgcccaatggcaccgtggtccatcacatcaatgccaactacttcttggacatcacctccgtgaagcccgaggaaatcgagagcaatctcttcagcttctcatccacctttgaagacccgtccacggccacctacatgcagttcctgaaggagggactccggcgtggcctgcccctcctccagccctagagtgcctggacgggatctgatgcatgcagcgccctcgcgacaagccatacgataagtccatcggctgtgctctctctacgcctcctattatcatgatctgcagaatgcgctgccctccactcgccatccctagctccctacgagctgccgttgcgcagtggcgctacaacgataccgactgagaggtggtcaccgatcacgtcctctggtcctaccatagggtggcgtctggagatatcacgagacggatgcctgggctgactgggcagaggaacctctagctctgactgtcactcggctctccctacccatttggctctggaagctgcttggcccccccagatcagggcctgggtgaactccctggacctttcctagccagccgcacagtctaggcccttgtggggtgaagaatggagggaggagcaggctaggaagacggggccaccaccctctccttgctttcagcccttcccacaggaaacatcaagaagccccagccaggaggggccaggctgccaaggcggctcccctgtttatctagagccttcgttcctggccataccccggactgccctcctgtgcctgatgtccccagctggggtcagtctcaacaggagccagtcttctggagcctctgggcagaaccctccatcagagtggaaatcagacgggaccccctgcagcttccctgaccacgccactgaccagctatctggggaagtttactgtgaaggggtttctgcctttagcaatggggttcactaagggggttcccgaggcccagggccaaggcactcccaccgcctaccttagcacagggtctctgcaggactgcgggagccagcgctcctgccgcccctcttgcccctcagaccttgcatccacagaagcacaacccagccaaacaccacagccttctccagagccggcactgtcccggcaaccaggggtgccccaggctagctcttctacctctggggcaccacggactccccttggccactcttgggactttggtccacgtcctgagccactgaccacggccagtctctctttttatatgtgcagaaaagtgtttttacacaaactttctcatggtttgtaggtatttttttataaccccagtgctgaggagaaaggaggggcagtggcttccccggcagcagccccatgatggctgaatccgaaatcctcgatgggtccagcttgatgtctttgcagctgcacctatgggaagaagtagtcctctcttccttctcctcttcagctttttaaaaacagtcctcagaggatccatgatccccagcactgtcccatcctccacaaaggcccacaggcatgcctgtactctctttcattaaggtcttgaagtcaggctgccccctccccagcccccagttctctccccaccccctcaccccacccggggctcactcagcctggcagaggaagaaggaaggcagacatctccgcagccactcctgggccttttatgtgccgagttaccccacttgccttgggcgtgtccactgagccttccccagccagtcttgttctcaattttgttttgttttgttttgttttgagacggagtcttgctctgtcacccaggctggagtgctatggctcgatcttggctcactgcaacctccacctcccaggttcaagcaattctcttgccccagcctcccgagtagctgggattacaggtgcatgccaccatggctggctaatttttgtatttttagtagagatggggtttcaccatattggtcaggctgatctggaactcctgacctcaggtgatccacctgcctcagcctcccaaagtgctgggattacaggcgtgagcaatcgtgcccagccttgttcttaattttgtatcatccagtcatcgctaatattacacgcaccttctcacttaatcctcacgacaagcctgtgaggcagatgctcattgttcccatcttgatgaaacttgagtctcagggaagtgaagtgacttgcccagggtcactcaggtagagttgagattcaaacccacatgtggctccaaagtctgcatctggatttgggggtgttttttggcatggcaccctcacctctctccctgcctgttttccccaaagtggaaaggaaggcctttcaaaccagagtgtctcactcccctctgacctccagaccagatggggcatgagccagccagctcagccaggctccctgtgtcctgggaggaagtgtccccatcccccatgccccttatggggagggagggcgtctgatgctctctctctgcctcccccccatcctgtcaggcacaggtgacgggggcagcccatgcgagcccttctcctgctgctctgggagggccagttccacattgagccagcctggtcccatggaaaatgatggcctgggctttctgaggccttatctgatgcctctgcagttcatgtcccccaccaggcctcgaggctcagggtgggagagggccccgggctgccctgtcactcctctaacacttccctcccctgtccccaacatgccctgtaataaaattagagaagactaa

SEQ ID NO: 362486 - DNA, 3973 bp, Homo sapiens
ccccgccccgctctttcgcttcccgggccgccggcagccgccgccagccgcagccatgggccgggcccggccgggccaacgcgggccgcccagccccggccccgccgcgcagcctcccgcgccaccgcgccgccgcgcccgttccctggcgctgctcggagccctgctggccgccgccgctgccgccgccgtccgggtctgcgcccgccacgccgaggcccaggcggccgcgcggcaggaactggcgctgaagaccctggggacagatggcctttttctcttttcctccttggacactgacggggatatgtacatcagccctgaggagttcaaacccattgctgagaagctaacagggtcaactcccgcggccagctacgaggaggaggagttgccccctgaccctagcgaggagacgctcaccatagaagcccgattccagcctctgctcccggagaccatgaccaagagcaaagatggcttcctaggggtctcccgcctcgccctgtccggcctccgaaactggacagccgccgcctcaccaagtgcagtgtttgccacccgccacttccagcccttccttcccccgccaggccaggagctgggtgagccctggtggatcatccccagtgagctgagcatgttcactggctacctgtccaacaaccgcttctatccaccgccgcccaagggcaaggaggtcatcatccaccggctcctgagcatgttccaccctcggccctttgtgaagacccgctttgcccctcagggagctgtggcctgcctgactgccatcagcgacttctactacactgtgatgttccggatccatgccgagttccagctcagtgagccgcccgacttccccttttggttctcccctgctcagttcaccggccacatcatcctctccaaagacgccacccacgtccgcgacttccggctcttcgtgcccaaccacaggtctctgaatgtggacatggagtggctttacggggccagtgaaagcagcaacatggaggtggacatcggctacataccccagatggagctggaggccacgggcccctctgtgccctccgtgatcctggatgaggatggcagcatgatcgacagccacctgccttcaggggagcccctgcagtttgtgtttgaggagatcaagtggcagcaggagctgagctgggaggaggctgcccggcgcctggaggtggccatgtaccccttcaagaaggtctcctacttgccgttcactgaggccttcgaccgagccaaggctgagaacaagctggtgcactcaatcctgctgtggggggccctggatgaccagtcctgctgaggttcagggcggactctccgggagactgtcctggaaagttcgcccatcctcaccctgctcaacgagagcttcatcagcacctggtccctggtgaaggagctggaggaactgcagaacaaacaggagaactcgtcccaccagaagctggctggcctgcacctggagaagtacagcttccccgtggagatgatgatctgcctgcccaatggcaccgtggtccatcacatcaatgccaactacttcttggacatcacctccgtgaagcccgaggaaatcgagagcaatctcttcagcttctcatccacctttgaagacccgtccacggccacctacatgcagttcctgaaggagggactccggcgtggcctgcccctcctccagccctagagtgcctggacgggatctgatgcacaggcccccacgcctcagagccagagtggtcctcagcccatttcagactgcagatgccgcccactcccaccccactcctaggctgccttggagggtacaagatccactgagggtggccaccacagccttggctccatggtggcgggtagacaagggatgcctgggctgactgggcagaggaacctctagctctgactgtcactcggctctccctacccatttggctctggaagctgcttggcccccccagatcagggcctgggtgaactccctggacctttcctagccagccgcacagtctaggcccttgtggggtgaagaatggagggaggagcaggctaggaagacggggccaccaccctctccttgctttcagcccttcccacaggaaacatcaagaagccccagccaggaggggccaggctgccaaggcggctcccctgtttatctagagccttcgttcctggccataccccggactgccctcctgtgcctgatgtccccagctggggtcagtctcaacaggagccagtcttctggagcctctgggcagaaccctccatcagagtggaaatcagacgggaccccctgcagcttccctgaccacgccactgaccagctatctggggaagtttactgtgaaggggtttctgcctttagcaatggggttcactaagggggttcccgaggcccagggccaaggcactcccaccgcctaccttagcacagggtctctgcaggactgcgggagccagcgctcctgccgcccctcttgcccctcagaccttgcatccacagaagcacaacccagccaaacaccacagccttctccagagccggcactgtcccggcaaccaggggtgccccaggctagctcttctacctctggggcaccacggactccccttggccactcttgggactttggtccacgtcctgagccactgaccacggccagtctctctttttatatgtgcagaaaagtgtttttacacaaactttctcatggtttgtaggtatttttttataaccccagtgctgaggagaaaggaggggcagtggcttccccggcagcagccccatgatggctgaatccgaaatcctcgatgggtccagcttgatgtctttgcagctgcacctatgggaagaagtagtcctctcttccttctcctcttcagctttttaaaaacagtcctcagaggatccatgatccccagcactgtcccatcctccacaaaggcccacaggcatgcctgtactctctttcattaaggtcttgaagtcaggctgccctgcaacctccacctcccaggttcaagcaattctcttgccccagcctcccgagtagctgggattacaggtgcatgccaccatggctggctaatttttgtatttttagtagagatggggtttcaccatattggtcaggctgatctggaactcctgacctcaggtgatccacctgcctcagcctcccaaagtgctgggattacaggcgtgagcaatcgtgcccagccttgttcttaattttgtatcatccagtcatcgctaatattacacgcaccttctcacttaatcctcacgacaagcctgtgaggcagatgctcattgttcccatcttgatgaaacttgagtctcagggaagtgaagtgacttgcccagggtcactcaggtagagttgagattcaaacccacatgtggctccaaagtctgcatctggatttgggggtgttttttggcatggcaccctcacctctctccctgcctgttttccccaaagtggaaaggaaggcctttcaaaccagagtgtctcactcccctctgacctccagaccagatggggcatgagccagccagctcagccaggctccctgtgtcctgggaggaagtgtccccatcccccatgccccttatggggagggagggcgtctgatgctctctctctgcctcccccccatcctgtcaggcacaggtgacgggggcagcccatgcgagcccttctcctgctgctctgggagggccagttccacattgagccagcctggtcccatggaaaatgatggcctgggctttctgaggccttatctgatgcctctgcagttcatgtcccccaccaggcctcgaggctcagggtgggagagggccccgggctgccctgtcactcctctaacacttccctcccctgtccccaacatgccctgtaataaaattagagaagactaa

SEQ ID NO: 362487 - DNA, 1931 bp, Homo sapiens
gctcgtgccgaattcggcacgaggtgagagagtccgggagcccgagcttgagatggcctgatatgaaggagtcacgcctcccgcctcccggagctgcccagtggctgccttgtccttcaagtgcaggagctggttcaaatgtcaggaatggaagccactgtgaccatcccaatctggcaaaacaagccacatggggctgctcgaagtgtagtaagaagaattgggaccaacctacccttgaagccgtgtgcccgggcgtcctttgagaccctgcccaacatctctgacctgtgtttgagagatgtgcccccagtccctaccctggctgacatcgcctggattgctgcggatgaagaggagacatatgcccgggtcaggagtgatacgcgccccctgaggcacacctggaaacccagccctctgattgtcatgcagcgcaatgcctctgttcccaacctgcgtgggtccgaggagaggcttctggccctgaagaagccagctctgccagccctaagccgcactactgagctgcaggacgagctgagccacttgcgcagccagattgcaaagatagtggcagctgatgcagcttcggcttcattaacgccagatttcttatctccaggaagttcaaatgtctcttctcccttaccttgttttggatcctcattccactctacaacttcctttgtcattagtgacatcaccgaggagacagaggtggaggtccctgagcttccatcagtccccctgctttgttctgccagccctgaatgttgcaaaccagaacacaaagctgcctgcagttcgtctgaagaggatgactgcgtctctttgtccaaggccagcagctttgcagacatgatgggtatcctgaaggactttcaccgaatgaaacagagtcaagatctgaaccggagtttattgaaggaggaagaccctgctgtgcttatctctgaggtcctaaggaggaagtttgctctaaaggaagaagatatcagtagaaaaggaaattgacaaccctcagctctgcaaactcagtctcatgctcctggaataccttcaatagctgccttcctcaccgcagatgtttctgcctcttaaggatagatcttctgcaacagtcttgctgacaagctagagcttggactgaaagagaagagctggattatatatttcccagacttcaaaccctagcagaagctaaggcttgtgatttgacctgagacatttgtttcaggtaatcgtgtagaatgaagtatcttagtttaaagggtaagagagaagttgtttctggtttttccttgcccctgtgtgaaaataggtcctaaatgactgacttcactgcattagaccctatagctggtctcacaagacactttgtgcccagctgtcactcactctcagcagcttccttgcagcagagcagggctgaggggaaggggctatgaatgtttgtatacgtgttcacagggcacggaaaatcttatgctgctccgtcataaacctacaccaatgcccagcaatcaccctcctcacttccttgtctagatgtagaggtcaggctgctgaaccagccaacacatgggctactgctgggaagcctgggctgttttttttcttaaacacattttatattactgaacaaccaaatctaccctccacggccctgaggccttatcagttccactgattaaaaactttctcttccacggactttaagcccggtaggaaagagagaggaggagggggaaagagcaaaccatctttcttccaggcccttgactgctcctttgggctgggccaaggtttgtatgtaccacaccatgcatgactcagatgccctcaggtccctttctctatggtatgtatactgcttgtgtttgggttgaagcactacctgacattaaaggaaggacttggagagagaa

SEQ ID NO: 362488 - DNA, 4587 bp, Homo sapiens
ccccgccccgctctttcgcttcccgggccgccggcagccgccgccagccgcagccatgggccgggcccggccgggccaacgcgggccgcccagccccggccccgccgcgcagcctcccgcgccaccgcgccgccgcgcccgttccctggcgctgctcggagccctgctggccgccgccgctgccgccgccgtccgggtctgcgcccgccacgccgaggcccaggcggccgcgcggcaggaactggcgctgaagaccctggggacagatggcctttttctcttttcctccttggacactgacggggatatgtacatcagccctgaggagttcaaacccattgctgagaagctaacagggtcaactcccgcggccagctacgaggaggaggagttgccccctgaccctagcgaggagacgctcaccatagaagcccgattccagcctctgctcccggagaccatgaccaagagcaaagatggcttcctaggggtctcccgcctcgccctgtccggcctccgaaactggacagccgccgcctcaccaagtgcagtgtttgccacccgccacttccagcccttccttcccccgccaggccaggagctgggtgagccctggtggatcatccccagtgagctgagcatgttcactggctacctgtccaacaaccgcttctatccaccgccgcccaagggcaaggaggtcatcatccaccggctcctgagcatgttccaccctcggccctttgtgaagacccgctttgcccctcagggagctgtggcctgcctgactgccatcagcgacttctactacactgtgatgttccggatccatgccgagttccagctcagtgagccgcccgacttccccttttggttctcccctgctcagttcaccggccacatcatcctctccaaagacgccacccacgtccgcgacttccggctcttcgtgcccaaccacaggtctctgaatgtggacatggagtggctttacggggccagtgaaagcagcaacatggaggtggacatcggctacataccccagatggagctggaggccacgggcccctctgtgccctccgtgatcctggatgaggatggcagcatgatcgacagccacctgccttcaggggagcccctgcagtttgtgtttgaggagatcaagtggcagcaggagctgagctgggaggaggctgcccggcgcctggaggtggccatgtaccccttcaagaaggtctcctacttgccgttcactgaggccttcgaccgagccaaggctgagaacaagctggtgcactcaatcctgctgtggggggccctggatgaccagtcctgctgaggttcagggcggactctccgggagactgtcctggaaagttcgcccatcctcaccctgctcaacgagagcttcatcagcacctggtccctggtgaaggagctggaggaactgcagaacaaacaggagaactcgtcccaccagaagctggctggcctgcacctggagaagtacagcttccccgtggagatgatgatctgcctgcccaatggcaccgtggtccatcacatcaatgccaactacttcttggacatcacctccgtgaagcccgaggaaatcgagagcaatctcttcagcttctcatccacctttgaagacccgtccacggccacctacatgcagttcctgaaggagggactccggcgtggcctgcccctcctccagccctagagtgcctggacgggatctgatgcacaggcccccacgcctcagagccagagtggtcctcagcccatttcagactgcagatgccgcccactcccaccccactcctaggctgccttggagggtacaagatccactgagggtggccaccacagccttggctccatggtggcgggtagacaagggatgcctgggctgactgggcagaggaacctctagctctgactgtcactcggctctccctacccatttggctctggaagctgcttggcccccccagatcagggcctgggtgaactccctggacctttcctagccagccgcacagtctaggcccttgtggggtgaagaatggagggaggagcaggctaggaagacggggccaccaccctctccttgctttcagcccttcccacaggaaacatcaagaagccccagccaggaggggccaggctgccaaggcggctcccctgtttatctagagccttcgttcctggccataccccggactgccctcctgtgcctgatgtccccagctggggtcagtctcaacaggagccagtcttctggagcctctgggcagaaccctccatcagagtggaaatcagacgggaccccctgcagcttccctgaccacgccactgaccagctatctggggaagtttactgtgaaggggtttctgcctttagcaatggggttcactaagggggttcccgaggcccagggccaaggcactcccaccgcctaccttagcacagggtctctgcaggactgcgggagccagcgctcctgccgcccctcttgcccctcagaccttgcatccacagaagcacaacccagccaaacaccacagccttctccagagccggcactgtcccggcaaccaggggtgccccaggctagctcttctacctctggggcaccacggactccccttggccactcttgggactttggtccacgtcctgagccactgaccacggccagtctctctttttatatgtgcagaaaagtgtttttacacaaactttctcatggtttgtaggtatttttttataaccccagtgctgaggagaaaggaggggcagtggcttccccggcagcagccccatgatggctgaatccgaaatcctcgatgggtccagcttgatgtctttgcagctgcacctatgggaagaagtagtcctctcttccttctcctcttcagctttttaaaaacagtcctcagaggatccatgatccccagcactgtcccatcctccacaaaggcccacaggcatgcctgtactctctttcattaaggtcttgaagtcaggctgccccctccccagcccccagttctctccccaccccctcaccccacccggggctcactcagcctggcagaggaagaaggaaggcagacatctccgcagccactcctgggccttttatgtgccgagttaccccacttgccttgggcgtgtccactgagccttccccagccagtcttgttctcaattttgttttgttttgttttgttttgagacggagtcttgctctgtcacccaggctggagtgctatggctcgatcttggctcactgcaacctccacctcccaggttcaagcaattctcttgccccagcctcccgagtagctgggattacaggtgcatgccaccatggctggctaatttttgtatttttagtagagatggggtttcaccatattggtcaggctgatctggaactcctgacctcaggtgatccacctgcctcagcctcccaaagtgctgggattacaggcgtgagcaatcgtgcccagccttgttcttaattttgtatcatccagtcatcgctaatattacacgcaccttctcacttaatcctcacgacaagcctgtgaggcagatgctcattgttcccatcttgatgaaacttgagtctcagggaagtgaagtgacttgcccagggtcactcaggtagagttgagattcaaacccacatgtggctccaaagtctgcatctggatttgggggtgttttttggcatggcaccctcacctctctccctgcctgttttccccaaagtggaaaggaaggcctttcaaaccagagtgtctcactcccctctgacctccagaccagatggggcatgagccagccagctcagccaggctccctgtgtcctgggaggaagtgtccccatcccccatgccccttatggggagggagggcgtctgatgctctctctctgcctcccccccatcctgtcaggcacaggtgacgggggcagcccatgcgagcccttctcctgctgctctgggagggccagttccacattgagccagcctggtcccatggaaaatgatggcctgggctttctgaggccttatctgatgcctctgcagttcatgtcccccaccaggcctcgaggctcagggtgggagagggccccgggctgccctgtcactcctctaacacttccctcccctgtccccaacatgccctgtaataaaattagagaagactaaaaaaaaaaaaaaaaaaaaaaacaaaaaaaaaaaaaaaaaagggggggccccaaaaaattcccccgcagggggccccaagtctaggcgcgcgttacccccagtttttgtgttgtcaacaagggggccccccccataagagggagggaggcgccgaattaaaaagcgacccagagagccacgcgggccgcaggggtttttcacaccaacgggctcgggagcggggggaaacacttcggctcaccggggagacaaccttgggggagaagagaaccccataactcgcgggggggggaggccacataggtggggcacaaagctccctcacggaggtttaacgagccccagggggaaatt

SEQ ID NO: 362489 - DNA, 3629 bp, Homo sapiens
ccccgccccgctctttcgcttcccgggccgccggcagccgccgccagccgcagccatgggccgggcccggccgggccaacgcgggccgcccagccccggccccgccgcgcagcctcccgcgccaccgcgccgccgcgcccgttccctggcgctgctcggagccctgctggccgccgccgctgccgccgccgtccgggtctgcgcccgccacgccgaggcccaggcggccgcgcggcaggaactggcgctgaagaccctggggacagatggcctttttctcttttcctccttggacactgacggggatatgtacatcagccctgaggagttcaaacccattgctgagaagctaacagggtcaactcccgcggccagctacgaggaggaggagttgccccctgaccctagcgaggagacgctcaccatagaagcccgattccagcctctgctcccggagaccatgaccaagagcaaagatggcttcctaggggtctcccgcctcgccctgtccggcctccgaaactggacagccgccgcctcaccaagtgcagtgtttgccacccgccacttccagcccttccttcccccgccaggccaggagctgggtgagccctggtggatcatccccagtgagctgagcatgttcactggctacctgtccaacaaccgcttctatccaccgccgcccaagggcaaggaggtcatcatccaccggctcctgagcatgttccaccctcggccctttgtgaagacccgctttgcccctcagggagctgtggcctgcctgactgccatcagcgacttctactacactgtgatgttccggatccatgccgagttccagctcagtgagccgcccgacttccccttttggttctcccctgctcagttcaccggccacatcatcctctccaaagacgccacccacgtccgcgacttccggctcttcgtgcccaaccacaggtctctgaatgtggacatggagtggctttacggggccagtgaaagcagcaacatggaggtggacatcggctacataccccagatggagctggaggccacgggcccctctgtgccctccgtgatcctggatgaggatggcagcatgatcgacagccacctgccttcaggggagcccctgcagtttgtgtttgaggagatcaagtggcagcaggagctgagctgggaggaggctgcccggcgcctggaggtggccatgtaccccttcaagaaggtctcctacttgccgttcactgaggccttcgaccgagccaaggctgagaacaagctggtgcactcaatcctgctgtggggggccctggatgaccagtcctgctgaggttcagggcggactctccgggagactgtcctggaaagttcgcccatcctcaccctgctcaacgagagcttcatcagcacctggtccctggtgaaggagctggaggaactgcagaacaaacaggagaactcgtcccaccagaagctggctggcctgcacctggagaagtacagcttccccgtggagatgatgatctgcctgcccaatggcaccgtgatggcctgatatgaaggagtcacgcctcccgcctcccggagctgcccagtggctgccttgtccttcaagtgcaggagctggttcaaatgtcaggaatggaagccactgtggtaaggggcattcccagggcaggggtatggtggggaaggttgggtgctgggcctgctgaagtactgtaaaaggttctgagactctccagttgagcactcctttctccagaggcctggaattggagcaaggccaccgtttcactccctccccctaagaagaaccaactatgatcctggggcacttcaggagtcagtaccatcccaatctggcaaaacaagccacatggggctgctcgaagtgtagtaagaagaattgggaccaacctacccttgaagccgtgtgcccgggcgtcctttgagaccctgcccaacatctctgacctgtgtttgagagatgtgcccccagtccctaccctggctgacatcgcctggattgctgcggatgaagaggagacatatgcccgggtcaggagtgatacgcgccccctgaggcacacctggaaacccagccctctgattgtcatgcagcgcaatgcctctgttcccaacctgcgtgggtccgaggagaggcttctggccctgaagaagccagctctgccagccctaagccgcactactgagctgcaggacgagctgagccacttgcgcagccagattgcaaagatagtggcagctgatgcagcttcggcttcattaacgccagatttcttatctccaggaagttcaaatgtctcttctcccttaccttgttttggatcctcattccactctacaacttcctttgtcattagtgacatcaccgaggagacagaggtggaggtccctgagcttccatcagtccccctgctttgttctgccagccctgaatgttgcaaaccagaacacaaagctgcctgcagttcgtctgaagaggatgactgcgtctctttgtccaaggccagcagctttgcagacatgatgggtatcctgaaggactttcaccgaatgaaacagagtcaagatctgaaccggagtttattgaaggaggaagaccctgctgtgcttatctctgaggtcctaaggaggaagtttgctctaaaggaagaagatatcagtagaaaaggaaattgacaaccctcagctctgcaaactcagtctcatgctcctggaataccttcaatagctgccttcctcaccgcagatgtttctgcctcttaaggatagatcttctgcaacagtcttgctgacaagctagagcttggactgaaagagaagagctggattatatatttcccagacttcaaaccctagcagaagctaaggcttgtgatttgacctgagacatttgtttcaggtaatcgtgtagaatgaagtatcttagtttaaagggtaagagagaagttgtttctggtttttccttgcccctgtgtgaaaataggtcctaaatgactgacttcactgcattagaccctatagctggtctcacaagacactttgtgcccagctgtcactcactctcagcagcttccttgcagcagagcagggctgaggggaaggggctatgaatgtttgtatacgtgttcacagggcacggaaaatcttatgctgctccgtcataaacctacaccaatgcccagcaatcaccctcctcacttccttgtctagatgtagaggtcaggctgctgaaccagccaacacatgggctactgctgggaagcctgggctgttttttttcttaaacacattttatattactgaacaaccaaatctaccctccacggccctgaggccttatcagttccactgattaaaaactttctcttccacggactttaagcccggtaggaaagagagaggaggagggggaaagagcaaaccatctttcttccaggcccttgactgctcctttgggctgggccaaggtttgtatgtaccacaccatgcatgactcagatgccctcaggtccctttctctatggtatgtatactgcttgtgtttgggttgaagcactacctgacattaaaggaaggacttggagagagaa

SEQ ID NO: 362490 - DNA, 2362 bp, Homo sapiens
ttagccaggatggtctcgctctcctgacctcgtgatccgcccacctcggcctcccaaagtgctgggattacagatgtgagccactgcgcctggccgcagatctttaacagaacctttaagagtctggacttagagctaagtgttgggtgagggcagcctcttgggctggttttctcccctgtgaagtcatggctctgcagggcctggttttttggggcttgtgtggtgaccattaaatccccactgtggggggttgtttcacaagagggaaatctggtgctcctccagatggcctgatatgaaggagtcacgcctcccgcctcccggagctgcccagtggctgccttgtccttcaagtgcaggagctggttcaaatgtcaggaatggaagccactgtggtaaggggcattcccagggcaggggtatggtggggaaggttgggtgctgggcctgctgaagtactgtaaaaggttctgagactctccagttgagcactcctttctccagaggcctggaattggagcaaggccaccgtttcactccctccccctaagaagaaccaactatgatcctggggcacttcaggagtcagtaccatcccaatctggcaaaacaagccacatggggctgctcgaagtgtagtaagaagaattgggaccaacctacccttgaagccgtgtgcccgggcgtcctttgagaccctgcccaacatctctgacctgtgtttgagagatgtgcccccagtccctaccctggctgacatcgcctggattgctgcggatgaagaggagacatatgcccgggtcaggagtgatacgcgccccctgaggcacacctggaaacccagccctctgattgtcatgcagcgcaatgcctctgttcccaacctgcgtgggtccgaggagaggcttctggccctgaagaagccagctctgccagccctaagccgcactactgagctgcaggacgagctgagccacttgcgcagccagattgcaaagatagtggcagctgatgcagcttcggcttcattaacgccagatttcttatctccaggaagttcaaatgtctcttctcccttaccttgttttggatcctcattccactctacaacttcctttgtcattagtgacatcaccgaggagacagaggtggaggtccctgagcttccatcagtccccctgctttgttctgccagccctgaatgttgcaaaccagaacacaaagctgcctgcagttcgtctgaagaggatgactgcgtctctttgtccaaggccagcagctttgcagacatgatgggtatcctgaaggactttcaccgaatgaaacagagtcaagatctgaaccggagtttattgaaggaggaagaccctgctgtgcttatctctgaggtcctaaggaggaagtttgctctaaaggaagaagatatcagtagaaaaggaaattgacaaccctcagctctgcaaactcagtctcatgctcctggaataccttcaatagctgccttcctcaccgcagatgtttctgcctcttaaggatagatcttctgcaacagtcttgctgacaagctagagcttggactgaaagagaagagctggattatatatttcccagacttcaaaccctagcagaagctaaggcttgtgatttgacctgagacatttgtttcaggtaatcgtgtagaatgaagtatcttagtttaaagggtaagagagaagttgtttctggtttttccttgcccctgtgtgaaaataggtcctaaatgactgacttcactgcattagaccctatagctggtctcacaagacactttgtgcccagctgtcactcactctcagcagcttccttgcagcagagcagggctgaggggaaggggctatgaatgtttgtatacgtgttcacagggcacggaaaatcttatgctgctccgtcataaacctacaccaatgcccagcaatcaccctcctcacttccttgtctagatgtagaggtcaggctgctgaaccagccaacacatgggctactgctgggaagcctgggctgttttttttcttaaacacattttatattactgaacaaccaaatctaccctccacggccctgaggccttatcagttccactgattaaaaactttctcttccacggactttaagcccggtaggaaagagagaggaggagggggaaagagcaaaccatctttcttccaggcccttgactgctcctttgggctgggccaaggtttgtatgtaccacaccatgcatgactcagatgccctcaggtccctttctctatggtatgtatactgcttgtgtttgggttgaagcactacctgacattaaaggaaggacttggagagagaa

SEQ ID NO: 362491 - DNA, 2434 bp, Homo sapiens
  misc_feature (1)..(2): n is a, c, g, or t
  misc_feature (203)..(203): n is a, c, g, or t
nngagtccccgaagggtagttgctcgtcggagttccccagcaaacagtgaccaagccagacctcaggcttctagtttcggcttcgctgcttgacgggccgggctgccccgccgcgcattctgagacctggccgcggctcggaggcttccgcgcactcgggtccgggtcctgtgggtccaagggccgctgggcaggcggcgagnacttggccgaccttggcccaggtcgggtcgtctgccgcgggggaggggcgactcgccctggcgggtccccgcggggagagggtccgcgcgggtctccggccactgctgcgcgcggcaaagtttcactgagcgcggcggcctccgtgggggcccccgggaccaggggtgctgagcagggccctgcgctggaggagctcccgttctcctgaggggacgcctgtcagcagacagcaactgcagcctccggagggctgcggggcgcagagatggcctgatatgaaggagtcacgcctcccgcctcccggagctgcccagtggctgccttgtccttcaagtgcaggagctggttcaaatgtcaggaatggaagccactgtgaggcctggaattggagcaaggccaccgtttcactccctccccctaagaagaaccaactatgatcctggggcacttcaggagtcagtaccatcccaatctggcaaaacaagccacatggggctgctcgaagtgtagtaagaagaattgggaccaacctacccttgaagccgtgtgcccgggcgtcctttgagaccctgcccaacatctctgacctgtgtttgagagatgtgcccccagtccctaccctggctgacatcgcctggattgctgcggatgaagaggagacatatgcccgggtcaggagtgatacgcgccccctgaggcacacctggaaacccagccctctgattgtcatgcagcgcaatgcctctgttcccaacctgcgtgggtccgaggagaggcttctggccctgaagaagccagctctgccagccctaagccgcactactgagctgcaggacgagctgagccacttgcgcagccagattgcaaagatagtggcagctgatgcagcttcggcttcattaacgccagatttcttatctccaggaagttcaaatgtctcttctcccttaccttgttttggatcctcattccactctacaacttcctttgtcattagtgacatcaccgaggagacagaggtggaggtccctgagcttccatcagtccccctgctttgttctgccagccctgaatgttgcaaaccagaacacaaagctgcctgcagttcgtctgaagaggatgactgcgtctctttgtccaaggccagcagctttgcagacatgatgggtatcctgaaggactttcaccgaatgaaacagagtcaagatctgaaccggagtttattgaaggaggaagaccctgctgtgcttatctctgaggtcctaaggaggaagtttgctctaaaggaagaagatatcagtagaaaaggaaattgacaaccctcagctctgcaaactcagtctcatgctcctggaataccttcaatagctgccttcctcaccgcagatgtttctgcctcttaaggatagatcttctgcaacagtcttgctgacaagctagagcttggactgaaagagaagagctggattatatatttcccagacttcaaaccctagcagaagctaaggcttgtgatttgacctgagacatttgtttcaggtaatcgtgtagaatgaagtatcttagtttaaagggtaagagagaagttgtttctggtttttccttgcccctgtgtgaaaataggtcctaaatgactgacttcactgcattagaccctatagctggtctcacaagacactttgtgcccagctgtcactcactctcagcagcttccttgcagcagagcagggctgaggggaaggggctatgaatgtttgtatacgtgttcacagggcacggaaaatcttatgctgctccgtcataaacctacaccaatgcccagcaatcaccctcctcacttccttgtctagatgtagaggtcaggctgctgaaccagccaacacatgggctactgctgggaagcctgggctgttttttttcttaaacacattttatattactgaacaaccaaatctaccctccacggccctgaggccttatcagttccactgattaaaaactttctcttccacggactttaagcccggtaggaaagagagaggaggagggggaaagagcaaaccatctttcttccaggcccttgactgctcctttgggctgggccaaggtttgtatgtaccacaccatgcatgactcagatgccctcaggtccctttctctatggtatgtatactgcttgtgtttgggttgaagcactacctgacattaaaggaaggacttggagagagaa

SEQ ID NO: 362492 - DNA, 1965 bp, Homo sapiens
agcggtccggggggcgggtcagcggaagtgagggcggttgaggctgggcggcccaaggtggaaggaggggccgtgaggtgagagagtccgggagcccgagcttgagatggcctgatatgaaggagtcacgcctcccgcctcccggagctgcccagtggctgccttgtccttcaagtgcaggagctggttcaaatgtcaggaatggaagccactgtgaccatcccaatctggcaaaacaagccacatggggctgctcgaagtgtagtaagaagaattgggaccaacctacccttgaagccgtgtgcccgggcgtcctttgagaccctgcccaacatctctgacctgtgtttgagagatgtgcccccagtccctaccctggctgacatcgcctggattgctgcggatgaagaggagtgatacgcgccccctgaggcacacctggaaacccagccctctgattgtcatgcagcgcaatgcctctgttcccaacctgcgtgggtccgaggagaggcttctggccctgaagaagccagctctgccagccctaagccgcactactgagctgcaggacgagctgagccacttgcgcagccagattgcaaagatagtggcagctgatgcagcttcggcttcattaacgccagatttcttatctccaggaagttcaaatgtctcttctcccttaccttgttttggatcctcattccactctacaacttcctttgtcattagtgacatcaccgaggagacagaggtggaggtccctgagcttccatcagtccccctgctttgttctgccagccctgaatgttgcaaaccagaacacaaagctgcctgcagttcgtctgaagaggatgactgcgtctctttgtccaaggccagcagctttgcagacatgatgggtatcctgaaggactttcaccgaatgaaacagagtcaagatctgaaccggagtttattgaaggaggaagaccctgctgtgcttatctctgaggtcctaaggaggaagtttgctctaaaggaagaagatatcagtagaaaaggaaattgacaaccctcagctctgcaaactcagtctcatgctcctggaataccttcaatagctgccttcctcaccgcagatgtttctgcctcttaaggatagatcttctgcaacagtcttgctgacaagctagagcttggactgaaagagaagagctggattatatatttcccagacttcaaaccctagcagaagctaaggcttgtgatttgacctgagacatttgtttcaggtaatcgtgtagaatgaagtatcttagtttaaagggtaagagagaagttgtttctggtttttccttgcccctgtgtgaaaataggtcctaaatgactgacttcactgcattagaccctatagctggtctcacaagacactttgtgcccagctgtcactcactctcagcagcttccttgcagcagagcagggctgaggggaaggggctatgaatgtttgtatacgtgttcacagggcacggaaaatcttatgctgctccgtcataaacctacaccaatgcccagcaatcaccctcctcacttccttgtctagatgtagaggtcaggctgctgaaccagccaacacatgggctactgctgggaagcctgggctgttttttttcttaaacacattttatattactgaacaaccaaatctaccctccacggccctgaggccttatcagttccactgattaaaaactttctcttccacggactttaagcccggtaggaaagagagaggaggagggggaaagagcaaaccatctttcttccaggcccttgactgctcctttgggctgggccaaggtttgtatgtaccacaccatgcatgactcagatgccctcaggtccctttctctatggtatgtatactgcttgtgtttgggttgaagcactacctgacattaaaggaaggacttggagagagaa

SEQ ID NO: 362493 - DNA, 3946 bp, Homo sapiens
ccccgccccgctctttcgcttcccgggccgccggcagccgccgccagccgcagccatgggccgggcccggccgggccaacgcgggccgcccagccccggccccgccgcgcagcctcccgcgccaccgcgccgccgcgcccgttccctggcgctgctcggagccctgctggccgccgccgctgccgccgccgtccgggtctgcgcccgccacgccgaggcccaggcggccgcgcggcaggaactggcgctgaagaccctggggacagatggcctttttctcttttcctccttggacactgacggggatatgtacatcagccctgaggagttcaaacccattgctgagaagctaacagggtcaactcccgcggccagctacgaggaggaggagttgccccctgaccctagcgaggagacgctcaccatagaagcccgattccagcctctgctcccggagaccatgaccaagagcaaagatggcttcctaggggtctcccgcctcgccctgtccggcctccgaaactggacagccgccgcctcaccaagtgcagtgtttgccacccgccacttccagcccttccttcccccgccaggccaggagctgggtgagccctggtggatcatccccagtgagctgagcatgttcactggctacctgtccaacaaccgcttctatccaccgccgcccaagggcaaggaggtcatcatccaccggctcctgagcatgttccaccctcggccctttgtgaagacccgctttgcccctcagggagctgtggcctgcctgactgccatcagcgacttctactacactgtgatgttccggatccatgccgagttccagctcagtgagccgcccgacttccccttttggttctcccctgctcagttcaccggccacatcatcctctccaaagacgccacccacgtccgcgacttccggctcttcgtgcccaaccacaggtctctgaatgtggacatggagtggctttacggggccagtgaaagcagcaacatggaggtggacatcggctacataccccagatggagctggaggccacgggcccctctgtgccctccgtgatcctggatgaggatggcagcatgatcgacagccacctgccttcaggggagcccctgcagtttgtgtttgaggagatcaagtggcagcaggagctgagctgggaggaggctgcccggcgcctggaggtggccatgtaccccttcaagaaggtctcctacttgccgttcactgaggccttcgaccgagccaaggctgagaacaagctggtgcactcaatcctgctgtggggggccctggatgaccagtcctgctgaggttcagggcggactctccgggagactgtcctggaaagttcgcccatcctcaccctgctcaacgagagcttcatcagcacctggtccctggtgaaggagctggaggaactgcagaacaaacaggagaactcgtcccaccagaagctggctggcctgcacctggagaagtacagcttccccgtggagatgatgatctgcctgcccaatggcaccgtggtccatcacatcaatgccaactacttcttggacatcacctccgtgaagcccgaggaaatcgagagcaatctcttcagcttctcatccacctttgaagacccgtccacggccacctacatgcagttcctgaaggagggactccggcgtggcctgcccctcctccagccctagagtgcctggacgggatctgatgcacaggcccccacgcctcagagccagagtggtcctcagcccatttcagactgcagatgccgcccactcccaccccactcctaggctgccttggagggtacaagatccactgagggtggccaccacagccttggctccatggtggcgggtagacaagggatgcctgggctgactgggcagaggaacctctagctctgactgtcactcggctctccctacccatttggctctggaagctgcttggcccccccagatcagggcctgggtgaactccctggacctttcctagccagccgcacagtctaggcccttgtggggtgaagaatggagggaggagcaggctaggaagacggggccaccaccctctccttgctttcagcccttcccacaggaaacatcaagaagccccagccaggaggggccaggctgccaaggcggctcccctgtttatctagagccttcgttcctggccataccccggactgccctcctgtgcctgatgtccccagctggggtcagtctcaacaggagccagtcttctggagcctctgggcagaaccctccatcagagtggaaatcagacgggaccccctgcagcttccctgaccacgccactgaccagctatctggggaagtttactgtgaaggggtttctgcctttagcaatggggttcactaagggggttcccgaggcccagggccaaggcactcccaccgcctaccttagcacagggtctctgcaggactgcgggagccagcgctcctgccgcccctcttgcccctcagaccttgcatccacagaagcacaacccagccaaacaccacagccttctccagagccggcactgtcccggcaaccaggggtgccccaggctagctcttctacctctggggcaccacggactccccttggccactcttgggactttggtccacgtcctgagccactgaccacggccagtctctctttttatatgtgcagaaaagtgtttttacacaaactttctcatggtttgtaggtatttttttataaccccagtgctgaggagaaaggaggggcagtggcttccccggcagcagccccatgatggctgaatccgaaatcctcgatgggtccagcttgatgtctttgcagctgcacctatgggaagaagtagtcctctcttccttctcctcttcagctttttaaaaacagtcctcagaggatccatgatccccagcactgtcccatcctccacaaaggcccacaggcatgcctgtactctctttcattaaggtcttgaagtcaggctgccccctccccagcccccagttctctccccaccccctcaccccacccggggctcactcagcctggcagaggaagaaggaaggcagacatctccgcagccactcctgggccttttatgtgccgagttaccccacttgccttgggcgtgtccactgagccttccccagccagtcttgttctcaattttgttttgttttgttttgttttgagacggagtcttgctctgtcacccaggctggagtgctatggctcgatcttggctcactgcaacctccacctcccaggttcaagcaattctcttgccccagcctcccgagtagctgggattacaggtgcatgccaccatggctggctaatttttgtatttttagtagagatggggtttcaccatattggtcaggctgatctggaactcctgacctcaggtgatccacctgcctcagcctcccaaagtgctgggattacaggcgtgagcaatcgtgcccagccttgttcttaattttgtatcatccagtcatcgctaatattacacgcaccttctcacttaatcctcacgacaagcctgtgaggcagatgctcattgttcccatcttgatgaaacttgagtctcagggaagtgaagtgacttgcccagggtcactcaggtagagttgagattcaaacccacatgtggctccaaagtctgcatctggatttgggggtgttttttggcatggcaccctcacctctctccctgcctgttttccccaaagtggaaaggaaggcctttcaaaccagagtgtctcactcccctctgacctccagaccagatggggcatgagccagccagctcagccaggctccctgtgtcctgggaggaagtgtccccatcccccatgcgtggattgccagagccgaatgtccagcac

SEQ ID NO: 362494 - DNA, 2085 bp, Homo sapiens
ccccgccccgctctttcgcttcccgggccgccggcagccgccgccagccgcagccatgggccgggcccggccgggccaacgcgggccgcccagccccggccccgccgcgcagcctcccgcgccaccgcgccgccgcgcccgttccctggcgctgctcggagccctgctggccgccgccgctgccgccgccgtccgggtctgcgcccgccacgccgaggcccaggcggccgcgcggcaggaactggcgctgaagaccctggggacagatggcctttttctcttttcctccttggacactgacggggatatgtacatcagccctgaggagttcaaacccattgctgagaagctaacagggtcaactcccgcggccagctacgaggaggaggagttgccccctgaccctagcgaggagacgctcaccatagaagcccgattccagcctctgctcccggagaccatgaccaagagcaaagatggcttcctaggggtctcccgcctcgccctgtccggcctccgaaactggacagccgccgcctcaccaagtgcagtgtttgccacccgccacttccagcccttccttcccccgccaggccaggagctgggtgagccctggtggatcatccccagtgagctgagcatgttcactggctacctgtccaacaaccgcttctatccaccgccgcccaagggcaaggaggtcatcatccaccggctcctgagcatgttccaccctcggccctttgtgaagacccgctttgcccctcagggagctgtggcctgcctgactgccatcagcgacttctactacactgtgatgttccggatccatgccgagttccagctcagtgagccgcccgacttccccttttggttctcccctgctcagttcaccggccacatcatcctctccaaagacgccacccacgtccgcgacttccggctcttcgtgcccaaccacaggtctctgaatgtggacatggagtggctttacggggccagtgaaagcagcaacatggaggtggacatcggctacataccccagatggagctggaggccacgggcccctctgtgccctccgtgatcctggatgaggatggcagcatgatcgacagccacctgccttcaggggagcccctgcagtttgtgtttgaggagatcaagtggcagcaggagctgagctgggaggaggctgcccggcgcctggaggtggccatgtaccccttcaagaaggtctcctacttgccgttcactgaggccttcgaccgagccaaggctgagaacaagctggtgcactcaatcctgctgtggggggccctggatgaccagtcctgctgaggttcagggcggactctccgggagactgtcctggaaagttcgcccatcctcaccctgctcaacgagagcttcatcagcacctggtccctggtgaaggagctggaggaactgcagaacaaacaggagaactcgtcccaccagaagctggctggcctgcacctggagaagtacagcttccccgtggagatgatgatctgcctgcccaatggcaccgtgatggcctgatatgaaggagtcacgcctcccgcctcccggagctgcccagtggctgccttgtccttcaagtgcaggagctggttcaaatgtcaggaatggaagccactgtgaccatcccaatctggcaaaacaagccacatggggctgctcgaagtgtagtaagaagaattaaccagccaacacatgggctactgctgggaagcctgggctgttttttttcttaaacacattttatattactgaacaaccaaatctaccctccacggccctgaggccttatcagttccactgattaaaaactttctcttccacggactttaagcccggtaggaaagagagaggaggagggggaaagagcaaaccatctttcttccaggcccttgactgctcctttgggctgggccaaggtttgtatgtaccacaccatgcatgactcagatgccctcaggtccctttctctatggtatgtatactgcttgtgtttgggttgaagcactacctgacattaaaggaaggacttggagagagaa

SEQ ID NO: 362495 - DNA, 1310 bp, Homo sapiens
gctgattgtccatcaaagatgacaaatttggttttgagtattgttatgaagtcatgaacagaaacacatttgatggagtccctttgtaccaattaaagtgctcatgccgaactaagatttgctaagcaggacaaagatctgattcttcaattaactctctagtgaggtctgacataaattacagttcctctttcccccgtctctgccttggctctccactccaggcgaccactttatcaagttcttcgctccgtggtgtggtcactgcaaagccctggctccaacctgggagcagctggctctgggccttgaacattccgaaactgtcaagattggcaaggtgagtgaaagcccttattaaactggaaatggactgctttgggctggattaattagcagagtggcccattattcattccgtgtgcaaagtcgcaaacttgatttattaattccatttagtgtgccacttgataattcatttcaccttcacagatggcagtctgattttgagttttgctggcttttccacagcctagagataaattatggcctcggctgctttgtttattttgaagagatggccaaatctgaattggcagccccagagcccgttctgcaaagagatggggtagagccttgtagaatgttcactggacgaacttggagaccgtccacgttcgacctcacccaagagctctctctaaaaggaccctggctctgtgctcccccaagcacgcagaagaccctccctcagtttgcactgtgcctgggattctttccagcatttcctactttatacagagaagccaagagtggtgtctgacaacttctgtgtaactggattttctggaaatatccagtgtagctccagggacatcacttttattcttctacactttccagcacccaccagacaccatgcatagatttcctttcttaaaaatctcatttttctaccttgccatggggctgatttgtatccaaaagtaatgctgcgtgtctaggactgaatgatggttaacaggatgatctacttgggatggtgagatggtcaaaagcataaacttgggggttgggtagacctggctggctgaccttgggaaaaacctctccacgcctcggtctccccctttgcaaaactgagctaagatctactgtgtggtgtctgggcagatgaaagtacactgcttagtgtgatgcttagcatggggcagatgcttggtaaattgtaatcacttttgttgtcagttaaatggatatttcactgttgcctcttaaacgcttacgataatatatactaattatacaaa

SEQ ID NO: 362496 - DNA, 321 bp, Homo sapiens
aagaaaccaagacccacttaatacttgtcctgtctgaaggccagcaagaatacaccaaggccaaggccaatttctttcgggaaccccaaggcccccttcttgcccccttttaaaaaaaggaaatctttattaatcacgtatggttcacagataattctttttttaaaaaaacccaacctcctagagaagcacaactgtcaagagtcttgtacacacaacttcagctttgcatcacgagtcttgtattccaagaaaatcaaagtggtacaatttgtttgtttacactatgatactttctaaataaactctttttttttaaaa

SEQ ID NO: 362497 - DNA, 2963 bp, Homo sapiens
ccggaggccgcggcgaggcgcgcccagccccgccgcgatgcccgcgcgcccaggacgcctcctcccgctgctggcccggccggcggccctgactgcgctgctgctgctgctgctgggccatggcggcggcgggcgctggggcgcccgggcccaggaggcggcggcggcggcggcggacgggccccccgcggcagacggcgaggacggacaggacccgcacagcaagcacctgtacacggccgacatgttcacgcacgggatccagagcgccgcgcacttcgtcatgttcttcgcgccctggtgtggacactgccagcggctgcagccgacttggaatgacctgggagacaaatacaacagcatggaagatgccaaagtctatgtggctaaagtggactgcacggcccactccgacgtgtgctccgcccagggggtgcgaggataccccaccttaaagcttttcaagccaggccaagaagctgtgaagtaccagggtcctcgggacttccagacactggaaaactggatgctgcagacactgaacgaggagccagtgacaccagagccggaagtggaaccgcccagtgcccccgagctcaagcaagggctgtatgagctctcagcaagcaactttgagctgcacgttgcacaaggcgaccactttatcaagttcttcgctccgtggtgtggtcactgcaaagccctggctccaacctgggagcagctggctctgggccttgaacattccgaaactgtcaagattggcaaggttgattgtacacagcactatgaactctgctccggaaaccaggttcgtggctatcccactcttctctggttccgagatgggaaaaaggtggatcagtacaagggaaagcgggatttggagtcactgagggagtacgtggagtcgcagctgcagcgcacagagactggagcgacggagaccgtcacgccctcagaggccccggtgctggcagctgagcccgaggctgacaagggcactgtgttggcactcactgaaaataacttcgatgacaccattgcagaaggaataaccttcatcaagttttatgctccatggtgtggtcattgtaagactctggctcctacttgggaggaactctctaaaaaggaattccctggtctggcgggggtcaagatcgccgaagtagactgcactgctgaacggaatatctgcagcaagtattcggtacgaggctaccccacgttattgcttttccgaggagggaagaaagtcagtgagcacagtggaggcagagaccttgactcgttacaccgctttgtcctgagccaagcgaaagacgaactttaggaacacagttggaggtcacctctcctgcccagctcccgcaccctgcgtttaggagttcagtcccacagaggccactgggttcccagtggtggctgttcagaaagcagaacatactaagcgtgaggtatcttctttgtgtgtgtgttttccaagccaacacactctacagattctttattaagttaagtttctctaagtaaatgtgtaactcatggtcactgtgtaaacattttcagtggcgatatatcccctttgaccttctcttgatgaaatttacatggtttcctttgagactaaaatagcgttgagggaaatgaaattgctggactatttgtggctcctgagttgagtgattttggtgaaagaaagcacatccaaagcatagtttacctgcccacgagttctggaaaggtggccttgtggcagtattgacgttcctctgatcttaaggtcacagttgactcaatactgtgttggtccgtagcatggagcagattgaaatgcaaaaacccacacctctggaagataccttcacggccgctgctggagcttctgttgctgtgaatacttctctcagtgtgagaggttagccgtgatgaaagcagcgttacttctgaccgtgcctgagtaagagaatgctgatgccataactttatgtgtcgatacttgtcaaatcagttactgttcaggggatccttctgtttctcacggggtgaaacatgtctttagttcctcatgttaacacgaagccagagcccacatgaactgttggatgtcttccttagaaagggtaggcatggaaaattccacgaggctcattctcagtatctcattaactcattgaaagattccagttgtatttgtcacctggggtgacaagaccagacaggctttcccaggcctgggtatccagggaggctctgcagccctgctgaagggccctaactagagttctagagtttctgattctgtttctcagtagtccttttagaggcttgctatacttggtctgcttcaaggaggtcgaccttctaatgtatgaagaatgggatgcatttgatctcaagaccaaagacagatgtcagtgggctgctctggccctggtgtgcacggctgtggcagctgttgatgccagtgtcctctaactcatgctgtccttgtgattaaacacctctatctcccttgggaataagcacatacaggcttaagctctaagatagataggtgtttgtccttttaccatcgagctacttcccataataaccactttgcatccaacactcttcacccacctcccatacgcaaggggatgtggatacttggcccaaagtaactggtggtaggaatcttagaaacaagaccacttatactgtctgtctgaggcagaagataacagcagcatctcgaccagcctctgccttaaaggaaatctttattaatcacgtatggttcacagataattctttttttaaaaaaacccaacctcctagagaagcacaactgtcaagagtcttgtacacacaacttcagctttgcatcacgagtcttgtattccaagaaaatcaaagtggtacaatttgtttgtttacactatgatactttctaaataaactctttttttttaaaa

SEQ ID NO: 362498 - DNA, 2542 bp, Homo sapiens
ttacggctaggtacgaggctgggtggtggcttaaagcttttcaagccaggccaagaagctgtgaagtaccagggtcctcgggacttccagacactggaaaactggatgctgcagacactgaacgaggagccagtgacaccagagccggaagtggaaccgcccagtgcccccgagctcaagcaagggctgtatgagctctcagcaagcaactttgagctgcacgttgcacaaggcgaccactttatcaagttcttcgctccgtggtgtggtcactgcaaagccctggctccaacctgggagcagctggctctgggccttgaacattccgaaactgtcaagattggcaaggttgattgtacacagcactatgaactctgctccggaaaccaggttcgtggctatcccactcttctctggttccgagatgggaaaaaggtggatcagtacaagggaaagcgggatttggagtcactgagggagtacgtggagtcgcagctgcagcgcacagagactggagcgacggagaccgtcacgccctcagaggccccggtgctggcagctgagcccgaggctgacaagggcactgtgttggcactcactgaaaataacttcgatgacaccattgcagaaggaataaccttcatcaagttttatgctccatggtgtggtcattgtaagactctggctcctacttgggaggaactctctaaaaaggaattccctggtctggcgggggtcaagatcgccgaagtagactgcactgctgaacggaatatctgcagcaagtattcggtacgaggctaccccacgttattgcttttccgaggagggaagaaagtcagtgagcacagtggaggcagagaccttgactcgttacaccgctttgtcctgagccaagcgaaagacgaactttaggaacacagttggaggtcacctctcctgcccagctcccgcaccctgcgtttaggagttcagtcccacagaggccactgggttcccagtggtggctgttcagaaagcagaacatactaagcgtgaggtatcttctttgtgtgtgtgttttccaagccaacacactctacagattctttattaagttaagtttctctaagtaaatgtgtaactcatggtcactgtgtaaacattttcagtggcgatatatcccctttgaccttctcttgatgaaatttacatggtttcctttgagactaaaatagcgttgagggaaatgaaattgctggactatttgtggctcctgagttgagtgattttggtgaaagaaagcacatccaaagcatagtttacctgcccacgagttctggaaaggtggccttgtggcagtattgacgttcctctgatcttaaggtcacagttgactcaatactgtgttggtccgtagcatggagcagattgaaatgcaaaaacccacacctctggaagataccttcacggccgctgctggagcttctgttgctgtgaatacttctctcagtgtgagaggttagccgtgatgaaagcagcgttacttctgaccgtgcctgagtaagagaatgctgatgccataactttatgtgtcgatacttgtcaaatcagttactgttcaggggatccttctgtttctcacggggtgaaacatgtctttagttcctcatgttaacacgaagccagagcccacatgaactgttggatgtcttccttagaaagggtaggcatggaaaattccacgaggctcattctcagtatctcattaactcattgaaagattccagttgtatttgtcacctggggtgacaagaccagacaggctttcccaggcctgggtatccagggaggctctgcagccctgctgaagggccctaactagagttctagagtttctgattctgtttctcagtagtccttttagaggcttgctatacttggtctgcttcaaggaggtcgaccttctaatgtatgaagaatgggatgcatttgatctcaagaccaaagacagatgtcagtgggctgctctggccctggtgtgcacggctgtggcagctgttgatgccagtgtcctctaactcatgctgtccttgtgattaaacacctctatctcccttgggaataagcacatacaggcttaagctctaagatagataggtgtttgtccttttaccatcgagctacttcccataataaccactttgcatccaacactcttcacccacctcccatacgcaaggggatgtggatacttggcccaaagtaactggtggtaggaatcttagaaacaagaccacttatactgtctgtctgaggcagaagataacagcagcatctcgaccagcctctgccttaaaggaaatctttattaatcacgtatggttcacagataattctttttttaaaaaaacccaacctcctagagaagcacaactgtcaagagtcttgtacacacaacttcagctttgcatcacgagtcttgtattccaagaaaatcaaagtggtacaatttgtttgtttacactatgatactttctaaataaactctttttttttaaaa

SEQ ID NO: 362499 - DNA, 2573 bp, Homo sapiens
  misc_feature (29)..(29): n is a, c, g, or t
  misc_feature (45)..(45): n is a, c, g, or t
  misc_feature (48)..(48): n is a, c, g, or t
  misc_feature (51)..(51): n is a, c, g, or t
  misc_feature (57)..(57): n is a, c, g, or t
ggtggactgcacggcccactttagaccangatagactttggcgtnttncanggatanccacttaaagcttttcaagccaggccaagaagctgtgaagtaccagggtcctcgggacttccagacactggaaaactggatgctgcagacactgaacgaggagccagtgacaccagagccggaagtggaaccgcccagtgcccccgagctcaagcaagggctgtatgagctctcagcaagcaactttgagctgcacgttgcacaaggcgaccactttatcaagttcttcgctccgtggtgtggtcactgcaaagccctggctccaacctgggagcagctggctctgggccttgaacattccgaaactgtcaagattggcaaggttgattgtacacagcactatgaactctgctccggaaaccaggttcgtggctatcccactcttctctggttccgagatgggaaaaaggtggatcagtacaagggaaagcgggatttggagtcactgagggagtacgtggagtcgcagctgcagcgcacagagactggagcgacggagaccgtcacgccctcagaggccccggtgctggcagctgagcccgaggctgacaagggcactgtgttggcactcactgaaaataacttcgatgacaccattgcagaaggaataaccttcatcaagttttatgctccatggtgtggtcattgtaagactctggctcctacttgggaggaactctctaaaaaggaattccctggtctggcgggggtcaagatcgccgaagtagactgcactgctgaacggaatatctgcagcaagtattcggtacgaggctaccccacgttattgcttttccgaggagggaagaaagtcagtgagcacagtggaggcagagaccttgactcgttacaccgctttgtcctgagccaagcgaaagacgaactttaggaacacagttggaggtcacctctcctgcccagctcccgcaccctgcgtttaggagttcagtcccacagaggccactgggttcccagtggtggctgttcagaaagcagaacatactaagcgtgaggtatcttctttgtgtgtgtgttttccaagccaacacactctacagattctttattaagttaagtttctctaagtaaatgtgtaactcatggtcactgtgtaaacattttcagtggcgatatatcccctttgaccttctcttgatgaaatttacatggtttcctttgagactaaaatagcgttgagggaaatgaaattgctggactatttgtggctcctgagttgagtgattttggtgaaagaaagcacatccaaagcatagtttacctgcccacgagttctggaaaggtggccttgtggcagtattgacgttcctctgatcttaaggtcacagttgactcaatactgtgttggtccgtagcatggagcagattgaaatgcaaaaacccacacctctggaagataccttcacggccgctgctggagcttctgttgctgtgaatacttctctcagtgtgagaggttagccgtgatgaaagcagcgttacttctgaccgtgcctgagtaagagaatgctgatgccataactttatgtgtcgatacttgtcaaatcagttactgttcaggggatccttctgtttctcacggggtgaaacatgtctttagttcctcatgttaacacgaagccagagcccacatgaactgttggatgtcttccttagaaagggtaggcatggaaaattccacgaggctcattctcagtatctcattaactcattgaaagattccagttgtatttgtcacctggggtgacaagaccagacaggctttcccaggcctgggtatccagggaggctctgcagccctgctgaagggccctaactagagttctagagtttctgattctgtttctcagtagtccttttagaggcttgctatacttggtctgcttcaaggaggtcgaccttctaatgtatgaagaatgggatgcatttgatctcaagaccaaagacagatgtcagtgggctgctctggccctggtgtgcacggctgtggcagctgttgatgccagtgtcctctaactcatgctgtccttgtgattaaacacctctatctcccttgggaataagcacatacaggcttaagctctaagatagataggtgtttgtccttttaccatcgagctacttcccataataaccactttgcatccaacactcttcacccacctcccatacgcaaggggatgtggatacttggcccaaagtaactggtggtaggaatcttagaaacaagaccacttatactgtctgtctgaggcagaagataacagcagcatctcgaccagcctctgccttaaaggaaatctttattaatcacgtatggttcacagataattctttttttaaaaaaacccaacctcctagagaagcacaactgtcaagagtcttgtacacacaacttcagctttgcatcacgagtcttgtattccaagaaaatcaaagtggtacaatttgtttgtttacactatgatactttctaaataaactctttttttttaaaa

SEQ ID NO: 362500 - DNA, 3609 bp, Homo sapiens
  misc_feature (1274)..(1274): n is a, c, g, or t
  misc_feature (1496)..(1496): n is a, c, g, or t
ccggaggccgcggcgaggcgcgcccagccccgccgcgatgcccgcgcgcccaggacgcctcctcccgctgctggcccggccggcggccctgactgcgctgctgctgctgctgctgggccatggcggcggcgggcgctggggcgcccgggcccaggaggcggcggcggcggcggcggacgggccccccgcggcagacggcgaggacggacaggacccgcacagcaagcacctgtacacggccgacatgttcacgcacgggatccagagcgccgcgcacttcgtcatgttcttcgcgccctggtgtggacactgccagcggctgcagccgacttggaatgacctgggagacaaatacaacagcatggaagatgccaaagtctatgtggctaaagtggactgcacggcccactccgacgtgtgctccgcccagggggtgcgaggataccccaccttaaagcttttcaagccaggccaagaagctgtgaagtaccagggtcctcgggacttccagacactggaaaactggatgctgcagacactgaacgaggagccagtgacaccagagccggaagtggaaccgcccagtgcccccgagctcaagcaagggctgtatgagctctcagcaagcaactttgagctgcacgttgcacaaggcgaccactttatcaagttcttcgctccgtggtgtggtcactgcaaagccctggctccaacctgggagcagctggctctgggccttgaacattccgaaactgtcaagattggcaaggttgattgtacacagcactatgaactctgctccggaaaccaggttcgtggctatcccactcttctctggttccgagatgggaaaaaggtacgtctgcacttcttagtactgagaattcttcatctcttaaccccatcaggctgagctactgagtggtttaatgggcacagtgaattgccaatcttgattgttagggcactggtttggagaaatgtgtataatgaaacaaacgtctttctcttaattgataagatttgggttgtggagatgaaccttgaaacatttcagtggcccaggttatcactagaataacccacatcttacagtcacagggtaactgtgctctggttgtaaacacaaaccttcaggcctttgaacagagctaaggcttgcacttggtccggttctgcctgcctccctccctccttccctggccgatggtcagcagctcagagttccccatcagcacaacggcttgctggcaggcctctgccccagacttctntgatgtgtaaccccgtggagggaagaggggcctgtacagttctctcaccaaagccgaggcattcagttatcctctctacattcccgtctaaatatgaacatgcagactttgcaccaccgctaagacatctgggagctctgacccgggcaagcaggggttgcaggaaggcttaagtgattcagaacacctcagtggactcactcagccgcgtgcccgtgtctnggccaggtggatcagtacaagggaaagcgggatttggagtcactgagggagtacgtggagtcgcagctgcagcgcacagagactggagcgacggagaccgtcacgccctcagaggccccggtgctggcagctgagcccgaggctgacaagggcactgtgttggcactcactgaaaataacttcgatgacaccattgcagaaggaataaccttcatcaagttttatgctccatggtgtggtcattgtaagactctggctcctacttgggaggaactctctaaaaaggaattccctggtctggcgggggtcaagatcgccgaagtagactgcactgctgaacggaatatctgcagcaagtattcggtacgaggctaccccacgttattgcttttccgaggagggaagaaagtcagtgagcacagtggaggcagagaccttgactcgttacaccgctttgtcctgagccaagcgaaagacgaactttaggaacacagttggaggtcacctctcctgcccagctcccgcaccctgcgtttaggagttcagtcccacagaggccactgggttcccagtggtggctgttcagaaagcagaacatactaagcgtgaggtatcttctttgtgtgtgtgttttccaagccaacacactctacagattctttattaagttaagtttctctaagtaaatgtgtaactcatggtcactgtgtaaacattttcagtggcgatatatcccctttgaccttctcttgatgaaatttacatggtttcctttgagactaaaatagcgttgagggaaatgaaattgctggactatttgtggctcctgagttgagtgattttggtgaaagaaagcacatccaaagcatagtttacctgcccacgagttctggaaaggtggccttgtggcagtattgacgttcctctgatcttaaggtcacagttgactcaatactgtgttggtccgtagcatggagcagattgaaatgcaaaaacccacacctctggaagataccttcacggccgctgctggagcttctgttgctgtgaatacttctctcagtgtgagaggttagccgtgatgaaagcagcgttacttctgaccgtgcctgagtaagagaatgctgatgccataactttatgtgtcgatacttgtcaaatcagttactgttcaggggatccttctgtttctcacggggtgaaacatgtctttagttcctcatgttaacacgaagccagagcccacatgaactgttggatgtcttccttagaaagggtaggcatggaaaattccacgaggctcattctcagtatctcattaactcattgaaagattccagttgtatttgtcacctggggtgacaagaccagacaggctttcccaggcctgggtatccagggaggctctgcagccctgctgaagggccctaactagagttctagagtttctgattctgtttctcagtagtccttttagaggcttgctatacttggtctgcttcaaggaggtcgaccttctaatgtatgaagaatgggatgcatttgatctcaagaccaaagacagatgtcagtgggctgctctggccctggtgtgcacggctgtggcagctgttgatgccagtgtcctctaactcatgctgtccttgtgattaaacacctctatctcccttgggaataagcacatacaggcttaagctctaagatagataggtgtttgtccttttaccatcgagctacttcccataataaccactttgcatccaacactcttcacccacctcccatacgcaaggggatgtggatacttggcccaaagtaactggtggtaggaatcttagaaacaagaccacttatactgtctgtctgaggcagaagataacagcagcatctcgaccagcctctgccttaaaggaaatctttattaatcacgtatggttcacagataattctttttttaaaaaaacccaacctcctagagaagcacaactgtcaagagtcttgtacacacaacttcagctttgcatcacgagtcttgtattccaagaaaatcaaagtggtacaatttgtttgtttacactatgatactttctaaataaactctttttttttaaaa

SEQ ID NO: 362501 - DNA, 2870 bp, Homo sapiens
  misc_feature (535)..(535): n is a, c, g, or t
  misc_feature (757)..(757): n is a, c, g, or t
actgggaagttgatctgcttttattctcaggttgattgtacacagcactatgaactctgctccggaaaccaggttcgtggctatcccactcttctctggttccgagatgggaaaaaggtacgtctgcacttcttagtactgagaattcttcatctcttaaccccatcaggctgagctactgagtggtttaatgggcacagtgaattgccaatcttgattgttagggcactggtttggagaaatgtgtataatgaaacaaacgtctttctcttaattgataagatttgggttgtggagatgaaccttgaaacatttcagtggcccaggttatcactagaataacccacatcttacagtcacagggtaactgtgctctggttgtaaacacaaaccttcaggcctttgaacagagctaaggcttgcacttggtccggttctgcctgcctccctccctccttccctggccgatggtcagcagctcagagttccccatcagcacaacggcttgctggcaggcctctgccccagacttctntgatgtgtaaccccgtggagggaagaggggcctgtacagttctctcaccaaagccgaggcattcagttatcctctctacattcccgtctaaatatgaacatgcagactttgcaccaccgctaagacatctgggagctctgacccgggcaagcaggggttgcaggaaggcttaagtgattcagaacacctcagtggactcactcagccgcgtgcccgtgtctnggccaggtggatcagtacaagggaaagcgggatttggagtcactgagggagtacgtggagtcgcagctgcagcgcacagagactggagcgacggagaccgtcacgccctcagaggccccggtgctggcagctgagcccgaggctgacaagggcactgtgttggcactcactgaaaataacttcgatgacaccattgcagaaggaataaccttcatcaagttttatgctccatggtgtggtcattgtaagactctggctcctacttgggaggaactctctaaaaaggaattccctggtctggcgggggtcaagatcgccgaagtagactgcactgctgaacggaatatctgcagcaagtattcggtacgaggctaccccacgttattgcttttccgaggagggaagaaagtcagtgagcacagtggaggcagagaccttgactcgttacaccgctttgtcctgagccaagcgaaagacgaactttaggaacacagttggaggtcacctctcctgcccagctcccgcaccctgcgtttaggagttcagtcccacagaggccactgggttcccagtggtggctgttcagaaagcagaacatactaagcgtgaggtatcttctttgtgtgtgtgttttccaagccaacacactctacagattctttattaagttaagtttctctaagtaaatgtgtaactcatggtcactgtgtaaacattttcagtggcgatatatcccctttgaccttctcttgatgaaatttacatggtttcctttgagactaaaatagcgttgagggaaatgaaattgctggactatttgtggctcctgagttgagtgattttggtgaaagaaagcacatccaaagcatagtttacctgcccacgagttctggaaaggtggccttgtggcagtattgacgttcctctgatcttaaggtcacagttgactcaatactgtgttggtccgtagcatggagcagattgaaatgcaaaaacccacacctctggaagataccttcacggccgctgctggagcttctgttgctgtgaatacttctctcagtgtgagaggttagccgtgatgaaagcagcgttacttctgaccgtgcctgagtaagagaatgctgatgccataactttatgtgtcgatacttgtcaaatcagttactgttcaggggatccttctgtttctcacggggtgaaacatgtctttagttcctcatgttaacacgaagccagagcccacatgaactgttggatgtcttccttagaaagggtaggcatggaaaattccacgaggctcattctcagtatctcattaactcattgaaagattccagttgtatttgtcacctggggtgacaagaccagacaggctttcccaggcctgggtatccagggaggctctgcagccctgctgaagggccctaactagagttctagagtttctgattctgtttctcagtagtccttttagaggcttgctatacttggtctgcttcaaggaggtcgaccttctaatgtatgaagaatgggatgcatttgatctcaagaccaaagacagatgtcagtgggctgctctggccctggtgtgcacggctgtggcagctgttgatgccagtgtcctctaactcatgctgtccttgtgattaaacacctctatctcccttgggaataagcacatacaggcttaagctctaagatagataggtgtttgtccttttaccatcgagctacttcccataataaccactttgcatccaacactcttcacccacctcccatacgcaaggggatgtggatacttggcccaaagtaactggtggtaggaatcttagaaacaagaccacttatactgtctgtctgaggcagaagataacagcagcatctcgaccagcctctgccttaaaggaaatctttattaatcacgtatggttcacagataattctttttttaaaaaaacccaacctcctagagaagcacaactgtcaagagtcttgtacacacaacttcagctttgcatcacgagtcttgtattccaagaaaatcaaagtggtacaatttgtttgtttacactatgatactttctaaataaactctttttttttaaaa

SEQ ID NO: 362502 - DNA, 2912 bp, Homo sapiens
ccggaggccgcggcgaggcgcgcccagccccgccgcgatgcccgcgcgcccaggacgcctcctcccgctgctggcccggccggcggccctgactgcgctgctgctgctgctgctgggccatggcggcggcgggcgctggggcgcccgggcccaggaggcggcggcggcggcggcggacgggccccccgcggcagacggcgaggacggacaggacccgcacagcaagcacctgtacacggccgacatgttcacgcacgggatccagagcgccgcgcacttcgtcatgttcttcgcgccctggtgtggacactgccagcggctgcagccgacttggaatgacctgggagacaaatacaacagcatggaagatgccaaagtctatgtggctaaagtggactgcacggcccactccgacgtgtgctccgcccagggggtgcgaggataccccaccttaaagcttttcaagccaggccaagaagctgtgaagtaccagggtcctcgggacttccagacactggaaaactggatgctgcagacactgaacgaggagccagtgacaccagagccggaagtggaaccgcccagtgcccccgagctcaagcaagggctgtatgagctctcagcaagcaactttgagctgcacgttgcacaaggcgaccactttatcaagttcttcgctccgtggtgtggtcactgcaaagccctggctccaacctgggagcagctggctctgggccttgaacattccgaaactgtcaagattggcaaggttgattgtacacagcactatgaactctgctccggaaaccaggttcgtggctatcccactcttctctggttccgagatgggaaaatggagtcgcagctgcagcgcacagagactggagcgacggagaccgtcacgccctcagaggccccggtgctggcagctgagcccgaggctgacaagggcactgtgttggcactcactgaaaataacttcgatgacaccattgcagaaggaataaccttcatcaagttttatgctccatggtgtggtcattgtaagactctggctcctacttgggaggaactctctaaaaaggaattccctggtctggcgggggtcaagatcgccgaagtagactgcactgctgaacggaatatctgcagcaagtattcggtacgaggctaccccacgttattgcttttccgaggagggaagaaagtcagtgagcacagtggaggcagagaccttgactcgttacaccgctttgtcctgagccaagcgaaagacgaactttaggaacacagttggaggtcacctctcctgcccagctcccgcaccctgcgtttaggagttcagtcccacagaggccactgggttcccagtggtggctgttcagaaagcagaacatactaagcgtgaggtatcttctttgtgtgtgtgttttccaagccaacacactctacagattctttattaagttaagtttctctaagtaaatgtgtaactcatggtcactgtgtaaacattttcagtggcgatatatcccctttgaccttctcttgatgaaatttacatggtttcctttgagactaaaatagcgttgagggaaatgaaattgctggactatttgtggctcctgagttgagtgattttggtgaaagaaagcacatccaaagcatagtttacctgcccacgagttctggaaaggtggccttgtggcagtattgacgttcctctgatcttaaggtcacagttgactcaatactgtgttggtccgtagcatggagcagattgaaatgcaaaaacccacacctctggaagataccttcacggccgctgctggagcttctgttgctgtgaatacttctctcagtgtgagaggttagccgtgatgaaagcagcgttacttctgaccgtgcctgagtaagagaatgctgatgccataactttatgtgtcgatacttgtcaaatcagttactgttcaggggatccttctgtttctcacggggtgaaacatgtctttagttcctcatgttaacacgaagccagagcccacatgaactgttggatgtcttccttagaaagggtaggcatggaaaattccacgaggctcattctcagtatctcattaactcattgaaagattccagttgtatttgtcacctggggtgacaagaccagacaggctttcccaggcctgggtatccagggaggctctgcagccctgctgaagggccctaactagagttctagagtttctgattctgtttctcagtagtccttttagaggcttgctatacttggtctgcttcaaggaggtcgaccttctaatgtatgaagaatgggatgcatttgatctcaagaccaaagacagatgtcagtgggctgctctggccctggtgtgcacggctgtggcagctgttgatgccagtgtcctctaactcatgctgtccttgtgattaaacacctctatctcccttgggaataagcacatacaggcttaagctctaagatagataggtgtttgtccttttaccatcgagctacttcccataataaccactttgcatccaacactcttcacccacctcccatacgcaaggggatgtggatacttggcccaaagtaactggtggtaggaatcttagaaacaagaccacttatactgtctgtctgaggcagaagataacagcagcatctcgaccagcctctgccttaaaggaaatctttattaatcacgtatggttcacagataattctttttttaaaaaaacccaacctcctagagaagcacaactgtcaagagtcttgtacacacaacttcagctttgcatcacgagtcttgtattccaagaaaatcaaagtggtacaatttgtttgtttacactatgatactttctaaataaactctttttttttaaaa

SEQ ID NO: 362503 - DNA, 3526 bp, Homo sapiens
ccggaggccgcggcgaggcgcgcccagccccgccgcgatgcccgcgcgcccaggacgcctcctcccgctgctggcccggccggcggccctgactgcgctgctgctgctgctgctgggccatggcggcggcgggcgctggggcgcccgggcccaggaggcggcggcggcggcggcggacgggccccccgcggcagacggcgaggacggacaggacccgcacagcaagcacctgtacacggccgacatgttcacgcacgggatccagagcgccgcgcacttcgtcatgttcttcgcgccctggtgtggacactgccagcggctgcagccgacttggaatgacctgggagacaaatacaacagcatggaagatgccaaagtctatgtggctaaagtggactgcacggcccactccgacgtgtgctccgcccagggggtgcgaggataccccaccttaaagcttttcaagccaggccaagaagctgtgaagtaccagggtcctcgggacttccagacactggaaaactggatgctgcagacactgaacgaggagccagtgacaccagagccggaagtggaaccgcccagtgcccccgagctcaagcaagggctgtatgagctctcagcaagcaactttgagctgcacgttgcacaaggcgaccactttatcaagttcttcgctccgtggtgtggtcactgcaaagccctggctccaacctgggagcagctggctctgggccttgaacattccgaaactgtcaagattggcaaggttgattgtacacagcactatgaactctgctccggaaaccaggttcgtggctatcccactcttctctggttccgagatgggaaaaaggtggatcagtacaagggaaagcgggatttggagtcactgagggagtacgtggagtcgcagctgcagcgcacagagactggagcgacggagaccgtcacgccctcagaggccccggtgctggcagctgagcccgaggctgacaagggcactgtgttggcactcactgaaaataacttcgatgacaccattgcagaaggaataaccttcatcaagttttatgctccatggtgtggtcattgtaagactctggctcctacttgggaggaactctctaaaaaggaattccctggtctggcgggggtcaagatcgccgaagtagactgcactgctgaacggaatatctgcagcaagtattcggtacgaggctaccccacgttattgcttttccgaggagggaagaaagtcagtgagcacagtggaggcagagaccttgactcgttacaccgctttgtcctgagccaagcgaaagacgaactttaggaacacagttggaggtcacctctcctgcccagctcccgcaccctgcgtttaggagttcagtcccacagaggccactgggttcccagtggtggctgttcagaaagcagaacatactaagcgtgaggtatcttctttgtgtgtgtgttttccaagccaacacactctacagattctttattaagttaagtttctctaagtaaatgtgtaactcatggtcactgtgtaaacattttcagtggcgatatatcccctttgaccttctcttgatgaaatttacatggtttcctttgagactaaaatagcgttgagggaaatgaaattgctggactatttgtggctcctgagttgagtgattttggtgaaagaaagcacatccaaagcatagtttacctgcccacgagttctggaaaggtggccttgtggcagtattgacgttcctctgatcttaaggtcacagttgactcaatactgtgttggtccgtagcatggagcagattgaaatgcaaaaacccacacctctggaagataccttcacggccgctgctggagcttctgttgctgtgaatacttctctcagtgtgagaggttagccgtgatgaaagcagcgttacttctgaccgtgcctgagtaagagaatgctgatgccataactttatgtgtcgatacttgtcaaatcagttactgttcaggggatccttctgtttctcacggggtgaaacatgtctttagttcctcatgttaacacgaagccagagcccacatgaactgttggatgtcttccttagaaagggtaggcatggaaaattccacgaggctcattctcagtatctcattaactcattgaaagattccagttgtatttgtcacctggggtgacaagaccagacaggctttcccaggcctgggtatccagggaggctctgcagccctgctgaagggccctaactagagttctagagtttctgattctgtttctcagtagtccttttagaggcttgctatacttggtctgcttcaaggaggtcgaccttctaatgtatgaagaatgggatgcatttgatctcaagaccaaagacagatgtcagtgggctgctctggccctggtgtgcacggctgtggcagctgttgatgccagtgtcctctaactcatgctgtccttgtgattaaacacctctatctcccttgggaataagcacatacaggcttaagctctaagatagataggtgtttgtccttttaccatcgagctacttcccataataaccactttgcatccaacactcttcacccacctcccatacgcaaggggatgtggatacttggcccaaagtaactggtggtaggaatcttagaaacaagaccacttatactgtctgtctgaggcagaagataacagcagcatctcgaccagcctctgccttaaaggaaatctttattaatcacgtatggttcacagataattctttttttaaaaaaacccaacctcctagagaagcacaactgtcaagagtcttgtacacacaacttcagctttgcatcacgagtcttgtattccaagaaaatcaaagtggtacaatttgtttgtttacactatgatactttctaaataaactctttttttttaaaagtctggtctttccttcaatgttacagcaaaacagatataaaatagacaataaattatagtttatatttacaaaaaaagctgtaagtgcaaacagttgtagattataaatgtattatttaatcagtttagtatgaaattgccttcccagtacatgattgtgaaaaagacatttagaaaatattctaaaatttaatctgagcctcactttctacaagggaaatcatgatttccgttcataaacagcatgctcatccccctaacaccattcttataagctgggcaccctcattttattttcttcgttggttctaaccctgtggcgtggtatgctgtatagtaaaaaggcagagaaccactttactgaaaaggtactagagccggcagtccagaagttaatgtgctggtcaaagaaccgttctggtaaagaagaggtgagcattgccttcacgtgttacacggttacacaccccttgtagcctcacctcagtgtaatcagtctacttttggtactagcaaagagtacagcaaatggaggattgaggtgtagaaatggtatgttttgg

SEQ ID NO: 362504 - DNA, 3117 bp, Homo sapiens
  misc_feature (2966)..(2966): n is a, c, g, or t
ccggaggccgcggcgaggcgcgcccagccccgccgcgatgcccgcgcgcccaggacgcctcctcccgctgctggcccggccggcggccctgactgcgctgctgctgctgctgctgggccatggcggcggcgggcgctggggcgcccgggcccaggaggcggcggcggcggcggcggacgggccccccgcggcagacggcgaggacggacaggacccgcacagcaagcacctgtacacggccgacatgttcacgcacgggatccagagcgccgcgcacttcgtcatgttcttcgcgccctggtgtggacactgccagcggctgcagccgacttggaatgacctgggagacaaatacaacagcatggaagatgccaaagtctatgtggctaaagtggactgcacggcccactccgacgtgtgctccgcccagggggtgcgaggataccccaccttaaagcttttcaagccaggccaagaagctgtgaagtaccagggtcctcgggacttccagacactggaaaactggatgctgcagacactgaacgaggagccagtgacaccagagccggaagtggaaccgcccagtgcccccgagctcaagcaagggctgtatgagctctcagcaagcaactttgagctgcacgttgcacaaggcgaccactttatcaagttcttcgctccgtggtgtggtcactgcaaagccctggctccaacctgggagcagctggctctgggccttgaacattccgaaactgtcaagattggcaaggttgattgtacacagcactatgaactctgctccggaaaccaggttcgtggctatcccactcttctctggttccgagatgggaaaaaggtggatcagtacaagggaaagcgggatttggagtcactgagggagtacgtggagtcgcagctgcagcgcacagagactggagcgacggagaccgtcacgccctcagaggccccggtgctggcagctgagcccgaggctgacaagggcactgtgttggcactcactgaaaataacttcgatgacaccattgcagaaggaataaccttcatcaagttttatgctccatggtgtggtcattgtaagactctggctcctacttgggaggaactctctaaaaaggaattccctggtctggcgggggtcaagatcgccgaagtagactgcactgctgaacggaatatctgcagcaagtattcggtacgaggctaccccacgttattgcttttccgaggagggaagaaagtcagtgagcacagtggaggcagagaccttgactcgttacaccgctttgtcctgagccaagcgaaagacgaactttaggaacacagttggaggtcacctctcctgcccagctcccgcaccctgcgtttaggagttcagtcccacagaggccactgggttcccagtggtggctgttcagaaagcagaacatactaagcgtgaggtatcttctttgtgtgtgtgttttccaagccaacacactctacagattctttattaagttaagtttctctaagtaaatgtgtaactcatggtcactgtgtaaacattttcagtggcgatatatcccctttgaccttctcttgatgaaatttacatggtttcctttgagactaaaatagcgttgagggaaatgaaattgctggactatttgtggctcctgagttgagtgattttggtgaaagaaagcacatccaaagcatagtttacctgcccacgagttctggaaaggtggccttgtggcagtattgacgttcctctgatcttaaggtcacagttgactcaatactgtgttggtccgtagcatggagcagattgaaatgcaaaaacccacacctctggaagataccttcacggccgctgctggagcttctgttgctgtgaatacttctctcagtgtgagaggttagccgtgatgaaagcagcgttacttctgaccgtgcctgagtaagagaatgctgatgccataactttatgtgtcgatacttgtcaaatcagttactgttcaggggatccttctgtttctcacggggtgaaacatgtctttagttcctcatgttaacacgaagccagagcccacatgaactgttggatgtcttccttagaaagggtaggcatggaaaattccacgaggctcattctcagtatctcattaactcattgaaagattccagttgtatttgtcacctggggtgacaagaccagacaggctttcccaggcctgggtatccagggaggctctgcagccctgctgaagggccctaactagagttctagagtttctgattctgtttctcagtagtccttttagaggcttgctatacttggtctgcttcaaggaggtcgaccttctaatgtatgaagaatgggatgcatttgatctcaagaccaaagacagatgtcagtgggctgctctggccctggtgtgcacggctgtggcagctgttgatgccagtgtcctctaactcatgctgtccttgtgattaaacacctctatctcccttgggaataagcacatacaggcttaagctctaagatagataggtgtttgtccttttaccatcgagctacttcccataataaccactttgcatccaacactcttcacccacctcccatacgcaaggggatgtggatacttggcccaaagtaactggtggtaggaatcttagaaacaagaccacttatactgtctgtctgaggcagaagataacagcagcatctcgaccagcctctgccttaaaggaaatctttattaatcacgtatggttcacagataattctttttttaaaaaaacccaacctcctagagaagcacaactgtcaagagtcttgtacacacaacttcagctttgcatcacgagtcttgtattccaagaaaatcaaagtggtacaatttgtttgtttacactatgatactttctaaataaactctttttttttaaaaacnacacgaaaaaactccgagggctctaatccggggccgggaaaagagggtctggaatgggcatgggccaaagcgggtccctgaaccacttttcttgtcacagggagattgcgggccccaaagggggcgataaattcgaaagccggtacgattg

SEQ ID NO: 362505 - DNA, 3051 bp, Homo sapiens
ccggaggccgcggcgaggcgcgcccagccccgccgcgatgcccgcgcgcccaggacgcctcctcccgctgctggcccggccggcggccctgactgcgctgctgctgctgctgctgggccatggcggcggcgggcgctggggcgcccgggcccaggaggcggcggcggcggcggcggacgggccccccgcggcagacggcgaggacggacaggacccgcacagcaagcacctgtacacggccgacatgttcacgcacgggatccagagcgccgcgcacttcgtcatgttcttcgcgccctggtgtggacactgccagcggctgcagccgacttggaatgacctgggagacaaatacaacagcatggaagatgccaaagtctatgtggctaaagtggactgcacggcccactccgacgtgtgctccgcccagggggtgcgaggataccccaccttaaagcttttcaagccaggccaagaagctgtgaagtaccagggtcctcgggacttccagacactggaaaactggatgctgcagacactgaacgaggagccagtgacaccagagccggaagtggaaccgcccagtgcccccgagctcaagcaagggctgtatgagctctcagcaagcaactttgagctgcacgttgcacaaggcgaccactttatcaagttcttcgctccgtggtgtggtcactgcaaagccctggctccaacctgggagcagctggctctgggccttgaacattccgaaactgtcaagattggcaaggttgattgtacacagcactatgaactctgctccggaaaccaggttcgtggctatcccactcttctctggttccgagatgggaaaaaggtggatcagtacaagggaaagcgggatttggagtcactgagggagtacgtggagtcgcagctgcagcgcacagagactggagcgacggagaccgtcacgccctcagaggccccggtgctggcagctgagcccgaggctgacaagggcactgtgttggcactcactgaaaataacttcgatgacaccattgcagaaggaataaccttcatcaagttttatgctccatggtgtggtcattgtaagactctggctcctacttgggaggaactctctaaaaaggaattccctggtctggcgggggtcaagatcgccgaagtagactgcactgctgaacggaatatctgcagcaagtattcggtacgaggctaccccacgttattgcttttccgaggagggaagaaagtcagtgagcacagtggaggcagagaccttgactcgttacaccgctttgtcctgagccaagcgaaagacgaactttaggaacacagttggaggtcacctctcctgcccagctcccgcaccctgcgtttaggagttcagtcccacagaggccactgggttcccagtggtggctgttcagaaagcagaacatactaagcgtgaggtatcttctttgtgtgtgtgttttccaagccaacacactctacagattctttattaagttaagtttctctaagtaaatgtgtaactcatggtcactgtgtaaacattttcagtggcgatatatcccctttgaccttctcttgatgaaatttacatggtttcctttgagactaaaatagcgttgagggaaatgaaattgctggactatttgtggctcctgagttgagtgattttggtgaaagaaagcacatccaaagcatagtttacctgcccacgagttctggaaaggtggccttgtggcagtattgacgttcctctgatcttaaggtcacagttgactcaatactgtgttggtccgtagcatggagcagattgaaatgcaaaaacccacacctctggaagataccttcacggccgctgctggagcttctgttgctgtgaatacttctctcagtgtgagaggttagccgtgatgaaagcagcgttacttctgaccgtgcctgagtaagagaatgctgatgccataactttatgtgtcgatacttgtcaaatcagttactgttcaggggatccttctgtttctcacggggtgaaacatgtctttagttcctcatgttaacacgaagccagagcccacatgaactgttggatgtcttccttagaaagggtaggcatggaaaattccacgaggctcattctcagtatctcattaactcattgaaagattccagttgtatttgtcacctggggtgacaagaccagacaggctttcccaggcctgggtatccagggaggctctgcagccctgctgaagggccctaactagagttctagagtttctgattctgtttctcagtagtccttttagaggcttgctatacttggtctgcttcaaggaggtcgaccttctaatgtatgaagaatgggatgcatttgatctcaagaccaaagacagatgtcagtgggctgctctggccctggtgtgcacggctgtggcagctgttgatgccagtgtcctctaactcatgctgtccttgtgattaaacacctctatctcccttgggaataagcacatacaggcttaagctctaagatagataggtgtttgtccttttaccatcgagctacttcccataataaccactttgcatccaacactcttcacccacctcccatacgcaaggggatgtggatacttggcccaaagtaactggtggtaggaatcttagaaacaagaccacttatactgtctgtctgaggcagaagataacagcagcatctcgaccagcctctgccttaaaggaaatctttattaatcacgtatggttcacagataattctttttttaaaaaaacccaacctcctagagaagcacaactgtcaagagtcttgtacacacaacttcagctttgcatcacgagtcttgtattccaagaaaatcaaagtggtacaatttgtttgtttacactatgatactttctaaataaactctttttttttaaaatttttttttttttttttttttttattgtttattgtgtatttttttttttgaaaaaaaggagggggtaagggttcagggggaaaaattt

SEQ ID NO: 362506 - DNA, 3014 bp, Homo sapiens
ccggaggccgcggcgaggcgcgcccagccccgccgcgatgcccgcgcgcccaggacgcctcctcccgctgctggcccggccggcggccctgactgcgctgctgctgctgctgctgggccatggcggcggcgggcgctggggcgcccgggcccaggaggcggcggcggcggcggcggacgggccccccgcggcagacggcgaggacggacaggacccgcacagcaagcacctgtacacggccgacatgttcacgcacgggatccagagcgccgcgcacttcgtcatgttcttcgcgccctggtgtggacactgccagcggctgcagccgacttggaatgacctgggagacaaatacaacagcatggaagatgccaaagtctatgtggctaaagtggactgcacggcccactccgacgtgtgctccgcccagggggtgcgaggataccccaccttaaagcttttcaagccaggccaagaagctgtgaagtaccagggtcctcgggacttccagacactggaaaactggatgctgcagacactgaacgaggagccagtgacaccagagccggaagtggaaccgcccagtgcccccgagctcaagcaagggctgtatgagctctcagcaagcaactttgagctgcacgttgcacaaggcgaccactttatcaagttcttcgctccgtggtgtggtcactgcaaagccctggctccaacctgggagcagctggctctgggccttgaacattccgaaactgtcaagattggcaaggttgattgtacacagcactatgaactctgctccggaaaccaggttcgtggctatcccactcttctctggttccgagatgggaaaaaggtggatcagtacaagggaaagcgggatttggagtcactgagggagtacgtggagtcgcagctgcagcgcacagagactggagcgacggagaccgtcacgccctcagaggccccggtgctggcagctgagcccgaggctgacaagggcactgtgttggcactcactgaaaataacttcgatgacaccattgcagaaggaataaccttcatcaagttttatgctccatggtgtggtcattgtaagactctggctcctacttgggaggaactctctaaaaaggaattccctggtctggcgggggtcaagatcgccgaagtagactgcactgctgaacggaatatctgcagcaagtattcggtacgaggctaccccacgttattgcttttccgaggagggaagaaagtcagtgagcacagtggaggcagagaccttgactcgttacaccgctttgtcctgagccaagcgaaagacgaactttaggaacacagttggaggtcacctctcctgcccagctcccgcaccctgcgtttaggagttcagtcccacagaggccactgggttcccagtggtggctgttcagaaagcagaacatactaagcgtgaggtatcttctttgtgtgtgtgttttccaagccaacacactctacagattctttattaagttaagtttctctaagtaaatgtgtaactcatggtcactgtgtaaacattttcagtggcgatatatcccctttgaccttctcttgatgaaatttacatggtttcctttgagactaaaatagcgttgagggaaatgaaattgctggactatttgtggctcctgagttgagtgattttggtgaaagaaagcacatccaaagcatagtttacctgcccacgagttctggaaaggtggccttgtggcagtattgacgttcctctgatcttaaggtcacagttgactcaatactgtgttggtccgtagcatggagcagattgaaatgcaaaaacccacacctctggaagataccttcacggccgctgctggagcttctgttgctgtgaatacttctctcagtgtgagaggttagccgtgatgaaagcagcgttacttctgaccgtgcctgagtaagagaatgctgatgccataactttatgtgtcgatacttgtcaaatcagttactgttcaggggatccttctgtttctcacggggtgaaacatgtctttagttcctcatgttaacacgaagccagagcccacatgaactgttggatgtcttccttagaaagggtaggcatggaaaattccacgaggctcattctcagtatctcattaactcattgaaagattccagttgtatttgtcacctggggtgacaagaccagacaggctttcccaggcctgggtatccagggaggctctgcagccctgctgaagggccctaactagagttctagagtttctgattctgtttctcagtagtccttttagaggcttgctatacttggtctgcttcaaggaggtcgaccttctaatgtatgaagaatgggatgcatttgatctcaagaccaaagacagatgtcagtgggctgctctggccctggtgtgcacggctgtggcagctgttgatgccagtgtcctctaactcatgctgtccttgtgattaaacacctctatctcccttgggaataagcacatacaggcttaagctctaagatagataggtgtttgtccttttaccatcgagctacttcccataataaccactttgcatccaacactcttcacccacctcccatacgcaaggggatgtggatacttggcccaaagtaactggtggtaggaatcttagaaacaagaccacttatactgtctgtctgaggcagaagataacagcagcatctcgaccagcctctgccttaaaggaaatctttattaatcacgtatggttcacagataattctttttttaaaaaaacccaacctcctagagaagcacaactgtcaagagtcttgtacacacaacttcagctttgcatcacgagtcttgtattccaagaaaatcaaagtggtacaatttgtttgtttacactatgatactttctaaataaactctttttttttaaaaaaagtcgacgcggccgcgaatttagtagtagtagtagtagtaggcggccgc

SEQ ID NO: 362507 - DNA, 3023 bp, Homo sapiens
ccggaggccgcggcgaggcgcgcccagccccgccgcgatgcccgcgcgcccaggacgcctcctcccgctgctggcccggccggcggccctgactgcgctgctgctgctgctgctgggccatggcggcggcgggcgctggggcgcccgggcccaggaggcggcggcggcggcggcggacgggccccccgcggcagacggcgaggacggacaggacccgcacagcaagcacctgtacacggccgacatgttcacgcacgggatccagagcgccgcgcacttcgtcatgttcttcgcgccctggtgtggacactgccagcggctgcagccgacttggaatgacctgggagacaaatacaacagcatggaagatgccaaagtctatgtggctaaagtggactgcacggcccactccgacgtgtgctccgcccagggggtgcgaggataccccaccttaaagcttttcaagccaggccaagaagctgtgaagtaccagggtcctcgggacttccagacactggaaaactggatgctgcagacactgaacgaggagccagtgacaccagagccggaagtggaaccgcccagtgcccccgagctcaagcaagggctgtatgagctctcagcaagcaactttgagctgcacgttgcacaaggcgaccactttatcaagttcttcgctccgtggtgtggtcactgcaaagccctggctccaacctgggagcagctggctctgggccttgaacattccgaaactgtcaagattggcaaggttgattgtacacagcactatgaactctgctccggaaaccaggttcgtggctatcccactcttctctggttccgagatgggaaaaaggtggatcagtacaagggaaagcgggatttggagtcactgagggagtacgtggagtcgcagctgcagcgcacagagactggagcgacggagaccgtcacgccctcagaggccccggtgctggcagctgagcccgaggctgacaagggcactgtgttggcactcactgaaaataacttcgatgacaccattgcagaaggaataaccttcatcaagttttatgctccatggtgtggtcattgtaagactctggctcctacttgggaggaactctctaaaaaggaattccctggtctggcgggggtcaagatcgccgaagtagactgcactgctgaacggaatatctgcagcaagtattcggtacgaggctaccccacgttattgcttttccgaggagggaagaaagtcagtgagcacagtggaggcagagaccttgactcgttacaccgctttgtcctgagccaagcgaaagacgaactttaggaacacagttggaggtcacctctcctgcccagctcccgcaccctgcgtttaggagttcagtcccacagaggccactgggttcccagtggtggctgttcagaaagcagaacatactaagcgtgaggtatcttctttgtgtgtgtgttttccaagccaacacactctacagattctttattaagttaagtttctctaagtaaatgtgtaactcatggtcactgtgtaaacattttcagtggcgatatatcccctttgaccttctcttgatgaaatttacatggtttcctttgagactaaaatagcgttgagggaaatgaaattgctggactatttgtggctcctgagttgagtgattttggtgaaagaaagcacatccaaagcatagtttacctgcccacgagttctggaaaggtggccttgtggcagtattgacgttcctctgatcttaaggtcacagttgactcaatactgtgttggtccgtagcatggagcagattgaaatgcaaaaacccacacctctggaagataccttcacggccgctgctggagcttctgttgctgtgaatacttctctcagtgtgagaggttagccgtgatgaaagcagcgttacttctgaccgtgcctgagtaagagaatgctgatgccataactttatgtgtcgatacttgtcaaatcagttactgttcaggggatccttctgtttctcacggggtgaaacatgtctttagttcctcatgttaacacgaagccagagcccacatgaactgttggatgtcttccttagaaagggtaggcatggaaaattccacgaggctcattctcagtatctcattaactcattgaaagattccagttgtatttgtcacctggggtgacaagaccagacaggctttcccaggcctgggtatccagggaggctctgcagccctgctgaagggccctaactagagttctagagtttctgattctgtttctcagtagtccttttagaggcttgctatacttggtctgcttcaaggaggtcgaccttctaatgtatgaagaatgggatgcatttgatctcaagaccaaagacagatgtcagtgggctgctctggccctggtgtgcacggctgtggcagctgttgatgccagtgtcctctaactcatgctgtccttgtgattaaacacctctatctcccttgggaataagcacatacaggcttaagctctaagatagataggtgtttgtccttttaccatcgagctacttcccataataaccactttgcatccaacactcttcacccacctcccatacgcaaggggatgtggatacttggcccaaagtaactggtggtaggaatcttagaaacaagaccacttatactgtctgtctgaggcagaagataacagcagcatctcgaccagcctctgccttaaaggaaatctttattaatcacgtatggttcacagataattctttttttaaaaaaacccaacctcctagagaagcacaactgtcaagagtcttgtacacacaacttcagctttgcatcacgagtcttgtattccaagaaaatcaaagtggtacaatttgtttgtttacactatgatactttctaaataaactctttttttttaaaaaaagaagaaagaagaaaaatcaaaaacaaacaacaagaaaagaaacaacaaaaaagaggg

SEQ ID NO: 362508 - DNA, 2562 bp, Homo sapiens
ccggaggccgcggcgaggcgcgcccagccccgccgcgatgcccgcgcgcccaggacgcctcctcccgctgctggcccggccggcggccctgactgcgctgctgctgctgctgctgggccatggcggcggcgggcgctggggcgcccgggcccaggaggcggcggcggcggcggcggacgggccccccgcggcagacggcgaggacggacaggacccgcacagcaagcacctgtacacggccgacatgttcacgcacgggatccagagcgccgcgcacttcgtcatgttcttcgcgccctggtgtggacactgccagcggctgcagccgacttggaatgacctgggagacaaatacaacagcatggaagatgccaaagtctatgtggctaaagtggactgcacggcccactccgacgtgtgctccgcccagggggtgcgaggataccccaccttaaagcttttcaagccaggccaagaagctgtgaagtaccagggtcctcgggacttccagacactggaaaactggatgctgcagacactgaacgaggagccagtgacaccagagccggaagtggaaccgcccagtgcccccgagcaagggcactgtgttggcactcactgaaaataacttcgatgacaccattgcagaaggaataaccttcatcaagttttatgctccatggtgtggtcattgtaagactctggctcctacttgggaggaactctctaaaaaggaattccctggtctggcgggggtcaagatcgccgaagtagactgcactgctgaacggaatatctgcagcaagtattcggtacgaggctaccccacgttattgcttttccgaggagggaagaaagtcagtgagcacagtggaggcagagaccttgactcgttacaccgctttgtcctgagccaagcgaaagacgaactttaggaacacagttggaggtcacctctcctgcccagctcccgcaccctgcgtttaggagttcagtcccacagaggccactgggttcccagtggtggctgttcagaaagcagaacatactaagcgtgaggtatcttctttgtgtgtgtgttttccaagccaacacactctacagattctttattaagttaagtttctctaagtaaatgtgtaactcatggtcactgtgtaaacattttcagtggcgatatatcccctttgaccttctcttgatgaaatttacatggtttcctttgagactaaaatagcgttgagggaaatgaaattgctggactatttgtggctcctgagttgagtgattttggtgaaagaaagcacatccaaagcatagtttacctgcccacgagttctggaaaggtggccttgtggcagtattgacgttcctctgatcttaaggtcacagttgactcaatactgtgttggtccgtagcatggagcagattgaaatgcaaaaacccacacctctggaagataccttcacggccgctgctggagcttctgttgctgtgaatacttctctcagtgtgagaggttagccgtgatgaaagcagcgttacttctgaccgtgcctgagtaagagaatgctgatgccataactttatgtgtcgatacttgtcaaatcagttactgttcaggggatccttctgtttctcacggggtgaaacatgtctttagttcctcatgttaacacgaagccagagcccacatgaactgttggatgtcttccttagaaagggtaggcatggaaaattccacgaggctcattctcagtatctcattaactcattgaaagattccagttgtatttgtcacctggggtgacaagaccagacaggctttcccaggcctgggtatccagggaggctctgcagccctgctgaagggccctaactagagttctagagtttctgattctgtttctcagtagtccttttagaggcttgctatacttggtctgcttcaaggaggtcgaccttctaatgtatgaagaatgggatgcatttgatctcaagaccaaagacagatgtcagtgggctgctctggccctggtgtgcacggctgtggcagctgttgatgccagtgtcctctaactcatgctgtccttgtgattaaacacctctatctcccttgggaataagcacatacaggcttaagctctaagatagataggtgtttgtccttttaccatcgagctacttcccataataaccactttgcatccaacactcttcacccacctcccatacgcaaggggatgtggatacttggcccaaagtaactggtggtaggaatcttagaaacaagaccacttatactgtctgtctgaggcagaagataacagcagcatctcgaccagcctctgccttaaaggaaatctttattaatcacgtatggttcacagataattctttttttaaaaaaacccaacctcctagagaagcacaactgtcaagagtcttgtacacacaacttcagctttgcatcacgagtcttgtattccaagaaaatcaaagtggtacaatttgtttgtttacactatgatactttctaaataaactctttttttttaaaa

SEQ ID NO: 362509 - DNA, 1827 bp, Homo sapiens
ggggcgcccggggggggctgagaggtaggagcgtggcagctgcgtgaagcgggaagtagtgctgcagcaagtattcggtacgaggctaccccacgttattgcttttccgaggagggaagaaagtcagtgagcacagtggaggcagagaccttgactcgttacaccgctttgtcctgagccaagcgaaagacgaactttaggaacacagttggaggtcacctctcctgcccagctcccgcaccctgcgtttaggagttcagtcccacagaggccactgggttcccagtggtggctgttcagaaagcagaacatactaagcgtgaggtatcttctttgtgtgtgtgttttccaagccaacacactctacagattctttattaagttaagtttctctaagtaaatgtgtaactcatggtcactgtgtaaacattttcagtggcgatatatcccctttgaccttctcttgatgaaatttacatggtttcctttgagactaaaatagcgttgagggaaatgaaattgctggactatttgtggctcctgagttgagtgattttggtgaaagaaagcacatccaaagcatagtttacctgcccacgagttctggaaaggtggccttgtggcagtattgacgttcctctgatcttaaggtcacagttgactcaatactgtgttggtccgtagcatggagcagattgaaatgcaaaaacccacacctctggaagataccttcacggccgctgctggagcttctgttgctgtgaatacttctctcagtgtgagaggttagccgtgatgaaagcagcgttacttctgaccgtgcctgagtaagagaatgctgatgccataactttatgtgtcgatacttgtcaaatcagttactgttcaggggatccttctgtttctcacggggtgaaacatgtctttagttcctcatgttaacacgaagccagagcccacatgaactgttggatgtcttccttagaaagggtaggcatggaaaattccacgaggctcattctcagtatctcattaactcattgaaagattccagttgtatttgtcacctggggtgacaagaccagacaggctttcccaggcctgggtatccagggaggctctgcagccctgctgaagggccctaactagagttctagagtttctgattctgtttctcagtagtccttttagaggcttgctatacttggtctgcttcaaggaggtcgaccttctaatgtatgaagaatgggatgcatttgatctcaagaccaaagacagatgtcagtgggctgctctggccctggtgtgcacggctgtggcagctgttgatgccagtgtcctctaactcatgctgtccttgtgattaaacacctctatctcccttgggaataagcacatacaggcttaagctctaagatagataggtgtttgtccttttaccatcgagctacttcccataataaccactttgcatccaacactcttcacccacctcccatacgcaaggggatgtggatacttggcccaaagtaactggtggtaggaatcttagaaacaagaccacttatactgtctgtctgaggcagaagataacagcagcatctcgaccagcctctgccttaaaggaaatctttattaatcacgtatggttcacagataattctttttttaaaaaaacccaacctcctagagaagcacaactgtcaagagtcttgtacacacaacttcagctttgcatcacgagtcttgtattccaagaaaatcaaagtggtacaatttgtttgtttacactatgatactttctaaataaactctttttttttaaaa

SEQ ID NO: 362510 - DNA, 2864 bp, Homo sapiens
ccggaggccgcggcgaggcgcgcccagccccgccgcgatgcccgcgcgcccaggacgcctcctcccgctgctggcccggccggcggccctgactgcgctgctgctgctgctgctgggccatggcggcggcgggcgctggggcgcccgggcccaggaggcggcggcggcggcggcggacgggccccccgcggcagacggcgaggacggacaggacccgcacagcaagcacctgtacacggccgacatgttcacgcacgggatccagagcgccgcgcacttcgtcatgttcttcgcgccctggtgtggacactgccagcggctgcagccgacttggaatgacctgggagacaaatacaacagcatggaagatgccaaagtctatgtggctaaagtggactgcacggcccactccgacgtgtgctccgcccagggggtgcgaggataccccaccttaaagcttttcaagccaggccaagaagctgtgaagtaccagggtcctcgggacttccagacactggaaaactggatgctgcagacactgaacgaggagccagtgacaccagagccggaagtggaaccgcccagtgcccccgagctcaagcaagggctgtatgagctctcagcaagcaactttgagctgcacgttgcacaaggcgaccactttatcaagttcttcgctccgtggtgtggtcactgcaaagccctggctccaacctgggagcagctggctctgggccttgaacattccgaaactgtcaagattggcaaggttgattgtacacagcactatgaactctgctccggaaaccaggttcgtggctatcccactcttctctggttccgagatgggaaaaaggtggatcagtacaagggaaagcgggatttggagtcactgagggagtacgtggagtcgcagctgcagcgcacagagactggagcgacggagaccgtcacgccctcagaggccccggtgctggcagctgagcccgaggctgacaagggcactgtgttggcactcactgaaaataacttcgatgacaccattgcagaaggaataaccttcatcaagttttatgctccatggtgtggtcattgtaagactctggctcctacttgggaggaactctctaaaaaggaattccctggtctggcgggggtcaagatcgccgaagtagactgcactgctgaacggaatatctgcagcaagtattcggtacgaggctaccccacgttattgcttttccgaggagggaagaaagtcagtgagcacagtggaggcagagaccttgactcgttacaccgctttgtcctgagccaagcgaaagacgaactttaggaacacagttggaggtcacctctcctgcccagctcccgcaccctgcgtttaggagttcagtcccacagaggccactgggttcccagtggtggctgttcagaaagcagaacatactaagcgtgaggtatcttctttgtgtgtgtgttttccaagccaacacactctacagattctttattaagttaagtttctctaagtaaatgtgtaactcatggtcactgtgtaaacattttcagtggcgatatatcccctttgaccttctcttgatgaaatttacatggtttcctttgagactaaaatagcgttgagggaaatgaaattgctggactatttgtggctcctgagttgagtgattttggtgaaagaaagcacatccaaagcatagtttacctgcccacgagttctggaaaggtggccttgtggcagtattgacgttcctctgatcttaaggtcacagttgactcaatactgtgttggtccgtagcatggagcagattgaaatgcaaaaacccacacctctggaagataccttcacggccgctgctggagcttctgttgctgtgaatacttctctcagtgtgagaggttagccgtgatgaaagcagcgttacttctgaccgtgcctgagtaagagaatgctgatgccataactttatgtgtcgatacttgtcaaatcagttactgttcaggggatccttctgtttctcacggggtgaaacatgtctttagttcctcatgttaacacgaagccagagcccacatgaactgttggatgtcttccttagaaagggtaggcatggaaaattccacgaggctcattctcagtatctcattaactcattgaaagattccagttgtatttgtcacctggggtgacaagaccagacaggctttcccaggcctgggtatccagggaggctctgcagccctgctgaagggccctaactagagttctagagtttctgattctgtttctcagtagtccttttagaggcttgctatacttggtctgcttcaaggaggtcgaccttctaatgtatgaagaatgggatgcatttgatctcaagaccaaagacagatgtcagtgggctgctctggccctggtgtgcacggctgtggcagctgttgatgccagtgtcctctaactcatgctgtccttgtgattaaacacctctatctcccttgggaataagcacatacaggcttaagctctaagatagataggtgtttgtccttttaccatcgagctacttcccataataaccactttgcatccaacactctttacccacctctatcccacagggacgggattcttgccccaaagtgcccaggtatgacccttagaacactaccgtattctgggttgcttgagacaattatcccgaataacccgccgtccttgactaatggactgtttttacagccaatgttacaaataaaccccagttaataaaccctactgtaaccaacaccagctgctatactggccgtcttaataaccgagggggtccgaaccattgccttt

SEQ ID NO: 362511 - DNA, 2522 bp, Homo sapiens
ccggaggccgcggcgaggcgcgcccagccccgccgcgatgcccgcgcgcccaggacgcctcctcccgctgctggcccggccggcggccctgactgcgctgctgctgctgctgctgggccatggcggcggcgggcgctggggcgcccgggcccaggaggcggcggcggcggcggcggacgggccccccgcggcagacggcgaggacggacaggacccgcacagcaagcacctgtacacggccgacatgttcacgcacgggatccagagcgccgcgcacttcgtcatgttcttcgcgccctggtgtggacactgccagcggctgcagccgacttggaatgacctgggagacaaatacaacagcatggaagatgccaaagtctatgtggctaaagtggactgcacggcccactccgacgtgtgctccgcccagggggtgcgaggataccccaccttaaagcttttcaagccaggccaagaagctgtgaagtaccagggtcctcgggacttccagacactggaaaactggatgctgcagacactgaacgaggagccagtgacaccagagccggaagtggaaccgcccagtgcccccgagctcaagcaagggctgtatgagctctcagcaagcaactttgagctgcacgttgcacaaggcgaccactttatcaagttcttcgctccgtggtgtggtcactgcaaagccctggctccaacctgggagcagctggctctgggccttgaacattccgaaactgtcaagattggcaaggttgattgtacacagcactatgaactctgctccggaaaccaggttcgtggctatcccactcttctctggttccgagatgggaaaaaggtggatcagtacaagggaaagcgggatttggagtcactgagggagtacgtggagtcgcagctgcagcgcacagagactggagcgacggagaccgtcacgccctcagaggccccggtgctggcagctgagcccgaggctgacaagggcactgtgttggcactcactgaaaataacttcgatgacaccattgcagaaggaataaccttcatcaagttttatgctccatggtgtggtcattgtaagactctggctcctacttgggaggaactctctaaaaaggaattccctggtctggcgggggtcaagatcgccgaagtagactgcactgctgaacggaatatctgcagcaagtattcggtacgaggctaccccacgttattgcttttccgaggagggaagaaagtcagtgagcacagtggaggcagagaccttgactcgttacaccgctttgtcctgagccaagcgaaagacgaactttaggaacacagttggaggtcacctctcctgcccagctcccgcaccctgcgtttaggagttcagtcccacagaggccactgggttcccagtggtggctgttcagaaagcagaacatactaagcgtgaggtatcttctttgtgtgtgtgttttccaagccaacacactctacagattctttattaagttaagtttctctaagtaaatgtgtaactcatggtcactgtgtaaacattttcagtggcgatatatcccctttgaccttctcttgatgaaatttacatggtttcctttgagactaaaatagcgttgagggaaatgaaattgctggactatttgtggctcctgagttgagtgattttggtgaaagaaagcacatccaaagcatagtttacctgcccacgagttctggaaaggtggccttgtggcagtattgacgttcctctgatcttaaggtcacagttgactcaatactgtgttggtccgtagcatggagcagattgaaatgcaaaaacccacacctctggaagataccttcacggccgctgctggagcttctgttgctgtgaatacttctctcagtgtgagaggttagccgtgatgaaagcagcgttacttctgaccgtgcctgagtaagagaatgctgatgccataactttatgtgtcgatacttgtcaaatcagttactgttcaggggatccttctgtttctcacggggtgaaacatgtctttagttcctcatgttaacacgaagccagagcccacatgaactgttggatgtcttccttagaaagggtaggcatggaaaattccacgaggctcattctcagtatctcattaactcattgaaagattccagttgtatttgtcacctggggtgacaagaccagacaggctttcccaggcctgggtatccagggaggctctgcagccctgctgaagggccctaactagagttctagagtttctgattctgtttctcagtagtccttttagaggcttgctatacttggtctgcttcaaggaggtcgaccttctaatgtatgaagaatgggatgcatttgatctcaagagtcttgtacacacaacttcagctttgcatcacgagtcttgtattccaagaaaatcaaagtggtacaatttgtttgtttacactatgatactttctaaataaactctttttttttaaaa

SEQ ID NO: 362512 - DNA, 1015 bp, Homo sapiens
tgactctagcaggatccccttaacagctgatgccataactttatgtgtcgatacttgtcaaatcagttactgttcaggggatccttctgtttctcacggggtgaaacatgtctttagttcctcatgttaacacgaagccagagcccacatgaactgttggatgtcttccttagaaagggtaggcatggaaaattccacgaggctcattctcagtatctcattaactcattgaaagattccagttgtatttgtcacctggggtgacaagaccagacaggctttcccaggcctgggtatccagggaggctctgcagccctgctgaagggccctaactagagttctagagtttctgattctgtttctcagtagtccttttagaggcttgctatacttggtctgcttcaaggaggtcgaccttctaatgtatgaagaatgggatgcatttgatctcaagaccaaagacagatgtcagtgggctgctctggccctggtgtgcacggctgtggcagctgttgatgccagtgtcctctaactcatgctgtccttgtgattaaacacctctatctcccttgggaataagcacatacaggcttaagctctaagatagataggtgtttgtccttttaccatcgagctacttcccataataaccactttgcatccaacactcttcacccacctcccatacgcaaggggatgtggatacttggcccaaagtaactggtggtaggaatcttagaaacaagaccacttatactgtctgtctgaggcagaagataacagcagcatctcgaccagcctctgccttaaaggaaatctttattaatcacgtatggttcacagataattctttttttaaaaaaacccaacctcctagagaagcacaactgtcaagagtcttgtacacacaacttcagctttgcatcacgagtcttgtattccaagaaaatcaaagtggtacaatttgtttgtttacactatgatactttctaaataaactctttttttttaaaa

SEQ ID NO: 362513 - DNA, 2081 bp, Homo sapiens
ccggaggccgcggcgaggcgcgcccagccccgccgcgatgcccgcgcgcccaggacgcctcctcccgctgctggcccggccggcggccctgactgcgctgctgctgctgctgctgggccatggcggcggcgggcgctggggcgcccgggcccaggaggcggcggcggcggcggcggacgggccccccgcggcagacggcgaggacggacaggacccgcacagcaagcacctgtacacggccgacatgttcacgcacgggatccagagcgccgcgcacttcgtcatgttcttcgcgccctggtgtggacactgccagcggctgcagccgacttggaatgacctgggagacaaatacaacagcatggaagatgccaaagtctatgtggctaaagtggactgcacggcccactccgacgtgtgctccgcccagggggtgcgaggataccccaccttaaagcttttcaagccaggccaagaagctgtgaagtaccagggtcctcgggacttccagacactggaaaactggatgctgcagacactgaacgaggagccagtgacaccagagccggaagtggaaccgcccagtgcccccgagctcaagcaagggctgtatgagctctcagcaagcaactttgagctgcacgttgcacaaggcgaccactttatcaagttcttcgctccgtggtgtggtcactgcaaagccctggctccaacctgggagcagctggctctgggccttgaacattccgaaactgtcaagattggcaaggttgattgtacacagcactatgaactctgctccggaaaccaggttcgtggctatcccactcttctctggttccgagatgggaaaaaggtggatcagtacaagggaaagcgggatttggagtcactgagggagtacgtggagtcgcagctgcagcgcacagagactggagcgacggagaccgtcacgccctcagaggccccggtgctggcagctgagcccgaggctgacaagggcactgtgttggcactcactgaaaataacttcgatgacaccattgcagaaggaataaccttcatcaagttttatgctccatggtgtggtcattgtaagactctggctcctacttgggaggaactctctaaaaaggaattccctggtctggcgggggtcaagatcgccgaagtagactgcactgctgaacggaatatctgcagcaagtattcggtacgaggctaccccacgttattgcttttccgaggagggaagaaagtcagtgagcacagtggaggcagagaccttgactcgttacaccgctttgtcctgagccaagcgaaagacgaactttaggaacacagttggaggtcacctctcctgcccagctcccgcaccctgcgtttaggagttcagtcccacagaggccactgggttcccagtggtggctgttcagaaagcagaacatactaagcgtgaggtatcttctttgtgtgtgtgttttccaagccaacacactctacagattctttattaagttaagtttctctaagtaaatgtgtaactcatggtcactgtgtaaacattttcagtggcgatatatcccctttgaccttctcttgatgaaatttacatggtttcctttgagactaaaatagcgttgagggaaatgaaattgctggactatttgtggctcctgagttgagtgattttggtgaaagaaagcacatccaaagcatagtttacctgcccacgagttctggaaaggtggccttgtggcagtattgacgttcctctgatcttaaggtcacagttgactcaatactgtgttggtccgtagcatggagcagattgaaatgcaaaaacccacacctctggaagataccttcacggccgctgctggagcttctgttgctgtgaatacttctctcagtgtgagaggttagccgtgatgaaagcagcgttacttctgaccgtgcctgagtaagagaatgctgatgccagaaggtccaggtatgccagataggtccaggtatgtccagaaggtccaggtatgccagaaggtccaggtatgccagaaggtcaggtataccggggatct

SEQ ID NO: 362514 - DNA, 830 bp, Homo sapiens
aggaccccccgcgacagagtgtgctcagtatctcattaactcattgaaagattccagttgtatttgtcacctggggtgacaagaccagacaggctttcccaggcctgggtatccagggaggctctgcagccctgctgaagggccctaactagagttctagagtttctgattctgtttctcagtagtccttttagaggcttgctatacttggtctgcttcaaggaggtcgaccttctaatgtatgaagaatgggatgcatttgatctcaagaccaaagacagatgtcagtgggctgctctggccctggtgtgcacggctgtggcagctgttgatgccagtgtcctctaactcatgctgtccttgtgattaaacacctctatctcccttgggaataagcacatacaggcttaagctctaagatagataggtgtttgtccttttaccatcgagctacttcccataataaccactttgcatccaacactcttcacccacctcccatacgcaaggggatgtggatacttggcccaaagtaactggtggtaggaatcttagaaacaagaccacttatactgtctgtctgaggcagaagataacagcagcatctcgaccagcctctgccttaaaggaaatctttattaatcacgtatggttcacagataattctttttttaaaaaaacccaacctcctagagaagcacaactgtcaagagtcttgtacacacaacttcagctttgcatcacgagtcttgtattccaagaaaatcaaagtggtacaatttgtttgtttacactatgatactttctaaataaactctttttttttaaaa

SEQ ID NO: 362515 - DNA, 966 bp, Homo sapiens
ggttaggagattgagaccagcctggccaacatagtgaaaccccgtctctactaaaaatacaaaaattagccgggtgtggtggcaggtgcctgtagtcccaactactcaggaggctaaggcaggagaattgcttgaacccaggaggcagaggttgcagtgagagaaaaattaaaatgaataatcaagcatgaagtcaatgcagagagagacctgagcaagccaggcctggctttcccaggcctgggtatccagggaggctctgcagccctgctgaagggccctaactagagttctagagtttctgattctgtttctcagtagtccttttagaggcttgctatacttggtctgcttcaaggaggtcgaccttctaatgtatgaagaatgggatgcatttgatctcaagaccaaagacagatgtcagtgggctgctctggccctggtgtgcacggctgtggcagctgttgatgccagtgtcctctaactcatgctgtccttgtgattaaacacctctatctcccttgggaataagcacatacaggcttaagctctaagatagataggtgtttgtccttttaccatcgagctacttcccataataaccactttgcatccaacactcttcacccacctcccatacgcaaggggatgtggatacttggcccaaagtaactggtggtaggaatcttagaaacaagaccacttatactgtctgtctgaggcagaagataacagcagcatctcgaccagcctctgccttaaaggaaatctttattaatcacgtatggttcacagataattctttttttaaaaaaacccaacctcctagagaagcacaactgtcaagagtcttgtacacacaacttcagctttgcatcacgagtcttgtattccaagaaaatcaaagtggtacaatttgtttgtttacactatgatactttctaaataaactctttttttttaaaa

SEQ ID NO: 362516 - DNA, 1964 bp, Homo sapiens
  misc_feature (1786)..(1786): n is a, c, g, or t
  misc_feature (1788)..(1788): n is a, c, g, or t
  misc_feature (1810)..(1810): n is a, c, g, or t
  misc_feature (1818)..(1818): n is a, c, g, or t
  misc_feature (1821)..(1821): n is a, c, g, or t
ccggaggccgcggcgaggcgcgcccagccccgccgcgatgcccgcgcgcccaggacgcctcctcccgctgctggcccggccggcggccctgactgcgctgctgctgctgctgctgggccatggcggcggcgggcgctggggcgcccgggcccaggaggcggcggcggcggcggcggacgggccccccgcggcagacggcgaggacggacaggacccgcacagcaagcacctgtacacggccgacatgttcacgcacgggatccagagcgccgcgcacttcgtcatgttcttcgcgccctggtgtggacactgccagcggctgcagccgacttggaatgacctgggagacaaatacaacagcatggaagatgccaaagtctatgtggctaaagtggactgcacggcccactccgacgtgtgctccgcccagggggtgcgaggataccccaccttaaagcttttcaagccaggccaagaagctgtgaagtaccagggtcctcgggacttccagacactggaaaactggatgctgcagacactgaacgaggagccagtgacaccagagccggaagtggaaccgcccagtgcccccgagctcaagcaagggctgtatgagctctcagcaagcaactttgagctgcacgttgcacaaggcgaccactttatcaagttcttcgctccgtggtgtggtcactgcaaagccctggctccaacctgggagcagctggctctgggccttgaacattccgaaactgtcaagattggcaaggttgattgtacacagcactatgaactctgctccggaaaccaggttcgtggctatcccactcttctctggttccgagatgggaaaaaggtggatcagtacaagggaaagcgggatttggagtcactgagggagtacgtggagtcgcagctgcagcgcacagagactggagcgacggagaccgtcacgccctcagaggccccggtgctggcagctgagcccgaggctgacaagggcactgtgttggcactcactgaaaataacttcgatgacaccattgcagaaggaataaccttcatcaagttttatgctccatggtgtggtcattgtaagactctggctcctacttgggaggaactctctaaaaaggaattccctggtctggcgggggtcaagatcgccgaagtagactgcactgctgaacggaatatctgcagcaagtattcggtacgaggctaccccacgttattgcttttccgaggagggaagaaagtcagtgagcacagtggaggcagagaccttgactcgttacaccgctttgtcctgagccaagcgaaagacgaactttaggaacacagttggaggtcacctctcctgcccagctcccgcaccctgcgtttaggagttcagtcccacagaggccactgggttcccagtggtggctgttcagaaagcagaacatactaagcgtgaggtatcttctttgtgtgtgtgttttccaagccaacacactctacagattctttattaagttaagtttctctaagtaaatgtgtaactcatggtcactgtgtaaacattttcagtggcgatatatcccctttgaccttctcttgatgaaatttacatggtttcctttgagactaaaatagcgttgagggaaatgaaattgctggactatttgtggctcctgagttgagtgattttggtgaaagaaagcacatccaaagcatagtttacctgcccacgagttctggaaaggtggccttgtggcagtattgacgttcctctgatcttagncncagtgatcatactggtggccgncagggccnatngaagaaaccaccttggagatacttcacggcggtgtggacttctgggcggaaactcctcaggtgaaggtgccggtgaaaggtatctgacgggcgagaaaagtgtcgacacttggggatgcacaacagggggcccgtccgggaaa

SEQ ID NO: 362517 - DNA, 740 bp, Homo sapiens
  misc_feature (36)..(36): n is a, c, g, or t
gacggagactctcgacagttgtgcttctctaggagnttgggtttttttaaaaaaagaattatctgtgaaccatacgtgattaataaagatttcctttaaggcagaggcttgctatacttggtctgcttcaaggaggtcgaccttctaatgtatgaagaatgggatgcatttgatctcaagaccaaagacagatgtcagtgggctgctctggccctggtgtgcacggctgtggcagctgttgatgccagtgtcctctaactcatgctgtccttgtgattaaacacctctatctcccttgggaataagcacatacaggcttaagctctaagatagataggtgtttgtccttttaccatcgagctacttcccataataaccactttgcatccaacactcttcacccacctcccatacgcaaggggatgtggatacttggcccaaagtaactggtggtaggaatcttagaaacaagaccacttatactgtctgtctgaggcagaagataacagcagcatctcgaccagcctctgccttaaaggaaatctttattaatcacgtatggttcacagataattctttttttaaaaaaacccaacctcctagagaagcacaactgtcaagagtcttgtacacacaacttcagctttgcatcacgagtcttgtattccaagaaaatcaaagtggtacaatttgtttgtttacactatgatactttctaaataaactctttttttttaaaa

SEQ ID NO: 362518 - DNA, 591 bp, Homo sapiens
  misc_feature (24)..(24): n is a, c, g, or t
tgatggtgactctagagtatcccntacgagagaagagacgagatgtcagtgggctgctctggccctggtgtgcacggctgtggcagctgttgatgccagtgtcctctaactcatgctgtccttgtgattaaacacctctatctcccttgggaataagcacatacaggcttaagctctaagatagataggtgtttgtccttttaccatcgagctacttcccataataaccactttgcatccaacactcttcacccacctcccatacgcaaggggatgtggatacttggcccaaagtaactggtggtaggaatcttagaaacaagaccacttatactgtctgtctgaggcagaagataacagcagcatctcgaccagcctctgccttaaaggaaatctttattaatcacgtatggttcacagataattctttttttaaaaaaacccaacctcctagagaagcacaactgtcaagagtcttgtacacacaacttcagctttgcatcacgagtcttgtattccaagaaaatcaaagtggtacaatttgtttgtttacactatgatactttctaaataaactctttttttttaaaa

SEQ ID NO: 362519 - DNA, 1503 bp, Homo sapiens
ccggaggccgcggcgaggcgcgcccagccccgccgcgatgcccgcgcgcccaggacgcctcctcccgctgctggcccggccggcggccctgactgcgctgctgctgctgctgctgggccatggcggcggcgggcgctggggcgcccgggcccaggaggcggcggcggcggcggcggacgggccccccgcggcagacggcgaggacggacaggacccgcacagcaagcacctgtacacggccgacatgttcacgcacgggatccagagcgccgcgcacttcgtcatgttcttcgcgccctggtgtggacactgccagcggctgcagccgacttggaatgacctgggagacaaatacaacagcatggaagatgccaaagtctatgtggctaaagtggactgcacggcccactccgacgtgtgctccgcccagggggtgcgaggataccccaccttaaagcttttcaagccaggccaagaagctgtgaagtaccagggtcctcgggacttccagacactggaaaactggatgctgcagacactgaacgaggagccagtgacaccagagccggaagtggaaccgcccagtgcccccgagctcaagcaagggctgtatgagctctcagcaagcaactttgagctgcacgttgcacaaggcgaccactttatcaagttcttcgctccgtggtgtggtcactgcaaagccctggctccaacctgggagcagctggctctgggccttgaacattccgaaactgtcaagattggcaaggttgattgtacacagcactatgaactctgctccggaaaccaggttcgtggctatcccactcttctctggttccgagatgggaaaaaggtggatcagtacaagggaaagcgggatttggagtcactgagggagtacgtggagtcgcagctgcagcgcacagagactggagcgacggagaccgtcacgccctcagaggccccggtgctggcagctgagcccgaggctgacaagggcactgtgttggcactcactgaaaataacttcgatgacaccattgcagaaggaataaccttcatcaagttttatgctccatggtgtggtcattgtaagactctggctcctacttgggaggaactctctaaaaaggaattccctggtctggcgggggtcaagatcgccgaagtagactgcactgctgaacggaatatctgcagcaagtattcggtacgaggctaccccacgttattgcttttccgaggagggaagaaagtcagtgagcacagtggaggcagagaccttgactcgttacaccgctttgtcctgagccaagcgaaagacgaactttaggaacacagttggaggtcacctctcctgcccagctcccgcacagcaccagcacgaattcccttagcaccagcacgaattcccttagcaccagcacgaattcccttagcaccagcacgaattcccttagcaccagcacgaattcccttagcaccagcacgaattccctt

SEQ ID NO: 362520 - DNA, 1232 bp, Homo sapiens
ccggaggccgcggcgaggcgcgcccagccccgccgcgatgcccgcgcgcccaggacgcctcctcccgctgctggcccggccggcggccctgactgcgctgctgctgctgctgctgggccatggcggcggcgggcgctggggcgcccgggcccaggaggcggcggcggcggcggcggacgggccccccgcggcagacggcgaggacggacaggacccgcacagcaagcacctgtacacggccgacatgttcacgcacgggatccagagcgccgcgcacttcgtcatgttcttcgcgccctggtgtggacactgccagcggctgcagccgacttggaatgacctgggagacaaatacaacagcatggaagatgccaaagtctatgtggctaaagtggactgcacggcccactccgacgtgtgctccgcccagggggtgcgaggataccccaccttaaagcttttcaagccaggccaagaagctgtgaagtaccagggtcctcgggacttccagacactggaaaactggatgctgcagacactgaacgaggagccagtgacaccagagccggaagtggaaccgcccagtgcccccgagctcaagcaagggctgtatgagctctcagcaagcaactttgagctgcacgttgcacaaggcgaccactttatcaagttcttcgctccgtggtgtggtcactgcaaagccctggctccaacctgggagcagctggctctgggccttgaacattccgaaactgtcaagattggcaaggttgattgtacacagcactatgaactctgctccggaaaccaggttcgtggctatcccactcttctctggttccgagatgggaaaaaggtggatcagtacaagggaaagcgggatttggagtcactgagggagtacgtggagtcgcagctgcagcgcacagagactggagcgacggagaccgtcacgccctcagaggccccggtgctggcagctgagcccgaggctgacaagggcactgtgttggcactcactgaaaataacttcgatgacaccattgcagaaggaataaccttcatcaagttttatgctccatggtgtggtcattgtaagactctggctcctacttgggaggaactctctaaaaggattcctggtctgggggggtcagaacgcgagaacggcgggaagggattgcggcagttcgggacggacccggatgttccgagagggaaaagcaagggga

SEQ ID NO: 362521 - DNA, 538 bp, Homo sapiens
  misc_feature (32)..(32): n is a, c, g, or t
  misc_feature (80)..(80): n is a, c, g, or t
  misc_feature (90)..(90): n is a, c, g, or t
  misc_feature (122)..(122): n is a, c, g, or t
  misc_feature (165)..(165): n is a, c, g, or t
  misc_feature (174)..(174): n is a, c, g, or t
  misc_feature (176)..(176): n is a, c, g, or t
aaaaaaaaaaaaaaaaaaaaataaaaaaaaanaaaaaaaaaaaaaaaaaaaaaaaaaaaaaaaaaaaaaaaaaaaaaaanaaaaaaaaanaaaaaaaaaaaaaaaaaaaaaaaaaaaaaaanaaaaaaaaaaaaaaaaaaaaaaaaaaacaaaaaaaaaaaaaanaaaaaaaananaaaaaaaaaaaaaaaaaaaacacccacctcccatacgcaaggggatgtggatacttggcccaaagtaactggtggtaggaatcttagaaacaagaccacttatactgtctgtctgaggcagaagataacagcagcatctcgaccagcctctgccttaaaggaaatctttattaatcacgtatggttcacagataattctttttttaaaaaaacccaacctcctagagaagcacaactgtcaagagtcttgtacacacaacttcagctttgcatcacgagtcttgtattccaagaaaatcaaagtggtacaatttgtttgtttacactatgatactttctaaataaactctttttttttaaaa

SEQ ID NO: 362522 - DNA, 1739 bp, Homo sapiens
ccggaggccgcggcgaggcgcgcccagccccgccgcgatgcccgcgcgcccaggacgcctcctcccgctgctggcccggccggcggccctgactgcgctgctgctgctgctgctgggccatggcggcggcgggcgctggggcgcccgggcccaggaggcggcggcggcggcggcggacgggccccccgcggcagacggcgaggacggacaggacccgcacagcaagcacctgtacacggccgacatgttcacgcacgggatccagagcgccgcgcacttcgtcatgttcttcgcgccctggtgtggacactgccagcggctgcagccgacttggaatgacctgggagacaaatacaacagcatggaagatgccaaagtctatgtggctaaagtggactgcacggcccactccgacgtgtgctccgcccagggggtgcgaggataccccaccttaaagcttttcaagccaggccaagaagctgtgaagtaccagggtcctcgggacttccagacactggaaaactggatgctgcagacactgaacgaggagccagtgacaccagagccggaagtggaaccgcccagtgcccccgagctcaagcaagggctgtatgagctctcagcaagcaactttgagctgcacgttgcacaaggcgaccactttatcaagttcttcgctccgtggtgtggtcactgcaaagccctggctccaacctgggagcagctggctctgggccttgaacattccgaaactgtcaagattggcaaggtgagtgaaagcccttattaaactggaaatggactgctttgggctggattaattagcagagtggcccattattcattccgtgtgcaaagtcgcaaacttgatttattaattccatttagtgtgccacttgataattcatttcaccttcacagatggcagtctgattttgagttttgctggcttttccacagcctagagataaattatggcctcggctgctttgtttattttgaagagatggccaaatctgaattggcagccccagagcccgttctgcaaagagatggggtagagccttgtagaatgttcactggacgaacttggagaccgtccacgttcgacctcacccaagagctctctctaaaaggaccctggctctgtgctcccccaagcacgcagaagaccctccctcagtttgcactgtgcctgggattctttccagcatttcctactttatacagagaagccaagagtggtgtctgacaacttctgtgtaactggattttctggaaatatccagtgtagctccagggacatcacttttattcttctacactttccagcacccaccagacaccatgcatagatttcctttcttaaaaatctcatttttctaccttgccatggggctgatttgtatccaaaagtaatgctgcgtgtctaggactgaatgatggttaacaggatgatctacttgggatggtgagatggtcaaaagcataaacttgggggttgggtagacctggctggctgaccttgggaaaaacctctccacgcctcggtctccccctttgcaaaactgagctaagatctactgtgtggtgtctgggcagatgaaagtacactgcttagtgtgatgcttagcatggggcagatgcttggtaaattgtaatcacttttgttgtcagttaaatggatatttcactgttgcctcttaaacgcttacgataatatatactaattatacaaa

SEQ ID NO: 362523 - DNA, 1415 bp, Homo sapiens
ccggaggccgcggcgaggcgcgcccagccccgccgcgatgcccgcgcgcccaggacgcctcctcccgctgctggcccggccggcggccctgactgcgctgctgctgctgctgctgggccatggcggcggcgggcgctggggcgcccgggcccaggaggcggcggcggcggcggcggacgggccccccgcggcagacggcgaggacggacaggacccgcacagcaagcacctgtacacggccgacatgttcacgcacgggatccagagcgccgcgcacttcgtcatgttcttcgcgccctggtgtggacactgccagcggctgcagccgacttggaatgacctgggagacaaatacaacagcatggaagatgccaaagtctatgtggctaaagtggactgcacggcccactccgacgtgtgctccgcccagggggtgcgaggataccccaccttaaagcttttcaagccaggccaagaagctgtgaagtaccagggtcctcgggacttccagacactggaaaactggatgctgcagacactgaacgaggagccagtgacaccagagccggaagtggaaccgcccagtgcccccgagctcaagcaagggctgtatgagctctcagcaagcaactttgagctgcacgttgcacaaggtaagggggacgtcctgatgccagcttcagagaatcactattattccttggcgtgctgggcttttccttcctgctactcaagggctcttagatagcagcatcagtggcactgacaaagggtcactctagaggagctgttgggaccgttgttcagtgcacctcctctaaaacatgagttctccttttgtctgtgcccttatagaaacgccgagtctaatgctaagcacacgtgacccgcacactagctggacagtgcatccttggctaagagtgtttattgacagactcacctcgcttgattgctctttactttattgcactttggagatactgcatttttttacggattgaggattttggcagcccagcatctggcaggtctagcggtttttccagcagcttgtgcttactttgtatccctctgtcagcatctttttagcaataaaatattttttaattaaggtacattgtttttaaagaagtaatgctgtagcacatttcatagactatagtgtaaacataactttgatattcactagggaaccaaaaaatttgtgtgacttgttttattgtgatattatctttattgcagtggtctggaaccaaacccacagtatctcggaagtatgcctgtgtattaatgataatcatatgcttaatgacctcaggcagaaacaaaagcttctctctgtctaaacagaatttagattgggcacagtggctcatgcctatcatcccagcacttggggagaacaaggtggg

SEQ ID NO: 362524 - DNA, 784 bp, Homo sapiens
cggcacgaggagctgggctgaccttggcccagacaagtatttgtcagataaagattttcagtgtctaatcaaacttctgccttcttgtttgcacccttacatctatcgggttacctttgccacagctaatgaatcctcagcgttgctaattaggatgtttaacgaaaagggaacattgaaggatctgatctacaaggcaaaaccaaaagacccatttctaaagaagtactgcaaccctaagaagattcagggcctggaactccagcaaataaaaacatatggacggcaaatattagaggtactgaagtttcttcatgacaagggattcccttatgggcatcttcacgcctccaatgtgatgctcgatggggacacttgtcggcagcccagcatctggcaggtctagcggtttttccagcagcttgtgcttactttgtatccctctgtcagcatctttttagcaataaaatattttttaattaaggtacattgtttttaaagaagtaatgctgtagcacatttcatagactatagtgtaaacataactttgatattcactagggaaccaaaaaatttgtgtgacttgttttattgtgatattatctttattgcagtggtctggaaccaaacccacagtatctcggaagtatgcctgtgtattaatgataatcatatgcttaatgacctcaggcagaaacaaaagcttctctctgtctaaacagaatttagattgggcacagtggctcatgcctatcatcccagcacttggggagaacaaggtggg

SEQ ID NO: 362525 - DNA, 2879 bp, Homo sapiens
ccggaggccgcggcgaggcgcgcccagccccgccgcgatgcccgcgcgcccaggacgcctcctcccgctgctggcccggccggcggcggcggacgggccccccgcggcagacggcgaggacggacaggacccgcacagcaagcacctgtacacggccgacatgttcacgcacgggatccagagcgccgcgcacttcgtcatgttcttcgcgccctggtgtggacactgccagcggctgcagccgacttggaatgacctgggagacaaatacaacagcatggaagatgccaaagtctatgtggctaaagtggactgcacggcccactccgacgtgtgctccgcccagggggtgcgaggataccccaccttaaagcttttcaagccaggccaagaagctgtgaagtaccagggtcctcgggacttccagacactggaaaactggatgctgcagacactgaacgaggagccagtgacaccagagccggaagtggaaccgcccagtgcccccgagctcaagcaagggctgtatgagctctcagcaagcaactttgagctgcacgttgcacaaggcgaccactttatcaagttcttcgctccgtggtgtggtcactgcaaagccctggctccaacctgggagcagctggctctgggccttgaacattccgaaactgtcaagattggcaaggttgattgtacacagcactatgaactctgctccggaaaccaggttcgtggctatcccactcttctctggttccgagatgggaaaaaggtggatcagtacaagggaaagcgggatttggagtcactgagggagtacgtggagtcgcagctgcagcgcacagagactggagcgacggagaccgtcacgccctcagaggccccggtgctggcagctgagcccgaggctgacaagggcactgtgttggcactcactgaaaataacttcgatgacaccattgcagaaggaataaccttcatcaagttttatgctccatggtgtggtcattgtaagactctggctcctacttgggaggaactctctaaaaaggaattccctggtctggcgggggtcaagatcgccgaagtagactgcactgctgaacggaatatctgcagcaagtattcggtacgaggctaccccacgttattgcttttccgaggagggaagaaagtcagtgagcacagtggaggcagagaccttgactcgttacaccgctttgtcctgagccaagcgaaagacgaactttaggaacacagttggaggtcacctctcctgcccagctcccgcaccctgcgtttaggagttcagtcccacagaggccactgggttcccagtggtggctgttcagaaagcagaacatactaagcgtgaggtatcttctttgtgtgtgtgttttccaagccaacacactctacagattctttattaagttaagtttctctaagtaaatgtgtaactcatggtcactgtgtaaacattttcagtggcgatatatcccctttgaccttctcttgatgaaatttacatggtttcctttgagactaaaatagcgttgagggaaatgaaattgctggactatttgtggctcctgagttgagtgattttggtgaaagaaagcacatccaaagcatagtttacctgcccacgagttctggaaaggtggccttgtggcagtattgacgttcctctgatcttaaggtcacagttgactcaatactgtgttggtccgtagcatggagcagattgaaatgcaaaaacccacacctctggaagataccttcacggccgctgctggagcttctgttgctgtgaatacttctctcagtgtgagaggttagccgtgatgaaagcagcgttacttctgaccgtgcctgagtaagagaatgctgatgccataactttatgtgtcgatacttgtcaaatcagttactgttcaggggatccttctgtttctcacggggtgaaacatgtctttagttcctcatgttaacacgaagccagagcccacatgaactgttggatgtcttccttagaaagggtaggcatggaaaattccacgaggctcattctcagtatctcattaactcattgaaagattccagttgtatttgtcacctggggtgacaagaccagacaggctttcccaggcctgggtatccagggaggctctgcagccctgctgaagggccctaactagagttctagagtttctgattctgtttctcagtagtccttttagaggcttgctatacttggtctgcttcaaggaggtcgaccttctaatgtatgaagaatgggatgcatttgatctcaagaccaaagacagatgtcagtgggctgctctggccctggtgtgcacggctgtggcagctgttgatgccagtgtcctctaactcatgctgtccttgtgattaaacacctctatctcccttgggaataagcacatacaggcttaagctctaagatagataggtgtttgtccttttaccatcgagctacttcccataataaccactttgcatccaacactcttcacccacctcccatacgcaaggggatgtggatacttggcccaaagtaactggtggtaggaatcttagaaacaagaccacttatactgtctgtctgaggcagaagataacagcagcatctcgaccagcctctgccttaaaggaaatctttattaatcacgtatggttcacagataattctttttttaaaaaaacccaacctcctagagaagcacaactgtcaagagtcttgtacacacaacttcagctttgcatcacgagtcttgtattccaagaaaatcaaagtggtacaatttgtttgtttacactatgatactttctaaataaactctttttttttaaaa

SEQ ID NO: 362526 - DNA, 3025 bp, Homo sapiens
aaacatgagtcctttcccttcctcatttgtgtgtttgctttaccagtgagttttatacttttgggtgttttcatgatgatagatattgtcctttcactttcaggtgtagagccctggtaagcatttactgtagggctggactagtggtgatgaatttcctcagtttctgcttgtctaggaaagaccttatttctccttcatttgtgaaagataactttgctgagcatagtatacttggctaacagttttttttttttctttcagtacttcgaataggccattttctcctggcctgtaaagtttctgctgagaaatctcttgtaagtctgatggaggttcccttacttttgactagacacttttctcttgctgtttgtagaattttctgtcttgggctttggatagtttgactatcacgtgccgcagggaagaaccttttgggattttatctgtttgctctctgataagacaactttctttttgctctgtctaatcctttgttattctttcagcttaaagcttttcaagccaggccaagaagctgtgaagtaccagggtcctcgggacttccagacactggaaaactggatgctgcagacactgaacgaggagccagtgacaccagagccggaagtggaaccgcccagtgcccccgagctcaagcaagggctgtatgagctctcagcaagcaactttgagctgcacgttgcacaaggcgaccactttatcaagttcttcgctccgtggtgtggtcactgcaaagccctggctccaacctgggagcagctggctctgggccttgaacattccgaaactgtcaagattggcaaggttgattgtacacagcactatgaactctgctccggaaaccaggttcgtggctatcccactcttctctggttccgagatgggaaaaaggtggatcagtacaagggaaagcgggatttggagtcactgagggagtacgtggagtcgcagctgcagcgcacagagactggagcgacggagaccgtcacgccctcagaggccccggtgctggcagctgagcccgaggctgacaagggcactgtgttggcactcactgaaaataacttcgatgacaccattgcagaaggaataaccttcatcaagttttatgctccatggtgtggtcattgtaagactctggctcctacttgggaggaactctctaaaaaggaattccctggtctggcgggggtcaagatcgccgaagtagactgcactgctgaacggaatatctgcagcaagtattcggtacgaggctaccccacgttattgcttttccgaggagggaagaaagtcagtgagcacagtggaggcagagaccttgactcgttacaccgctttgtcctgagccaagcgaaagacgaactttaggaacacagttggaggtcacctctcctgcccagctcccgcaccctgcgtttaggagttcagtcccacagaggccactgggttcccagtggtggctgttcagaaagcagaacatactaagcgtgaggtatcttctttgtgtgtgtgttttccaagccaacacactctacagattctttattaagttaagtttctctaagtaaatgtgtaactcatggtcactgtgtaaacattttcagtggcgatatatcccctttgaccttctcttgatgaaatttacatggtttcctttgagactaaaatagcgttgagggaaatgaaattgctggactatttgtggctcctgagttgagtgattttggtgaaagaaagcacatccaaagcatagtttacctgcccacgagttctggaaaggtggccttgtggcagtattgacgttcctctgatcttaaggtcacagttgactcaatactgtgttggtccgtagcatggagcagattgaaatgcaaaaacccacacctctggaagataccttcacggccgctgctggagcttctgttgctgtgaatacttctctcagtgtgagaggttagccgtgatgaaagcagcgttacttctgaccgtgcctgagtaagagaatgctgatgccataactttatgtgtcgatacttgtcaaatcagttactgttcaggggatccttctgtttctcacggggtgaaacatgtctttagttcctcatgttaacacgaagccagagcccacatgaactgttggatgtcttccttagaaagggtaggcatggaaaattccacgaggctcattctcagtatctcattaactcattgaaagattccagttgtatttgtcacctggggtgacaagaccagacaggctttcccaggcctgggtatccagggaggctctgcagccctgctgaagggccctaactagagttctagagtttctgattctgtttctcagtagtccttttagaggcttgctatacttggtctgcttcaaggaggtcgaccttctaatgtatgaagaatgggatgcatttgatctcaagaccaaagacagatgtcagtgggctgctctggccctggtgtgcacggctgtggcagctgttgatgccagtgtcctctaactcatgctgtccttgtgattaaacacctctatctcccttgggaataagcacatacaggcttaagctctaagatagataggtgtttgtccttttaccatcgagctacttcccataataaccactttgcatccaacactcttcacccacctcccatacgcaaggggatgtggatacttggcccaaagtaactggtggtaggaatcttagaaacaagaccacttatactgtctgtctgaggcagaagataacagcagcatctcgaccagcctctgccttaaaggaaatctttattaatcacgtatggttcacagataattctttttttaaaaaaacccaacctcctagagaagcacaactgtcaagagtcttgtacacacaacttcagctttgcatcacgagtcttgtattccaagaaaatcaaagtggtacaatttgtttgtttacactatgatactttctaaataaactctttttttttaaaa

SEQ ID NO: 362527 - DNA, 3277 bp, Homo sapiens
ccggaggccgcggcgaggcgcgcccagccccgccgcgatgcccgcgcgcccaggacgcctcctcccgctgctggcccggccggcggccctgactgcgctgctgctgctgctgctgggccatggcggcggcgggcgctggggcgcccgggcccaggaggcggcggcggcggcggcggacgggccccccgcggcagacggcgaggacggacaggacccgcacagcaagcacctgtacacggccgacatgttcacgcacgggatccagagcgccgcgcacttcgtcatgttcttcgcgccctggtgtggacactgccagcggctgcagccgacttggaatgacctgggagacaaatacaacagcatggaagatgccaaagtctatgtggctaaagtggactgcacggcccactccgacgtgtgctccgcccagggggtgcgaggataccccaccttaaagcttttcaagccaggccaagaagctgtgaagtaccagggtcctcgggacttccagacactggaaaactggatgctgcagacactgaacgaggagccagtgacaccagagccggaagtggaaccgcccagtgcccccgagctcaagcaagggctgtatgagctctcagcaagcaactttgagctgcacgttgcacaaggcgaccactttatcaagttcttcgctccgtggtgtggtcactgcaaagccctggctccaacctgggagcagctggctctgggccttgaacattccgaaactgtcaagattggcaaggttgattgtacacagcactatgaactctgctccggaaaccaggttcgtggctatcccactcttctctggttccgagatgggaaaaaggtggatcagtacaagggaaagcgggatttggagtcactgagggagtacgtggagtcgcagctgcagcgcacagagactggagcgacggagaccgtcacgccctcagaggccccggtgctggcagctgagcccgaggctgacaagggcactgtgttggcactcactgaaaataacttcgatgacaccattgcagaaggaataaccttcatcaagttttatgctccatggtgtggtcattgtaagactctggctcctacttgggaggaactctctaaaaaggaattccctggtctggcgggggtcaagatcgccgaagtagactgcactgctgaacggaatatctgcagcaagtattcggtacgaggctaccccacgttattgcttttccgaggagggaagaaagtcagtgagcacagtggaggcagagaccttgactcgttacaccgctttgtcctgagccaagcgaaagacgaactttaggaacacagttggaggtcacctctcctgcccagctcccgcaccctgcgtttaggagttcagtcccacagaggccactgggttcccagtggtggctgttcagaaagcagaacatactaagcgtgaggtatcttctttgtgtgtgtgttttccaagccaacacactctacagattctttattaagttaagtttctctaagtaaatgtgtaactcatggtcactgtgtaaacattttcagtggcgatatatcccctttgaccttctcttgatgaaatttacatggtttcctttgagactaaaatagcgttgagggaaatgaaattgctggactatttgtggctcctgagttgagtgattttggtgaaagaaagcacatccaaagcatagtttacctgcccacgagttctggaaaggtggccttgtggcagtattgacgttcctctgatcttaaggtcacagttgactcaatactgtgttggtccgtagcatggagcagattgaaatgcaaaaacccacacctctggaagataccttcacggccgctgctggagcttctgttgctgtgaatacttctctcagtgtgagaggttagccgtgatgaaagcagcgttacttctgaccgtgcctgagtaagagaatgctgatgccataactttatgtgtcgatacttgtcaaatcagttactgttcaggggatccttctgtttctcacggggtgaaacatgtctttagttcctcatgttaacacgaagccagagcccacatgaactgttggatgtcttccttagaaagggtaggcatggaaaattccacgaggctcattctcagtatctcattaactcattgaaagattccagttgtatttgtcacctggggtgacaagaccagacaggctttcccaggcctgggtatccagggaggctctgcagccctgctgaagggccctaactagagttctagagtttctgattctgtttctcagtagtccttttagaggcttgctatacttggtctgcttcaaggaggtcgaccttctaatgtatgaagaatgggatgcatttgatctcaagaccaaagacagatgtcagtgggctgctctggccctggtgtgcacggctgtggcagctgttgatgccagtgtcctctaactcatgctgtccttgtgattaaacacctctatctcccttgggaataagcacatacaggcttaagctctaagatagataggtgtttgtccttttaccatcgagctacttcccataataaccactttgcatccaacactcttcacccacctcccatacgcaaggggatgtggatacttggcccaaagtaactggtggtaggaatcttagaaacaagaccacttatactgtctgtctgaggcagaagataacagcagcatctcgaccagcctctgccttaaaggaaatctttattaatcacgtatggttcacagataattctttttttaaaaaaacccaacctcctagagaagcacaactgtcaagagtcttgtacacacaacttcagctttgcatcacgagtcttgtattccaagaaaatcaaagtggtacaatttgtttgtttacactatgatactttctaaataaactctttttttttaaaaaaaaaaaaaaaaaaaaaaaaaacgacgaaaaaagaaaaaagggcggtccgaatccccgggccagtacgtcccgtgtgtaaaggggccaaaaggacgaattatagacaggcaggggcgcgttaacacggttgtgcggcaaaacgttatgggaatttggaagggaccctcttggtgggtgacatattgacacatacctaggaattagcttaggataataaaatttagggtttaatggttaacaagggattttctgggttaaaatttgctgtcgaaatttttttgaaaatttttttctggacttttaaataggggtt

SEQ ID NO: 362528 - DNA, 2909 bp, Homo sapiens
ccggaggccgcggcgaggcgcgcccagccccgccgcgatgcccgcgcgcccaggacgcctcctcccgctgctggcccggccggcggccctgactgcgctgctgctgctgctgctgggccatggcggcggcgggcgctggggcgcccgggcccaggaggcggcggcggcggcggcggacgggccccccgcggcagacggcgaggacggacaggacccgcacagcaagcacctgtacacggccgacatgttcacgcacgggatccagagcgccgcgcacttcgtcatgttcttcgcgccctggtgtggacactgccagcggctgcagccgacttggaatgacctgggagacaaatacaacagcatggaagatgccaaagtctatgtggctaaagtggactgcacggcccactccgacgtgtgctccgcccagggggtgcgaggataccccaccttaaagcttttcaagccaggccaagaagctgtgaagtaccagggtcctcgggacttccagacactggaaaactggatgctgcagacactgaacgaggagccagtgacaccagagccggaagtggaaccgcccagtgcccccgagctcaagcaagggctgtatgagctctcagcaagcaactttgagctgcacgttgcacaaggcgaccactttatcaagttcttcgctccgtggtgtggtcactgcaaagccctggctccaacctgggagcagctggctctgggccttgaacattccgaaactgtcaagattggcaaggttgattgtacacagcactatgaactctgctccggaaaccaggttcgtggctatcccactcttctctggttccgagatgggaaaaaggtggatcagtacaagggaaagcgggatttggagtcactgagggagtacgtggagtcgcagctgcagcgcacagagactggagcgacggagaccgtcacgccctcagaggccccggtgctggcagctgagcccgaggctgacaagggcactgtgttggcactcactgaaaataacttcgatgacaccattgcagaaggaataaccttcatcaagttttatgctccatggtgtggtcattgtaagactctggctcctacttgggaggaactctctaaaaaggaattccctggtctggcgggggtcaagatcgccgaagtagactgcactgctgaacggaatatctgcagcaagtattcggtacgaggctaccccacgttattgcttttccgaggagggaagaaagtcagtgagcacagtggaggcagagaccttgactcgttacaccgctttgtcctgagccaagcgaaagacgaactttaggaacacagttggaggtcacctctcctgcccagctcccgcaccctgcgtttaggagttcagtcccacagaggccactgggttcccagtggtggctgttcagaaagcagaacatactaagcgtgaggtatcttctttgtgtgtgtgttttccaagccaacacactctacagattctttattaagttaagtttctctaagtaaatgtgtaactcatggtcactgtgtaaacattttcagtggcgatatatcccctttgaccttctcttgatgaaatttacatggtttcctttgagactaaaatagcgttgagggaaatgaaattgctggactatttgtggctcctgagttgagtgattttggtgaaagaaagcacatccaaagcatagtttacctgcccacgagttctggaaaggtggccttgtggcagtattgacgttcctctgatcttaaggtcacagttgactcaatactgtgttggtccgtagcatggagcagattgaaatgcaaaaacccacacctctggaagataccttcacggccgctgctggagcttctgttgctgtgaatacttctctcagtgtgagaggttagccgtgatgaaagcagcgttacttctgaccgtgcctgagtaagagaatgctgatgccataactttatgtgtcgatacttgtcaaatcagttactgttcaggggatccttctgtttctcacggggtgaaacatgtctttagttcctcatgttaacacgaagccagagcccacatgaactgttggatgtcttccttagaaagggtaggcatggttgtatttgtcacctggggtgacaagaccagacaggctttcccaggcctgggtatccagggaggctctgcagccctgctgaagggccctaactagagttctagagtttctgattctgtttctcagtagtccttttagaggcttgctatacttggtctgcttcaaggaggtcgaccttctaatgtatgaagaatgggatgcatttgatctcaagaccaaagacagatgtcagtgggctgctctggccctggtgtgcacggctgtggcagctgttgatgccagtgtcctctaactcatgctgtccttgtgattaaacacctctatctcccttgggaataagcacatacaggcttaagctctaagatagataggtgtttgtccttttaccatcgagctacttcccataataaccactttgcatccaacactcttcacccacctcccatacgcaaggggatgtggatacttggcccaaagtaactggtggtaggaatcttagaaacaagaccacttatactgtctgtctgaggcagaagataacagcagcatctcgaccagcctctgccttaaaggaaatctttattaatcacgtatggttcacagataattctttttttaaaaaaacccaacctcctagagaagcacaactgtcaagagtcttgtacacacaacttcagctttgcatcacgagtcttgtattccaagaaaatcaaagtggtacaatttgtttgtttacactatgatactttctaaataaactctttttttttaaaa

SEQ ID NO: 362529 - DNA, 3042 bp, Homo sapiens
ccggaggccgcggcgaggcgcgcccagccccgccgcgatgcccgcgcgcccaggacgcctcctcccgctgctggcccggccggcggccctgactgcgctgctgctgctgctgctgggccatggcggcggcgggcgctggggcgcccgggcccaggaggcggcggcggcggcggcggacgggccccccgcggcagacggcgaggacggacaggacccgcacagcaagcacctgtacacggccgacatgttcacgcacgggatccagagcgccgcgcacttcgtcatgttcttcgcgccctggtgtggacactgccagcggctgcagccgacttggaatgacctgggagacaaatacaacagcatggaagatgccaaagtctatgtggctaaagtggactgcacggcccactccgacgtgtgctccgcccagggggtgcgaggataccccaccttaaagcttttcaagccaggccaagaagctgtgaagtaccagggtcctcgggacttccagacactggaaaactggatgctgcagacactgaacgaggagccagtgacaccagagccggaagtggaaccgcccagtgcccccgagctcaagcaagggctgtatgagctctcagcaagcaactttgagctgcacgttgcacaaggcgaccactttatcaagttcttcgctccgtggtgtggtcactgcaaagccctggctccaacctgggagcagctggctctgggccttgaacattccgaaactgtcaagattggcaaggttgattgtacacagcactatgaactctgctccggaaaccaggttcgtggctatcccactcttctctggttccgagatgggaaaaaggtggatcagtacaagggaaagcgggatttggagtcactgagggagtacgtggagtcgcagctgcagcgcacagagactggagcgacggagaccgtcacgccctcagaggccccggtgctggcagctgagcccgaggctgacaagggcactgtgttggcactcactgaaaataacttcgatgacaccattgcagaaggaataaccttcatcaagttttatgctccatggtgtggtcattgtaagactctggctcctacttgggaggaactctctaaaaaggaattccctggtctggcgggggtcaagatcgccgaagtagactgcactgctgaacggaatatctgcagcaagtattcggtacgaggctaccccacgttattgcttttccgaggagggaagaaagtcagtgagcacagtggaggcagagaccttgactcgttacaccgctttgtcctgagccaagcgaaagacgaactttaggaacacagttggaggtcacctctcctgcccagctcccgcaccctgcgtttaggagttcagtcccacagaggccactgggttcccagtggtggctgttcagaaagcagaacatactaagcgtgaggtatcttctttgtgtgtgtgttttccaagccaacacactctacagattctttattaagttaagtttctctaagtaaatgtgtaactcatggtcactgtgtaaacattttcagtggcgatatatcccctttgaccttctcttgatgaaatttacatggtttcctttgagactaaaatagcgttgagggaaatgaaattgctggactatttgtggctcctgagttgagtgattttggtgaaagaaagcacatccaaagcatagtttacctgcccacgagttctggaaaggtggccttgtggcagtattgacgttcctctgatcttaaggtcacagttgactcaatactgtgttggtccgtagcatggagcagattgaaatgcaaaaacccacacctctggaagataccttcacggccgctgctggagcttctgttgctgtgaatacttctctcagtgtgagaggttagccgtgatgaaagcagcgttacttctgaccgtgcctgagtaagagaatgctgatgccataactttatgtgtcgatacttgtcaaatcagttactgttcaggggatccttctgtttctcacggggtgaaacatgtctttagttcctcatgttaacacgaagccagagcccacatgaactgttggatgtcttccttagaaagggtaggcatggaaaattccacgaggctcattctcagtatctcattaactcattgaaagattccagttgtatttgtcacctggggtgacaagaccagacaggctttcccaggcctgggtatccagggaggctctgcagccctgctgaagggccctaactagagttctagagtttctgattctgtttctcagtagtccttttagaggcttgctatacttggtctgcttcaaggaggtcgaccttctaatgtatgaagaatgggatgcatttgatctcaagaccaaagacagatgtcagtgggctgctctggccctggtgtgcacggctgtggcagctgttgatgccagtgtcctctaactcatgctgtccttgtgattaaacacctctatctcccttgggaataagcacatacaggcttaagctctaagatagataggtgtttgtccttttaccatcgagctacttcccataataaccactttgcatccaacactcttcacccacctcccatacgcaaggggatgtggatacttggcccaaagtaactggtggtaggaatcttagaaacaagaccacttatactgtctgtctgaggcagaagataacagcagcatctcgaccagcctctgccttaaaggaaatctttattaatcacgtatggttcacagataattctttttttaaaaaaacccaacctcctagagaagcacaactgtcaagagtcttgtacacacaacttcagctttgcatcacgagtcttgtattccaagaaaatcaaagtggtacaatttgtttgtttacactatgatactttctaaataaactctttttttttaaaatttttttttttttttttttttttttttttttttttttttttttttttttttttttttgggggggcagaaaaaatccggg

SEQ ID NO: 362530 - DNA, 3043 bp, Homo sapiens
ccggaggccgcggcgaggcgcgcccagccccgccgcgatgcccgcgcgcccaggacgcctcctcccgctgctggcccggccggcggccctgactgcgctgctgctgctgctgctgggccatggcggcggcgggcgctggggcgcccgggcccaggaggcggcggcggcggcggcggacgggccccccgcggcagacggcgaggacggacaggacccgcacagcaagcacctgtacacggccgacatgttcacgcacgggatccagagcgccgcgcacttcgtcatgttcttcgcgccctggtgtggacactgccagcggctgcagccgacttggaatgacctgggagacaaatacaacagcatggaagatgccaaagtctatgtggctaaagtggactgcacggcccactccgacgtgtgctccgcccagggggtgcgaggataccccaccttaaagcttttcaagccaggccaagaagctgtgaagtaccagggtcctcgggacttccagacactggaaaactggatgctgcagacactgaacgaggagccagtgacaccagagccggaagtggaaccgcccagtgcccccgagctcaagcaagggctgtatgagctctcagcaagcaactttgagctgcacgttgcacaaggcgaccactttatcaagttcttcgctccgtggtgtggtcactgcaaagccctggctccaacctgggagcagctggctctgggccttgaacattccgaaactgtcaagattggcaaggttgattgtacacagcactatgaactctgctccggaaaccaggttcgtggctatcccactcttctctggttccgagatgggaaaaaggtggatcagtacaagggaaagcgggatttggagtcactgagggagtacgtggagtcgcagctgcagcgcacagagactggagcgacggagaccgtcacgccctcagaggccccggtgctggcagctgagcccgaggctgacaagggcactgtgttggcactcactgaaaataacttcgatgacaccattgcagaaggaataaccttcatcaagttttatgctccatggtgtggtcattgtaagactctggctcctacttgggaggaactctctaaaaaggaattccctggtctggcgggggtcaagatcgccgaagtagactgcactgctgaacggaatatctgcagcaagtattcggtacgaggctaccccacgttattgcttttccgaggagggaagaaagtcagtgagcacagtggaggcagagaccttgactcgttacaccgctttgtcctgagccaagcgaaagacgaactttaggaacacagttggaggtcacctctcctgcccagctcccgcaccctgcgtttaggagttcagtcccacagaggccactgggttcccagtggtggctgttcagaaagcagaacatactaagcgtgaggtatcttctttgtgtgtgtgttttccaagccaacacactctacagattctttattaagttaagtttctctaagtaaatgtgtaactcatggtcactgtgtaaacattttcagtggcgatatatcccctttgaccttctcttgatgaaatttacatggtttcctttgagactaaaatagcgttgagggaaatgaaattgctggactatttgtggctcctgagttgagtgattttggtgaaagaaagcacatccaaagcatagtttacctgcccacgagttctggaaaggtggccttgtggcagtattgacgttcctctgatcttaaggtcacagttgactcaatactgtgttggtccgtagcatggagcagattgaaatgcaaaaacccacacctctggaagataccttcacggccgctgctggagcttctgttgctgtgaatacttctctcagtgtgagaggttagccgtgatgaaagcagcgttacttctgaccgtgcctgagtaagagaatgctgatgccataactttatgtgtcgatacttgtcaaatcagttactgttcaggggatccttctgtttctcacggggtgaaacatgtctttagttcctcatgttaacacgaagccagagcccacatgaactgttggatgtcttccttagaaagggtaggcatggaaaattccacgaggctcattctcagtatctcattaactcattgaaagattccagttgtatttgtcacctggggtgacaagaccagacaggctttcccaggcctgggtatccagggaggctctgcagccctgctgaagggccctaactagagttctagagtttctgattctgtttctcagtagtccttttagaggcttgctatacttggtctgcttcaaggaggtcgaccttctaatgtatgaagaatgggatgcatttgatctcaagaccaaagacagatgtcagtgggctgctctggccctggtgtgcacggctgtggcagctgttgatgccagtgtcctctaactcatgctgtccttgtgattaaacacctctatctcccttgggaataagcacatacaggcttaagctctaagatagataggtgtttgtccttttaccatcgagctacttcccataataaccactttgcatccaacactcttcacccacctcccatacgcaaggggatgtggatacttggcccaaagtaactggtggtaggaatcttagaaacaagaccacttatactgtctgtctgaggcagaagataacagcagcatctcgaccagcctctgccttaaaggaaatctttattaatcacgtatggttcacagataattctttttttaaaaaaacccaacctcctagagaagcacaactgtcaagagtcttgtacacacaacttcagctttgcatcacgagtcttgtattccaagaaaatcaaagtggtacaatttgtttgtttacactatgatactttctaaataaactctttttttttaaaattttttttttttttttttttttttttttaaattttttcagggggggggcgggggggggaaagggaaaaggggggccaggg

SEQ ID NO: 362531 - DNA, 3042 bp, Homo sapiens
ccggaggccgcggcgaggcgcgcccagccccgccgcgatgcccgcgcgcccaggacgcctcctcccgctgctggcccggccggcggccctgactgcgctgctgctgctgctgctgggccatggcggcggcgggcgctggggcgcccgggcccaggaggcggcggcggcggcggcggacgggccccccgcggcagacggcgaggacggacaggacccgcacagcaagcacctgtacacggccgacatgttcacgcacgggatccagagcgccgcgcacttcgtcatgttcttcgcgccctggtgtggacactgccagcggctgcagccgacttggaatgacctgggagacaaatacaacagcatggaagatgccaaagtctatgtggctaaagtggactgcacggcccactccgacgtgtgctccgcccagggggtgcgaggataccccaccttaaagcttttcaagccaggccaagaagctgtgaagtaccagggtcctcgggacttccagacactggaaaactggatgctgcagacactgaacgaggagccagtgacaccagagccggaagtggaaccgcccagtgcccccgagctcaagcaagggctgtatgagctctcagcaagcaactttgagctgcacgttgcacaaggcgaccactttatcaagttcttcgctccgtggtgtggtcactgcaaagccctggctccaacctgggagcagctggctctgggccttgaacattccgaaactgtcaagattggcaaggttgattgtacacagcactatgaactctgctccggaaaccaggttcgtggctatcccactcttctctggttccgagatgggaaaaaggtggatcagtacaagggaaagcgggatttggagtcactgagggagtacgtggagtcgcagctgcagcgcacagagactggagcgacggagaccgtcacgccctcagaggccccggtgctggcagctgagcccgaggctgacaagggcactgtgttggcactcactgaaaataacttcgatgacaccattgcagaaggaataaccttcatcaagttttatgctccatggtgtggtcattgtaagactctggctcctacttgggaggaactctctaaaaaggaattccctggtctggcgggggtcaagatcgccgaagtagactgcactgctgaacggaatatctgcagcaagtattcggtacgaggctaccccacgttattgcttttccgaggagggaagaaagtcagtgagcacagtggaggcagagaccttgactcgttacaccgctttgtcctgagccaagcgaaagacgaactttaggaacacagttggaggtcacctctcctgcccagctcccgcaccctgcgtttaggagttcagtcccacagaggccactgggttcccagtggtggctgttcagaaagcagaacatactaagcgtgaggtatcttctttgtgtgtgtgttttccaagccaacacactctacagattctttattaagttaagtttctctaagtaaatgtgtaactcatggtcactgtgtaaacattttcagtggcgatatatcccctttgaccttctcttgatgaaatttacatggtttcctttgagactaaaatagcgttgagggaaatgaaattgctggactatttgtggctcctgagttgagtgattttggtgaaagaaagcacatccaaagcatagtttacctgcccacgagttctggaaaggtggccttgtggcagtattgacgttcctctgatcttaaggtcacagttgactcaatactgtgttggtccgtagcatggagcagattgaaatgcaaaaacccacacctctggaagataccttcacggccgctgctggagcttctgttgctgtgaatacttctctcagtgtgagaggttagccgtgatgaaagcagcgttacttctgaccgtgcctgagtaagagaatgctgatgccataactttatgtgtcgatacttgtcaaatcagttactgttcaggggatccttctgtttctcacggggtgaaacatgtctttagttcctcatgttaacacgaagccagagcccacatgaactgttggatgtcttccttagaaagggtaggcatggaaaattccacgaggctcattctcagtatctcattaactcattgaaagattccagttgtatttgtcacctggggtgacaagaccagacaggctttcccaggcctgggtatccagggaggctctgcagccctgctgaagggccctaactagagttctagagtttctgattctgtttctcagtagtccttttagaggcttgctatacttggtctgcttcaaggaggtcgaccttctaatgtatgaagaatgggatgcatttgatctcaagaccaaagacagatgtcagtgggctgctctggccctggtgtgcacggctgtggcagctgttgatgccagtgtcctctaactcatgctgtccttgtgattaaacacctctatctcccttgggaataagcacatacaggcttaagctctaagatagataggtgtttgtccttttaccatcgagctacttcccataataaccactttgcatccaacactcttcacccacctcccatacgcaaggggatgtggatacttggcccaaagtaactggtggtaggaatcttagaaacaagaccacttatactgtctgtctgaggcagaagataacagcagcatctcgaccagcctctgccttaaaggaaatctttattaatcacgtatggttcacagataattctttttttaaaaaaacccaacctcctagagaagcacaactgtcaagagtcttgtacacacaacttcagctttgcatcacgagtcttgtattccaagaaaatcaaagtggtacaatttgtttgtttacactatgatactttctaaataaactctttttttttaaaattttttttttttttttttttttttccctaaaattttccaggggggggaccggggccggaattggaaccgggggcaaagg

SEQ ID NO: 362532 - DNA, 2117 bp, Homo sapiens
agcaccaccacgccaggcctcagtgaggaatctaccaccgtctacagcagcagcccaggctcaactgaaaccacagtgttccctcgcagcaccacaacctcagttcgtggtgaagagcctacaaccttccacagccggccagcctcaactcacacaacactgttcactgaggacagcaccacctcgggcctcactgaagaatctacagccaagccccagcgcgctgagctgcacatggtgtggtcattgtaagactctggctcctacttgggaggaactctctaaaaaggaattccctggtctggcgggggtcaagatcgccgaagtagactgcactgctgaacggaatatctgcagcaagtattcggtacgaggctaccccacgttattgcttttccgaggagggaagaaagtcagtgagcacagtggaggcagagaccttgactcgttacaccgctttgtcctgagccaagcgaaagacgaactttaggaacacagttggaggtcacctctcctgcccagctcccgcaccctgcgtttaggagttcagtcccacagaggccactgggttcccagtggtggctgttcagaaagcagaacatactaagcgtgaggtatcttctttgtgtgtgtgttttccaagccaacacactctacagattctttattaagttaagtttctctaagtaaatgtgtaactcatggtcactgtgtaaacattttcagtggcgatatatcccctttgaccttctcttgatgaaatttacatggtttcctttgagactaaaatagcgttgagggaaatgaaattgctggactatttgtggctcctgagttgagtgattttggtgaaagaaagcacatccaaagcatagtttacctgcccacgagttctggaaaggtggccttgtggcagtattgacgttcctctgatcttaaggtcacagttgactcaatactgtgttggtccgtagcatggagcagattgaaatgcaaaaacccacacctctggaagataccttcacggccgctgctggagcttctgttgctgtgaatacttctctcagtgtgagaggttagccgtgatgaaagcagcgttacttctgaccgtgcctgagtaagagaatgctgatgccataactttatgtgtcgatacttgtcaaatcagttactgttcaggggatccttctgtttctcacggggtgaaacatgtctttagttcctcatgttaacacgaagccagagcccacatgaactgttggatgtcttccttagaaagggtaggcatggaaaattccacgaggctcattctcagtatctcattaactcattgaaagattccagttgtatttgtcacctggggtgacaagaccagacaggctttcccaggcctgggtatccagggaggctctgcagccctgctgaagggccctaactagagttctagagtttctgattctgtttctcagtagtccttttagaggcttgctatacttggtctgcttcaaggaggtcgaccttctaatgtatgaagaatgggatgcatttgatctcaagaccaaagacagatgtcagtgggctgctctggccctggtgtgcacggctgtggcagctgttgatgccagtgtcctctaactcatgctgtccttgtgattaaacacctctatctcccttgggaataagcacatacaggcttaagctctaagatagataggtgtttgtccttttaccatcgagctacttcccataataaccactttgcatccaacactcttcacccacctcccatacgcaaggggatgtggatacttggcccaaagtaactggtggtaggaatcttagaaacaagaccacttatactgtctgtctgaggcagaagataacagcagcatctcgaccagcctctgccttaaaggaaatctttattaatcacgtatggttcacagataattctttttttaaaaaaacccaacctcctagagaagcacaactgtcaagagtcttgtacacacaacttcagctttgcatcacgagtcttgtattccaagaaaatcaaagtggtacaatttgtttgtttacactatgatactttctaaataaactctttttttttaaaa

SEQ ID NO: 362533 - DNA, 2548 bp, Homo sapiens
ccggaggccgcggcgaggcgcgcccagccccgccgcgatgcccgcgcgcccaggacgcctcctcccgctgctggcccggccggcggccctgactgcgctgctgctgctgctgctgggccatggcggcggcgggcgctggggcgcccgggcccaggaggcggcggcggcggcggcggacgggccccccgcggcagacggcgaggacggacaggacccgcacagcaagcacctgtacacggccgacatgttcacgcacgggatccagagcgccgcgcacttcgtcatgttcttcgcgccctggtgtggacactgccagcggctgcagccgacttggaatgacctgggagacaaatacaacagcatggaagatgccaaagtctatgtggctaaagtggactgcacggcccactccgacgtgtgctccgcccagggggtgcgaggataccccaccttaaagcttttcaagccaggccaagaagctgtgaagtaccagggtcctcgggacttccagacactggaaaactggatgctgcagacactgaacgaggagccagtgacaccagagccggaagtggaaccgcccagtgcccccgagctcaagcaagggctgtatgagctctcagcaagcaactttgagctgcacgttgcacaaggcgaccactttatcaagttcttcgctccgtggtgtggtcactgcaaagccctggctccaacctgggagcagctggctctgggccttgaacattccgaaactgtcaagattggcaaggttgattgtacacagcactatgaactctgctccggaaaccaggttcgtggctatcccactcttctctggttccgagatgggaaaaaggtggatcagtacaagggaaagcgggatttggagtcactgagggagtacgtggagtcgcagctgcagcgcacagagactggagcgacggagaccgtcacgccctcagaggccccggtgctggcagctgagcccgaggctgacaagggcactgtgttggcactcactgaaaataacttcgatgacaccattgcagaaggaataaccttcatcaagttttatgctccatggtgtggtcattgtaagactctggctcctacttgggaggaactctctaaaaaggaattccctggtctggcgggggtcaagatcgccgaagtagactgcactgctgaacggaatatctgcagcaagtattcggtacgaggctaccccacgttattgcttttccgaggagggaagaaagtcagtgagcacagtggaggcagagaccttgactcgttacaccgctttgtcctgagccaagcgaaagacgaactttaggaacacagttggaggtcacctctcctgcccagctcccgcaccctgcgtttaggagttcagtcccacagaggccactgggttcccagtggtggctgttcagaaagcagaacataccttcacggccgctgctggagcttctgttgctgtgaatacttctctcagtgtgagaggttagccgtgatgaaagcagcgttacttctgaccgtgcctgagtaagagaatgctgatgccataactttatgtgtcgatacttgtcaaatcagttactgttcaggggatccttctgtttctcacggggtgaaacatgtctttagttcctcatgttaacacgaagccagagcccacatgaactgttggatgtcttccttagaaagggtaggcatggaaaattccacgaggctcattctcagtatctcattaactcattgaaagattccagttgtatttgtcacctggggtgacaagaccagacaggctttcccaggcctgggtatccagggaggctctgcagccctgctgaagggccctaactagagttctagagtttctgattctgtttctcagtagtccttttagaggcttgctatacttggtctgcttcaaggaggtcgaccttctaatgtatgaagaatgggatgcatttgatctcaagaccaaagacagatgtcagtgggctgctctggccctggtgtgcacggctgtggcagctgttgatgccagtgtcctctaactcatgctgtccttgtgattaaacacctctatctcccttgggaataagcacatacaggcttaagctctaagatagataggtgtttgtccttttaccatcgagctacttcccataataaccactttgcatccaacactcttcacccacctcccatacgcaaggggatgtggatacttggcccaaagtaactggtggtaggaatcttagaaacaagaccacttatactgtctgtctgaggcagaagataacagcagcatctcgaccagcctctgccttaaaggaaatctttattaatcacgtatggttcacagataattctttttttaaaaaaacccaacctcctagagaagcacaactgtcaagagtcttgtacacacaacttcagctttgcatcacgagtcttgtattccaagaaaatcaaagtggtacaatttgtttgtttacactatgatactttctaaataaactctttttttttaaaa

SEQ ID NO: 362534 - DNA, 2338 bp, Homo sapiens
  misc_feature (2300)..(2300): n is a, c, g, or t
  misc_feature (2309)..(2309): n is a, c, g, or t
  misc_feature (2316)..(2316): n is a, c, g, or t
  misc_feature (2326)..(2327): n is a, c, g, or t
  misc_feature (2332)..(2332): n is a, c, g, or t
ccggaggccgcggcgaggcgcgcccagccccgccgcgatgcccgcgcgcccaggacgcctcctcccgctgctggcccggccggcggccctgactgcgctgctgctgctgctgctgggccatggcggcggcgggcgctggggcgcccgggcccaggaggcggcggcggcggcggcggacgggccccccgcggcagacggcgaggacggacaggacccgcacagcaagcacctgtacacggccgacatgttcacgcacgggatccagagcgccgcgcacttcgtcatgttcttcgcgccctggtgtggacactgccagcggctgcagccgacttggaatgacctgggagacaaatacaacagcatggaagatgccaaagtctatgtggctaaagtggactgcacggcccactccgacgtgtgctccgcccagggggtgcgaggataccccaccttaaagcttttcaagccaggccaagaagctgtgaagtaccagggtcctcgggacttccagacactggaaaactggatgctgcagacactgaacgaggagccagtgacaccagagccggaagtggaaccgcccagtgcccccgagctcaagcaagggctgtatgagctctcagcaagcaactttgagctgcacgttgcacaaggcgaccactttatcaagttcttcgctccgtggtgtggtcactgcaaagccctggctccaacctgggagcagctggctctgggccttgaacattccgaaactgtcaagattggcaaggttgattgtacacagcactatgaactctgctccggaaaccaggttcgtggctatcccactcttctctggttccgagatgggaaaaaggtggatcagtacaagggaaagcgggatttggagtcactgagggagtacgtggagtcgcagctgcagcgcacagagactggagcgacggagaccgtcacgccctcagaggccccggtgctggcagctgagcccgaggctgacaagggcactgtgttggcactcactgaaaataacttcgatgacaccattgcagaaggaataaccttcatcaagttttatgctccatggtgtggtcattgtaagactctggctcctacttgggaggaactctctaaaaaggaattccctggtctggcgggggtcaagatcgccgaagtagactgcactgctgaacggaatatctgcagcaagtattcggtacgaggctaccccacgttattgcttttccgaggagggaagaaagtcagtgagcacagtggaggcagagaccttgactcgttacaccgctttgtcctgagccaagcgaaagacgaactttaggaacacagttggaggtcacctctcctgcccagctcccgcaccctgcgtttaggagttcagtcccacagaggccactgggttcccagtggtggctgttcagaaagcagaacatactaagcgtgaggtatcttctttgtgtgtgtgttttccaagccaacacactctacagattctttattaagttaagtttctctaagtaaatgtgtaactcatggtcactgtgtaaacattttcagtggcgatatatcccctttgaccttctcttgatgaaatttacatggtttcctttgagactaaaatagcgttgagggaaatgaaattgctggactatttgtggctcctgagttgagtgattttggtgaaagaaagcacatccaaagcatagtttacctgcccacgagttctggaaaggtggccttgtggcagtattgacgttcctctgatcttaaggtcacagttgactcaatactgtgttggtccgtagcatggagcagattgaaatgcaaaaacccacacctctggaagataccttcacggccgctgctggagcttctgttgctgtgaatacttctctcagtgtgagaggttagccgtgatgaaagcagcgttacttctgaccgtgcctgagtaagagaatgctgatgccataactttatgtgtcgatacttgtcaaatcagttactgttcaggggatccttctgtttctcacggggtgaaacatgtctttagttcctcatgttaacacgaagccagagcccacatgaactgttggatgtcttccttagaaagggtaggcatggaaaattccacgaggctcattctcagtatctcattaactcattgaaagattccagttgtatttgtcacctggggtgacaagaccagacaggctttcccaggcctgggtatccagggaggctctgcagcctgttgaagggcctaactaaagttaaaattcggaacngtcaaaacnttaaagncgaaaatggnngtcanggggcc

SEQ ID NO: 362535 - DNA, 690 bp, Homo sapiens
ggtgggcgctatggccttggtgggcgctatggccttggttgggcgctatggccttgtgtgggcgctatggccttggtgggcgctatggccttggtgggcgctatggccttggtgggcgctatggccttggtgggcgctatggccttggtgggctgctctggccctggtgtgcacggctgtggcagctgttgatgccagtgtcctctaactcatgctgtccttgtgattaaacacctctatctcccttgggaataagcacatacaggcttaagctctaagatagataggtgtttgtccttttaccatcgagctacttcccataataaccactttgcatccaacactcttcacccacctcccatacgcaaggggatgtggatacttggcccaaagtaactggtggtaggaatcttagaaacaagaccacttatactgtctgtctgaggcagaagataacagcagcatctcgaccagcctctgccttaaaggaaatctttattaatcacgtatggttcacagataattctttttttaaaaaaacccaacctcctagagaagcacaactgtcaagagtcttgtacacacaacttcagctttgcatcacgagtcttgtattccaagaaaatcaaagtggtacaatttgtttgtttacactatgatactttctaaataaactctttttttttaaaa

SEQ ID NO: 362536 - DNA, 1564 bp, Homo sapiens
  misc_feature (1379)..(1379): n is a, c, g, or t
  misc_feature (1394)..(1394): n is a, c, g, or t
  misc_feature (1397)..(1397): n is a, c, g, or t
  misc_feature (1400)..(1400): n is a, c, g, or t
  misc_feature (1407)..(1408): n is a, c, g, or t
  misc_feature (1414)..(1414): n is a, c, g, or t
  misc_feature (1425)..(1425): n is a, c, g, or t
ccggaggccgcggcgaggcgcgcccagccccgccgcgatgcccgcgcgcccaggacgcctcctcccgctgctggcccggccggcggccctgactgcgctgctgctgctgctgctgggccatggcggcggcgggcgctggggcgcccgggcccaggaggcggcggcggcggcggcggacgggccccccgcggcagacggcgaggacggacaggacccgcacagcaagcacctgtacacggccgacatgttcacgcacgggatccagagcgccgcgcacttcgtcatgttcttcgcgccctggtgtggacactgccagcggctgcagccgacttggaatgacctgggagacaaatacaacagcatggaagatgccaaagtctatgtggctaaagtggactgcacggcccactccgacgtgtgctccgcccagggggtgcgaggataccccaccttaaagcttttcaagccaggccaagaagctgtgaagtaccagggtcctcgggacttccagacactggaaaactggatgctgcagacactgaacgaggagccagtgacaccagagccggaagtggaaccgcccagtgcccccgagctcaagcaagggctgtatgagctctcagcaagcaactttgagctgcacgttgcacaaggcgaccactttatcaagttcttcgctccgtggtgtggtcactgcaaagccctggctccaacctgggagcagctggctctgggccttgaacattccgaaactgtcaagattggcaaggttgattgtacacagcactatgaactctgctccggaaaccaggttcgtggctatcccactcttctctggttccgagatgggaaaaaggtggatcagtacaagggaaagcgggatttggagtcactgagggagtacgtggagtcgcagctgcagcgcacagagactggagcgacggagaccgtcacgccctcagaggccccggtgctggcagctgagcccgaggctgacaagggcactgtgttggcactcactgaaaataacttcgatgacaccattgcagaaggaataaccttcatcaagttttatgctccatggtgtggtcattgtaagactctggctcctacttgggaggaactctctaaaaaggaattccctggtctggcgggggtcaagatcgccgaagtagactgcactgctgaacggaatatctgcagcaagtattcggtacgaggctaccccacgttattgcttttccgaggagggaagaaagtcagtgagcacagtggaggcagagaccttgactcgttacaccgctttgtcctgagccaagcgaaagacgaactttaggaacacagttggaggtcacctctcctgcccagctcccgcaccnggttagatcagtccncgngcntggtccnngtgtgncgaaggactcnaggggggacccttgggggggtccagcagccccaactaaataggcccacgaagggaccgccggaactccgggaaaccgcccgaaagggcggaaagagagaagatgcggtggacacacccggggcctaggcgaacaggact

SEQ ID NO: 362537 - DNA, 1318 bp, Homo sapiens
  misc_feature (1157)..(1157): n is a, c, g, or t
ccggaggccgcggcgaggcgcgcccagccccgccgcgatgcccgcgcgcccaggacgcctcctcccgctgctggcccggccggcggccctgactgcgctgctgctgctgctgctgggccatggcggcggcgggcgctggggcgcccgggcccaggaggcggcggcggcggcggcggacgggccccccgcggcagacggcgaggacggacaggacccgcacagcaagcacctgtacacggccgacatgttcacgcacgggatccagagcgccgcgcacttcgtcatgttcttcgcgccctggtgtggacactgccagcggctgcagccgacttggaatgacctgggagacaaatacaacagcatggaagatgccaaagtctatgtggctaaagtggactgcacggcccactccgacgtgtgctccgcccagggggtgcgaggataccccaccttaaagcttttcaagccaggccaagaagctgtgaagtaccagggtcctcgggacttccagacactggaaaactggatgctgcagacactgaacgaggagccagtgacaccagagccggaagtggaaccgcccagtgcccccgagctcaagcaagggctgtatgagctctcagcaagcaactttgagctgcacgttgcacaaggcgaccactttatcaagttcttcgctccgtggtgtggtcactgcaaagccctggctccaacctgggagcagctggctctgggccttgaacattccgaaactgtcaagattggcaaggttgattgtacacagcactatgaactctgctccggaaaccaggttcgtggctatcccactcttctctggttccgagatgggaaaaaggtggatcagtacaagggaaagcgggatttggagtcactgagggagtacgtggagtcgcagctgcagcgcacagagactggagcgacggagaccgtcacgccctcagaggccccggtgctggcagctgagcccgaggctgacaagggcactgtgttggcactcactgaaaataacttcgatgacaccattgcagaaggaataaccttcatcaagttttatgctccatattgctcctgggtgggcctggtaaaccgggccactgtgaggaacctctaaaagaatcctggtctgggggggcaanaccgaaaaacgagcgcagaacgaatctagcccaccttatgagaaggacctctatttctttctgagcgacatcacctgcgccctaggaaaccttaccactgtcacacacaaactacgccgcgagtctctcagcccaactatcgtcgagatcactccagacac

SEQ ID NO: 362538 - DNA, 441 bp, Homo sapiens
ccggaggccgcggcgaggcgcgcccagccccgccgcgatgcccgcgcgcccaggacgcctcctcccgctgctggcccggccggcggccctgactgcgctgctgctgctgctgctgggccatggcggcggcgggcgctggggcgcccgggcccaggaggcggcggcggcggcggcggacgggccccccgcggcagacggcgaggacggacaggacccgcacagcaagcacctgtacacggccgacatgttcacgcacgggatccagagcgccgcgcacttcgtcatgttcttcgcgccctggtgtggacactgccagcggctgcagccgacttggaatgacctgggagacaaatacaacagcatggaagatgccaaagtctatgtggctaacagtcctgcttcccagcgcaccccagggaagcggccatcaagcggccagca

SEQ ID NO: 362539 - DNA, 256 bp, Homo sapiens
tcaggaagctgaagtgggaggatcacttgaacccaggagttcaaggccagcctgggcaacatagtaagaccccatctcaatttttaaaaataaattttgaaaaagattgtttaatgaataatttatttctattcattaaaaaattagactattggctgggtatggtggcacatccccgtaattccagcactttgggaggctgaggcaggaagaccacttacagctaggagtttgagaccagcctggacaacatatt

SEQ ID NO: 362540 - DNA, 381 bp, Homo sapiens
atttcatatattactgataattcataatgaattttaggattccattcaattacatactaaaaattacattttttatagtggcaatgtacttttatcagtattcttatttgacggtcaatttgagttcagtgtaaacaaataggacttagaaaaataatttgtaactcaagatgctgtacctcatcctataattgttgttttgtaatattccttctcaggaatatgggctaaggatatctcaactctgtcagatttgttgataagaatttaatagtaaggagttcttatagcctataaaaagcatgaattatgagatcaaatgtgggagttactatatgattatctgcattacaaaatgaaagcaaatgctttatttattcc

SEQ ID NO: 362541 - DNA, 591 bp, Homo sapiens
tgggttgaatgagagataaagaaaattaataggaagaacatcctgcatacaataaccgttttgttttcccaatttctatagggttgaagctttgagagaagcagcaactgctgttgagcaagagaaagaaatccttctggaaatgatccacagtatccaaaatagccaggacatgaggcagatcagtgacggtgagagccatctccacagaaggggctcatcttttacactcctttaaagagtttatgataagtgtgggtcaatttttgcttgacttttggtatgcgtacaccaggccacagcatttaatgtgagccacagagagcagctgcagctgtcagttcattacagcagccacttactcagagatttcttccagcatgctctctaccccaagcccctggctaggagagataggaaaaagcctgcaagctcagaaaagctggccccaagcagtaaggccatgtgttttatcccaggttcacagtcctaacttcagttcctcacaagttactggactgcaagagattaaaaaagcagaggaagagggtgagagagtggaagcagagaagtagagaccaaaaaaaaaaa

SEQ ID NO: 362542 - DNA, 2066 bp, Homo sapiens
cgggtagttcctgggtccggggagcagacgatccgctagccacattaggcgctcggtctctgcgtccgcccctcccgtgcctcagagacttgcgctccccaggcccgagcccctgtcggcccatcctcgagcccgtgtggctcgcgaacctctaactccagccgctgcagccccctcccaggcccggcgtccccgagccccgcgggcgccgcgcctgcccttctttggctacgctgcagccgcggtgtcggcgagtcctcccgggttgcccccgcgggcgtcagagggagggcgggcgcccgcgtggtgacggcgacgcctgcagcccaaggagcgctccactcgctgccgccggaggggccggtgacctcttggctaccccgcgtcggaggcttagatggctcaggcgaagatcaacgctaaagccaacgaggggcgcttctgccgctcctcctccatggctgaccgctccagccgcctgctggagagcctggaccagctggagctcagggttgaagctttgagagaagcagcaactgctgttgagcaagagaaagaaatccttctggaaatgatccacagtatccaaaatagccaggacatgaggcagatcagtgacggagaaagagaagaattaaatctgactgcaaaccgtttgatgggaagaactctcaccgttgaagtgtcagtagaaacaattagaaacccccagcagcaagaatccctaaagcatgccacaaggattattgatgaggtggtcaataagtttctggatgatttgggaaatgccaagagtcatttaatgtcgctctacagtgcatgttcatctgaggtgccacatgggccagttgatcagaagtttcaatccatagtaattggctgtgctcttgaagatcagaagaaaattaagagaagattagagactctgcttagaaatattgaaaactctgacaaggccatcaagctattagagcattctaaaggagctggttccaaaactctgcaacaaaatgctgaaagcagattcaattagtcttcaaacctaagagcatttacacaatacacaaggtgtaaaaatgataaaatactattttaattgataactagttctttgttaggtataaccacttagttgacactgatagttgtttcagatgaggaaaatattccatcaagtatcttcagttttgtgaataacaaaactagcaatattttaattatctatctagagattttttagattgaattcttgtcttgtactaggatctagcatatttcactattctgtggatgaatacatagtttgtggggaaaacaaacgttcagctaggggcaaaaagcatgactgctttttcctgtctggcatggaatcacgcagtcaccttgggcatttagtttactagaaattctttaccttaagcagcacacacatttactacacacacagtgttaacaaagcactgtgcttagagggtaaaaaggaatcacaaaacaagaatctttccaaagttgtctcattcagcaatgttaaggcatctgtatcaaattattttggatgtaaagattcctgtgtctcataatatgaatgtattttttgatatacaagaaactgacataaaatgtgagaaaaccacctataatttaccactgtgaacaattatatatctatctgcttcatcttttctcaaatgcatcaattctctaaaattcctatattgtaacttgcctttttttaaaaaagttagatgctgatataaagtctgcttaattgtcaacttaatgagctctattttgtgtagttatatctttatccattcctcttttatggacatttaggttgtttccaacttgttgctattactgcaacatatttttgtacacaggactttttccttctttcatttttgtttttctctgtataaaggcccagcagtgaattatattgggtcaaaggatatagacgttttcatggcctcacacatattaaactttttttgtataaaggttacagcaatttatacttttttcagtaattaaaatatagctatttcactgaaatatttcca

SEQ ID NO: 362543 - DNA, 1637 bp, Homo sapiens
cgggtagttcctgggtccggggagcagacgatccgctagccacattaggcgctcggtctctgcgtccgcccctcccgtgcctcagagacttgcgctccccaggcccgagcccctgtcggcccatcctcgagcccgtgtggctcgcgaacctctaactccagccgctgcagccccctcccaggcccggcgtccccgagccccgcgggcgccgcgcctgcccttctttggctacgctgcagccgcggtgtcggcgagtcctcccgggttgcccccgcgggcgtcagagggagggcgggcgcccgcgtggtgacggcgacgcctgcagcccaaggagcgctccactcgctgccgccggaggggccggtgacctcttggctaccccgcgtcggaggcttagatggctcaggcgaagatcaacgctaaagccaacgaggggcgcttctgccgctcctcctccatggctgaccgctccagccgcctgctggagagcctggaccagctggagctcagggttgaagctttgagagaagcagcaactgctgttgagcaagagaaagaaatccttctggaaatgatccacagtatccaaaatagccaggacatgaggcagatcagtgacggagaaagagaagaattaaatctgactgcaaaccgtttgatgggaagaactctcaccgttgaagtgtcagtagaaacaattagaaacccccagcagcaagaatccctaaagcatgccacaaggattattgatgaggtggtcaataagtttctggatgatttgggaaatgccaagagtcatttaatgtcgctctacagtgcatgttcatctgaggtgccacatgggccagttgatcagaagtttcaatccatagtaattggctgtgctcttgaagatcagaagaaaattaagagaagattagagactctgcttagaaatattgaaaactctgacaaggccatcaagctattagagcattctaaaggagctggttccaaaactctgcaacaaaatgctgaaagcagattcaattagtcttcaaacctaagagcatttacacaatacacaaggtgtaaaaatgataaaatactattttaattgataactagttctttgttaggtataaccacttagttgacactgatagttgtttcagatgaggaaaatattccatcaagtatcttcagttttgtgaataacaaaactagcaatattttaattatctatctagagattttttagattgaattcttgtcttgtactaggatctagcatatttcactattctgtggatgaatacatagtttgtggggaaaacaaacgttcagctaggggcaaaaagcatgactgctttttcctgtctggcatggaatcacgcagtcaccttgggcatttagtttactagaaattctttaccttaagcagcacacacatttactacacacacagtgttaacaaagcactgtgcttagagggtaaaaaggaatcacaaaacaagaatctttccaaagttgtctcattcagcaatgttaaggcatctgtatcaaattattttggatgtaaagattcctgtgtctcataatatgaatgtattttttgatatacaagaaactgacataaaatgtgagaaaaccaccta

SEQ ID NO: 362544 - DNA, 2259 bp, Homo sapiens
cgggtagttcctgggtccggggagcagacgatccgctagccacattaggcgctcggtctctgcgtccgcccctcccgtgcctcagagacttgcgctccccaggcccgagcccctgtcggcccatcctcgagcccgtgtggctcgcgaacctctaactccagccgctgcagccccctcccaggcccggcgtccccgagccccgcgggcgccgcgcctgcccttctttggctacgctgcagccgcggtgtcggcgagtcctcccgggttgcccccgcgggcgtcagagggagggcgggcgcccgcgtggtgacggcgacgcctgcagcccaaggagcgctccactcgctgccgccggaggggccggtgacctcttggctaccccgcgtcggaggcttagatggctcaggcgaagatcaacgctaaagccaacgaggggcgcttctgccgctcctcctccatggctgaccgctccagccgcctgctggagagcctggaccagctggagctcagggagccacataacaagtaacacacatctctccatgtcttcagaacgttgagggcatgttctcaaccacttcattctcctctcccttagccagaaagaaaagttttcctaaaggaatggggaggttgttactccactccgccttccttcaagctgagtcattgtcctccaacttgaattaatgcctcacatgtgggttgaagctttgagagaagcagcaactgctgttgagcaagagaaagaaatccttctggaaatgatccacagtatccaaaatagccaggacatgaggcagatcagtgacggagaaagagaagaattaaatctgactgcaaaccgtttgatgggaagaactctcaccgttgaagtgtcagtagaaacaattagaaacccccagcagcaagaatccctaaagcatgccacaaggattattgatgaggtggtcaataagtttctggatgatttgggaaatgccaagagtcatttaatgtcgctctacagtgcatgttcatctgaggtgccacatgggccagttgatcagaagtttcaatccatagtaattggctgtgctcttgaagatcagaagaaaattaagagaagattagagactctgcttagaaatattgaaaactctgacaaggccatcaagctattagagcattctaaaggagctggttccaaaactctgcaacaaaatgctgaaagcagattcaattagtcttcaaacctaagagcatttacacaatacacaaggtgtaaaaatgataaaatactattttaattgataactagttctttgttaggtataaccacttagttgacactgatagttgtttcagatgaggaaaatattccatcaagtatcttcagttttgtgaataacaaaactagcaatattttaattatctatctagagattttttagattgaattcttgtcttgtactaggatctagcatatttcactattctgtggatgaatacatagtttgtggggaaaacaaacgttcagctaggggcaaaaagcatgactgctttttcctgtctggcatggaatcacgcagtcaccttgggcatttagtttactagaaattctttaccttaagcagcacacacatttactacacacacagtgttaacaaagcactgtgcttagagggtaaaaaggaatcacaaaacaagaatctttccaaagttgtctcattcagcaatgttaaggcatctgtatcaaattattttggatgtaaagattcctgtgtctcataatatgaatgtattttttgatatacaagaaactgacataaaatgtgagaaaaccacctataatttaccactgtgaacaattatatatctatctgcttcatcttttctcaaatgcatcaattctctaaaattcctatattgtaacttgcctttttttaaaaaagttagatgctgatataaagtctgcttaattgtcaacttaatgagctctattttgtgtagttatatctttatccattcctcttttatggacatttaggttgtttccaacttgttgctattactgcaacatatttttgtacacaggactttttccttctttcatttttgtttttctctgtataaaggcccagcagtgaattatattgggtcaaaggatatagacgttttcatggcctcacacatattaaactttttttgtataaaggttacagcaatttatacttttttcagtaattaaaatatagctatttcactgaaatatttcca

SEQ ID NO: 362545 - DNA, 2318 bp, Homo sapiens
ggcgggccggggcctggggcacagtgaggctgcggcaaccgaagttgcttgttgagatttgttgtggatggacgtggtgtagttttgtttgtttcttggattatctcccctagtccgagagaaaacgcattcgatttaagctaaacctgtgagggcgttatcggtggccacactttgattaatttacctaggtgttagggagcggaaaaaaatcagaggagataaaagttacagtgagattccatgcgattaaggactgtggcagcttgggtctgcagaacttctagaaccttctgtgtggccccaaacgttttaacttactcttctcgttatgcattttttaagggaggcagcagtttacagtggccctccacgtgaagttaagtttccttgcttcagaacaaaaatgaataaaacaaaaccaacccagcaatccattgagagcaaagattagacaggagtgaggggtaggcagtaagttaccgggtgcttcgtgcagcagagacgttgccgcttctgtttctcccctaacctcgcggacgggattcagcggttccgttcgtctctcgggagccacataacaagtaacacacatctctccatgtcttcagaacgttgagggcatgttctcaaccacttcattctcctctcccttagccagaaagaaaagttttcctaaaggaatggggaggttgttactccactccgccttccttcaagctgagtcattgtcctccaacttgaattaatgcctcacatgtgggttgaagctttgagagaagcagcaactgctgttgagcaagagaaagaaatccttctggaaatgatccacagtatccaaaatagccaggacatgaggcagatcagtgacggagaaagagaagaattaaatctgactgcaaaccgtttgatgggaagaactctcaccgttgaagtgtcagtagaaacaattagaaacccccagcagcaagaatccctaaagcatgccacaaggattattgatgaggtggtcaataagtttctggatgatttgggaaatgccaagagtcatttaatgtcgctctacagtgcatgttcatctgaggtgccacatgggccagttgatcagaagtttcaatccatagtaattggctgtgctcttgaagatcagaagaaaattaagagaagattagagactctgcttagaaatattgaaaactctgacaaggccatcaagctattagagcattctaaaggagctggttccaaaactctgcaacaaaatgctgaaagcagattcaattagtcttcaaacctaagagcatttacacaatacacaaggtgtaaaaatgataaaatactattttaattgataactagttctttgttaggtataaccacttagttgacactgatagttgtttcagatgaggaaaatattccatcaagtatcttcagttttgtgaataacaaaactagcaatattttaattatctatctagagattttttagattgaattcttgtcttgtactaggatctagcatatttcactattctgtggatgaatacatagtttgtggggaaaacaaacgttcagctaggggcaaaaagcatgactgctttttcctgtctggcatggaatcacgcagtcaccttgggcatttagtttactagaaattctttaccttaagcagcacacacatttactacacacacagtgttaacaaagcactgtgcttagagggtaaaaaggaatcacaaaacaagaatctttccaaagttgtctcattcagcaatgttaaggcatctgtatcaaattattttggatgtaaagattcctgtgtctcataatatgaatgtattttttgatatacaagaaactgacataaaatgtgagaaaaccacctataatttaccactgtgaacaattatatatctatctgcttcatcttttctcaaatgcatcaattctctaaaattcctatattgtaacttgcctttttttaaaaaagttagatgctgatataaagtctgcttaattgtcaacttaatgagctctattttgtgtagttatatctttatccattcctcttttatggacatttaggttgtttccaacttgttgctattactgcaacatatttttgtacacaggactttttccttctttcatttttgtttttctctgtataaaggcccagcagtgaattatattgggtcaaaggatatagacgttttcatggcctcacacatattaaactttttttgtataaaggttacagcaatttatacttttttcagtaattaaaatatagctatttcactgaaatatttcca

SEQ ID NO: 362546 - DNA, 2205 bp, Homo sapiens
cgggtagttcctgggtccggggagcagacgatccgctagccacattaggcgctcggtctctgcgtccgcccctcccgtgcctcagagacttgcgctccccaggcccgagcccctgtcggcccatcctcgagcccgtgtggctcgcgaacctctaactccagccgctgcagccccctcccaggcccggcgtccccgagccccgcgggcgccgcgcctgcccttctttggctacgctgcagccgcggtgtcggcgagtcctcccgggttgcccccgcgggcgtcagagggagggcgggcgcccgcgtggtgacggcgacgcctgcagcccaaggagcgctccactcgctgccgccggaggggccggtgacctcttggctaccccgcgtcggaggcttagatggctcaggcgaagatcaacgctaaagccaacgaggggcgcttctgccgctcctcctccatggctgaccgctccagccgcctgctggagagcctggaccagctggagctcagggagccacataacaagtaacacacatctctccatgtcttcagaacgttgagggcatgttctcaaccacttcattctcctctcccttagccagaaagaaaagttttcctaaaggaatggggaggttgttactccactccgccttccttcaagctgagtcattgtcctccaacttgaattaatgcctcacatgtgggttgaagctttgagagaagcagcaactgctgttgagcaagagaaagaaatccttctggaaatgatccacagtatcctgactgcaaaccgtttgatgggaagaactctcaccgttgaagtgtcagtagaaacaattagaaacccccagcagcaagaatccctaaagcatgccacaaggattattgatgaggtggtcaataagtttctggatgatttgggaaatgccaagagtcatttaatgtcgctctacagtgcatgttcatctgaggtgccacatgggccagttgatcagaagtttcaatccatagtaattggctgtgctcttgaagatcagaagaaaattaagagaagattagagactctgcttagaaatattgaaaactctgacaaggccatcaagctattagagcattctaaaggagctggttccaaaactctgcaacaaaatgctgaaagcagattcaattagtcttcaaacctaagagcatttacacaatacacaaggtgtaaaaatgataaaatactattttaattgataactagttctttgttaggtataaccacttagttgacactgatagttgtttcagatgaggaaaatattccatcaagtatcttcagttttgtgaataacaaaactagcaatattttaattatctatctagagattttttagattgaattcttgtcttgtactaggatctagcatatttcactattctgtggatgaatacatagtttgtggggaaaacaaacgttcagctaggggcaaaaagcatgactgctttttcctgtctggcatggaatcacgcagtcaccttgggcatttagtttactagaaattctttaccttaagcagcacacacatttactacacacacagtgttaacaaagcactgtgcttagagggtaaaaaggaatcacaaaacaagaatctttccaaagttgtctcattcagcaatgttaaggcatctgtatcaaattattttggatgtaaagattcctgtgtctcataatatgaatgtattttttgatatacaagaaactgacataaaatgtgagaaaaccacctataatttaccactgtgaacaattatatatctatctgcttcatcttttctcaaatgcatcaattctctaaaattcctatattgtaacttgcctttttttaaaaaagttagatgctgatataaagtctgcttaattgtcaacttaatgagctctattttgtgtagttatatctttatccattcctcttttatggacatttaggttgtttccaacttgttgctattactgcaacatatttttgtacacaggactttttccttctttcatttttgtttttctctgtataaaggcccagcagtgaattatattgggtcaaaggatatagacgttttcatggcctcacacatattaaactttttttgtataaaggttacagcaatttatacttttttcagtaattaaaatatagctatttcactgaaatatttcca

SEQ ID NO: 362547 - DNA, 844 bp, Homo sapiens
  misc_feature (21)..(21): n is a, c, g, or t
gagcatttacaccttgtgtantgtgtaaatgctcttaggtttgaagactaattgaatctgctttcagcatttgttgcagagtttggaaccagctcctttagaatgctctaagagcatttacacaatacacaaggtgtaaaaatgataaaatactattttaattgataactagttctttgttaggtataaccacttagttgacactgatagttgtttcagatgaggaaaatattccatcaagtatcttcagttttgtgaataacaaaactagcaatattttaattatctatctagagattttttagattgaattcttgtcttgtactaggatctagcatatttcactattctgtggatgaatacatagtttgtggggaaaacaaacgttcagctaggggcaaaaagcatgactgctttttcctgtctggcatggaatcacgcagtcaccttgggcatttagtttactagaaattctttaccttaagcagcacacacatttactacacacacagtgttaacaaagcactgtgcttagagggtaaaaaggaatcacaaaacaagaatctttccaaagttgtctcattcagcaatgttaaggcatctgtatcaaattattttggatgtaaagattcctgtgtctcataatatgaatgtattttttgatatacaagaaactgacataaaatgtgagaaaaccacctataatttaccactgtgaacaattatatatctatctgcttcatcttttctcaaatgcatcaattctctaaaattcctatattgtaacttgcctttttttaaaaaagttagatgctgatataaagtctgcttaattgtcaactta

SEQ ID NO: 362548 - DNA, 1020 bp, Homo sapiens
cgggtagttcctgggtccggggagcagacgatccgctagccacattaggcgctcggtctctgcgtccgcccctcccgtgcctcagagacttgcgctccccaggcccgagcccctgtcggcccatcctcgagcccgtgtggctcgcgaacctctaactccagccgctgcagccccctcccaggcccggcgtccccgagccccgcgggcgccgcgcctgcccttctttggctacgctgcagccgcggtgtcggcgagtcctcccgggttgcccccgcgggcgtcagagggagggcgggcgcccgcgtggtgacggcgacgcctgcagcccaaggagcgctccactcgctgccgccggaggggccggtgacctcttggctaccccgcgtcggaggcttagatggctcaggcgaagatcaacgctaaagccaacgaggggcgcttctgccgctcctcctccatggctgaccgctccagccgcctgctggagagcctggaccagctggagctcagggttgaagctttgagagaagcagcaactgctgttgagcaagagaaagaaatccttctggaaatgatccacagtatccaaaatagccaggacatgaggcagatcagtgacggtgagagccatctccacagaaggggctcatcttttacactcctttaaagagtttatgataagtgtgggtcaatttttgcttgacttttggtatgcgtacaccaggccacagcatttaatgtgagccacagagagcagctgcagctgtcagttcattacagcagccacttactcagagatttcttccagcatgctctctaccccaagcccctggctaggagagataggaaaaagcctgcaagctcagaaaagctggccccaagcagtaaggccatgtgttttatcccaggttcacagtcctaacttcagttcctcacaagttactggactgcaagagattaaaaaagcagaggaagagggtgagagagtggaagcagagaagtagagaccaaaaaaaaaaa

SEQ ID NO: 362549 - DNA, 1779 bp, Homo sapiens
cgggtagttcctgggtccggggagcagacgatccgctagccacattaggcgctcggtctctgcgtccgcccctcccgtgcctcagagacttgcgctccccaggcccgagcccctgtcggcccatcctcgagcccgtgtggctcgcgaacctctaactccagccgctgcagccccctcccaggcccggcgtccccgagccccgcgggcgccgcgcctgcccttctttggctacgctgcagccgcggtgtcggcgagtcctcccgggttgcccccgcgggcgtcagagggagggcgggcgcccgcgtggtgacggcgacgcctgcagcccaaggagcgctccactcgctgccgccggaggggccggtgacctcttggctaccccgcgtcggaggcttagatggctcaggcgaagatcaacgctaaagccaacgaggggcgcttctgccgctcctcctccatggctgaccgctccagccgcctgctggagagcctggaccagctggagctcagggttgaagctttgagagaagcagcaactgctgttgagcaagagaaagaaatccttctggaaatgatccacagtatccaaaatagccaggacatgaggcagatcagtgacggagaaagagaagaattaaatctgactgcaaaccgtttgatgggaagaactctcaccgttgaagtgtcagtagaaacaattagaaacccccagcagcaagaatccctaaagcatgccacaaggattattgatgaggtggtcaataagtttctggatgatttgggaaatgccaagagtcatttaatgtcgctctacagtgcatgttcatctgaggtgccacatgggccagttgatcagaagtttcaatccatagtaattggctgtgctcttgaagatcagaagaaaattaagagaagattagagactctgcttagaaatattgaaaactctgacaaggccatcaagctattagagcattctaaaggagctggttccaaaactctgcaacaaaatgctgaaagcagattcaattagtcttcaaacctaagagcatttacacaatacacaaggtgtaaaaatgataaaatactattttaattgataactagttctttgttaggtataaccacttagttgacactgatagttgtttcagatgaggaaaatattccatcaagtatcttcagttttgtgaataacaaaactagcaatattttaattatctatctagagattttttagattgaattcttgtcttgtactaggatctagcatatttcactattctgtggatgaatacatagtttgtggggaaaacaaacgttcagctaggggcaaaaagcatgactgctttttcctgtctggcatggaatcacgcagtcaccttgggcatttagtttactagaaattctttaccttaagcagcacacacatttactacacacacagtgttaacaaagcactgtgcttagagggtaaaaaggaatcacaaaacaagaatctttccaaagttgtctcattcagcaatgttaaggcatctgtatcaaattattttggatgtaaagattcctgtgtctcataatatgaatgtattttttgatatacaagaaactgacataaaatgtgagaaaaccacctataatttaccactgtgaacaattatatatctatctgcttcatcttttctcaaatgcatcaattctctaaaattcctatattgtaacttgcctttttttaaaaaagttagatgctgatataaagtctgcttaattgtcaactta

SEQ ID NO: 362550 - DNA, 2227 bp, Homo sapiens
ggcgggccggggcctggggcacagtgaggctgcggcaaccgaagttgcttgttgagatttgttgtggatggacgtggtgtagttttgtttgtttcttggattatctcccctagtccgagagaaaacgcattcgatttaagctaaacctgtgagggcgttatcggtggccacactttgattaatttacctaggtgttagggagcggaaaaaaatcagaggagataaaagttacagtgagattccatgcgattaaggactgtggcagcttgggtctgcagaacttctagaaccttctgtgtggccccaaacgttttaacttactcttctcgttatgcattttttaagggaggcagcagtttacagtggccctccacgtgaagttaagtttccttgcttcagaacaaaaatgaataaaacaaaaccaacccagcaatccattgagagcaaagattagacaggagtgaggggtaggcagtaagttaccgggtgcttcgtgcagcagagacgttgccgcttctgtttctcccctaacctcgcggacgggattcagcggttccgttcgtctctcggtatttattgggcacctccctacatagaagactaagtgctagttactggcctgaaagcatgaaaagatagttttccccttttcttgcttaagaatttatttgggttgaagctttgagagaagcagcaactgctgttgagcaagagaaagaaatccttctggaaatgatccacagtatccaaaatagccaggacatgaggcagatcagtgacggagaaagagaagaattaaatctgactgcaaaccgtttgatgggaagaactctcaccgttgaagtgtcagtagaaacaattagaaacccccagcagcaagaatccctaaagcatgccacaaggattattgatgaggtggtcaataagtttctggatgatttgggaaatgccaagagtcatttaatgtcgctctacagtgcatgttcatctgaggtgccacatgggccagttgatcagaagtttcaatccatagtaattggctgtgctcttgaagatcagaagaaaattaagagaagattagagactctgcttagaaatattgaaaactctgacaaggccatcaagctattagagcattctaaaggagctggttccaaaactctgcaacaaaatgctgaaagcagattcaattagtcttcaaacctaagagcatttacacaatacacaaggtgtaaaaatgataaaatactattttaattgataactagttctttgttaggtataaccacttagttgacactgatagttgtttcagatgaggaaaatattccatcaagtatcttcagttttgtgaataacaaaactagcaatattttaattatctatctagagattttttagattgaattcttgtcttgtactaggatctagcatatttcactattctgtggatgaatacatagtttgtggggaaaacaaacgttcagctaggggcaaaaagcatgactgctttttcctgtctggcatggaatcacgcagtcaccttgggcatttagtttactagaaattctttaccttaagcagcacacacatttactacacacacagtgttaacaaagcactgtgcttagagggtaaaaaggaatcacaaaacaagaatctttccaaagttgtctcattcagcaatgttaaggcatctgtatcaaattattttggatgtaaagattcctgtgtctcataatatgaatgtattttttgatatacaagaaactgacataaaatgtgagaaaaccacctataatttaccactgtgaacaattatatatctatctgcttcatcttttctcaaatgcatcaattctctaaaattcctatattgtaacttgcctttttttaaaaaagttagatgctgatataaagtctgcttaattgtcaacttaatgagctctattttgtgtagttatatctttatccattcctcttttatggacatttaggttgtttccaacttgttgctattactgcaacatatttttgtacacaggactttttccttctttcatttttgtttttctctgtataaaggcccagcagtgaattatattgggtcaaaggatatagacgttttcatggcctcacacatattaaactttttttgtataaaggttacagcaatttatacttttttcagtaattaaaatatagctatttcactgaaatatttcca

SEQ ID NO: 362551 - DNA, 2251 bp, Homo sapiens
acaccatcctcttagttgctcagactgaaaagctagcagccatcctggatttctctcacactgcctattcaacgtgtgaatgcatgagtggaaagctgagttcgcactcgtgactggccggggtcgactctgacattcactcccactttggcgcgctgatttgcctctgagcggatgaaggttgagccatggcgggcggggccggggaggcgggcttggagcgagggggcggggcaggcgccacaaaaacgcgctcgcgccggcgccgaaccgcaactcccggcgacccccgcgctcccgggtggcaagatggtggcgcgcaggaggaagtgcgccgcgcgggacccggaggaccgtatccccagcccactgggctacgcagctattccaatcaagttctctgaaaagcaacaggcttctcactacctctatgtgagagcacacggcgttcgacaaggcaccaagtccacctggcctcagaagaggactctttttgtcctcaatgtgcccccatactgcacagaggagagcctgtcccgcctcctgtccacctgtggcctcgtccagtctgtagagttgcaggagaagccggacctggctgagagcccaaaggagtcaaggtcgaagttttttcatcccaagccagttccgggtttccaggtagcctatgtggtgttccagaagccaagtggggtgtcagcggccttggccctgaagggccccctgctggtgtccacagagagccaccctgtgaagagtggcattcacaagtggatcagtgactacgcagactctgtgcccgaccctgaggccctgagggtggaagtggacacgttcatggaggcatatgaccagaagatcgctgaggaagaagctaaggccaaggaggaggagggggtccctgacgaggagggctgggtgaaggtgacccgccggggccggcggcctgtgctcccccggactgaggcagccagcttgcgggtgctggagagggagagacggaagcgcagccgaaaagagctgctcaacttctacgcctggcagcatcgagagagcaagatggagcatctagcgcagctgcgcaagaagttcgaggaggacaagcagaggatcgagctgctgcgggcccagcgcaaattccgaccgtactgagctgtgagagccgcagtgaatggctggaggtgcagggccaggaggaggcgaggcagggcctgcagcggtctctgagaggccgagctctggccaacgggccccaggttgaaggccaccgcgtccaacagccccatcagagtccacacaggccaggagggaaggaccaggccacccctcgggtcttgtgcttcagcagtcctggggacccaggcgtgccgagaggaggacttgtccttcctgcttcttgcctccacaccctcctctccaggaccctggatgaatccgttctgtgcttccttttccctcaatgcaaaagcccttgctggcaacgaaaaagcctcaaaagcagtgagaatacaagaaccttttattttccatccagttgggcagcagggaaaggctaggtgggcccagcctgcccttccttcctccagctggctggatatttattattagccaggagaaagcagccctggaacccagactctgtctcccccttgaggtcacagatgttgaagttggaatctcgctccttcccctgactaccatcctaggctgggcctcaagactagtgaggcctgtccccaccatccctggccttgttgtggggctcaggaactcagagtcccagtgttgagtctgggagcactaggtcttcatagttccaggcccagagctacagctgggctgggagcgtgtgtgtgcactgtaagaaggagctgatgatactggccacgtgctggggttcgctcatgtggacacagtgattgcctgggacttccacaaactggaactgctctttgagggtggatttcatcgtgtctatcatgaacgacagggactccttctcagagtaattctgtcttgaatcaaaatatccgtggactgctttgatcaacaggacatggcctgcagcttcctgatggaatgcgcacacagctccctgctgatgaagtcaatgctgttctctgcccaggcgagcctctggtctctgttcagaaccagacctgtgggcaccttcgtggttcctctttgcaggagaactccccgcactcctcactcaagtggctattgctcttcagtaacctctgcagcagct

SEQ ID NO: 362552 - DNA, 795 bp, Homo sapiens
agcaaccatgactggctttgtctctgccgtgtgtcctatttggacttgaacgtgaatgcagccatacaacacgtagacggttgtgtctgacttcatccacttagtgcgatgttttcaaggctcatccatgctggagcccatgtcagtgcttcgtttctttttatggcttaaaaatcgtctatggtgggccacgcacggtggctctcgcctgtaatcccaacactgggaggccgaggcaggcggatcatgaggtcaggagatggagagcagcctggccaacatggcgaaacctcgtctctactaaaaatacaaagataagccaggcgtggtggcgggcgcctgtagtcccagctactcgggaggctgaggcaggagaatcgtttgaatccaggaggcagaggttgcagtgagtcgagactgggctcactggttatggagccttacctgggcatgccccccgctgacacctgtggaaaggcatgggacagccccggcccatcccctgctgcctgagccctcccctcctctgaccttcctccttccatgaccctgctgccaggggggcttcccaaaaaagatcttgagtcttagcgatgtggtcgacacgcagagaacttggagcctcatgccagggccccctcccagagattcctgcagcttcctgatggaatgcgcacacagctccctgctgatgaagtcaatgctgttctctgcctgcagagacaaaaacatggtgaattctcgtcacaaggcacaggcactctcgtgggcacgaaacccatctctgttggggtg

SEQ ID NO: 362553 - DNA, 2807 bp, Homo sapiens
acaccatcctcttagttgctcagactgaaaagctagcagccatcctggatttctctcacactgcctattcaacgtgtgaatgcatgagtggaaagctgagttcgcactcgtgactggccggggtcgactctgacattcactcccactttggcgcgctgatttgcctctgagcggatgaaggttgagccatggcgggcggggccggggaggcgggcttggagcgagggggcggggcaggcgccacaaaaacgcgctcgcgccggcgccgaaccgcaactcccggcgacccccgcgctcccgggtggcaagatggtggcgcgcaggaggaagtgcgccgcgcgggacccggaggaccgtatccccagcccactgggctacgcagctattccaatcaagttctctgaaaagcaacaggcttctcactacctctatgtgagagcacacggcgttcgacaaggcaccaagtccacctggcctcagaagaggactctttttgtcctcaatgtgcccccatactgcacagaggagagcctgtcccgcctcctgtccacctgtggcctcgtccagtctgtagagttgcaggagaagccggacctggctgagagcccaaaggagtcaaggtcgaagttttttcatcccaagccagttccgggtttccaggtagcctatgtggtgttccagaagccaagtggggtgtcagcggccttggccctgaagggccccctgctggtgtccacagagagccaccctgtgaagagtggcattcacaagtggatcagtgactacgcagactctgtgcccgaccctgaggccctgagggtggaagtggacacgttcatggaggcatatgaccagaagatcgctgaggaagaagctaaggccaaggaggaggagggggtccctgacgaggagggctgggtgaaggtgacccgccggggccggcggcctgtgctcccccggactgaggcagccagcttgcgggtgctggagagggagagacggaagcgcagccgaaaagagctgctcaacttctacgcctggcagcatcgagagagcaagatggagcatctagcgcagctgcgcaagaagttcgaggaggacaagcagaggatcgagctgctgcgggcccagcgcaaattccgaccgtactgagctgtgagagccgcagtgaatggctggaggtgcagggccaggaggaggcgaggcagggcctgcagcggtctctgagaggccgagctctggccaacgggccccaggttgaaggccaccgcgtccaacagccccatcagagtccacacaggccaggagggaaggaccaggccacccctcgggtcttgtgcttcagcagtcctggggacccaggcgtgccgagaggaggacttgtccttcctgcttcttgcctccacaccctcctctccaggaccctggatgaatccgttctgtgcttccttttccctcaatgcaaaagcccttgctggcaacgaaaaagcctcaaaagcagtgagaatacaagaaccttttattttccatccagttgggcagcagggaaaggctaggtgggcccagcctgcccttccttcctccagctggctggatatttattattagccaggagaaagcagccctggaacccagactctgtctcccccttgaggtcacagatgttgaagttggaatctcgctccttcccctgactaccatcctaggctgggcctcaagactagtgaggcctgtccccaccatccctggccttgttgtggggctcaggaactcagagtcccagtgttgagtctgggagcactaggtcttcatagttccaggcccagagctacagctgggctgggagcgtgtgtgtgcactgtaagaaggagctgatgatactggccacgtgctggggttcgctcatgtggacacagtgattgcctgggacttccacaaactggaactgctggagaggggagggggtgggtagtgagatgtggccagaggagcctagggagctccatgggccccggggtcagggccctcccacagcattccagctccctgcaggtcaggagcgcctcccacagtgagtttcccccacactcggctccttggagccccgacagtccatagcaccccaggagatgtctaaccttagggacttggaggcctcccaggggtctaggccagctgagttgtgaagttgcatggcagggacagggcagggccgaggccagggttgctgtgattgtatccgaagtagtcctcgtgagaaaagataatgagatgacgtgagcagcctgcagacttgtgtctgccttcaagaagccagacaggaaggccctgcctgccttggctctgacctggcggccagccagccagccacaggtgggcttcttccttttgtggtgacaacgccaagaaaactgcagaggccccagggtcaggtgtaagtgggtaggtgaccataaaacaccaggtgctcccaggaacccgggcaaaggccatccccacctacagccagcatgcccactggcgtgatgggtgcagagggatgaggcagccaggtgttctgctgtggtttgggagcctataaagtgagactaggctgggcatggtggctcccatctgcaaaaccagcactttgggaggccaaggtgggcggatcgcctgaggtcaggagtttgagaccagcctggccaacatggtgaacccccatctcttaaaaatataaaaattagctgggcatggtggcaggtgcctgtaatcccagctactcaggaggctgaggcacgagagtcgcttgaacccgggaggtggag

SEQ ID NO: 362554 - DNA, 2123 bp, Homo sapiens
acaccatcctcttagttgctcagactgaaaagctagcagccatcctggatttctctcacactgcctattcaacgtgtgaatgcatgagtggaaagctgagttcgcactcgtgactggccggggtcgactctgacattcactcccactttggcgcgctgatttgcctctgagcggatgaaggttgagccatggcgggcggggccggggaggcgggcttggagcgagggggcggggcaggcgccacaaaaacgcgctcgcgccggcgccgaaccgcaactcccggcgacccccgcgctcccgggtggcaagatggtggcgcgcaggaggaagtgcgccgcgcgggacccggaggaccgtatccccagcccactgggctacgcagctattccaatcaagttctctgaaaagcaacaggcttctcactacctctatgtgagagcacacggcgttcgacaaggcaccaagtccacctggcctcagaagaggactctttttgtcctcaatgtgcccccatactgcacagaggagagcctgtcccgcctcctgtccacctgtggcctcgtccagtctgtagagttgcaggagaagccggacctggctgagagcccaaaggagtcaaggtcgaagttttttcatcccaagccagttccgggtttccaggtagcctatgtggtgttccagaagccaagtggggtgtcagcggccttggccctgaagggccccctgctggtgtccacagagagccaccctgtgaagagtggcattcacaagtggatcagtgactacgcagactctgtgcccgaccctgaggccctgagggtggaagtggacacgttcatggaggcatatgaccagaagatcgctgaggaagaagctaaggccaaggaggaggagggggtccctgacgaggagggctgggtgaaggtgacccgccggggccggcggcctgtgctcccccggactgaggcagccagcttgcgggtgctggagagggagagacggaagcgcagccgaaaagagctgctcaacttctacgcctggcagcatcgagagagcaagatggagcatctagcgcagctgcgcaagaagttcgaggaggacaagcagaggatcgagctgctgcgggcccagcgcaaattccgaccgtactgagctgtgagagccgcagtgaatggctggaggtgcagggccaggaggaggcgaggcagggcctgcagcggtctctgagaggccgagctctggccaacgggccccaggttgaaggccaccgcgtccaacagccccatcagagtccacacaggccaggagggaaggaccaggccacccctcgggtcttgtgcttcagcagtcctggggacccaggcgtgccgagaggaggacttgtccttcctgcttcttgcctccacaccctcctctccaggaccctggatgaatccgttctgtgcttccttttccctcaatgcaaaagcccttgctggcaacgaaaaagcctcaaaagcagtgagaatacaagaaccttttattttccatccagttgggcagcagggaaaggctaggtgggcccagcctgcccttccttcctccagctggctggatatttattattagccaggagaaagcagccctggaacccagactctgtctcccccttgaggtcacagatgttgaagttggaatctcgctccttcccctgactaccatcctaggctgggcctcaagactagtgaggcctgtccccaccatccctggccttgttgtggggctcaggaactcagagtcccagtgttgagtctgggagcactaggtcttcatagttccaggcccagagctacagctgggctgggagcgtgtgtgtgcactgtaagaaggagctgatgatactggccacgtgctggggttcgctcatgtggacacagtgattgcctgggacttccacaaactggaactgcttgagagttctatagctttcctatttctattccaaagtttttatttatctggattttgttcctaagatctttttatactttatgttctattttttttcgttttttattcatatatattctatattgtttttattactaatgattttttatataatctgtatagtgataacatat

SEQ ID NO: 362555 - DNA, 2083 bp, Homo sapiens
acaccatcctcttagttgctcagactgaaaagctagcagccatcctggatttctctcacactgcctattcaacgtgtgaatgcatgagtggaaagctgagttcgcactcgtgactggccggggtcgactctgacattcactcccactttggcgcgctgatttgcctctgagcggatgaaggttgagccatggcgggcggggccggggaggcgggcttggagcgagggggcggggcaggcgccacaaaaacgcgctcgcgccggcgccgaaccgcaactcccggcgacccccgcgctcccgggtggcaagatggtggcgcgcaggaggaagtgcgccgcgcgggacccggaggaccgtatccccagcccactgggctacgcagctattccaatcaagttctctgaaaagcaacaggcttctcactacctctatgtgagagcacacggcgttcgacaaggcaccaagtccacctggcctcagaagaggactctttttgtcctcaatgtgcccccatactgcacagaggagagcctgtcccgcctcctgtccacctgtggcctcgtccagtctgtagagttgcaggagaagccggacctggctgagagcccaaaggagtcaaggtcgaagttttttcatcccaagccagttccgggtttccaggtagcctatgtggtgttccagaagccaagtggggtgtcagcggccttggccctgaagggccccctgctggtgtccacagagagccaccctgtgaagagtggcattcacaagtggatcagtgactacgcagactctgtgcccgaccctgaggccctgagggtggaagtggacacgttcatggaggcatatgaccagaagatcgctgaggaagaagctaaggccaaggaggaggagggggtccctgacgaggagggctgggtgaaggtgacccgccggggccggcggcctgtgctcccccggactgaggcagccagcttgcgggtgctggagagggagagacggaagcgcagccgaaaagagctgctcaacttctacgcctggcagcatcgagagagcaagatggagcatctagcgcagctgcgcaagaagttcgaggaggacaagcagaggatcgagctgctgcgggcccagcgcaaattccgaccgtactgagctgtgagagccgcagtgaatggctggaggtgcagggccaggaggaggcgagtgtccaccaaaggagacagggctgggagcgctgcccggggcccaggtcctccctaatgacagcatgcacgaaagcccgcttctcacatctgattccaggagaaagagcggcgtgtccagcaagataagtttatccaccatctcggggaaggtacagaaaaactgtgaggatgccaaaaggggagaatgaatagggggaagaaggaaaggacactcccgcctttccctggggaccctggagttccccgaaacatcttttaggctggggggagggtgctgaccaagaggccagaggagaatcttctatctatggtgtgccttcccccaccacccctaagtctgcacccagcactgagctccagaccttggtgatggctggactccagggtgctggtgggactgggtatgggggcgtggaaacatgaactctaccaggagtctccaccgtttacaccaacttcctggtataaggactatcactgtgacaggaggaggcactttctgtcccaggtaccttctccttcctcctttgtgctcccctccccactccacccaagggagccccagttggccagacaaagccatctactcaccattccgcccacgacgccacctgggggacaaaagagctgtgggtgacattccctcactccctccccagctgcataccctaaagcttcttcccaccagttggggggggggcaccatatgggtggctgggggctcagcatctgggccatgatgtccccttcatcagacctgaccactcaaaagaccacatttccctcatccctgtgtcccttgcggcagttgcctgaggtcagagggtacagtggtcaacctctgactgaccctctcatctctctttgcagatctcata

SEQ ID NO: 362556 - DNA, 2533 bp, Homo sapiens
cccggcggcccccgcgcgcgctcccgggtggcaagatggtggcgcgcaggaggaagtgcgccgcgcgggacccggaggaccgtatccccagcccactgggctacgcagctattccaatcaagttctctgaaaagcaacaggcttctcactacctctatgtgagagcacacggcgttcgacaaggcaccaagtccacctggcctcagaagaggactctttttgtcctcaatgtgcccccatactgcacagaggagagcctgtcccgcctcctgtccacctgtggcctcgtccagtctgtagagttgcaggagaagccggacctggctgagagcccaaaggagtcaaggtcgaagttttttcatcccaagccagttccgggtttccaggtagcctatgtggtgttccagaagccaagtggggtgtcagcggccttggccctgaagggccccctgctggtgtccacagagagccaccctgtgaagagtggcattcacaagtggatcagtgactacgcagactctgtgcccgaccctgaggccctgagggtggaagtggacacgttcatggaggcatatgaccagaagatcgctgaggaagaagctaaggccaaggaggaggagggggtccctgacgaggagggctgggtgaaggtgacccgccggggccggcggcctgtgctcccccggactgaggcagccagcttgcgggtgctggagagggagagacggaagcgcagccgaaaagagctgctcaacttctacgcctggcagcatcgagagagcaagatggagcatctagcgcagctgcgcaagaagttcgaggaggacaagcagaggatcgagctgctgcgggcccagcgcaaattccgaccgtactgagctgtgagagccgcagtgaatggctggaggtgcagggccaggaggaggcgaggcagggcctgcagcggtctctgagaggccgagctctggccaacgggccccaggttgaaggccaccgcgtccaacagccccatcagagtccacacaggccaggagggaaggaccaggccacccctcgggtcttgtgcttcagcagtcctggggacccaggcgtgccgagaggaggacttgtccttcctgcttcttgcctccacaccctcctctccaggaccctggatgaatccgttctgtgcttccttttccctcaatgcaaaagcccttgctggcaacgaaaaagcctcaaaagcagtgagaatacaagaaccttttattttccatccagttgggcagcagggaaaggctaggtgggcccagcctgcccttccttcctccagctggctggatatttattattagccaggagaaagcagccctggaacccagactctgtctcccccttgaggtcacagatgttgaagttggaatctcgctccttcccctgactaccatcctaggctgggcctcaagactagtgaggcctgtccccaccatccctggccttgttgtggggctcaggaactcagagtcccagtgttgagtctgggagcactaggtcttcatagttccaggcccagagctacagctgggctgggagcgtgtgtgtgcactgtaagaaggagctgatgatactggccacgtgctggggttcgctcatgtggacacagtgattgcctgggacttccacaaactggaactgctggagaggggagggggtgggtagtgagatgtggccagaggagcctagggagctccatgggccccggggtcagggccctcccacagcattccagctccctgcaggtcaggagcgcctcccacagtgagtttcccccacactcggctccttggagccccgacagtccatagcaccccaggagatgtctaaccttagggacttggaggcctcccaggggtctaggccagctgagttgtgaagttgcatggcagggacagggcagggccgaggccagggttgctgtgattgtatccgaagtagtcctcgtgagaaaagataatgagatgacgtgagcagcctgcagacttgtgtctgccttcaagaagccagacaggaaggccctgcctgccttggctctgacctggcggccagccagccagccacaggtgggcttcttccttttgtggtgacaacgccaagaaaactgcagaggccccagggtcaggtgtaagtgggtaggtgaccataaaacaccaggtgctcccaggaacccgggcaaaggccatccccacctacagccagcatgcccactggcgtgatgggtgcagagggatgaggcagccaggtgttctgctgtggtttgggagcctataaagtgagactaggctgggcatggtggctcccatctgcaaaaccagcactttgggaggccaaggtgggcggatcgcctgaggtcaggagtttgagaccagcctggccaacatggtgaacccccatctcttaaaaatataaaaattagctgggcatggtggcaggtgcctgtaatcccagctactcaggaggctgaggcacgagagtcgcttgaacccgggaggtggag

SEQ ID NO: 362557 - DNA, 2415 bp, Homo sapiens
ggaggagaggggaaactacggctaggtacgaggctgggtggcgcgctcccgggtggcaagatggtggcgcgcaggaggaagtgcgccgcgcgggacccggaggaccgtatccccagcccactgggctacgcaggagagcctgtcccgcctcctgtccacctgtggcctcgtccagtctgtagagttgcaggagaagccggacctggctgagagcccaaaggagtcaaggtcgaagttttttcatcccaagccagttccgggtttccaggtagcctatgtggtgttccagaagccaagtggggtgtcagcggccttggccctgaagggccccctgctggtgtccacagagagccaccctgtgaagagtggcattcacaagtggatcagtgactacgcagactctgtgcccgaccctgaggccctgagggtggaagtggacacgttcatggaggcatatgaccagaagatcgctgaggaagaagctaaggccaaggaggaggagggggtccctgacgaggagggctgggtgaaggtgacccgccggggccggcggcctgtgctcccccggactgaggcagccagcttgcgggtgctggagagggagagacggaagcgcagccgaaaagagctgctcaacttctacgcctggcagcatcgagagagcaagatggagcatctagcgcagctgcgcaagaagttcgaggaggacaagcagaggatcgagctgctgcgggcccagcgcaaattccgaccgtactgagctgtgagagccgcagtgaatggctggaggtgcagggccaggaggaggcgaggcagggcctgcagcggtctctgagaggccgagctctggccaacgggccccaggttgaaggccaccgcgtccaacagccccatcagagtccacacaggccaggagggaaggaccaggccacccctcgggtcttgtgcttcagcagtcctggggacccaggcgtgccgagaggaggacttgtccttcctgcttcttgcctccacaccctcctctccaggaccctggatgaatccgttctgtgcttccttttccctcaatgcaaaagcccttgctggcaacgaaaaagcctcaaaagcagtgagaatacaagaaccttttattttccatccagttgggcagcagggaaaggctaggtgggcccagcctgcccttccttcctccagctggctggatatttattattagccaggagaaagcagccctggaacccagactctgtctcccccttgaggtcacagatgttgaagttggaatctcgctccttcccctgactaccatcctaggctgggcctcaagactagtgaggcctgtccccaccatccctggccttgttgtggggctcaggaactcagagtcccagtgttgagtctgggagcactaggtcttcatagttccaggcccagagctacagctgggctgggagcgtgtgtgtgcactgtaagaaggagctgatgatactggccacgtgctggggttcgctcatgtggacacagtgattgcctgggacttccacaaactggaactgctggagaggggagggggtgggtagtgagatgtggccagaggagcctagggagctccatgggccccggggtcagggccctcccacagcattccagctccctgcaggtcaggagcgcctcccacagtgagtttcccccacactcggctccttggagccccgacagtccatagcaccccaggagatgtctaaccttagggacttggaggcctcccaggggtctaggccagctgagttgtgaagttgcatggcagggacagggcagggccgaggccagggttgctgtgattgtatccgaagtagtcctcgtgagaaaagataatgagatgacgtgagcagcctgcagacttgtgtctgccttcaagaagccagacaggaaggccctgcctgccttggctctgacctggcggccagccagccagccacaggtgggcttcttccttttgtggtgacaacgccaagaaaactgcagaggccccagggtcaggtgtaagtgggtaggtgaccataaaacaccaggtgctcccaggaacccgggcaaaggccatccccacctacagccagcatgcccactggcgtgatgggtgcagagggatgaggcagccaggtgttctgctgtggtttgggagcctataaagtgagactaggctgggcatggtggctcccatctgcaaaaccagcactttgggaggccaaggtgggcggatcgcctgaggtcaggagtttgagaccagcctggccaacatggtgaacccccatctcttaaaaatataaaaattagctgggcatggtggcaggtgcctgtaatcccagctactcaggaggctgaggcacgagagtcgcttgaacccgggaggtggag

SEQ ID NO: 362558 - DNA, 3340 bp, Homo sapiens
  misc_feature (1366)..(1366): n is a, c, g, or t
acaccatcctcttagttgctcagactgaaaagctagcagccatcctggatttctctcacactgcctattcaacgtgtgaatgcatgagtggaaagctgagttcgcactcgtgactggccggggtcgactctgacattcactcccactttggcgcgctgatttgcctctgagcggatgaaggttgagccatggcgggcggggccggggaggcgggcttggagcgagggggcggggcaggcgccacaaaaacgcgctcgcgccggcgccgaaccgcaactcccggcgacccccgcgctcccgggtggcaagatggtggcgcgcaggaggaagtgcgccgcgcgggacccggaggaccgtatccccagcccactgggctacgcagctattccaatcaagttctctgaaaagcaacaggcttctcactacctctatgtgagagcacacggcattcaacaaggcaccaagtccacctggcctcagaagaggactctttttgtcttcaatgtgcccccatactgcacagagcaggagagcctgtcctgcctccagtccacctgtggccttgtccagtctgtagagttgaaggagaagctggagctggctgggagtcaaggtcgaagttttttcatccaaagccagttccgggtttccaggtagcctacgtggtgttccagaagccaagtggggtgtcagcggccttggccctgaagggccccctgctggtgtccacagagagccaccctgtgaagagtggcattcacaaatggatcagtgactacgcagactctgtgcccgaccctgaggccctgagggtggaagtggacacgttcatggaggcatatgaccagaagatcgctgaggaagaagctaaggccaaggaggaggagggggtccctgacgaggagggctgggtgaaggtgacccgccggggccggcggcctgtgctcccccggactgaggcagccagcttgcgggtgctggagagggagagacggaagcgcagccaaaaagagctgctcaactacgcctggcagcatcgagagagcaagatggagcatctagcgcagctgcgcaagaagtttgaggaggacaagcagaggatcgagctgctgcgggcccagcgcaaattccgaccctactgagccgtgagagccgcagtggatggctggaggtgcagggccaggaggaacatgaggtgaggcagggcctgcagcggtctctgagaggccgagctctggccaacgggccccaggttgaaggccatcgcgtccaacagccccatcagagtccacacaggccaggagtgaaggaccaggccacccctcgggtcttgtgcttcagcagtcctggagacccaggcgtgccnagaggaggacttgtccttcccacctcttgcctccacacccttgaggaccctggatgaatccgttctgtgcttccttttccctcaatgcaaaagcccttgctggcaacaaaaaagcctcaaaagcagtgagaatacaagaaccttttattttccatccagttgggcagcagggaaaggctaggtgggcccagcctgcccttccttcctccagctggctggatatttattattagccaggagaaagcagccctggaacccagactctgtctcccccttgaggtcacagatgttgaagttggaatctcgctccttcccctgactaccatcctaggctgggcctcaagactagtgaggcctgtccccaccatccctggccttgttgtggggctcaggaactcagagtcccagtgttgagtctgggagcactaggtcttcatagttccaggcccagagctacagctgggctgggagcatgtgtgtgcactgtaagaaggagctgatgatactggccacgtgctggggttcgctcatgtggacacagtgattgcctgggacttccacaaactggaactgctggagaggggagggggtgggtggtgaggtgtggccagaggagcctagggagctccatgggccccggggtcagggccctcccacagcattccagctccctgcaggtcaggagcgcctcccacagtgagtttcccccacactcggctccttggagccccgacagtccatagcaccccaggagatgtctaaccttagggacttggaggcctcccaggggtctaggccagctgagttgtgaagttgcatggcagggacagggcggggccgaggccagggttgctgtgattgtatcagaagaggtacccgtgagaaaagataatgagatgggggcgtgaacagcctgcagacttgtgtctgccttcaagaagccagacagggccgggcgcagtggctcacgcctgtattcccagcactttgggaggccaaggcaggcgggaggccaaggtgggcggatcacgaggtcaggagatcaagagcatcctggttaagacagtgaaaccccgtctctactaaaaatacaaaaaattagccgggcgtggtggcgggcgcctgtagtcccagctactcgggaggctgaggcaggagaatggcatgaacccgggaggtggaacttggagtgagccgagatcgggccactgccctccagcctgagcgacagagtgagactccatctcaaaaaaaaaaaaaaagtgtgactattagctgggcatgatggcatgcgcctgtagtgccacctactcaggtggctgaggtgggaggatcatttgagcccaggagtttgaggctgcagtgagctatgactgagcctgagcaacagaatgagaccctgtctctcaaaaaatgtgggactgtctctggcagttgggtcacctaattgtgcctggccccaagaaggaggggtgggtacttgaggatggtaaagaacctccccaccaaaggtctctgtttcttaaattctgattacatgtgtccccaggcctctagggactgatcactggagcatgaggcctgatagatcctggtggtcacttgttgggcctgggggcagaccaggggtctttcccagtgcatgagaagagatgggtgaggtgggaccagagtgggcgacagtggctggacaccagctgcctgagccccgccttacctctttgagggtggatttcatcgtgtctatcatgaacgacagggactccttctcagagtaattctgtcttgaatcaaaatatccgtggactgctttgatcaacaggacatggcctgcagcttcctgatggaatgcgcacacagctccctgctgatgaagtcaatgctgttctctgcctgcagagacaaaaacatggtgaattctcgtcacaaggcacaggcactctcgtgggcacgaaacccatctctgttggggtg

SEQ ID NO: 362559 - DNA, 923 bp, Homo sapiens
acaccatcctcttagttgctcagactgaaaagctagcagccatcctggatttctctcacactgcctattcaacgtgtgaatgcatgagtggaaagctgagttcgcactcgtgactggccggggtcgactctgacattcactcccactttggcgcgctgatttgcctctgagcggatgaaggttgagccatggcgggcggggccggggaggcgggcttggagcgagggggcggggcaggcgccacaaaaacgcgctcgcgccggcgccgaaccgcaactcccggcgacccccgcgctcccgggtggcaagatggtggcgcgcaggaggaagtgcgccgcgcgggacccggaggaccgtatccccagcccactgggctacgcagctattccaatcaagttctctgaaaagcaacaggcttctcactacctctatgtgagagcacacggcgttcgacaaggcaccaagtccacctggcctcagaagaggactctttttgtcctcaatgtgcccccatactgcacagaggagagcctgtcccgcctcctgtccacctgtggcctcgtccagtctgtagagttgcaggagaagccggacctggctgagagcccaaaggagtcaaggtcgaagttttttcatcccaagccagttccgggtttccaggtagcctatgtggtgttccagaagccaagtggggtgtcagcggccttggccctgaagggccccctgctggtgtccacagagagccaccctgtgaagagtggcattcacaagtggatcagtgactacgcagactctgtgcccgaccctgaggccctgagggtggaagtggacacgttcatggaggcatatgaccagaagatcgctgaggaagaagctaacgcgcaagagaggagggtcccgctgtctaggcgtccgcttctaag

SEQ ID NO: 362560 - DNA, 834 bp, Homo sapiens
ggaggagaggggaaactacggctaggtacgaggctgggtggcgcgctcccgggtggcaagatggtggcgcgcaggaggaagtgcgccgcgcgggacccggaggaccgtatccccagcccactgggctacgcagctattccaatcaagttctctgaaaagcaacaggcttctcactacctctatgtgagagcacacggcgttcgacaaggcaccaagtccacctggcctcagaagaggactctttttgtcctcaatgtgcccccatactgcacagaggtcggaggccatggtgcccacagtctcccggcttgggcagatgtggctgtggctgagtccttcagcggcgctggacccctggcagcgccacccatggtgcagggaggctttgggatggccctgcggatgctcacacttggcttccctctccctgcggcaggagagcctgtcccgcctcctgtccacctgtggcctcgtccagtctgtagagttgcaggagaagccggacctggctgagagcccaaaggagtcaaggtcgaagttttttcatcccaagccagttccgggtttccaggtagcctatgtggtgttccagaagccaagtggggtgtcagcggccttggccctgaagggccccctgctggtgtccacagagagccaccctgtgaagagtggcattcacaagtggatcagtgactacgcagactctgtgcccgaccctgaggccctgagggtggaagtggacacgttcatggaggcatatgaccagaagatcgctgaggaagaagctaacgcgcaagagaggagggtcccgctgtctaggcgtccgcttctaag

SEQ ID NO: 362561 - DNA, 516 bp, Homo sapiens
ctctgatctggggactccaagggcaggagctctcagcattttctctatccctagttctcagcacgtggagtacagaggagaagcttcataaatgcagctgagtggattaattccgggaagctcccgtaaggaccagctcccctaagttacacccgatactcctgcaccattgtgaatataaaattgccatgaacacacacacacacacacacacacacacacacacaaattgctatgaacacacacacaccagtgaaaactcactgccctgtttccaccctggccctccagctattttctgcttctcagactaaaatgacctgaagtgccttccctgaaacaggggttcccatactgttcccaaggcctgcgtgttctcatatgtcagctgccacatctcacagcggggtgtgaccaagctttttgggcctgcacacaggaggggcttcctgggcacaaggtgaacaggcaaacttgaccctgtctctactaaaaatatgaaaattagactgggca

SEQ ID NO: 362562 - DNA, 390 bp, Homo sapiens
  misc_feature (386)..(386): n is a, c, g, or t
cccaccattttgggaagctgaggcaggtggatcgcctgaggtcagaagttcgagaccagtttggcaaacgtggtgaaaccccatctctactaaaattacaacaaattagctgggcatggtgtcaggcgcctgtaatcccagctactcaggaggctgaggcaggagaattgcttgaacccgggaggcagaagttgcaggcagccaaactcgggccaccgcactccaccctggatgacagagtaagacttggtctctaaataaataaataaatagaaggtaggtgctttgcttcagcagcacatatactgctaaattggaacaacaaagagatgattagcgtggcccctgtgcaagcgtgatacgaaaatttgtgaaatgttcctttncaag

SEQ ID NO: 362563 - DNA, 367 bp, Homo sapiens
ggagaaaggaagttgtgtgagtgtctcgctggcctcagctcagggtagcctggccatccctcccctcccatttcctttccagctattccaatcaagttctctgaaaagcaacaggcttctcactacctctatgtgagagcacacggcgttcgacaaggcaccaagtccacctggcctcagaagaggactctttttgtcctcaatgtgcccccatactgcacagaggtgagctagtgtctgtctgggaggagacctgtgggctcaaggtgggggctcccatggcctccaccaagtccttggtggtgagacggacacagctaatgggagccccagaggagagtgtcaggagggctaccgtgatctccag

SEQ ID NO: 362564 - DNA, 2067 bp, Homo sapiens
  misc_feature (2063)..(2063): n is a, c, g, or t
acaccatcctcttagttgctcagactgaaaagctagcagccatcctggatttctctcacactgcctattcaacgtgtgaatgcatgagtggaaagctgagttcgcactcgtgactggccggggtcgactctgacattcactcccactttggcgcgctgatttgcctctgagcggatgaaggttgagccatggcgggcggggccggggaggcgggcttggagcgagggggcggggcaggcgccacaaaaacgcgctcgcgccggcgccgaaccgcaactcccggcgacccccgcgctcccgggtggcaagatggtggcgcgcaggaggaagtgcgccgcgcgggacccggaggaccgtatccccagcccactgggctacgcagctattccaatcaagttctctgaaaagcaacaggcttctcactacctctatgtgagagcacacggcattcaacaaggcaccaagtccacctggcctcagaagaggactctttttgtcttcaatgtgcccccatactgcacagagcaggagagcctgtcctgcctccagtccacctgtggccttgtccagtctgtagagttgaaggagaagctggagctggctgggagtcaaggtcgaagttttttcatccaaagccagttccgggtttccaggtagcctacgtggtgttccagaagccaagtggggtgtcagcggccttggccctgaagggccccctgctggtgtccacagagagccaccctgtgaagagtggcattcacaaatggatcagtgactacgcagactctgtgcccgaccctgaggccctgagggtggaagtggacacgttcatggaggcatatgaccagaagatcgctgaggaagaagctaaggccaaggaggaggagggggtccctgacgaggagggctgggtgaaggtgacccgccggggccggcggcctgtgctcccccggactgaggcagccagcttgcgggtgctggagagggagagacggaagcgcagccaaaaagagctgctcaactacgcctggcagcatcgagagagcaagatggagcatctagcgcagctgcgcaagaagtttgaggaggacaagcagaggatcgagctgctgcgggcccagcgcaaattccgaccctactgagccgtgagagccgcagtggatggctggaggtgcagggccaggaggaacatgagttctcagcacgtggagtacagaggagaagcttcataaatgcagctgagtggattaattccgggaagctcccgtaaggaccagctcccctaagttacacccgatactcctgcaccattgtgaatataaaattgccatgaacacacacacacacacacacacacacacacacacaaattgctatgaacacacacacaccagtgaaaactcactgccctgtttccaccctggccctccagctattttctgcttctcagactaaaatgacctgaagtgccttccctgaaacaggggttcccatactgttcccaaggcctgcgtgttctcatatgtcagctgccacatctcacagcggggtgtgaccaagctttttgggcctgcacacaggaggggcttcctgggcacaaggtgaacaggcaaacttgaccctgtctctactaaaaatatgaaaattagactgggcacagtcactcacgcctgtaatcccaccattttgggaagctgaggcaggtggatcgcctgaggtcagaagttcgagaccagtttggcaaacgtggtgaaaccccatctctactaaaattacaacaaattagctgggcatggtgtcaggcgcctgtaatcccagctactcaggaggctgaggcaggagaattgcttgaacccgggaggcagaagttgcaggcagccaaactcgggccaccgcactccaccctggatgacagagtaagacttggtctctaaataaataaataaatagaaggtaggtgctttgcttcagcagcacatatactgctaaattggaacaacaaagagatgattagcgtggcccctgtgcaagcgtgatacgaaaatttgtgaaatgttcctttncaag

SEQ ID NO: 362565 - DNA, 2742 bp, Homo sapiens
acaccatcctcttagttgctcagactgaaaagctagcagccatcctggatttctctcacactgcctattcaacgtgtgaatgcatgagtggaaagctgagttcgcactcgtgactggccggggtcgactctgacattcactcccactttggcgcgctgatttgcctctgagcggatgaaggttgagccatggcgggcggggccggggaggcgggcttggagcgagggggcggggcaggcgccacaaaaacgcgctcgcgccggcgccgaaccgcaactcccggcgacccccgcgctcccgggtggcaagatggtggcgcgcaggaggaagtgcgccgcgcgggacccggaggaccgtatccccagcccactgggctacgcagctattccaatcaagttctctgaaaagcaacaggcttctcactacctctatgtgagagcacacggcgttcgacaaggcaccaagtccacctggcctcagaagaggactctttttgtcctcaatgtgcccccatactgcacagaggagagcctgtcccgcctcctgtccacctgtggcctcgtccagtctgtagagttgcaggagaagccggacctggctgagagcccaaaggagtcaaggtcgaagttttttcatcccaagccagttccgggtttccaggtagcctatgtggtgttccagaagccaagtggggtgtcagcggccttggccctgaagggccccctgctggtgtccacagagagccaccctgtgaagagtggcattcacaagtggatcagtgactacgcagactctgtgcccgaccctgaggccctgagggtggaagtggacacgttcatggaggcatatgaccagaagatcgctgaggaagaagctaaggccaaggaggaggagggggtccctgacgaggagggctgggtgaaggtgacccgccggggccggcggcctgtgctcccccggactgaggcagccagcttgcgggtgctggagagggagagacggaagcgcagccgaaaagagctgctcaacttctacgcctggcagcatcgagagagcaagatggagcatctagcgcagctgcgcaagaagttcgaggaggacaagcagaggatcgagctgctgcgggcccagcgcaaattccgaccgtactgagctgtgagagccgcagtgaatggctggaggtgcagggccaggaggaggcgaggcagggcctgcagcggtctctgagaggccgagctctggccaacgggccccaggttgaaggccaccgcgtccaacagccccatcagagtccacacaggccaggagggaaggaccaggccacccctcgggtcttgtgcttcagcagtcctggggaccctggatgaatccgttctgtgcttccttttccctcaatgcaaaagcccttgctggcaacgaaaaagcctcaaaagcagtgagaatacaagaaccttttattttccatccagttgggcagcagggaaaggctaggtgggcccagcctgcccttccttcctccagctggctggatatttattattagccaggagaaagcagccctggaacccagactctgtctcccccttgaggtcacagatgttgaagttggaatctcgctccttcccctgactaccatcctaggctgggcctcaagactagtgaggcctgtccccaccatccctggccttgttgtggggctcaggaactcagagtcccagtgttgagtctgggagcactaggtcttcatagttccaggcccagagctacagctgggctgggagcgtgtgtgtgcactgtaagaaggagctgatgatactggccacgtgctggggttcgctcatgtggacacagtgattgcctgggacttccacaaactggaactgctggagaggggagggggtgggtagtgagatgtggccagaggagcctagggagctccatgggccccggggtcagggccctcccacagcattccagctccctgcaggtcaggagcgcctcccacagtgagtttcccccacactcggctccttggagccccgacagtccatagcaccccaggagatgtctaaccttagggacttggaggcctcccaggggtctaggccagctgagttgtgaagttgcatggcagggacagggcagggccgaggccagggttgctgtgattgtatccgaagtagtcctcgtgagaaaagataatgagatgacgtgagcagcctgcagacttgtgtctgccttcaagaagccagacaggaaggccctgcctgccttggctctgacctggcggccagccagccagccacaggtgggcttcttccttttgtggtgacaacgccaagaaaactgcagaggccccagggtcaggtgtaagtgggtaggtgaccataaaacaccaggtgctcccaggaacccgggcaaaggccatccccacctacagccagcatgcccactggcgtgatgggtgcagagggatgaggcagccaggtgttctgctgtggtttgggagcctataaagtgagactaggctgggcatggtggctcccatctgcaaaaccagcactttgggaggccaaggtgggcggatcgcctgaggtcaggagtttgagaccagcctggccaacatggtgaacccccatctcttaaaaatataaaaattagctgggcatggtggcaggtgcctgtaatcccagctactcaggaggctgaggcacgagagtcgcttgaacccgggaggtggag

SEQ ID NO: 362566 - DNA, 2558 bp, Homo sapiens
ggaggagaggggaaactacggctaggtacgaggctgggtggcgcgctcccgggtggcaagatggtggcgcgcaggaggaagtgcgccgcgcgggacccggaggaccgtatccccagcccactgggctacgcagctattccaatcaagttctctgaaaagcaacaggcttctcactacctctatgtgagagcacacggcgttcgacaaggcaccaagtccacctggcctcagaagaggactctttttgtcctcaatgtgcccccatactgcacagaggagagcctgtcccgcctcctgtccacctgtggcctcgtccagtctgtagagttgcaggagaagccggacctggctgagagcccaaaggagtcaaggtcgaagttttttcatcccaagccagttccgggtttccaggtagcctatgtggtgttccagaagccaagtggggtgtcagcggccttggccctgaagggccccctgctggtgtccacagagagccaccctgtgaagagtggcattcacaagtggatcagtgactacgcagactctgtgcccgaccctgaggccctgagggtggaagtggacacgttcatggaggcatatgaccagaagatcgctgaggaagaagctaaggccaaggaggaggagggggtccctgacgaggagggctgggtgaaggtgacccgccggggccggcggcctgtgctcccccggactgaggcagccagcttgcgggtgctggagagggagagacggaagcgcagccgaaaagagctgctcaacttctacgcctggcagcatcgagagagcaagatggagcatctagcgcagctgcgcaagaagttcgaggaggacaagcagaggatcgagctgctgcgggcccagcgcaaattccgaccgtactgagctgtgagagccgcagtgaatggctggaggtgcagggccaggaggaggcgaggcagggcctgcagcggtctctgagaggccgagctctggccaacgggccccaggttgaaggccaccgcgtccaacagccccatcagagtccacacaggccaggagggaaggaccaggccacccctcgggtcttgtgcttcagcagtcctggggacccaggcgtgccgagaggaggacttgtccttcctgcttcttgcctccacaccctcctctccaggaccctggatgaatccgttctgtgcttccttttccctcaatgcaaaagcccttgctggcaacgaaaaagcctcaaaagcagtgagaatacaagaaccttttattttccatccagttgggcagcagggaaaggctaggtgggcccagcctgcccttccttcctccagctggctggatatttattattagccaggagaaagcagccctggaacccagactctgtctcccccttgaggtcacagatgttgaagttggaatctcgctccttcccctgactaccatcctaggctgggcctcaagactagtgaggcctgtccccaccatccctggccttgttgtggggctcaggaactcagagtcccagtgttgagtctgggagcactaggtcttcatagttccaggcccagagctacagctgggctgggagcgtgtgtgtgcactgtaagaaggagctgatgatactggccacgtgctggggttcgctcatgtggacacagtgattgcctgggacttccacaaactggaactgctggagaggggagggggtgggtagtgagatgtggccagaggagcctagggagctccatgggccccggggtcagggccctcccacagcattccagctccctgcaggtcaggagcgcctcccacagtgagtttcccccacactcggctccttggagccccgacagtccatagcaccccaggagatgtctaaccttagggacttggaggcctcccaggggtctaggccagctgagttgtgaagttgcatggcagggacagggcagggccgaggccagggttgctgtgattgtatccgaagtagtcctcgtgagaaaagataatgagatgacgtgagcagcctgcagacttgtgtctgccttcaagaagccagacaggaaggccctgcctgccttggctctgacctggcggccagccagccagccacaggtgggcttcttccttttgtggtgacaacgccaagaaaactgcagaggccccagggtcaggtgtaagtgggtaggtgaccataaaacaccaggtgctcccaggaacccgggcaaaggccatccccacctacagccagcatgcccactggcgtgatgggtgcagagggatgaggcagccaggtgttctgctgtggtttgggagcctataaagtgagactaggctgggcatggtggctcccatctgcaaaaccagcactttgggaggccaaggtgggcggatcgcctgaggtcaggagtttgagaccagcctggccaacatggtgaacccccatctcttaaaaatataaaaattagctgggcatggtggcaggtgcctgtaatcccagctactcaggaggctgaggcacgagagtcgcttgaacccgggaggtggag

SEQ ID NO: 362567 - DNA, 2496 bp, Homo sapiens
tgcgccgagtggttatcgcctggccggtaccctgtgtacgagactgtatcccagcccactgggctacgcagctattccaatcaagttctctgaaaagcaacaggcttctcactacctctatgtgagagcacacggcgttcgacaaggcaccaagtccacctggcctcagaagaggactctttttgtcctcaatgtgcccccatactgcacagaggagagcctgtcccgcctcctgtccacctgtggcctcgtccagtctgtagagttgcaggagaagccggacctggctgagagcccaaaggagtcaaggtcgaagttttttcatcccaagccagttccgggtttccaggtagcctatgtggtgttccagaagccaagtggggtgtcagcggccttggccctgaagggccccctgctggtgtccacagagagccaccctgtgaagagtggcattcacaagtggatcagtgactacgcagactctgtgcccgaccctgaggccctgagggtggaagtggacacgttcatggaggcatatgaccagaagatcgctgaggaagaagctaaggccaaggaggaggagggggtccctgacgaggagggctgggtgaaggtgacccgccggggccggcggcctgtgctcccccggactgaggcagccagcttgcgggtgctggagagggagagacggaagcgcagccgaaaagagctgctcaacttctacgcctggcagcatcgagagagcaagatggagcatctagcgcagctgcgcaagaagttcgaggaggacaagcagaggatcgagctgctgcgggcccagcgcaaattccgaccgtactgagctgtgagagccgcagtgaatggctggaggtgcagggccaggaggaggcgaggcagggcctgcagcggtctctgagaggccgagctctggccaacgggccccaggttgaaggccaccgcgtccaacagccccatcagagtccacacaggccaggagggaaggaccaggccacccctcgggtcttgtgcttcagcagtcctggggacccaggcgtgccgagaggaggacttgtccttcctgcttcttgcctccacaccctcctctccaggaccctggatgaatccgttctgtgcttccttttccctcaatgcaaaagcccttgctggcaacgaaaaagcctcaaaagcagtgagaatacaagaaccttttattttccatccagttgggcagcagggaaaggctaggtgggcccagcctgcccttccttcctccagctggctggatatttattattagccaggagaaagcagccctggaacccagactctgtctcccccttgaggtcacagatgttgaagttggaatctcgctccttcccctgactaccatcctaggctgggcctcaagactagtgaggcctgtccccaccatccctggccttgttgtggggctcaggaactcagagtcccagtgttgagtctgggagcactaggtcttcatagttccaggcccagagctacagctgggctgggagcgtgtgtgtgcactgtaagaaggagctgatgatactggccacgtgctggggttcgctcatgtggacacagtgattgcctgggacttccacaaactggaactgctggagaggggagggggtgggtagtgagatgtggccagaggagcctagggagctccatgggccccggggtcagggccctcccacagcattccagctccctgcaggtcaggagcgcctcccacagtgagtttcccccacactcggctccttggagccccgacagtccatagcaccccaggagatgtctaaccttagggacttggaggcctcccaggggtctaggccagctgagttgtgaagttgcatggcagggacagggcagggccgaggccagggttgctgtgattgtatccgaagtagtcctcgtgagaaaagataatgagatgacgtgagcagcctgcagacttgtgtctgccttcaagaagccagacaggaaggccctgcctgccttggctctgacctggcggccagccagccagccacaggtgggcttcttccttttgtggtgacaacgccaagaaaactgcagaggccccagggtcaggtgtaagtgggtaggtgaccataaaacaccaggtgctcccaggaacccgggcaaaggccatccccacctacagccagcatgcccactggcgtgatgggtgcagagggatgaggcagccaggtgttctgctgtggtttgggagcctataaagtgagactaggctgggcatggtggctcccatctgcaaaaccagcactttgggaggccaaggtgggcggatcgcctgaggtcaggagtttgagaccagcctggccaacatggtgaacccccatctcttaaaaatataaaaattagctgggcatggtggcaggtgcctgtaatcccagctactcaggaggctgaggcacgagagtcgcttgaacccgggaggtggag

SEQ ID NO: 362568 - DNA, 544 bp, Homo sapiens
  misc_feature (387)..(387): n is a, c, g, or t
  misc_feature (397)..(397): n is a, c, g, or t
  misc_feature (401)..(401): n is a, c, g, or t
  misc_feature (446)..(446): n is a, c, g, or t
  misc_feature (496)..(496): n is a, c, g, or t
  misc_feature (539)..(539): n is a, c, g, or t
cccggcggcccccgcgcgcgctcccgggtggcaagatggtggcgcgcaggaggaagtgcgccgcgcgggacccggaggaccgtatccccagcccactgggctacgcagctattccaatcaagttctctgaaaagcaacaggcttctcactacctctatgtgagagcacacggcgttcgacaaggcaccaagtccacctggcctcagaagaggactctttttgtcctcaatgtgcccccatactgcacagaggagagcctgtcccgcctcctgtccacctgtggcctcgtccagtctgtagagttgcaggagaagccggacctggctgagagcccaaaggagtcaaggtcgaagttttttcatcccaagccagttccggttttcaggnagcctacgtngtgntcagaagcaagtgggtgtaagcggctttgccttgaaggcccctgntgtgtcacaagagcacctgtggtgcattacagtgatagtgctaccaactntggcccaccttaggcttaggtggtggcacgtatgagctatacngactc

SEQ ID NO: 362569 - DNA, 781 bp, Homo sapiens
ctcgtgccgaatctcggcacgacgcgggcgcagagctggcgctctagcccacggagttggttaactcctctcaccggcccctggaaagggttccaagtcctttagtacccgacgctgtctgggaattccgggcgtttcggctccttggtcgcagaggcaggaggcgtgcgtggcaggaggacccgaccgcatgtctgtcatggacctcgccaatacttgctccagctttcagtcggacctggatttctgttcagattgcggctcggtcctgcctctgcccggggctcaggatacggtcacctgtattcgctgtggcttcaacatcaacgttcgggactttgaggggaaggttgtgaagacttcggttgtgttccaccaactggggacagccatgcctatgtcggtggaggaagggcctgagtgccagggacctgtggttgacaggcgctgccctcgatgtggtcatgaaggaatggcataccacaccagacagatgcgttcagccgatgaagggcaaactgtcttctacacctgtaccaactgcaagttccaggagaaggaagactcttgacctttttcctgggcaactctacagtccctccctcctttcggaaggtgaaggatactgggtttttagatgccttgtccatcctgtctggttgcaatgttttgctcccagaagagaatcagatcatcatgtggggattaccattgttcctggagtactcctacccttagttgaatttccttattaaagttatatttttctataagaccctga

SEQ ID NO: 362570 - DNA, 1335 bp, Homo sapiens
  misc_feature (641)..(641): n is a, c, g, or t
ctcgtgccgaatctcggcacgacgcgggcgcagagctggcgctctagcccacggagttggttaactcctctcaccggcccctggaaagggttccaagtcctttagtacccgacgctgtctgggaattccgggcgtttcggctccttggtcgcagaggcaggaggcgtgcgtggcaggagggttcgggttatatactcctaggtcctgggacagaatagttacgacctctgggacaggaactcttctctcttttgttaataaacttccaactccctcctcagacccgaccgcatgtctgtcatggacctcgccaatacttgctccagctttcagtcggacctggatttctgttcagattgcggctcggtcctgcctctgcccggggctcaggatacggtcacctgtattcgctgtggcttcaacatcaacgttcggggtgagaggcttgtacgcaggggtcctggcggagggcgcagggtcggaagcttggggaactcaagatcggttgggttgaggaggggatcctagagcaggacatcaggcggttgtacatttggtctagcgatgaaaactgagggaaaggatgtagggcctcctggcctaaccagccaggggaaaggggaggtttccggtgtcagctntctctggttgtctccataaccagttcttacttgcctgtgcagactttgaggggaaggttgtgaagacttcggttgtgttccaccaactggggacagccatgcctatgtcggtggaggaagggcctgagtgccagggacctgtggtaagctaatgagatcaagaactggctccataaggtgggtaggaaagaaatggaggagtgattgcaaagctctggagagttttgtgcccaattccaagagggaaaagagatgtaaaccatcgacgtttgagaggcgtgatcgcctgattcctgtgggaagtaaggggatatgaccaggcctccctaacccaccagtttcttcccaggttgacaggcgctgccctcgatgtggtcatgaaggaatggcataccacaccagacagatgcgttcagccgatgaagggcaaactgtcttctacacctgtaccaactgcaagttccaggagaaggaagactcttgacctttttcctgggcaactctacagtccctccctcctttcggaaggtgaaggatactgggtttttagatgccttgtccatcctgtctggttgcaatgttttgctcccagaagagaatcagatcatcatgtggggattaccattgttcctggagtactcctacccttagttgaatttccttattaaagttatatttttctataagaccctga

SEQ ID NO: 362571 - DNA, 312 bp, Homo sapiens
aattcgcggccgcgtcgactacggctcgagaagacgacagaagggcaaactgtcttctacacctgtaccaactgcaagttccaggagaaggaagactcttgacctttttcctgggcaactctacagtccctccctcctttcggaaggtgaaggatactgggtttttagatgccttgtccatcctgtctggttgcaatgttttgctcccagaagagaatcagatcatcatgtggggattaccattgttcctggagtactcctacccttagttgaatttccttattaaagttatatttttctataagaccctga

SEQ ID NO: 362572 - DNA, 781 bp, Homo sapiens
ctcgtgccgaatctcggcacgacgcgggcgcagagctggcgctctagcccacggagttggttaactcctctcaccggcccctggaaagggttccaagtcctttagtacccgacgctgtctgggaattccgggcgtttcggctccttggtcgcagaggcaggaggcgtgcgtggcaggagggttcgggttatatactcctaggtcctgggacagaatagttacgacctctgggacaggaactcttctctcttttgttaataaacttccaactccctcctcagacccgaccgcatgtctgtcatggacctcgccaatacttgctccagctttcagtcggacctggatttctgttcagattgcggctcggtcctgcctctgcccggggctcaggatacggtcacctgtattcgctgtggcttcaacatcaacgttcggggttgacaggcgctgccctcgatgtggtcatgaaggaatggcataccacaccagacagatgcgttcagccgatgaagggcaaactgtcttctacacctgtaccaactgcaagttccaggagaaggaagactcttgacctttttcctgggcaactctacagtccctccctcctttcggaaggtgaaggatactgggtttttagatgccttgtccatcctgtctggttgcaatgttttgctcccagaagagaatcagatcatcatgtggggattaccattgttcctggagtactcctacccttagttgaatttccttattaaagttatatttttctataagaccctga

SEQ ID NO: 362573 - DNA, 405 bp, Homo sapiens
tatttttaatcccagaatttttagttgtcttggaattagaattggaagtttgtttaggggagccagtcctcaatgatgtcataaataaaagtccttccttgattatttgattgcatatcttatcttatactactagaaactcatcttttggtgaatataacaagtcctttctttcctcataggttccaggagaaggaagactcttgacctttttcctgggcaactctacagtccctccctcctttcggaaggtgaaggatactgggtttttagatgccttgtccatcctgtctggttgcaatgttttgctcccagaagagaatcagatcatcatgtggggattaccattgttcctggagtactcctacccttagttgaatttccttattaaagttatatttttct

SEQ ID NO: 362574 - DNA, 882 bp, Homo sapiens
ctcgtgccgaatctcggcacgacgcgggcgcagagctggcgctctagcccacggagttggttaactcctctcaccggcccctggaaagggttccaagtcctttagtacccgacgctgtctgggaattccgggcgtttcggctccttggtcgcagaggcaggaggcgtgcgtggcaggagggttcgggttatatactcctaggtcctgggacagaatagttacgacctctgggacaggaactcttctctcttttgttaataaacttccaactccctcctcagacccgaccgcatgtctgtcatggacctcgccaatacttgctccagctttcagtcggacctggatttctgttcagattgcggctcggtcctgcctctgcccggggctcaggatacggtcacctgtattcgctgtggcttcaacatcaacgttcgggactttgaggggaaggttgtgaagacttcggttgtgttccaccaactggggacagccatgcctatgtcggtggaggaagggcctgagtgccagggacctgtggttgacaggcgctgccctcgatgtggtcatgaaggaatggcataccacaccagacagatgcgttcagccgatgaagggcaaactgtcttctacacctgtaccaactgcaagttccaggagaaggaagactcttgacctttttcctgggcaactctacagtccctccctcctttcggaaggtgaaggatactgggtttttagatgccttgtccatcctgtctggttgcaatgttttgctcccagaagagaatcagatcatcatgtggggattaccattgttcctggagtactcctacccttagttgaatttccttattaaagttatatttttctataagaccctga

SEQ ID NO: 362575 - DNA, 572 bp, Homo sapiens
  misc_feature (1)..(1): n is a, c, g, or t
  misc_feature (100)..(100): n is a, c, g, or t
  misc_feature (116)..(116): n is a, c, g, or t
nataactcaaccctctagccgacccaatgactcgcatatgctcagttcatcggactgatgtcaatgcgccgtctgcttgccgggctcagatacgtcactntatcgctgtgctcacncacgttcgggactttgaggggaaggttgtgaagacttcggttgtgttccaccaactggggacagccatgcctatgtcggtggaggaagggcctgagtgccagggacctgtggttgacaggcgctgccctcgatgtggtcatgaaggaatggcataccacaccagacagatgcgttcagccgatgaagggcaaactgtcttctacacctgtaccaactgcaagttccaggagaaggaagactcttgacctttttcctgggcaactctacagtccctccctcctttcggaaggtgaaggatactgggtttttagatgccttgtccatcctgtctggttgcaatgttttgctcccagaagagaatcagatcatcatgtggggattaccattgttcctggagtactcctacccttagttgaatttccttattaaagttatatttttctataagaccctga

SEQ ID NO: 362576 - DNA, 338 bp, Homo sapiens
gatcctcccacctcagtctcccaagtagcgagggctataggtgtgtgtaccacagctcccagctgcatgtactttaaaaatgtgtctaagccaggcgtggtggctcacgcccgtaatcccaacactttgggaggcggaggcgggtggatcacctgaggtcaggagttcaagaccagcctgaccaatatgacgaaaccctgtctctactaaaaatacaaaaactagccgggtgtggtggtgcgtgcctgtagtcccagttagtcaggaggctgaggcaggagaatcacttgaacccaggaggcggagtttgcagtgagccaagatcgtgccagtgcact

SEQ ID NO: 362577 - DNA, 391 bp, Homo sapiens
tccctcttccaaaataaccacttcactaataaaagatggtgctcttaatctaagaaatttagtaagcctccccaaaccttcacacctattattgctgattgagaaaaaataagaccttacaaaaatgaaccaaacatggaagctgacatttgtacacaactactacaggaagaaaatagaaaatgaaaatcaaaacatttcacgtaatgaatattctccctcaaaaaacagtcatgaagcagaagaaaattgttacacaatctaccaatctgaattaaatgtccttaaacatttgcagataagacaaaacaccttaaatcagaaattcaaaaacttaaagccaaaatggataaaaaactgcatgctgtgaaatgaaagtttactaaactca

SEQ ID NO: 362578 - DNA, 1466 bp, Homo sapiens
gaggtgggaactaaaacagaggcggtggaagaagttgcacaaggctagagagatcactgctggagggaaaagcatgatgggctctcgggttttgagaactggcaagttgttggaggcagctggagcggggcctgggtcgccggcactggctgtctttgcgtttgggcgtggccagtcactcctcttccaggttccagcctgaactgtctgcccctgatctgcggcgatttatcgatggtccaaaccgggctgtggccctgcttccggagctacgggaggtcgtctcctctatcagctacatcgctcgacagctgcaggaacaggaggaccacgatgcgctgaaggaggactggcagtttgtggccatggtagtggaccgcctcttcctgtggactttcatcatcttcaccagcgttgggaccctagtcatcttcctggacgccacgtaccacttgccccctccagacccctttccttgaagactggagggttgagacccaggccccctgccagttgaagtgagagtttggtgatactgtcaagccctatccttctctgcctcttaactccttcacgaggaatctgggcctcttatttcgtttctggggactgcattggactgagggctgggtaggcaggtgtcttggacccacctgaaatgcagtatcatctgatttactctttgggatcttgaagaagctcttttgggtatcaacacctaggtcgccagtgaaatagaacacagaacaggaactagattataagccttatgaggtcaagaaatgtgacttggccgggcgcggtggctcacgcctgtaatcccagcactttgggaggccaaggcgggcggatcacctgaggtcgggagtttgagaccagcccgaccaacatggagaaaccctgtctctactaaaaatacaaaattagccaggtgtggtggtacatgcctgtaatcccagctactagggaggctgaggcaggagaatcactcgaacccgggaggcagaggttgcagtgagtcaagatcacgccattgcactccagcctgggcaacaagagcgaaactccatctcaaaaaaaaaaaagtgtcttgttcactgcagcatgcccagtgccacgcacaggtgctgacctatagtaagtgcttaacatttgttgaataggggaaagaaatttccggaagtaaatacagcaattaataatgtttataagctgggcatggtcgctcaggccagtaatcccagtgacttaggaggctgaggtgggaggattacttgaaacccacagtttgagaccagcctgggcaacatagtgagaccctgtctctaaaaaaataaaaatagaaataaagtagtgcttattgtttgcatgttgggtcttgtggtcgttttctttttacctttctgtaatttattatgttttgtaatgtgtactatctctgggattaaaaaaagttatttctacaa

SEQ ID NO: 362579 - DNA, 236 bp, Homo sapiens
atgagatgcattttgggggggtgagtacttttttcaaaaaaaagaaaaaaaaaattttctccccccaaaaaaaaaaaaaaaaaaaaaaaaaaaaaaaaaaaaaataaaaatagaaataaagtagtgcttattgtttgcatgttgggtcttgtggtcgttttctttttacctttctgtaatttattatgttttgtaatgtgtactatctctgggattaaaaaaagttatttctacaa

SEQ ID NO: 362580 - DNA, 371 bp, Homo sapiens
gaggtgggaactaaaacagaggcggtggaagaagttgcacaaggctagagagatcactgctggagggaaaagcatgatgggctctcgggttttgagaactggcaagttgttggaggcagctggagcggggcctgggtcgccggcactggctgtctttgcgtttgggcgtggccagtcactcctcttccaggttccagcctgaactgtctgcccctgatctgcggcgatttatcgatggtccaaaccgggctgtggccctgcttccggagctacgggaggtcgtctcctctatcagctacatcgctcgacagctgcagaaggaggacagcagcaggagcaggaggaggcaggggaaggaggccgccgtagga

SEQ ID NO: 362581 - DNA, 2906 bp, Homo sapiens
cgcggctgcttcctctcctggagtccagagtcccgttgctccgccgcgatattcagtaaaccactgggagtccggcagcatggaggcagcgcgccctcccccgacggcagggaagttcgtggtggtcggcggcggcatcgcgggcgtcacttgtgcggagcagttggctactcactttccatcggaagatattctcttggtaacagcttctcctgttattaaagcagttacaaatttcaagcagatttctaaaatattggaagaattcgatgttgaagaacaatcaagtaccatgttaggaaaacgctttcccaacattaaggttatagaatctggcgtaaagcaactgaagagtgaagaacactgcattgtaacagaagatggcaatcagcacgtatataagaaactctgtctgtgtgctggagctaaaccaaagttgatatgtgaaggaaatccttatgtattaggaatccgtgatacagacagtgctcaggaatttcagaaacagcttactaaagctaaaagaataatgatcatagggaacggtggtattgcacttgagttagtgtatgaaattgaaggctgtgaagtgatttgggccattaaagataaagctatagggaatactttcttcgatgcaggagcagctgaattcttgacttcaaagctcattgctgaaaaatcagaggctaaaattgcacataaaagaaccagatatacaactgaaggaaggaaaaaggaagctagaagcaaatctaaagcagataatgtaggaagtgcattgggaccagattggcatgaaggcttgaatcttaaaggaacaaaagagttttctcataagattcaccttgaaactatgtgtgaagtaaagaaaatctaccttcaggatgagtttagaattttgaagaaaaagtccttcacttttccaagagaccataagtcagttacagctgatacagagatgtggcctgtctatgtggaattgaccaatgaaaagatatatggctgcgatttcattgtcagtgctacaggagttacaccaaatgtagaaccttttctccatggtaacagttttgatctaggagaagatggtggcctgaaagtggatgatcatatgcacacatcccttcctgatatctatgctgccggtgacatctgtactacatcctggcagctgagcccagtctggcagcagatgaggctgtggacccaggctagacagatgggatggtatgcagcaaagtgcatggctgcagcgagttcaggagactctattgacatggatttcagctttgaactgtttgctcatgtgacaaaattttttaactataaggttgtactgctgggaaaatacaatgcacagggcttaggttcagatcatgaattaatgctgagatgtaccaaaggacgagaatacatcaaagtcgtcatgcaaaatggacgaatgatgggagctgtcttaattggtgaaaccgatttagaagaaacatttgaaaacctaatcttaaaccaaatgaatctttcatcatatggagaagatctgctagatccaaatattgatatagaagattattttgactaaaaatggaatttcttcaggaatcatataaagttccaaatgacaccagaaaaatcacaagtcaataaaatgaatgactgtattgagttaatgatgaccacactgaaaattacagaagtgataatgatattagtggaaaaatataaaaacataaattctaagtttgaaatcagttcaaagtttatttatagatatatctttccaacacaacactgaccgcttagataaaaatcttaagttatttatttctgtgttttaaacataaatatgtttacttgtgatttagctttggagcaaatttaggtaagttatctacttagccaaatgtactctagtagactagaaccattctttgtgaaatgtcaaaatatggctatggtttcaggaactttaaaatcggttgtattttactttaaatagagatgtagcaatatctcgtttgctaatatttatattgatgacttactccttttttgttgaattgtacttctggttttataacctgaaatcatctacaagcttgtccaactctagcccacgggtctaatgcagcccagaacagctttgaatgcagcccaacacaaatctgtaaactttcttaaaacatgagatttttcttgcaatttttttttttttaagctcatcagctatcgtcagtgttagcatattttatgtgcggcccaagacaattcttcttccaatgtggctcagggaagccaaaagattggacatccctgatctacatatttaacttaaagtatcactcagtgaacctctgtcagtataatattgctttcaaaaagatggttatgtcaaaagaaaaaatatagctaagtatataaaggcataaaaaacttaagacaattacatgaacttattctcaaatattttacattttttgtaaactttcttaaaacatgagatttttcttgcaattttttttttaagctcatcagctatcatcagtgttagcatattttatgtgcggcccaagacaattcttcttccaatgtggctcagggaagccaaaagattggacatccttgatctacatatttaacttaaagtatcactcagtgaaattcttttaaaaactattgtctaactacaaaaataatggcatatacatgcataaaccatctttaattagaaaatttagtaacagtcatatcaggcatcatcgatttttcttttcttagctcctgtattcttagaaccagattgctgaagcatgtttgcagccttcttctggaagttgcctgaatttttttcctccatctttttatcaccttgttcagaatgacaagtttgagacgattcagcctac

SEQ ID NO: 362582 - DNA, 629 bp, Homo sapiens
tgctttagcaaatatgcctcataataattgctaaggagtgtgttacaaagttatctcttgcctttctttttctttctttgtttctagtcattgtagtcacatacactgctgtggtgatggttccatttacaaataaagtctgtttttttggtttttttttcttaaagagatgtggcctgtctatgtggaattgaccaatgaaaagatatatggctgcgatttcattgtcagtgctacaggagttacaccaaatgtagaaccttttctccatggtaacagtgtaaggtgaaatttttttgtccagctgtgaatatatttgaagtatttttgtgaagatctctaattctcaaacatgaataattattattttagtgtacaactgtaacttaacatggttggaaacagtttggttaaaacattgtcttgatttacggtattttttactgcttaaaatccttacatagttatatccttgcataagcgtcatcagtaatggtttataatgtacaatttatttatctaaatgttggtaagagactgacacctcccgtgacttctcaaaaatgattcttttagagaaaccatcttgtattttttgcttttcagcacttgaagcttacaaaaaaaaa

SEQ ID NO: 362583 - DNA, 1961 bp, Homo sapiens
tatttaatagaaatgctactaaaacaggtgtgattggtatcatcttttaattttagaggcagtaatttagatagaattaacaaataccaaaaatcagtctgattagttatccattggtgactgcttctgtggcaaagatgacagaaagactgtcaaacattgaactcctttaagtgaatttacaaggttaacatttttcagataatgatcatgaaaaatgacattgtgtaacattttttcatcatttcagatgaggctgtggacccaggctagacagatgggatggtatgcagcaaagtgcatggctgcagcgagttcaggagactctattgacatggatttcagctttgaactgtttgctcatgtgacaaaattttttaactataaggttgtactgctgggaaaatacaatgcacagggcttaggttcagatcatgaattaatgctgagatgtaccaaaggacgagaatacatcaaagtcgtcatgcaaaatggacgaatgatgggagctgtcttaattggtgaaaccgatttagaagaaacatttgaaaacctaatcttaaaccaaatgaatctttcatcatatggagaagatctgctagatccaaatattgatatagaagattattttgactaaaaatggaatttcttcaggaatcatataaagttccaaatgacaccagaaaaatcacaagtcaataaaatgaatgactgtattgagttaatgatgaccacactgaaaattacagaagtgataatgatattagtggaaaaatataaaaacataaattctaagtttgaaatcagttcaaagtttatttatagatatatctttccaacacaacactgaccgcttagataaaaatcttaagttatttatttctgtgttttaaacataaatatgtttacttgtgatttagctttggagcaaatttaggtaagttatctacttagccaaatgtactctagtagactagaaccattctttgtgaaatgtcaaaatatggctatggtttcaggaactttaaaatcggttgtattttactttaaatagagatgtagcaatatctcgtttgctaatatttatattgatgacttactccttttttgttgaattgtacttctggttttataacctgaaatcatctacaagcttgtccaactctagcccacgggtctaatgcagcccagaacagctttgaatgcagcccaacacaaatctgtaaactttcttaaaacatgagatttttcttgcaatttttttttttttaagctcatcagctatcgtcagtgttagcatattttatgtgcggcccaagacaattcttcttccaatgtggctcagggaagccaaaagattggacatccctgatctacatatttaacttaaagtatcactcagtgaacctctgtcagtataatattgctttcaaaaagatggttatgtcaaaagaaaaaatatagctaagtatataaaggcataaaaaacttaagacaattacatgaacttattctcaaatattttacattttttgtaaactttcttaaaacatgagatttttcttgcaattttttttttaagctcatcagctatcatcagtgttagcatattttatgtgcggcccaagacaattcttcttccaatgtggctcagggaagccaaaagattggacatccttgatctacatatttaacttaaagtatcactcagtgaaattcttttaaaaactattgtctaactacaaaaataatggcatatacatgcataaaccatctttaattagaaaatttagtaacagtcatatcaggcatcatcgatttttcttttcttagctcctgtattcttagaaccagattgctgaagcatgtttgcagccttcttctggaagttgcctgaatttttttcctccatctttttatcaccttgttcagaatgacaagtttgagacgattcagcctac

SEQ ID NO: 362584 - DNA, 1561 bp, Homo sapiens
gccgtaattttaatatctgaacaactttcttccccaaaatatgtggtttcaccataatatccatattttttcttccccagcaactttctctttgctgttgttctctcattttcgccccccccccacagatgtgggtttttcccacaaaatcactaccaccgtctttttttctccccaccttgttttttatatactcctcgccccttcttgtttttatttaataacctcctcttttatggaccccttcttcaaaaaatggtgcttattcccccccccgcggaattttcttcccccccccccctcctccttttttttttttttttttttttttttttttttttttttttttttttttttttttttttttttttttttttttttttttttttttttttttttgaaatcagttcaaagtttatttatagatatatctttccaacacaacactgaccgcttagataaaaatcttaagttatttatttctgtgttttaaacataaatatgtttacttgtgatttagctttggagcaaatttaggtaagttatctacttagccaaatgtactctagtagactagaaccattctttgtgaaatgtcaaaatatggctatggtttcaggaactttaaaatcggttgtattttactttaaatagagatgtagcaatatctcgtttgctaatatttatattgatgacttactccttttttgttgaattgtacttctggttttataacctgaaatcatctacaagcttgtccaactctagcccacgggtctaatgcagcccagaacagctttgaatgcagcccaacacaaatctgtaaactttcttaaaacatgagatttttcttgcaatttttttttttttaagctcatcagctatcgtcagtgttagcatattttatgtgcggcccaagacaattcttcttccaatgtggctcagggaagccaaaagattggacatccctgatctacatatttaacttaaagtatcactcagtgaacctctgtcagtataatattgctttcaaaaagatggttatgtcaaaagaaaaaatatagctaagtatataaaggcataaaaaacttaagacaattacatgaacttattctcaaatattttacattttttgtaaactttcttaaaacatgagatttttcttgcaattttttttttaagctcatcagctatcatcagtgttagcatattttatgtgcggcccaagacaattcttcttccaatgtggctcagggaagccaaaagattggacatccttgatctacatatttaacttaaagtatcactcagtgaaattcttttaaaaactattgtctaactacaaaaataatggcatatacatgcataaaccatctttaattagaaaatttagtaacagtcatatcaggcatcatcgatttttcttttcttagctcctgtattcttagaaccagattgctgaagcatgtttgcagccttcttctggaagttgcctgaatttttttcctccatctttttatcaccttgttcagaatgacaagtttgagacgattcagcctac

SEQ ID NO: 362585 - DNA, 464 bp, Homo sapiens
tttgactatattcaccagaattttttaatgtcagtgtagagtgtgtgatagtgtcatctgtagaattaacgcatgctgttgaaacattttctttgggactctccccaataacatttttagttatgaaattttgtggcataagttttctgcggctattcaaacttgacacaaaataactacccattacattttctttatgatactcatgacaataacctttttatctctaaatataggttgtactgctgggaaaatacaatgcacagggcttaggttcagatcatgaattaatgctgagatgtaccaaaggacgagaatacatcaaagtcgtcatgcaaaatggacgaatgatgggagctgtcttaattggtgaaaccgatttagaagaaacatttgaaaacctaatcttaaaccaaatgaatctttcatcatatggagaagatctgctagatccaaatattgat

SEQ ID NO: 362586 - DNA, 3128 bp, Homo sapiens
cgcggctgcttcctctcctggagtccagagtcccgttgctccgccgcgatattcagtaaaccactgggagtccggcagcatggaggcagcgcgccctcccccgacggcagggaagttcgtggtggtcggcggcggcatcgcgggcgtcacttgtgcggagcagttggctactcactttccatcggaagatattctcttggtaacagcttctcctgttattaaagcagttacaaatttcaagcagatttctaaaatattggaagaattcgatgttgaagaacaatcaagtaccatgttaggaaaacgctttcccaacattaaggttatagaatctggcgtaaagcaactgaagagtgaagaacactgcattgtaacagaagatggcaatcagcacgtatataagaaactctgtctgtgtgctggagctaaaccaaagttgatatgtgaaggaaatccttatgtattaggaatccgtgatacagacagtgctcaggaatttcagaaacagcttactaaagctaaaagaataatgatcatagggaacggtggtattgcacttgagttagtgtatgaaattgaaggctgtgaagtgatttgggccattaaagataaagctatagggaatactttcttcgatgcaggagcagctgaattcttgacttcaaagctcattgctgaaaaatcagaggctaaaattgcacataaaagaaccagatatacaactgaaggaaggaaaaaggaagctagaagcaaatctaaagcagataatgtaggaagtgcattgggaccagattggcatgaaggcttgaatcttaaaggaacaaaagagcaatactcacagcatcctcaccagaagtaaactccatctcagataactacgttctttgctcatccatgagaaacaacaactcatcttttcaaattttatcatgagattgcagcaatgtagtctcatcttcaggattcatttctaattacagttcttttgttatttccaccatatctgcctttctccattgaaatcttgaatccctcaaagtcatccatgaagttttctcataagattcaccttgaaactatgtgtgaagtaaagaaaatctaccttcaggatgagtttagaattttgaagaaaaagtccttcacttttccaagagaccataagtcagttacagctgatacagagatgtggcctgtctatgtggaattgaccaatgaaaagatatatggctgcgatttcattgtcagtgctacaggagttacaccaaatgtagaaccttttctccatggtaacagttttgatctaggagaagatggtggcctgaaagtggatgatcatatgcacacatcccttcctgatatctatgctgccggtgacatctgtactacatcctggcagctgagcccagtctggcagcagatgaggctgtggacccaggctagacagatgggatggtatgcagcaaagtgcatggctgcagcgagttcaggagactctattgacatggatttcagctttgaactgtttgctcatgtgacaaaattttttaactataaggttgtactgctgggaaaatacaatgcacagggcttaggttcagatcatgaattaatgctgagatgtaccaaaggacgagaatacatcaaagtcgtcatgcaaaatggacgaatgatgggagctgtcttaattggtgaaaccgatttagaagaaacatttgaaaacctaatcttaaaccaaatgaatctttcatcatatggagaagatctgctagatccaaatattgatatagaagattattttgactaaaaatggaatttcttcaggaatcatataaagttccaaatgacaccagaaaaatcacaagtcaataaaatgaatgactgtattgagttaatgatgaccacactgaaaattacagaagtgataatgatattagtggaaaaatataaaaacataaattctaagtttgaaatcagttcaaagtttatttatagatatatctttccaacacaacactgaccgcttagataaaaatcttaagttatttatttctgtgttttaaacataaatatgtttacttgtgatttagctttggagcaaatttaggtaagttatctacttagccaaatgtactctagtagactagaaccattctttgtgaaatgtcaaaatatggctatggtttcaggaactttaaaatcggttgtattttactttaaatagagatgtagcaatatctcgtttgctaatatttatattgatgacttactccttttttgttgaattgtacttctggttttataacctgaaatcatctacaagcttgtccaactctagcccacgggtctaatgcagcccagaacagctttgaatgcagcccaacacaaatctgtaaactttcttaaaacatgagatttttcttgcaatttttttttttttaagctcatcagctatcgtcagtgttagcatattttatgtgcggcccaagacaattcttcttccaatgtggctcagggaagccaaaagattggacatccctgatctacatatttaacttaaagtatcactcagtgaacctctgtcagtataatattgctttcaaaaagatggttatgtcaaaagaaaaaatatagctaagtatataaaggcataaaaaacttaagacaattacatgaacttattctcaaatattttacattttttgtaaactttcttaaaacatgagatttttcttgcaattttttttttaagctcatcagctatcatcagtgttagcatattttatgtgcggcccaagacaattcttcttccaatgtggctcagggaagccaaaagattggacatccttgatctacatatttaacttaaagtatcactcagtgaaattcttttaaaaactattgtctaactacaaaaataatggcatatacatgcataaaccatctttaattagaaaatttagtaacagtcatatcaggcatcatcgatttttcttttcttagctcctgtattcttagaaccagattgctgaagcatgtttgcagccttcttctggaagttgcctgaatttttttcctccatctttttatcaccttgttcagaatgacaagtttgagacgattcagcctac

SEQ ID NO: 362587 - DNA, 1421 bp, Homo sapiens
cgcggctgcttcctctcctggagtccagagtcccgttgctccgccgcgatattcagtaaaccactgggagtccggcagcatggaggcagcgcgccctcccccgacggcagggaagttcgtggtggtcggcggcggcatcgcgggcgtcacttgtgcggagcagttggctactcactttccatcggaagatattctcttggtaacagcttctcctgttattaaagcagttacaaatttcaagcagatttctaaaatattggaagaattcgatgttgaagaacaatcaagtaccatgttaggaaaacgctttcccaacattaaggttatagaatctggcgtaaagcaactgaagagtgaagaacactgcattgtaacagaagatggcaatcagcacgtatataagaaactctgtctgtgtgctggagctaaaccaaagttgatatgtgaaggaaatccttatgtattaggaatccgtgatacagacagtgctcaggaatttcagaaacagcttactaaagctaaaagaataatgatcatagggaacggtggtattgcacttgagttagtgtatgaaattgaaggctgtgaagtgatttgggccattaaagataaagctatagggaatactttcttcgatgcaggagcagctgaattcttgacttcaaagctcattgctgaaaaatcagaggctaaaattgcacataaaagaaccagatatacaactgaaggaaggaaaaaggaagctagaagcaaatctaaagcagataatgtaggaagtgcattgggaccagattggcatgaaggcttgaatcttaaaggaacaaaagagttttctcataagattcaccttgaaactatgtgtgaagtaaagaaaatctaccttcaggatgagtttagaattttgaagaaaaagtccttcacttttccaagagaccataagtcagttacagctgatacagagatgtggcctgtctatgtggaattgaccaatgaaaagatatatggctgcgatttcattgtcagtgctacaggagttacaccaaatgtagaaccttttctccatggtaacagtgtaaggtgaaatttttttgtccagctgtgaatatatttgaagtatttttgtgaagatctctaattctcaaacatgaataattattattttagtgtacaactgtaacttaacatggttggaaacagtttggttaaaacattgtcttgatttacggtattttttactgcttaaaatccttacatagttatatccttgcataagcgtcatcagtaatggtttataatgtacaatttatttatctaaatgttggtaagagactgacacctcccgtgacttctcaaaaatgattcttttagagaaaccatcttgtattttttgcttttcagcacttgaagcttacaaaaaaaaa

SEQ ID NO: 362588 - DNA, 2886 bp, Homo sapiens
ggccggtggcggcggccggccggggaggcggcctcggcgcacagtaatggcagcgctgtgagcaggggaacgcgagctgacagccgccgccgccgccgcctccgcccaccttcctcgccggggcttcgtctttcactccttcgggctgcctccccctccccttgtcccctgccccttgccctgcttctgcagaagatttcaacactacacttgcacaatgtctttgaaaccaagagtagtagattttgatgaaacatggaacaaacttttgacgacaataaaagccgtggtcatgttggaatacgtcgaaagagcaacatggaatgaccgtttctcagatatctatgctttatgtgtggcctatcctgaaccccttggagaaagactttatacagaaactaagatttttttggaaaatcatgttcggcatttgcataagagagttttggagtcagaagaacaagtacttgttatgtatcataggtactgggaagaatacagcaagggtgcagactatatggactgcttatataggtatctcaacacccagtttattaaaaagaataaattaacagaagcggaccttcagtatggctatggtggtgtagatatgaatgaaccacttatggaaataggagagctagcattggatatgtggaggaaattgatggttgaaccacttcaggccatccttatccgaatgctgctccgagaaatcaaaaatgatcgtggtggagaagacccaaaccagaaagtaatccatggggttattaactcctttgttcatgttgaacagtataagaaaaaattccccttaaagttttatcaggaaatttttgagtctccctttctgactgaaacaggagagtattacaaacaagaagcttcaaatttattacaagaatcaaactgctcacagtatatggaaaaggttctaggtagattaaaagatgaagaaattcgatgtcgaaaatacctacatccaagttcatatactaaggtgattcatgaatgtcaacaacgaatggtagcagaccacttacagtttttacatgcagaatgtcataatataattcgacaagagaaaaaaaatgacatggcaaatatgtacgtcttactccgtgctgtgtccactggtttacctcatatgattcaggagctgcaaaaccacatccatgatgagggccttcgagcaaccagcaaccttactcaggaaaacatgccaacactatttgtggagtcagttttggaagtgcatggtaaatttgttcagcttatcaacactgttttgaatggtgatcagcattttatgagtgcgttggataaggcccttacgtcagttgtaaattacagagaacctaagtctgtttgcaaagcacctgaactgcttgctaagtactgtgacaacttactgaagaagtcagcgaaagggatgacagagaatgaagtggaagacaggctcacgagcttcatcacagtgttcaaatacattgatgacaaggacgtctttcaaaagttctacgcaagaatgctggcaaaacgtttaattcatgggttatccatgtctatggactctgaagaagccatgatcaacaaattaaagcaagcctgtggttatgagtttaccagcaagctacatcggatgtatacagatatgagtgtcagcgctgatctcaacaataagttcaacaattttatcaaaaaccaagacacagtaatagatttgggaattagttttcaaatatatgttctacaggctggtgcgtggcctcttactcaggctccttcatctacgtttgcaattccccaggaattagaaaaaagtgtacagatgtttgaattattttatagccaacatttcagtggaaggaaacttacatggttacattatctgtgtacaggtgaagttaaaatgaactatttgggcaaaccatatgtagccatggttacaacataccaaatggcagttcttcttgcctttaacaacagtgaaactgtcagttataaagagcttcaggacagcactcagatgaatgaaaaggaactgacaaaaacaatcaaatcattacttgatgtgaaaatgattaaccatgattcagaaaaggaagatattgatgcagaatcttcattttcattaaatatgaactttagcagtaaaagaacaaaatttaaaattactacatcaatgcagaaagacacaccacaagaaatggagcagactagaagtgcagttgatgaggaccggaaaatgtatctccaagctgctatagttcgtatcatgaaagcacgaaaagtgcttcggcacaatgcccttattcaagaggtgattagccagtcaagagctaggtttaatcccagtatcagcatgattaagaagtgtattgaagttctgatagacaaacaatacatagaacgcagccaggcgtcggcagatgaatacagctacgtcgcgtgatgtcgctctcctccagcgtggtgtgagaagatcattgccatcaccatttggtgtgttcctgtgggaaaaagcaggactgtgcctccataatttggtcatttggcagcccctgttttctgctgtttacaacatcaccagtgccacgtcatgagcgtcaaagaaaatgcctagagatatttcaagctcatgtcattatgacatttcttaaaactttattaaaagaatgagtgaagtattgctgaaaagtggaaattcggttgggtaccatgctttttctccccttcacgtttgcagttgatgtgtctttttttttttttttaatgtatcttaaaggacataaaatttaaaaacttaaatattgtaatatgacagataacctaataattgtatctacattaaaatgacaaacatgatactgctgcttgtcaaat

SEQ ID NO: 362589 - DNA, 1000 bp, Homo sapiens
ggctcacacctataatcccagcactttgggaggccaaggcgggcggatcacttgagcctcaggagttcgagaccagcctggccaacatggtgaaaccctgtctctattaacaatacaaaaattagggtgcgatggctcacgcctgtaatcccccagctccttgagaggctgtggcaggtgaatcacttgaacgtgggaggtggaggttgcagtgcactcgagcctgggtgacagagggagactctgtctcaggaacaaacaaaaaaaaagctagtggaccaaggttagactatcagtgggagttaggtggaatgggtggagggggcagctaaggaaaagataagcactttaggtagagaaaatagtaagggtaaaggcaagtgtatgaatcaggctgatgtgttcagtgatctctaagcagagagaagttcctagattatgatgtcacagtagggagtaccaggaggagaggaagcttgggtgccatgttgcagttgagcccaaactgaatgctgtctgtagaaggaaacaacaaactttgtactttatgtacagagtaacatggtcaactttttggcttagatttcaacactacacttgcacaatgtctttgaaaccaagagtagtagattttgatgaaacatggaacaaacttttgacgacaataaaagccgtggtcatgttggaatacgtcgaaagagcaacatggaatgaccgtttctcattcattatctttaccttggagacacttggtggtggtcatcgtactgataagatggcatagctttatcatggaacagtctggagtataaccaccaggaggtcctgacctctgtgttgctctggtgtcattgttcctgtggacaaatgagctgttacctccaaaatgccttgtcacagtagttggaggcagcatatgaaacacctagttcccagaatcataatctaataccgtgtctggccccaaagttataaatgggctttgccttaagtcttatct

SEQ ID NO: 362590 - DNA, 615 bp, Homo sapiens
ggctcacacctataatcccagcactttgggaggccaaggcgggcggatcacttgagcctcaggagttcgagaccagcctggccaacatggtgaaaccctgtctctattaacaatacaaaaattagggtgcgatggctcacgcctgtaatcccccagctccttgagaggctgtggcaggtgaatcacttgaacgtgggaggtggaggttgcagtgcactcgagcctgggtgacagagggagactctgtctcaggaacaaacaaaaaaaaagctagtggaccaaggttagactatcagtgggagttaggtggaatgggtggagggggcagctaaggaaaagataagcactttaggtagagaaaatagtaagggtaaaggcaagtgtatgaatcaggctgatgtgttcagtgatctctaagcagagagaagttcctagattatgatgtcacagtagggagtaccaggaggagaggaagcttgggtgccatgttgcagttgagcccaaactgaatgctgtctgtagaaggaaacaacaaactttgtactttatgtacagagtaacatggtcaactttttggcttaggtaggttatttttgtgtctttgataagggcaag

SEQ ID NO: 362591 - DNA, 4233 bp, Homo sapiens
accattgctttccgggtggcgggggggatttggcagcagcggaagaaggagaccggagggtgtgtgttgggcaaagccggaggcagaggaggacgattgttttacggatcccgtgatcggcccgtccttctcccctttccccccctccctaccgcccctgtcccgccggggagcggcggcggccttggactttgctgtctttcctcgcggagacagatttcaacactacacttgcacaatgtctttgaaaccaagagtagtagattttgatgaaacatggaacaaacttttgacgacaataaaagccgtggtcatgttggaatacgtcgaaagagcaacatggaatgaccgtttctcagatatctatgctttatgtgtggcctatcctgaaccccttggagaaagactttatacagaaactaagatttttttggaaaatcatgttcggcatttgcataagagagttttggagtcagaagaacaagtacttgttatgtatcataggtactgggaagaatacagcaagggtgcagactatatggactgcttatataggtatctcaacacccagtttattaaaaagaataaattaacagaagcggaccttcagtatggctatggtggtgtagatatgaatgaaccacttatggaaataggagagctagcattggatatgtggaggaaattgatggttgaaccacttcaggccatccttatccgaatgctgctccgagaaatcaaaaatgatcgtggtggagaagacccaaaccagaaagtaatccatggggttattaactcctttgttcatgttgaacagtataagaaaaaattccccttaaagttttatcaggaaatttttgagtctccctttctgactgaaacaggagagtattacaaacaagaagcttcaaatttattacaagaatcaaactgctcacagtatatggaaaaggttctaggtagattaaaagatgaagaaattcgatgtcgaaaatacctacatccaagttcatatactaaggtgattcatgaatgtcaacaacgaatggtagcagaccacttacagtttttacatgcagaatgtcataatataattcgacaagagaaaaaaaatgacatggcaaatatgtacgtcttactccgtgctgtgtccactggtttacctcatatgattcaggagctgcaaaaccacatccatgatgagggccttcgagcaaccagcaaccttactcaggaaaacatgccaacactatttgtggagtcagttttggaagtgcatggtaaatttgttcagcttatcaacactgttttgaatggtgatcagcattttatgagtgcgttggataaggcccttacgtcagttgtaaattacagagaacctaagtctgtttgcaaagcacctgaactgcttgctaagtactgtgacaacttactgaagaagtcagcgaaagggatgacagagaatgaagtggaagacaggctcacgagcttcatcacagtgttcaaatacattgatgacaaggacgtctttcaaaagttctacgcaagaatgctggcaaaacgtttaattcatgggttatccatgtctatggactctgaagaagccatgatcaacaaattaaagcaagcctgtggttatgagtttaccagcaagctacatcggatgtatacagatatgagtgtcagcgctgatctcaacaataagttcaacaattttatcaaaaaccaagacacagtaatagatttgggaattagttttcaaatatatgttctacaggctggtgcgtggcctcttactcaggctccttcatctacgtttgcaattccccaggaattagaaaaaagtgtacagatgtttgaattattttatagccaacatttcagtggaaggaaacttacatggttacattatctgtgtacaggtgaagttaaaatgaactatttgggcaaaccatatgtagccatggttacaacataccaaatggcagttcttcttgcctttaacaacagtgaaactgtcagttataaagagcttcaggacagcactcagatgaatgaaaaggaactgacaaaaacaatcaaatcattacttgatgtgaaaatgattaaccatgattcagaaaaggaagatattgatgcagaatcttcattttcattaaatatgaactttagcagtaaaagaacaaaatttaaaattactacatcaatgcagaaagacacaccacaagaaatggagcagactagaagtgcagttgatgaggaccggaaaatgtatctccaagctgctatagttcgtatcatgaaagcacgaaaagtgcttcggcacaatgcccttattcaagaggtgattagccagtcaagagctaggtttaatcccagtatcagcatgattaagaagtgtattgaagttctgatagacaaacaatacatagaacgcagccaggcgtcggcagatgaatacagctacgtcgcgtgatgtcgctctcctccagcgtggtgtgagaagatcattgccatcaccatttggtgtgttcctgtgggaaaaagcaggactgtgcctccataatttggtcatttggcagcccctgttttctgctgtttacaacatcaccagtgccacgtcatgagcgtcaaagaaaatgcctagagatatttcaagctcatgtcattatgacatttcttaaaactttattaaaagaatgagtgaagtattgctgaaaagtggaaattcggttgggtaccatgctttttctccccttcacgtttgcagttgatgtgtctttttttttttttttaatgtatcttaaaggacataaaatttaaaaacttaaatattgtaatatgacagataacctaataattgtatctacattaaaatgacaaacatgatactgctgcttgtcaaataaaaaaaaaataaagaaatagaatgccttttttatgtggatggagtatcaggttgaccacaaaatatattgactcaaagcagctaatgcatctttagttgcgtttttatctgaatggtttaattcacttgtactcctatttaaatcctacatgaaaaatgtctagattattgttcttgactgcataggactgcattcagcataaagaatgctttatttttatggattagatatattggatctaaacattttgaatcttgaagatgtaattccatcagcagtttctggtggtgtgctactccacagacatcgcagagtgtgagcaggatgcttggtgacctcaagtctggcacagagagagcttttcattcaaaagttgtctttcttcggttgcataatccattaattctagcatagactagtaccctagctctgtggccttccctgagtcttaggaaatctatgataccaacatattccttctatatgcctcccctacctgttacccttacaaccctcctccaacagtttagatactagagtcactctcatcaatcacagatgtgcttagcaatgcataacctaaatacttttttaaaaaagaaaattgtacattgtactgggtgccacatatataaatcccattattttgtttattttatatatatatatatatataatatatatatatatatatctcaacagcagtgttaagagtactgcgatctattatccatatttattgtctatccacaccatcaccaccaccaccacacccctcctccctcaacatacaatttttctttattttaaaaaaaataagagacggggtttcgccatgtttcccaggctagtctggaacttctggcctcaagcaatcctatctctgtctcccaaagtgctgggattacaagcatgagccactgcatccatccaacacaaaatttttaaaatcggaatattttaaagcaaatcacacaaattatttcacttataatacttcagtaaggcctttaaaaaatccacagtgatattattactcctaacaaaaacaataattacttagtatcatctaatatgtggttcatatttaaatttgttgttttgagatgggtcttacaattggtttattcaattgcattttttctaactcgtgtctcaagtgttttaaaaatctactgaacttataatgacttatataatgtatttctcattttacctttcttccaaaagaggaaataatggcaaaccatataatattgtacattcactgtcaaaaagcaaacccttgttttgataacttgttgattgataaaagttttccaaa

SEQ ID NO: 362592 - DNA, 4279 bp, Homo sapiens
accattgctttccgggtggcgggggggatttggcagcagcggaagaaggagaccggagggtgtgtgttgggcaaagccggaggcagaggaggacgattgttttacggatcccgtgatcggcccgtccttctcccctttccccccctccctaccgcccctgtcccgccggggagcggcggcggccttggactttgctgtctttcctcgcggagacagatttcaacactacacttgcacaatgtctttgaaaccaagagtagtagattttgatgaaacatggaacaaacttttgacgacaataaaagccgtggtcatgttggaatacgtcgaaagagcaacatggaatgaccgtttctcagatatctatgctttatgtgtggcctatcctgaaccccttggagaaagactttatacagaaactaagatttttttggaaaatcatgttcggcatttgcataagagagttttggagtcagaagaacaagtacttgttatgtatcataggtactgggaagaatacagcaagggtgcagactatatggactgcttatataggtatctcaacacccagtttattaaaaagaataaattaacagaagcggaccttcagtatggctatggtggtgtagatatgaatgaaccacttatggaaataggagagctagcattggatatgtggaggaaattgatggttgaaccacttcaggccatccttatccgaatgctgctccgagaaatcaaaaatgatcgtggtggagaagacccaaaccagaaagtaatccatggggttattaactcctttgttcatgttgaacagtataagaaaaaattccccttaaagttttatcaggaaatttttgagtctccctttctgactgaaacaggagagtattacaaacaagaagcttcaaatttattacaagaatcaaactgctcacagtatatggaaaaggttctaggtagattaaaagatgaagaaattcgatgtcgaaaatacctacatccaagttcatatactaaggtgattcatgaatgtcaacaacgaatggtagcagaccacttacagtttttacatgcagaatgtcataatataattcgacaagagaaaaaaaatgacatggcaaatatgtacgtcttactccgtgctgtgtccactggtttacctcatatgattcaggagctgcaaaaccacatccatgatgagggccttcgagcaaccagcaaccttactcaggaaaacatgccaacactatttgtggagtcagttttggaagtgcatggtaaatttgttcagcttatcaacactgttttgaatggtgatcagcattttatgagtgcgttggataaggcccttacgtcagttgtaaattacagagaacctaagtctgtttgcaaagcacctgaactgcttgctaagtactgtgacaacttactgaagaagtcagcgaaagggatgacagagaatgaagtggaagacaggctcacgagcttcatcacagtgttcaaatacattgatgacaaggacgtctttcaaaagttctacgcaagaatgctggcaaaacgtttaattcatgggttatccatgtctatggactctgaagaagccatgatcaacaaattaaagcaagcctgtggttatgagtttaccagcaagctacatcggatgtatacagatatgagtgtcagcgctgatctcaacaataagttcaacaattttatcaaaaaccaagacacagtaatagatttgggaattagttttcaaatatatgttctacaggctggtgcgtggcctcttactcaggctccttcatctacgtttgcaattccccaggaattagaaaaaagtgtacagatgtttgaattattttatagccaacatttcagtggaaggaaacttacatggttacattatctgtgtacaggtgaagttaaaatgaactatttgggcaaaccatatgtagccatggttacaacataccaaatggcagttcttcttgcctttaacaacagtgaaactgtcagttataaagagcttcaggacagcactcagatgaatgaaaaggaactgacaaaaacaatcaaatcattacttgatgtgaaaatgattaaccatgattcagaaaaggaagatattgatgcagaatcttcattttcattaaatatgaactttagcagtaaaagaacaaaatttaaaattactacatcaatgcagaaagacacaccacaagaaatggagcagactagaagtgcagttgatgaggaccggaaaatgtatctccaagctgctatagttcgtatcatgaaagcacgaaaagtgcttcggcacaatgcccttattcaagaggtgattagccagtcaagagctaggtttaatcccagtatcagcatgattaagaagtgtattgaagttctgatagacaaacaatacatagaacgcagccaggcgtcggcagatgaatacagctacgtcgcgtgatgtcgctctcctccagcgtggtgtgagaagatcattgccatcaccatttggtgtgttcctgtgggaaaaagcaggactgtgcctccataatttggtcatttggcagcccctgttttctgctgtttacaacatcaccagtgccacgtcatgagcgtcaaagaaaatgcctagagatatttcaagctcatgtcattatgacatttcttaaaactttattaaaagaatgagtgaagtattgctgaaaagtggaaattcggttgggtaccatgctttttctccccttcacgtttgcagttgatgtgtctttttttttttttttaatgtatcttaaaggacataaaatttaaaaacttaaatattgtaatatgacagataacctaataattgtatctacattaaaatgacaaacatgatactgctgcttgtcaaataaaaaaaaaataaagaaatagaatgccttttttatgtggatggagtatcaggttgaccacaaaatatattgactcaaagcagctaatgcatctttagttgcgtttttatctgaatggtttaattcacttgtactcctatttaaatcctacatgaaaaatgtctagattattgttcttgactgcataggactgcattcagcataaagaatgctttatttttatggattagatatattggatctaaacattttgaatcttgaagatgtaattccatcagcagtttctggtggtgtgctactccacagacatcgcagagtgtgagcaggatgcttggtgacctcaagtctggcacagagagagcttttcattcaaaagttgtctttcttcggttgcataatccattaattctagcatagactagtaccctagctctgtggccttccctgagtcttaggaaatctatgataccaacatattccttctatatgcctcccctacctgttacccttacaaccctcctccaacagtttagatactagagtcactctcatcaatcacagatgtgcttagcaatgcataacctaaatacttttttaaaaaagaaaattgtacattgtactgggtgccacatatataaatcccattattttgtttattttatatatatatatatatataatatatatatatatatatctcaacagcagtgttaagagtactgcgatctattatccatatttattgtctatccacaccatcaccaccaccaccacacccctcctccctcaacatacaatttttctttattttaaaaaaaataagagacggggtttcgccatgtttcccaggctagtctggaacttctggcctcaagcaatcctatctctgtctcccaaagtgctgggattacaagcatgagccactgcatccatccaacacaaaatttttaaaatcggaatattttaaagcaaatcacacaaattatttcacttataatacttcagtaaggcctttaaaaaatccacagtgatattattactcctaacaaaaacaataattacttagtatcatctaatatgtggttcatatttaaatttgttgttttgagatgggtcttacaattggtttattcaattgcattttttctaactcgtgtctcaagtgttttaaaaatctactgaacttataatgacttatataatgtatttctcattttacctttcttccaaaagaggaaataatggcaaaccatataatattgtacattcactgtcaaaaagcaaacccttgttttgataacttgttgattgataaaagttttccaaattgattcctttttttcttaaatatttataaatgttaaattaagtct

SEQ ID NO: 362593 - DNA, 4599 bp, Homo sapiens
ggctcacacctataatcccagcactttgggaggccaaggcgggcggatcacttgagcctcaggagttcgagaccagcctggccaacatggtgaaaccctgtctctattaacaatacaaaaattagggtgcgatggctcacgcctgtaatcccccagctccttgagaggctgtggcaggtgaatcacttgaacgtgggaggtggaggttgcagtgcactcgagcctgggtgacagagggagactctgtctcaggaacaaacaaaaaaaaagctagtggaccaaggttagactatcagtgggagttaggtggaatgggtggagggggcagctaaggaaaagataagcactttaggtagagaaaatagtaagggtaaaggcaagtgtatgaatcaggctgatgtgttcagtgatctctaagcagagagaagttcctagattatgatgtcacagtagggagtaccaggaggagaggaagcttgggtgccatgttgcagttgagcccaaactgaatgctgtctgtagaaggaaacaacaaactttgtactttatgtacagagtaacatggtcaactttttggcttagatttcaacactacacttgcacaatgtctttgaaaccaagagtagtagattttgatgaaacatggaacaaacttttgacgacaataaaagccgtggtcatgttggaatacgtcgaaagagcaacatggaatgaccgtttctcagatatctatgctttatgtgtggcctatcctgaaccccttggagaaagactttatacagaaactaagatttttttggaaaatcatgttcggcatttgcataagagagttttggagtcagaagaacaagtacttgttatgtatcataggtactgggaagaatacagcaagggtgcagactatatggactgcttatataggtatctcaacacccagtttattaaaaagaataaattaacagaagcggaccttcagtatggctatggtggtgtagatatgaatgaaccacttatggaaataggagagctagcattggatatgtggaggaaattgatggttgaaccacttcaggccatccttatccgaatgctgctccgagaaatcaaaaatgatcgtggtggagaagacccaaaccagaaagtaatccatggggttattaactcctttgttcatgttgaacagtataagaaaaaattccccttaaagttttatcaggaaatttttgagtctccctttctgactgaaacaggagagtattacaaacaagaagcttcaaatttattacaagaatcaaactgctcacagtatatggaaaaggttctaggtagattaaaagatgaagaaattcgatgtcgaaaatacctacatccaagttcatatactaaggtgattcatgaatgtcaacaacgaatggtagcagaccacttacagtttttacatgcagaatgtcataatataattcgacaagagaaaaaaaatgacatggcaaatatgtacgtcttactccgtgctgtgtccactggtttacctcatatgattcaggagctgcaaaaccacatccatgatgagggccttcgagcaaccagcaaccttactcaggaaaacatgccaacactatttgtggagtcagttttggaagtgcatggtaaatttgttcagcttatcaacactgttttgaatggtgatcagcattttatgagtgcgttggataaggcccttacgtcagttgtaaattacagagaacctaagtctgtttgcaaagcacctgaactgcttgctaagtactgtgacaacttactgaagaagtcagcgaaagggatgacagagaatgaagtggaagacaggctcacgagcttcatcacagtgttcaaatacattgatgacaaggacgtctttcaaaagttctacgcaagaatgctggcaaaacgtttaattcatgggttatccatgtctatggactctgaagaagccatgatcaacaaattaaagcaagcctgtggttatgagtttaccagcaagctacatcggatgtatacagatatgagtgtcagcgctgatctcaacaataagttcaacaattttatcaaaaaccaagacacagtaatagatttgggaattagttttcaaatatatgttctacaggctggtgcgtggcctcttactcaggctccttcatctacgtttgcaattccccaggaattagaaaaaagtgtacagatgtttgaattattttatagccaacatttcagtggaaggaaacttacatggttacattatctgtgtacaggtgaagttaaaatgaactatttgggcaaaccatatgtagccatggttacaacataccaaatggcagttcttcttgcctttaacaacagtgaaactgtcagttataaagagcttcaggacagcactcagatgaatgaaaaggaactgacaaaaacaatcaaatcattacttgatgtgaaaatgattaaccatgattcagaaaaggaagatattgatgcagaatcttcattttcattaaatatgaactttagcagtaaaagaacaaaatttaaaattactacatcaatgcagaaagacacaccacaagaaatggagcagactagaagtgcagttgatgaggaccggaaaatgtatctccaagctgctatagttcgtatcatgaaagcacgaaaagtgcttcggcacaatgcccttattcaagaggtgattagccagtcaagagctaggtttaatcccagtatcagcatgattaagaagtgtattgaagttctgatagacaaacaatacatagaacgcagccaggcgtcggcagatgaatacagctacgtcgcgtgatgtcgctctcctccagcgtggtgtgagaagatcattgccatcaccatttggtgtgttcctgtgggaaaaagcaggactgtgcctccataatttggtcatttggcagcccctgttttctgctgtttacaacatcaccagtgccacgtcatgagcgtcaaagaaaatgcctagagatatttcaagctcatgtcattatgacatttcttaaaactttattaaaagaatgagtgaagtattgctgaaaagtggaaattcggttgggtaccatgctttttctccccttcacgtttgcagttgatgtgtctttttttttttttttaatgtatcttaaaggacataaaatttaaaaacttaaatattgtaatatgacagataacctaataattgtatctacattaaaatgacaaacatgatactgctgcttgtcaaataaaaaaaaaataaagaaatagaatgccttttttatgtggatggagtatcaggttgaccacaaaatatattgactcaaagcagctaatgcatctttagttgcgtttttatctgaatggtttaattcacttgtactcctatttaaatcctacatgaaaaatgtctagattattgttcttgactgcataggactgcattcagcataaagaatgctttatttttatggattagatatattggatctaaacattttgaatcttgaagatgtaattccatcagcagtttctggtggtgtgctactccacagacatcgcagagtgtgagcaggatgcttggtgacctcaagtctggcacagagagagcttttcattcaaaagttgtctttcttcggttgcataatccattaattctagcatagactagtaccctagctctgtggccttccctgagtcttaggaaatctatgataccaacatattccttctatatgcctcccctacctgttacccttacaaccctcctccaacagtttagatactagagtcactctcatcaatcacagatgtgcttagcaatgcataacctaaatacttttttaaaaaagaaaattgtacattgtactgggtgccacatatataaatcccattattttgtttattttatatatatatatatatataatatatatatatatatatctcaacagcagtgttaagagtactgcgatctattatccatatttattgtctatccacaccatcaccaccaccaccacacccctcctccctcaacatacaatttttctttattttaaaaaaaataagagacggggtttcgccatgtttcccaggctagtctggaacttctggcctcaagcaatcctatctctgtctcccaaagtgctgggattacaagcatgagccactgcatccatccaacacaaaatttttaaaatcggaatattttaaagcaaatcacacaaattatttcacttataatacttcagtaaggcctttaaaaaatccacagtgatattattactcctaacaaaaacaataattacttagtatcatctaatatgtggttcatatttaaatttgttgttttgagatgggtcttacaattggtttattcaattgcattttttctaactcgtgtctcaagtgttttaaaaatctactgaacttataatgacttatataatgtatttctcattttacctttcttccaaaagaggaaataatggcaaaccatataatattgtacattcactgtcaaaaagcaaacccttgttttgataacttgttgattgataaaagttttccaaa

SEQ ID NO: 362594 - DNA, 4077 bp, Homo sapiens
attcgcagtggtcgcttcttctccttggatttgttaaggattccaagtaactcttatttgatttcaacactacacttgcacaatgtctttgaaaccaagagtagtagattttgatgaaacatggaacaaacttttgacgacaataaaagccgtggtcatgttggaatacgtcgaaagagcaacatggaatgaccgtttctcagatatctatgctttatgtgtggcctatcctgaaccccttggagaaagactttatacagaaactaagatttttttggaaaatcatgttcggcatttgcataagagagttttggagtcagaagaacaagtacttgttatgtatcataggtactgggaagaatacagcaagggtgcagactatatggactgcttatataggtatctcaacacccagtttattaaaaagaataaattaacagaagcggaccttcagtatggctatggtggtgtagatatgaatgaaccacttatggaaataggagagctagcattggatatgtggaggaaattgatggttgaaccacttcaggccatccttatccgaatgctgctccgagaaatcaaaaatgatcgtggtggagaagacccaaaccagaaagtaatccatggggttattaactcctttgttcatgttgaacagtataagaaaaaattccccttaaagttttatcaggaaatttttgagtctccctttctgactgaaacaggagagtattacaaacaagaagcttcaaatttattacaagaatcaaactgctcacagtatatggaaaaggttctaggtagattaaaagatgaagaaattcgatgtcgaaaatacctacatccaagttcatatactaaggtgattcatgaatgtcaacaacgaatggtagcagaccacttacagtttttacatgcagaatgtcataatataattcgacaagagaaaaaaaatgacatggcaaatatgtacgtcttactccgtgctgtgtccactggtttacctcatatgattcaggagctgcaaaaccacatccatgatgagggccttcgagcaaccagcaaccttactcaggaaaacatgccaacactatttgtggagtcagttttggaagtgcatggtaaatttgttcagcttatcaacactgttttgaatggtgatcagcattttatgagtgcgttggataaggcccttacgtcagttgtaaattacagagaacctaagtctgtttgcaaagcacctgaactgcttgctaagtactgtgacaacttactgaagaagtcagcgaaagggatgacagagaatgaagtggaagacaggctcacgagcttcatcacagtgttcaaatacattgatgacaaggacgtctttcaaaagttctacgcaagaatgctggcaaaacgtttaattcatgggttatccatgtctatggactctgaagaagccatgatcaacaaattaaagcaagcctgtggttatgagtttaccagcaagctacatcggatgtatacagatatgagtgtcagcgctgatctcaacaataagttcaacaattttatcaaaaaccaagacacagtaatagatttgggaattagttttcaaatatatgttctacaggctggtgcgtggcctcttactcaggctccttcatctacgtttgcaattccccaggaattagaaaaaagtgtacagatgtttgaattattttatagccaacatttcagtggaaggaaacttacatggttacattatctgtgtacaggtgaagttaaaatgaactatttgggcaaaccatatgtagccatggttacaacataccaaatggcagttcttcttgcctttaacaacagtgaaactgtcagttataaagagcttcaggacagcactcagatgaatgaaaaggaactgacaaaaacaatcaaatcattacttgatgtgaaaatgattaaccatgattcagaaaaggaagatattgatgcagaatcttcattttcattaaatatgaactttagcagtaaaagaacaaaatttaaaattactacatcaatgcagaaagacacaccacaagaaatggagcagactagaagtgcagttgatgaggaccggaaaatgtatctccaagctgctatagttcgtatcatgaaagcacgaaaagtgcttcggcacaatgcccttattcaagaggtgattagccagtcaagagctaggtttaatcccagtatcagcatgattaagaagtgtattgaagttctgatagacaaacaatacatagaacgcagccaggcgtcggcagatgaatacagctacgtcgcgtgatgtcgctctcctccagcgtggtgtgagaagatcattgccatcaccatttggtgtgttcctgtgggaaaaagcaggactgtgcctccataatttggtcatttggcagcccctgttttctgctgtttacaacatcaccagtgccacgtcatgagcgtcaaagaaaatgcctagagatatttcaagctcatgtcattatgacatttcttaaaactttattaaaagaatgagtgaagtattgctgaaaagtggaaattcggttgggtaccatgctttttctccccttcacgtttgcagttgatgtgtctttttttttttttttaatgtatcttaaaggacataaaatttaaaaacttaaatattgtaatatgacagataacctaataattgtatctacattaaaatgacaaacatgatactgctgcttgtcaaataaaaaaaaaataaagaaatagaatgccttttttatgtggatggagtatcaggttgaccacaaaatatattgactcaaagcagctaatgcatctttagttgcgtttttatctgaatggtttaattcacttgtactcctatttaaatcctacatgaaaaatgtctagattattgttcttgactgcataggactgcattcagcataaagaatgctttatttttatggattagatatattggatctaaacattttgaatcttgaagatgtaattccatcagcagtttctggtggtgtgctactccacagacatcgcagagtgtgagcaggatgcttggtgacctcaagtctggcacagagagagcttttcattcaaaagttgtctttcttcggttgcataatccattaattctagcatagactagtaccctagctctgtggccttccctgagtcttaggaaatctatgataccaacatattccttctatatgcctcccctacctgttacccttacaaccctcctccaacagtttagatactagagtcactctcatcaatcacagatgtgcttagcaatgcataacctaaatacttttttaaaaaagaaaattgtacattgtactgggtgccacatatataaatcccattattttgtttattttatatatatatatatatataatatatatatatatatatctcaacagcagtgttaagagtactgcgatctattatccatatttattgtctatccacaccatcaccaccaccaccacacccctcctccctcaacatacaatttttctttattttaaaaaaaataagagacggggtttcgccatgtttcccaggctagtctggaacttctggcctcaagcaatcctatctctgtctcccaaagtgctgggattacaagcatgagccactgcatccatccaacacaaaatttttaaaatcggaatattttaaagcaaatcacacaaattatttcacttataatacttcagtaaggcctttaaaaaatccacagtgatattattactcctaacaaaaacaataattacttagtatcatctaatatgtggttcatatttaaatttgttgttttgagatgggtcttacaattggtttattcaattgcattttttctaactcgtgtctcaagtgttttaaaaatctactgaacttataatgacttatataatgtatttctcattttacctttcttccaaaagaggaaataatggcaaaccatataatattgtacattcactgtcaaaaagcaaacccttgttttgataacttgttgattgataaaagttttccaaa

SEQ ID NO: 362595 - DNA, 4589 bp, Homo sapiens
tccctgccgaccccggaccaaaagtagcgctgcagccgaccgaaccgcgtcctcccgccccgtcctcccctcccccacgccgggacggcctcccgggggaggccccgaggaaaaaaatccaggctcgaactccgccccctgccggccgccagcaggagtgaagcgccacaatccaacaatgaaatggaaccggggaggggcggcgggaaggttatagtgccatcatgtggatactttgttttcttcaaataaaatgtaacctttttataacagagactagaaaacccagccatcccaacacccaggctgtgcaaagaaattggggccaaacgtttttttgccatgttctgaaaaggatagaggcactctccattcctgattgttccaaggctcaagtggtcagaaatgactgggaagaagggagaaaaactcaggtggcaaaggacatggacgaaaacccatggcgacatggaaagaaaaccctgtgatatagagaggaaaagcacaggacagcttattggggagaatggaactcttctgtatcctgattgcggtgatggccacgcatggctatttcaacactacacttgcacaatgtctttgaaaccaagagtagtagattttgatgaaacatggaacaaacttttgacgacaataaaagccgtggtcatgttggaatacgtcgaaagagcaacatggaatgaccgtttctcagatatctatgctttatgtgtggcctatcctgaaccccttggagaaagactttatacagaaactaagatttttttggaaaatcatgttcggcatttgcataagagagttttggagtcagaagaacaagtacttgttatgtatcataggtactgggaagaatacagcaagggtgcagactatatggactgcttatataggtatctcaacacccagtttattaaaaagaataaattaacagaagcggaccttcagtatggctatggtggtgtagatatgaatgaaccacttatggaaataggagagctagcattggatatgtggaggaaattgatggttgaaccacttcaggccatccttatccgaatgctgctccgagaaatcaaaaatgatcgtggtggagaagacccaaaccagaaagtaatccatggggttattaactcctttgttcatgttgaacagtataagaaaaaattccccttaaagttttatcaggaaatttttgagtctccctttctgactgaaacaggagagtattacaaacaagaagcttcaaatttattacaagaatcaaactgctcacagtatatggaaaaggttctaggtagattaaaagatgaagaaattcgatgtcgaaaatacctacatccaagttcatatactaaggtgattcatgaatgtcaacaacgaatggtagcagaccacttacagtttttacatgcagaatgtcataatataattcgacaagagaaaaaaaatgacatggcaaatatgtacgtcttactccgtgctgtgtccactggtttacctcatatgattcaggagctgcaaaaccacatccatgatgagggccttcgagcaaccagcaaccttactcaggaaaacatgccaacactatttgtggagtcagttttggaagtgcatggtaaatttgttcagcttatcaacactgttttgaatggtgatcagcattttatgagtgcgttggataaggcccttacgtcagttgtaaattacagagaacctaagtctgtttgcaaagcacctgaactgcttgctaagtactgtgacaacttactgaagaagtcagcgaaagggatgacagagaatgaagtggaagacaggctcacgagcttcatcacagtgttcaaatacattgatgacaaggacgtctttcaaaagttctacgcaagaatgctggcaaaacgtttaattcatgggttatccatgtctatggactctgaagaagccatgatcaacaaattaaagcaagcctgtggttatgagtttaccagcaagctacatcggatgtatacagatatgagtgtcagcgctgatctcaacaataagttcaacaattttatcaaaaaccaagacacagtaatagatttgggaattagttttcaaatatatgttctacaggctggtgcgtggcctcttactcaggctccttcatctacgtttgcaattccccaggaattagaaaaaagtgtacagatgtttgaattattttatagccaacatttcagtggaaggaaacttacatggttacattatctgtgtacaggtgaagttaaaatgaactatttgggcaaaccatatgtagccatggttacaacataccaaatggcagttcttcttgcctttaacaacagtgaaactgtcagttataaagagcttcaggacagcactcagatgaatgaaaaggaactgacaaaaacaatcaaatcattacttgatgtgaaaatgattaaccatgattcagaaaaggaagatattgatgcagaatcttcattttcattaaatatgaactttagcagtaaaagaacaaaatttaaaattactacatcaatgcagaaagacacaccacaagaaatggagcagactagaagtgcagttgatgaggaccggaaaatgtatctccaagctgctatagttcgtatcatgaaagcacgaaaagtgcttcggcacaatgcccttattcaagaggtgattagccagtcaagagctaggtttaatcccagtatcagcatgattaagaagtgtattgaagttctgatagacaaacaatacatagaacgcagccaggcgtcggcagatgaatacagctacgtcgcgtgatgtcgctctcctccagcgtggtgtgagaagatcattgccatcaccatttggtgtgttcctgtgggaaaaagcaggactgtgcctccataatttggtcatttggcagcccctgttttctgctgtttacaacatcaccagtgccacgtcatgagcgtcaaagaaaatgcctagagatatttcaagctcatgtcattatgacatttcttaaaactttattaaaagaatgagtgaagtattgctgaaaagtggaaattcggttgggtaccatgctttttctccccttcacgtttgcagttgatgtgtctttttttttttttttaatgtatcttaaaggacataaaatttaaaaacttaaatattgtaatatgacagataacctaataattgtatctacattaaaatgacaaacatgatactgctgcttgtcaaataaaaaaaaaataaagaaatagaatgccttttttatgtggatggagtatcaggttgaccacaaaatatattgactcaaagcagctaatgcatctttagttgcgtttttatctgaatggtttaattcacttgtactcctatttaaatcctacatgaaaaatgtctagattattgttcttgactgcataggactgcattcagcataaagaatgctttatttttatggattagatatattggatctaaacattttgaatcttgaagatgtaattccatcagcagtttctggtggtgtgctactccacagacatcgcagagtgtgagcaggatgcttggtgacctcaagtctggcacagagagagcttttcattcaaaagttgtctttcttcggttgcataatccattaattctagcatagactagtaccctagctctgtggccttccctgagtcttaggaaatctatgataccaacatattccttctatatgcctcccctacctgttacccttacaaccctcctccaacagtttagatactagagtcactctcatcaatcacagatgtgcttagcaatgcataacctaaatacttttttaaaaaagaaaattgtacattgtactgggtgccacatatataaatcccattattttgtttattttatatatatatatatatataatatatatatatatatatctcaacagcagtgttaagagtactgcgatctattatccatatttattgtctatccacaccatcaccaccaccaccacacccctcctccctcaacatacaatttttctttattttaaaaaaaataagagacggggtttcgccatgtttcccaggctagtctggaacttctggcctcaagcaatcctatctctgtctcccaaagtgctgggattacaagcatgagccactgcatccatccaacacaaaatttttaaaatcggaatattttaaagcaaatcacacaaattatttcacttataatacttcagtaaggcctttaaaaaatccacagtgatattattactcctaacaaaaacaataattacttagtatcatctaatatgtggttcatatttaaatttgttgttttgagatgggtcttacaattggtttattcaattgcattttttctaactcgtgtctcaagtgttttaaaaatctactgaacttataatgacttatataatgtatttctcattttacctttcttccaaaagaggaaataatggcaaaccatataatattgtacattcactgtcaaaaagcaaacccttgttttgataacttgttgattgataaaagttttccaaa

SEQ ID NO: 362596 - DNA, 4157 bp, Homo sapiens
agatggtatcctgtaagtgacctcggctccccagagcgctgacccgtaagccctgccaccccctggactggatcccgggcctccccaacccgatcttggccgcctctcccgcggccccattttccttcgaaggagggaagatttcaacactacacttgcacaatgtctttgaaaccaagagtagtagattttgatgaaacatggaacaaacttttgacgacaataaaagccgtggtcatgttggaatacgtcgaaagagcaacatggaatgaccgtttctcagatatctatgctttatgtgtggcctatcctgaaccccttggagaaagactttatacagaaactaagatttttttggaaaatcatgttcggcatttgcataagagagttttggagtcagaagaacaagtacttgttatgtatcataggtactgggaagaatacagcaagggtgcagactatatggactgcttatataggtatctcaacacccagtttattaaaaagaataaattaacagaagcggaccttcagtatggctatggtggtgtagatatgaatgaaccacttatggaaataggagagctagcattggatatgtggaggaaattgatggttgaaccacttcaggccatccttatccgaatgctgctccgagaaatcaaaaatgatcgtggtggagaagacccaaaccagaaagtaatccatggggttattaactcctttgttcatgttgaacagtataagaaaaaattccccttaaagttttatcaggaaatttttgagtctccctttctgactgaaacaggagagtattacaaacaagaagcttcaaatttattacaagaatcaaactgctcacagtatatggaaaaggttctaggtagattaaaagatgaagaaattcgatgtcgaaaatacctacatccaagttcatatactaaggtgattcatgaatgtcaacaacgaatggtagcagaccacttacagtttttacatgcagaatgtcataatataattcgacaagagaaaaaaaatgacatggcaaatatgtacgtcttactccgtgctgtgtccactggtttacctcatatgattcaggagctgcaaaaccacatccatgatgagggccttcgagcaaccagcaaccttactcaggaaaacatgccaacactatttgtggagtcagttttggaagtgcatggtaaatttgttcagcttatcaacactgttttgaatggtgatcagcattttatgagtgcgttggataaggcccttacgtcagttgtaaattacagagaacctaagtctgtttgcaaagcacctgaactgcttgctaagtactgtgacaacttactgaagaagtcagcgaaagggatgacagagaatgaagtggaagacaggctcacgagcttcatcacagtgttcaaatacattgatgacaaggacgtctttcaaaagttctacgcaagaatgctggcaaaacgtttaattcatgggttatccatgtctatggactctgaagaagccatgatcaacaaattaaagcaagcctgtggttatgagtttaccagcaagctacatcggatgtatacagatatgagtgtcagcgctgatctcaacaataagttcaacaattttatcaaaaaccaagacacagtaatagatttgggaattagttttcaaatatatgttctacaggctggtgcgtggcctcttactcaggctccttcatctacgtttgcaattccccaggaattagaaaaaagtgtacagatgtttgaattattttatagccaacatttcagtggaaggaaacttacatggttacattatctgtgtacaggtgaagttaaaatgaactatttgggcaaaccatatgtagccatggttacaacataccaaatggcagttcttcttgcctttaacaacagtgaaactgtcagttataaagagcttcaggacagcactcagatgaatgaaaaggaactgacaaaaacaatcaaatcattacttgatgtgaaaatgattaaccatgattcagaaaaggaagatattgatgcagaatcttcattttcattaaatatgaactttagcagtaaaagaacaaaatttaaaattactacatcaatgcagaaagacacaccacaagaaatggagcagactagaagtgcagttgatgaggaccggaaaatgtatctccaagctgctatagttcgtatcatgaaagcacgaaaagtgcttcggcacaatgcccttattcaagaggtgattagccagtcaagagctaggtttaatcccagtatcagcatgattaagaagtgtattgaagttctgatagacaaacaatacatagaacgcagccaggcgtcggcagatgaatacagctacgtcgcgtgatgtcgctctcctccagcgtggtgtgagaagatcattgccatcaccatttggtgtgttcctgtgggaaaaagcaggactgtgcctccataatttggtcatttggcagcccctgttttctgctgtttacaacatcaccagtgccacgtcatgagcgtcaaagaaaatgcctagagatatttcaagctcatgtcattatgacatttcttaaaactttattaaaagaatgagtgaagtattgctgaaaagtggaaattcggttgggtaccatgctttttctccccttcacgtttgcagttgatgtgtctttttttttttttttaatgtatcttaaaggacataaaatttaaaaacttaaatattgtaatatgacagataacctaataattgtatctacattaaaatgacaaacatgatactgctgcttgtcaaataaaaaaaaaataaagaaatagaatgccttttttatgtggatggagtatcaggttgaccacaaaatatattgactcaaagcagctaatgcatctttagttgcgtttttatctgaatggtttaattcacttgtactcctatttaaatcctacatgaaaaatgtctagattattgttcttgactgcataggactgcattcagcataaagaatgctttatttttatggattagatatattggatctaaacattttgaatcttgaagatgtaattccatcagcagtttctggtggtgtgctactccacagacatcgcagagtgtgagcaggatgcttggtgacctcaagtctggcacagagagagcttttcattcaaaagttgtctttcttcggttgcataatccattaattctagcatagactagtaccctagctctgtggccttccctgagtcttaggaaatctatgataccaacatattccttctatatgcctcccctacctgttacccttacaaccctcctccaacagtttagatactagagtcactctcatcaatcacagatgtgcttagcaatgcataacctaaatacttttttaaaaaagaaaattgtacattgtactgggtgccacatatataaatcccattattttgtttattttatatatatatatatatataatatatatatatatatatctcaacagcagtgttaagagtactgcgatctattatccatatttattgtctatccacaccatcaccaccaccaccacacccctcctccctcaacatacaatttttctttattttaaaaaaaataagagacggggtttcgccatgtttcccaggctagtctggaacttctggcctcaagcaatcctatctctgtctcccaaagtgctgggattacaagcatgagccactgcatccatccaacacaaaatttttaaaatcggaatattttaaagcaaatcacacaaattatttcacttataatacttcagtaaggcctttaaaaaatccacagtgatattattactcctaacaaaaacaataattacttagtatcatctaatatgtggttcatatttaaatttgttgttttgagatgggtcttacaattggtttattcaattgcattttttctaactcgtgtctcaagtgttttaaaaatctactgaacttataatgacttatataatgtatttctcattttacctttcttccaaaagaggaaataatggcaaaccatataatattgtacattcactgtcaaaaagcaaacccttgttttgataacttgttgattgataaaagttttccaaa

SEQ ID NO: 362597 - DNA, 4185 bp, Homo sapiens
accattgctttccgggtggcgggggggatttggcagcagcggaagaaggagaccggagggtgtgtgttgggcaaagccggaggcagaggaggacgattgttttacggatcccgtgatcggcccgtccttctcccctttccccccctccctaccgcccctgtcccgccggggagcggcggcggccttggactttgctgtctttcctcgcggagacagatttcaacactacacttgcacaatgtctttgaaaccaagagtagtagattttgatgaaacatggaacaaacttttgacgacaataaaagccgtggtcatgttggaatacgtcgaaagagcaacatggaatgaccgtttctcagatatctatgctttatgtgtggcctatcctgaaccccttggagaaagactttatacagaaactaagatttttttggaaaatcatgttcggcatttgcataagagagttttggagtcagaagaacaagtacttgttatgtatcataggtactgggaagaatacagcaagggtgcagactatatggactgcttatataggtatctcaacacccagtttattaaaaagaataaattaacagaagcggaccttcagtatggctatggtggtgtagatatgaatgaaccacttatggaaataggagagctagcattggatatgtggaggaaattgatggttgaaccacttcaggccatccttatccgaatgctgctccgagaaatcaaaaatgatcgtggtggagaagacccaaaccagaaagtaatccatggggttattaactcctttgttcatgttgaacagtataagaaaaaattccccttaaagttttatcaggaaatttttgagtctccctttctgactgaaacaggagagtattacaaacaagaagcttcaaatttattacaagaatcaaactgctcacagtatatggaaaaggttctaggtagattaaaagatgaagaaattcgatgtcgaaaatacctacatccaagttcatatactaaggtgattcatgaatgtcaacaacgaatggtagcagaccacttacagtttttacatgcagaatgtcataatataattcgacaagagaaaaaaaatgacatggcaaatatgtacgtcttactccgtgctgtgtccactggtttacctcatatgattcaggagctgcaaaaccacatccatgatgagggccttcgagcaaccagcaaccttactcaggaaaacgttcagcttatcaacactgttttgaatggtgatcagcattttatgagtgcgttggataaggcccttacgtcagttgtaaattacagagaacctaagtctgtttgcaaagcacctgaactgcttgctaagtactgtgacaacttactgaagaagtcagcgaaagggatgacagagaatgaagtggaagacaggctcacgagcttcatcacagtgttcaaatacattgatgacaaggacgtctttcaaaagttctacgcaagaatgctggcaaaacgtttaattcatgggttatccatgtctatggactctgaagaagccatgatcaacaaattaaagcaagcctgtggttatgagtttaccagcaagctacatcggatgtatacagatatgagtgtcagcgctgatctcaacaataagttcaacaattttatcaaaaaccaagacacagtaatagatttgggaattagttttcaaatatatgttctacaggctggtgcgtggcctcttactcaggctccttcatctacgtttgcaattccccaggaattagaaaaaagtgtacagatgtttgaattattttatagccaacatttcagtggaaggaaacttacatggttacattatctgtgtacaggtgaagttaaaatgaactatttgggcaaaccatatgtagccatggttacaacataccaaatggcagttcttcttgcctttaacaacagtgaaactgtcagttataaagagcttcaggacagcactcagatgaatgaaaaggaactgacaaaaacaatcaaatcattacttgatgtgaaaatgattaaccatgattcagaaaaggaagatattgatgcagaatcttcattttcattaaatatgaactttagcagtaaaagaacaaaatttaaaattactacatcaatgcagaaagacacaccacaagaaatggagcagactagaagtgcagttgatgaggaccggaaaatgtatctccaagctgctatagttcgtatcatgaaagcacgaaaagtgcttcggcacaatgcccttattcaagaggtgattagccagtcaagagctaggtttaatcccagtatcagcatgattaagaagtgtattgaagttctgatagacaaacaatacatagaacgcagccaggcgtcggcagatgaatacagctacgtcgcgtgatgtcgctctcctccagcgtggtgtgagaagatcattgccatcaccatttggtgtgttcctgtgggaaaaagcaggactgtgcctccataatttggtcatttggcagcccctgttttctgctgtttacaacatcaccagtgccacgtcatgagcgtcaaagaaaatgcctagagatatttcaagctcatgtcattatgacatttcttaaaactttattaaaagaatgagtgaagtattgctgaaaagtggaaattcggttgggtaccatgctttttctccccttcacgtttgcagttgatgtgtctttttttttttttttaatgtatcttaaaggacataaaatttaaaaacttaaatattgtaatatgacagataacctaataattgtatctacattaaaatgacaaacatgatactgctgcttgtcaaataaaaaaaaaataaagaaatagaatgccttttttatgtggatggagtatcaggttgaccacaaaatatattgactcaaagcagctaatgcatctttagttgcgtttttatctgaatggtttaattcacttgtactcctatttaaatcctacatgaaaaatgtctagattattgttcttgactgcataggactgcattcagcataaagaatgctttatttttatggattagatatattggatctaaacattttgaatcttgaagatgtaattccatcagcagtttctggtggtgtgctactccacagacatcgcagagtgtgagcaggatgcttggtgacctcaagtctggcacagagagagcttttcattcaaaagttgtctttcttcggttgcataatccattaattctagcatagactagtaccctagctctgtggccttccctgagtcttaggaaatctatgataccaacatattccttctatatgcctcccctacctgttacccttacaaccctcctccaacagtttagatactagagtcactctcatcaatcacagatgtgcttagcaatgcataacctaaatacttttttaaaaaagaaaattgtacattgtactgggtgccacatatataaatcccattattttgtttattttatatatatatatatatataatatatatatatatatatctcaacagcagtgttaagagtactgcgatctattatccatatttattgtctatccacaccatcaccaccaccaccacacccctcctccctcaacatacaatttttctttattttaaaaaaaataagagacggggtttcgccatgtttcccaggctagtctggaacttctggcctcaagcaatcctatctctgtctcccaaagtgctgggattacaagcatgagccactgcatccatccaacacaaaatttttaaaatcggaatattttaaagcaaatcacacaaattatttcacttataatacttcagtaaggcctttaaaaaatccacagtgatattattactcctaacaaaaacaataattacttagtatcatctaatatgtggttcatatttaaatttgttgttttgagatgggtcttacaattggtttattcaattgcattttttctaactcgtgtctcaagtgttttaaaaatctactgaacttataatgacttatataatgtatttctcattttacctttcttccaaaagaggaaataatggcaaaccatataatattgtacattcactgtcaaaaagcaaacccttgttttgataacttgttgattgataaaagttttccaaa

SEQ ID NO: 362598 - DNA, 2150 bp, Homo sapiens
ttttggtttttataaatataaatgttttatttttaaatgtaggaagatattgatgcagaatcttcattttcattaaatatgaactttagcagtaaaagaacaaaatttaaaattactacatcaatgcagaaagacacaccacaagaaatggagcagactagaagtgcagttgatgaggaccggaaaatgtatctccaagctgctatagttcgtatcatgaaagcacgaaaagtgcttcggcacaatgcccttattcaagaggtgattagccagtcaagagctaggtttaatcccagtatcagcatgattaagaagtgtattgaagttctgatagacaaacaatacatagaacgcagccaggcgtcggcagatgaatacagctacgtcgcgtgatgtcgctctcctccagcgtggtgtgagaagatcattgccatcaccatttggtgtgttcctgtgggaaaaagcaggactgtgcctccataatttggtcatttggcagcccctgttttctgctgtttacaacatcaccagtgccacgtcatgagcgtcaaagaaaatgcctagagatatttcaagctcatgtcattatgacatttcttaaaactttattaaaagaatgagtgaagtattgctgaaaagtggaaattcggttgggtaccatgctttttctccccttcacgtttgcagttgatgtgtctttttttttttttttaatgtatcttaaaggacataaaatttaaaaacttaaatattgtaatatgacagataacctaataattgtatctacattaaaatgacaaacatgatactgctgcttgtcaaataaaaaaaaaataaagaaatagaatgccttttttatgtggatggagtatcaggttgaccacaaaatatattgactcaaagcagctaatgcatctttagttgcgtttttatctgaatggtttaattcacttgtactcctatttaaatcctacatgaaaaatgtctagattattgttcttgactgcataggactgcattcagcataaagaatgctttatttttatggattagatatattggatctaaacattttgaatcttgaagatgtaattccatcagcagtttctggtggtgtgctactccacagacatcgcagagtgtgagcaggatgcttggtgacctcaagtctggcacagagagagcttttcattcaaaagttgtctttcttcggttgcataatccattaattctagcatagactagtaccctagctctgtggccttccctgagtcttaggaaatctatgataccaacatattccttctatatgcctcccctacctgttacccttacaaccctcctccaacagtttagatactagagtcactctcatcaatcacagatgtgcttagcaatgcataacctaaatacttttttaaaaaagaaaattgtacattgtactgggtgccacatatataaatcccattattttgtttattttatatatatatatatatataatatatatatatatatatctcaacagcagtgttaagagtactgcgatctattatccatatttattgtctatccacaccatcaccaccaccaccacacccctcctccctcaacatacaatttttctttattttaaaaaaaataagagacggggtttcgccatgtttcccaggctagtctggaacttctggcctcaagcaatcctatctctgtctcccaaagtgctgggattacaagcatgagccactgcatccatccaacacaaaatttttaaaatcggaatattttaaagcaaatcacacaaattatttcacttataatacttcagtaaggcctttaaaaaatccacagtgatattattactcctaacaaaaacaataattacttagtatcatctaatatgtggttcatatttaaatttgttgttttgagatgggtcttacaattggtttattcaattgcattttttctaactcgtgtctcaagtgttttaaaaatctactgaacttataatgacttatataatgtatttctcattttacctttcttccaaaagaggaaataatggcaaaccatataatattgtacattcactgtcaaaaagcaaacccttgttttgataacttgttgattgataaaagttttccaaa

SEQ ID NO: 362599 - DNA, 2354 bp, Homo sapiens
accattgctttccgggtggcgggggggatttggcagcagcggaagaaggagaccggagggtgtgtgttgggcaaagccggaggcagaggaggacgattgttttacggatcccgtgatcggcccgtccttctcccctttccccccctccctaccgcccctgtcccgccggggagcggcggcggccttggactttgctgtctttcctcgcggagacagatttcaacactacacttgcacaatgtctttgaaaccaagagtagtagattttgatgaaacatggaacaaacttttgacgacaataaaagccgtggtcatgttggaatacgtcgaaagagcaacatggaatgaccgtttctcagatatctatgctttatgtgtggcctatcctgaaccccttggagaaagactttatacagaaactaagatttttttggaaaatcatgttcggcatttgcataagagagttttggagtcagaagaacaagtacttgttatgtatcataggtactgggaagaatacagcaagggtgcagactatatggactgcttatataggtatctcaacacccagtttattaaaaagaataaattaacagaagcggaccttcagtatggctatggtggtgtagatatgaatgaaccacttatggaaataggagagctagcattggatatgtggaggaaattgatggttgaaccacttcaggccatccttatccgaatgctgctccgagaaatcaaaaatgatcgtggtggagaagacccaaaccagaaagtaatccatggggttattaactcctttgttcatgttgaacagtataagaaaaaattccccttaaagttttatcaggaaatttttgagtctccctttctgactgaaacaggagagtattacaaacaagaagcttcaaatttattacaagaatcaaactgctcacagtatatggaaaaggttctaggtagattaaaagatgaagaaattcgatgtcgaaaatacctacatccaagttcatatactaaggtgattcatgaatgtcaacaacgaatggtagcagaccacttacagtttttacatgcagaatgtcataatataattcgacaagagaaaaaaaatgacatggcaaatatgtacgtcttactccgtgctgtgtccactggtttacctcatatgattcaggagctgcaaaaccacatccatgatgagggccttcgagcaaccagcaaccttactcaggaaaacatgccaacactatttgtggagtcagttttggaagtgcatggtaaatttgttcagcttatcaacactgttttgaatggtgatcagcattttatgagtgcgttggataaggcccttacgtcagttgtaaattacagagaacctaagtctgtttgcaaagcacctgaactgcttgctaagtactgtgacaacttactgaagaagtcagcgaaagggatgacagagaatgaagtggaagacaggctcacgagcttcatcacagtgttcaaatacattgatgacaaggacgtctttcaaaagttctacgcaagaatgctggcaaaacgtttaattcatgggttatccatgtctatggactctgaagaagccatgatcaacaaattaaagcaagcctgtggttatgagtttaccagcaagctacatcggatgtatacagatatgagtgtcagcgctgatctcaacaataagttcaacaattttatcaaaaaccaagacacagtaatagatttgggaattagttttcaaatatatgttctacaggctggtgcgtggcctcttactcaggctccttcatctacgtttgcaattccccaggaattagaaaaaagtgtacagatgtttgaattattttatagccaacatttcagtggaaggaaacttacatggttacattatctgtgtacaggtgaagttaaaatgaactatttgggcaaaccatatgtagccatggttacaacataccaaatggcagttcttcttgcctttaacaacagtgaaactgtcagttataaagagcttcaggacagcactcagatgaatgaaaaggaactgacaaaaacaatcaaatcattacttgatgtgaaaatgattaaccatgattcagaaaaggaagatattgatgcagaatcttcattttcattaaatatgaactttagcagtaaaagaacaaaatttaaaattactacatcaatgcagaaagacacaccacaacaaatggaacagagctagaagtgcagttgatgtgtagaggataacctatggccaacaacaaatagttaggatcatcaaagcacggagagtccctcggcgcgaaccatatagtacaaagatgataagc

SEQ ID NO: 362600 - DNA, 777 bp, Homo sapiens
tgggttccggaccctgccggggcggcggggcgggcaccgcccgagggggtagggcgcgcgcgggggcgcgccgggccggggaggcgcgctcgctccgcgctcccttcgctcgctcgtttcctcctccctcggcagccgcggccgccgccgccgccgcctccgcccaccttcctcgccggggcttcgtctttcactccttcgggctgcctccccctccccttgtcccctgccccttgccctgcttctgcagaagagcgctgacccgtaagccctgccaccccctggactggatcccgggcctccccaacccgatcttggccgcctctcccgcggccccattttccttcgaaggagggaagatttcaacactacacttgcacaatgtctttgaaaccaagagtagtagattttgatgaaacatggaacaaacttttgacgacaataaaagccgtggtcatgttggaatacgtcgaaagagcaacatggaatgaccgtttctcattcattatctttaccttggagacacttggtggtggtcatcgtactgataagatggcatagctttatcatggaacagtctggagtataaccaccaggaggtcctgacctctgtgttgctctggtgtcattgttcctgtggacaaatgagctgttacctccaaaatgccttgtcacagtagttggaggcagcatatgaaacacctagttcccagaatcataatctaataccgtgtctggccccaaagttataaatgggctttgccttaagtcttatct

SEQ ID NO: 362601 - DNA, 693 bp, Homo sapiens
tccctgccgaccccggaccaaaagtagcgctgcagccgaccgaaccgcgtcctcccgccccgtcctcccctcccccacgccgggacggcctcccgggggaggccccgaggaaaaaaatccaggctcgaactccgccccctgccggccgccagcaggagtgaagcgccacaatccaacaatgaaatggaaccggggaggggcggcgggaaggttatagtgccatcatgtggatactttgttttcttcaaataaaatgtaacctttttataacagagactagaaaacccagccatcccaacacccaggctgtgcaaagaaattggggccaaacgtttttttgccatgttctgaaaaggatagaggcactctccattcctgattgttccaaggctcaagtggtcagaaatgactgggaagaagggagaaaaactcaggtggcaaaggacatggacgaaaacccatggcgacatggaaagaaaaccctgtgatatagagaggaaaagcacaggacagcttattggggagaatggaactcttctgtatcctgattgcggtgatggccacgcatggctctttcaaccagaattgtgtaggacagacacaaaaatagcctgttcatctgggcgcacgatcggccctcctatatgagatcagttgggagcttttccccttcagagccggaagcagtgcccc

SEQ ID NO: 362602 - DNA, 570 bp, Homo sapiens
caatgacttgtcagccagagtaacggctgttgtcaggtcttcagggtctcgaggttatagtgccatcatgtggatactttgttttcttcaaataaaatgtaacctttttataacagagactagaaaacccagccatcccaacacccaggatagaggcactctccattcctgattgttccaaggctcaagtggtcagaaatgactgggaagaagggagaaaaactcaggtggcaaaggacatggacgaaaacccatggcgacatggaaagaaaaccctgtgatatagagaggaaaagcacaggacagcttattggggagaatggaactcttctgtatcctgattgcggtgatggccacgcatggcttagagacgggctttcaccacgttgactaagctagtcttgaactcgtgacctcaggtgatccacctgcctcagcctcgctaagtctaactttcaaccagaattgtctaggagaggcaaagatataacctgttcatctggtaccactatcacccacagaatatgatatgagttctgagcttttccgattaaagaccttgtacttttg

SEQ ID NO: 362603 - DNA, 260 bp, Homo sapiens
gatatttcaagctcatgtcattatgacatttcttaaaactttattaaaagaatgagtgaagtattgctgaaaagtggaaattcggttgggtaccatgctttttctccccttcacgtttgcagttgatgtgtctttttttttttttttaatgtatcttaaaggacataaaatttaaaaacttaaatattgtaatatgacagataacctaataattgtatctacattaaaatgacaaacatgatactgctgcttgtcaaata

SEQ ID NO: 362604 - DNA, 455 bp, Homo sapiens
taaatttggtaatctataatataaaagttatgagagtggaggcttttttgcttggtcattaatttagcagaattgcttgcagcaaactcttatttaaagattttggtttttataaatataaatgttttatttttaaatgtaggaagatattgatgcagaatcttcattttcattaaatatgaactttagcagtaaaagaacaaaatttaaaattactacatcaatgcagaaagacacaccacaagtaagtgcttttaatgtcaagttttttttgagggggaaacatttaagcattggactttacaagtgtttacattgagattgtgcaaaactttgcacagcaaaattaataatgggatatgtcttttctggtttgttgttggcatttattaaccttacagtcaaacagaaatctctacttgtattttagttttttctaaggaaaagggtatggt

SEQ ID NO: 362605 - DNA, 645 bp, Homo sapiens
tcttaatcctacacagcccatacatcagggaatgagtatgctaaagtatatgttctatgatgtctggatgcgtggccatcttactctaagctcctatcatctacgattagcaaatcccctaggcatccgaatacagtgtacagatgtttgaattattttatagccaacatttcagtggaaggaaacttacatggttacattatctgtgtacaggtgaagttaaaatgaactatttgggcaaaccatatgtagccatggttacaacataccaaatggcagttcttcttgcctttaacaacagtgaaactgtcagttataaagagcttcaggacagcactcagatgaatgaaaaggaactgacaaaaacaatcaaatcattacttgatgtgaaaatgattaaccatgattcagaaaaggaagatattgatgcagaatcttcattttcattaaatatgaactttagcagtaaaagaacaaaatttaaaattactacatcaatgcagaaagacacaccacaacaaatggaacagagctagaagtgcagttgatgtgtagaggataacctatggccaacaacaaatagttaggatcatcaaagcacggagagtccctcggcgcgaaccatatagtacaaagatgataagc

SEQ ID NO: 362606 - DNA, 3684 bp, Homo sapiens
accattgctttccgggtggcgggggggatttggcagcagcggaagaaggagaccggagggtgtgtgttgggcaaagccggaggcagaggaggacgattgttttacggatcccgtgatcggcccgtccttctcccctttccccccctccctaccgcccctgtcccgccggggagcggcggcggccttggactttgctgtctttcctcgcggagacagatttcaacactacacttgcacaatgtctttgaaaccaagagtagtagattttgatgaaacatggaacaaacttttgacgacaataaaagccgtggtcatgttggaatacgtcgaaagagcaacatggaatgaccgtttctcagatatctatgctttatgtgtggcctatcctgaaccccttggagaaagactttatacagaaactaagatttttttggaaaatcatgttcggcatttgcataagagagttttggagtcagaagaacaagtacttgttatgtatcataggtactgggaagaatacagcaagggtgcagactatatggactgcttatataggtatctcaacacccagtttattaaaaagaataaattaacagaagcggaccttcagtatggctatggtggtgtagatatgaatgaaccacttatggaaataggagagctagcattggatatgtggaggaaattgatggttgaaccacttcaggccatccttatccgaatgctgctccgagaaatcaaaaatgatcgtggtggagaagacccaaaccagaaagtaatccatggggttattaactcctttgttcatgttgaacagtataagaaaaaattccccttaaagttttatcaggaaatttttgagtctccctttctgactgaaacaggagagtattacaaacaagaagcttcaaatttattacaagaatcaaactgctcacagtatatggaaaaggttctaggtagattaaaagatgaagaaattcgatgtcgaaaatacctacatccaagttcatatactaaggtgattcatgaatgtcaacaacgaatggtagcagaccacttacagtttttacatgcagaatgtcataatataattcgacaagagaaaaaaaatgacatggcaaatatgtacgtcttactccgtgctgtgtccactggtttacctcatatgattcaggagctgcaaaaccacatccatgatgagggccttcgagcaaccagcaaccttactcaggaaaacatgccaacactatttgtggagtcagttttggaagtgcatggtaaatttgttcagcttatcaacactgttttgaatggtgatcagcattttatgagtgcgttggataaggcccttacgtcagttgtaaattacagagaacctaagtctgtttgcaaagcacctgaactgcttgctaagtactgtgacaacttactgaagaagtcagcgaaagggatgacagagaatgaagtggaagacaggctcacgagcttcatcacagtgttcaaatacattgatgacaaggacgtctttcaaaagttctacgcaagaatgctggcaaaacgtttaattcatgggttatccatgtctatggactctgaagaagccatgatcaacaaattaaagcaagcctgtggttatgagtttaccagcaagctacatcggatgtatacagatatgagtgtcagcgctgatctcaacaataagttcaacaattttatcaaaaaccaagacacagtaatagatttgggaattagttttcaaatatatgttctacaggctggtgcgtggcctcttactcaggctccttcatctacgtttgcaattccccaggaattagaaaaaagtgtacagatgtttgaattattttatagccaacatttcagtggaaggaaacttacatggttacattatctgtgtacaggtgaagttaaaatgaactatttgggcaaaccatatgtagccatggttacaacataccaaatggcagttcttcttgcctttaacaacagtgaaactgtcagttataaagagcttcaggacagcactcagatgaatgaaaaggaactgacaaaaacaatcaaatcattacttgatgtgaaaatgattaaccatgattcagaaaaggaagatattgatgcagaatcttcattttcattaaatatgaactttagcagtaaaagaacaaaatttaaaattactacatcaatgcagaaagacacaccacaagaaatggagcagactagaagtgcagttgatgaggaccggaaaatgtatctccaagctgctatagttcgtatcatgaaagcacgaaaagtgcttcggcacaatgcccttattcaagaggtgattagccagtcaagagctaggtttaatcccagtatcagcatgattaagaagtgtattgaagttctgatagacaaacaatacatagaacgcagccaggcgtcggcagatgaatacagctacgtcgcgtgatgtcgctctcctccagcgtggtgtgagaagatcattgccatcaccatttggtgtgttcctgtgggaaaaagcaggactgtgcctccataatttggtcatttggcagcccctgttttctgctgtttacaacatcaccagtgccacgtcatgagcgtcaaagaaaatgcctagagatatttcaagctcatgtcattatgacatttcttaaaactttattaaaagaatgagtgaagtattgctgaaaagtggaaattcggttgggtaccatgctttttctccccttcacgtttgcagttgatgtgtctttttttttttttttaatgtatcttaaaggacataaaatttaaaaacttaaatattgtaatatgacagataacctaataattgtatctacattaaaatgacaaacatgatactgctgcttgtcaaataaaaaaaaaataaagaaatagaatgccttttttatgtggatggagtatcaggttgaccacaaaatatattgactcaaagcagaaaaaaaaaaaaaaaaaaacaaaaaaaaaaaaaacaacaaaaaaacagaaacataaaacaaaaaagaaaagcaaaaagaaaactaacaaatacaaaacaaactgagagagaaggaggggcgcggcgacataaaatgcgacaccatagtagacgtgggcccacaccggaactataacgcgacaaacacgagtgtatcatgaacactaatagggtgctaccgaacagagtgaattgaaaattaagccagcaccagtatgtgatgctgagctacaacgacagaggcttgagaggataaagatatgagtgaaagaatagcacaacctcagagcgaaagtaaacacaatcaagagccacatgatatgaggcgagagaacaacaaaaacagagaacagaagatagaaccaaatacgaactgagagataacattaccattgaccgtctagccagggacccacaatataacaagagtatagtgagcttagcattgacgctaatcgaggagcgctacagacaccacagaggcacagtgcaattaacacgaaactgcggataagaaacagaaaagaaatataagcctctgacaccaacggcagcagtatccatcgaggcaagaccacagcaaacgaggagagaggatacaaaacgcaaaagaataacagtctgcagataagatccaatacatgtcacggcattcc

SEQ ID NO: 362607 - DNA, 4080 bp, Homo sapiens
atggggagaacaggtcaggcgcagtggcccatgcctgtaaccctagcactttgggaggccaagatttcaacactacacttgcacaatgtctttgaaaccaagagtagtagattttgatgaaacatggaacaaacttttgacgacaataaaagccgtggtcatgttggaatacgtcgaaagagcaacatggaatgaccgtttctcagatatctatgctttatgtgtggcctatcctgaaccccttggagaaagactttatacagaaactaagatttttttggaaaatcatgttcggcatttgcataagagagttttggagtcagaagaacaagtacttgttatgtatcataggtactgggaagaatacagcaagggtgcagactatatggactgcttatataggtatctcaacacccagtttattaaaaagaataaattaacagaagcggaccttcagtatggctatggtggtgtagatatgaatgaaccacttatggaaataggagagctagcattggatatgtggaggaaattgatggttgaaccacttcaggccatccttatccgaatgctgctccgagaaatcaaaaatgatcgtggtggagaagacccaaaccagaaagtaatccatggggttattaactcctttgttcatgttgaacagtataagaaaaaattccccttaaagttttatcaggaaatttttgagtctccctttctgactgaaacaggagagtattacaaacaagaagcttcaaatttattacaagaatcaaactgctcacagtatatggaaaaggttctaggtagattaaaagatgaagaaattcgatgtcgaaaatacctacatccaagttcatatactaaggtgattcatgaatgtcaacaacgaatggtagcagaccacttacagtttttacatgcagaatgtcataatataattcgacaagagaaaaaaaatgacatggcaaatatgtacgtcttactccgtgctgtgtccactggtttacctcatatgattcaggagctgcaaaaccacatccatgatgagggccttcgagcaaccagcaaccttactcaggaaaacatgccaacactatttgtggagtcagttttggaagtgcatggtaaatttgttcagcttatcaacactgttttgaatggtgatcagcattttatgagtgcgttggataaggcccttacgtcagttgtaaattacagagaacctaagtctgtttgcaaagcacctgaactgcttgctaagtactgtgacaacttactgaagaagtcagcgaaagggatgacagagaatgaagtggaagacaggctcacgagcttcatcacagtgttcaaatacattgatgacaaggacgtctttcaaaagttctacgcaagaatgctggcaaaacgtttaattcatgggttatccatgtctatggactctgaagaagccatgatcaacaaattaaagcaagcctgtggttatgagtttaccagcaagctacatcggatgtatacagatatgagtgtcagcgctgatctcaacaataagttcaacaattttatcaaaaaccaagacacagtaatagatttgggaattagttttcaaatatatgttctacaggctggtgcgtggcctcttactcaggctccttcatctacgtttgcaattccccaggaattagaaaaaagtgtacagatgtttgaattattttatagccaacatttcagtggaaggaaacttacatggttacattatctgtgtacaggtgaagttaaaatgaactatttgggcaaaccatatgtagccatggttacaacataccaaatggcagttcttcttgcctttaacaacagtgaaactgtcagttataaagagcttcaggacagcactcagatgaatgaaaaggaactgacaaaaacaatcaaatcattacttgatgtgaaaatgattaaccatgattcagaaaaggaagatattgatgcagaatcttcattttcattaaatatgaactttagcagtaaaagaacaaaatttaaaattactacatcaatgcagaaagacacaccacaagaaatggagcagactagaagtgcagttgatgaggaccggaaaatgtatctccaagctgctatagttcgtatcatgaaagcacgaaaagtgcttcggcacaatgcccttattcaagaggtgattagccagtcaagagctaggtttaatcccagtatcagcatgattaagaagtgtattgaagttctgatagacaaacaatacatagaacgcagccaggcgtcggcagatgaatacagctacgtcgcgtgatgtcgctctcctccagcgtggtgtgagaagatcattgccatcaccatttggtgtgttcctgtgggaaaaagcaggactgtgcctccataatttggtcatttggcagcccctgttttctgctgtttacaacatcaccagtgccacgtcatgagcgtcaaagaaaatgcctagagatatttcaagctcatgtcattatgacatttcttaaaactttattaaaagaatgagtgaagtattgctgaaaagtggaaattcggttgggtaccatgctttttctccccttcacgtttgcagttgatgtgtctttttttttttttttaatgtatcttaaaggacataaaatttaaaaacttaaatattgtaatatgacagataacctaataattgtatctacattaaaatgacaaacatgatactgctgcttgtcaaataaaaaaaaaataaagaaatagaatgccttttttatgtggatggagtatcaggttgaccacaaaatatattgactcaaagcagctaatgcatctttagttgcgtttttatctgaatggtttaattcacttgtactcctatttaaatcctacatgaaaaatgtctagattattgttcttgactgcataggactgcattcagcataaagaatgctttatttttatggattagatatattggatctaaacattttgaatcttgaagatgtaattccatcagcagtttctggtggtgtgctactccacagacatcgcagagtgtgagcaggatgcttggtgacctcaagtctggcacagagagagcttttcattcaaaagttgtctttcttcggttgcataatccattaattctagcatagactagtaccctagctctgtggccttccctgagtcttaggaaatctatgataccaacatattccttctatatgcctcccctacctgttacccttacaaccctcctccaacagtttagatactagagtcactctcatcaatcacagatgtgcttagcaatgcataacctaaatacttttttaaaaaagaaaattgtacattgtactgggtgccacatatataaatcccattattttgtttattttatatatatatatatatataatatatatatatatatatctcaacagcagtgttaagagtactgcgatctattatccatatttattgtctatccacaccatcaccaccaccaccacacccctcctccctcaacatacaatttttctttattttaaaaaaaataagagacggggtttcgccatgtttcccaggctagtctggaacttctggcctcaagcaatcctatctctgtctcccaaagtgctgggattacaagcatgagccactgcatccatccaacacaaaatttttaaaatcggaatattttaaagcaaatcacacaaattatttcacttataatacttcagtaaggcctttaaaaaatccacagtgatattattactcctaacaaaaacaataattacttagtatcatctaatatgtggttcatatttaaatttgttgttttgagatgggtcttacaattggtttattcaattgcattttttctaactcgtgtctcaagtgttttaaaaatctactgaacttataatgacttatataatgtatttctcattttacctttcttccaaaagaggaaataatggcaaaccatataatattgtacattcactgtcaaaaagcaaacccttgttttgataacttgttgattgataaaagttttccaaa

SEQ ID NO: 362608 - DNA, 4539 bp, Homo sapiens
tccctgccgaccccggaccaaaagtagcgctgcagccgaccgaaccgcgtcctcccgccccgtcctcccctcccccacgccgggacggcctcccgggggaggccccgaggaaaaaaatccaggctcgaactccgccccctgccggccgccagcaggagtgaagcgccacaatccaacaatgaaatggaaccggggaggggcggcgggaaggttatagtgccatcatgtggatactttgttttcttcaaataaaatgtaacctttttataacagagactagaaaacccagccatcccaacacccaggatagaggcactctccattcctgattgttccaaggctcaagtggtcagaaatgactgggaagaagggagaaaaactcaggtggcaaaggacatggacgaaaacccatggcgacatggaaagaaaaccctgtgatatagagaggaaaagcacaggacagcttattggggagaatggaactcttctgtatcctgattgcggtgatggccacgcatggctatttcaacactacacttgcacaatgtctttgaaaccaagagtagtagattttgatgaaacatggaacaaacttttgacgacaataaaagccgtggtcatgttggaatacgtcgaaagagcaacatggaatgaccgtttctcagatatctatgctttatgtgtggcctatcctgaaccccttggagaaagactttatacagaaactaagatttttttggaaaatcatgttcggcatttgcataagagagttttggagtcagaagaacaagtacttgttatgtatcataggtactgggaagaatacagcaagggtgcagactatatggactgcttatataggtatctcaacacccagtttattaaaaagaataaattaacagaagcggaccttcagtatggctatggtggtgtagatatgaatgaaccacttatggaaataggagagctagcattggatatgtggaggaaattgatggttgaaccacttcaggccatccttatccgaatgctgctccgagaaatcaaaaatgatcgtggtggagaagacccaaaccagaaagtaatccatggggttattaactcctttgttcatgttgaacagtataagaaaaaattccccttaaagttttatcaggaaatttttgagtctccctttctgactgaaacaggagagtattacaaacaagaagcttcaaatttattacaagaatcaaactgctcacagtatatggaaaaggttctaggtagattaaaagatgaagaaattcgatgtcgaaaatacctacatccaagttcatatactaaggtgattcatgaatgtcaacaacgaatggtagcagaccacttacagtttttacatgcagaatgtcataatataattcgacaagagaaaaaaaatgacatggcaaatatgtacgtcttactccgtgctgtgtccactggtttacctcatatgattcaggagctgcaaaaccacatccatgatgagggccttcgagcaaccagcaaccttactcaggaaaacatgccaacactatttgtggagtcagttttggaagtgcatggtaaatttgttcagcttatcaacactgttttgaatggtgatcagcattttatgagtgcgttggataaggcccttacgtcagttgtaaattacagagaacctaagtctgtttgcaaagcacctgaactgcttgctaagtactgtgacaacttactgaagaagtcagcgaaagggatgacagagaatgaagtggaagacaggctcacgagcttcatcacagtgttcaaatacattgatgacaaggacgtctttcaaaagttctacgcaagaatgctggcaaaacgtttaattcatgggttatccatgtctatggactctgaagaagccatgatcaacaaattaaagcaagcctgtggttatgagtttaccagcaagctacatcggatgtatacagatatgagtgtcagcgctgatctcaacaataagttcaacaattttatcaaaaaccaagacacagtaatagatttgggaattagttttcaaatatatgttctacaggctggtgcgtggcctcttactcaggctccttcatctacgtttgcaattccccaggaattagaaaaaagtgtacagatgtttgaattattttatagccaacatttcagtggaaggaaacttacatggttacattatctgtgtacaggtgaagttaaaatgaactatttgggcaaaccatatgtagccatggttacaacataccaaatggcagttcttcttgcctttaacaacagtgaaactgtcagttataaagagcttcaggacagcactcagatgaatgaaaaggaactgacaaaaacaatcaaatcattacttgatgtgaaaatgattaaccatgattcagaaaaggaagatattgatgcagaatcttcattttcattaaatatgaactttagcagtaaaagaacaaaatttaaaattactacatcaatgcagaaagacacaccacaagaaatggagcagactagaagtgcagttgatgaggaccggaaaatgtatctccaagctgctatagttcgtatcatgaaagcacgaaaagtgcttcggcacaatgcccttattcaagaggtgattagccagtcaagagctaggtttaatcccagtatcagcatgattaagaagtgtattgaagttctgatagacaaacaatacatagaacgcagccaggcgtcggcagatgaatacagctacgtcgcgtgatgtcgctctcctccagcgtggtgtgagaagatcattgccatcaccatttggtgtgttcctgtgggaaaaagcaggactgtgcctccataatttggtcatttggcagcccctgttttctgctgtttacaacatcaccagtgccacgtcatgagcgtcaaagaaaatgcctagagatatttcaagctcatgtcattatgacatttcttaaaactttattaaaagaatgagtgaagtattgctgaaaagtggaaattcggttgggtaccatgctttttctccccttcacgtttgcagttgatgtgtctttttttttttttttaatgtatcttaaaggacataaaatttaaaaacttaaatattgtaatatgacagataacctaataattgtatctacattaaaatgacaaacatgatactgctgcttgtcaaataaaaaaaaaataaagaaatagaatgccttttttatgtggatggagtatcaggttgaccacaaaatatattgactcaaagcagctaatgcatctttagttgcgtttttatctgaatggtttaattcacttgtactcctatttaaatcctacatgaaaaatgtctagattattgttcttgactgcataggactgcattcagcataaagaatgctttatttttatggattagatatattggatctaaacattttgaatcttgaagatgtaattccatcagcagtttctggtggtgtgctactccacagacatcgcagagtgtgagcaggatgcttggtgacctcaagtctggcacagagagagcttttcattcaaaagttgtctttcttcggttgcataatccattaattctagcatagactagtaccctagctctgtggccttccctgagtcttaggaaatctatgataccaacatattccttctatatgcctcccctacctgttacccttacaaccctcctccaacagtttagatactagagtcactctcatcaatcacagatgtgcttagcaatgcataacctaaatacttttttaaaaaagaaaattgtacattgtactgggtgccacatatataaatcccattattttgtttattttatatatatatatatatataatatatatatatatatatctcaacagcagtgttaagagtactgcgatctattatccatatttattgtctatccacaccatcaccaccaccaccacacccctcctccctcaacatacaatttttctttattttaaaaaaaataagagacggggtttcgccatgtttcccaggctagtctggaacttctggcctcaagcaatcctatctctgtctcccaaagtgctgggattacaagcatgagccactgcatccatccaacacaaaatttttaaaatcggaatattttaaagcaaatcacacaaattatttcacttataatacttcagtaaggcctttaaaaaatccacagtgatattattactcctaacaaaaacaataattacttagtatcatctaatatgtggttcatatttaaatttgttgttttgagatgggtcttacaattggtttattcaattgcattttttctaactcgtgtctcaagtgttttaaaaatctactgaacttataatgacttatataatgtatttctcattttacctttcttccaaaagaggaaataatggcaaaccatataatattgtacattcactgtcaaaaagcaaacccttgttttgataacttgttgattgataaaagttttccaaa

SEQ ID NO: 362609 - DNA, 4376 bp, Homo sapiens
tgggttccggaccctgccggggcggcggggcgggcaccgcccgagggggtagggcgcgcgcgggggcgcgccgggccggggaggcgcgctcgctccgcgctcccttcgctcgctcgtttcctcctccctcggcagccgcggccgccgccgccgccgcctccgcccaccttcctcgccggggcttcgtctttcactccttcgggctgcctccccctccccttgtcccctgccccttgccctgcttctgcagaagagcgctgacccgtaagccctgccaccccctggactggatcccgggcctccccaacccgatcttggccgcctctcccgcggccccattttccttcgaaggagggaagatttcaacactacacttgcacaatgtctttgaaaccaagagtagtagattttgatgaaacatggaacaaacttttgacgacaataaaagccgtggtcatgttggaatacgtcgaaagagcaacatggaatgaccgtttctcagatatctatgctttatgtgtggcctatcctgaaccccttggagaaagactttatacagaaactaagatttttttggaaaatcatgttcggcatttgcataagagagttttggagtcagaagaacaagtacttgttatgtatcataggtactgggaagaatacagcaagggtgcagactatatggactgcttatataggtatctcaacacccagtttattaaaaagaataaattaacagaagcggaccttcagtatggctatggtggtgtagatatgaatgaaccacttatggaaataggagagctagcattggatatgtggaggaaattgatggttgaaccacttcaggccatccttatccgaatgctgctccgagaaatcaaaaatgatcgtggtggagaagacccaaaccagaaagtaatccatggggttattaactcctttgttcatgttgaacagtataagaaaaaattccccttaaagttttatcaggaaatttttgagtctccctttctgactgaaacaggagagtattacaaacaagaagcttcaaatttattacaagaatcaaactgctcacagtatatggaaaaggttctaggtagattaaaagatgaagaaattcgatgtcgaaaatacctacatccaagttcatatactaaggtgattcatgaatgtcaacaacgaatggtagcagaccacttacagtttttacatgcagaatgtcataatataattcgacaagagaaaaaaaatgacatggcaaatatgtacgtcttactccgtgctgtgtccactggtttacctcatatgattcaggagctgcaaaaccacatccatgatgagggccttcgagcaaccagcaaccttactcaggaaaacatgccaacactatttgtggagtcagttttggaagtgcatggtaaatttgttcagcttatcaacactgttttgaatggtgatcagcattttatgagtgcgttggataaggcccttacgtcagttgtaaattacagagaacctaagtctgtttgcaaagcacctgaactgcttgctaagtactgtgacaacttactgaagaagtcagcgaaagggatgacagagaatgaagtggaagacaggctcacgagcttcatcacagtgttcaaatacattgatgacaaggacgtctttcaaaagttctacgcaagaatgctggcaaaacgtttaattcatgggttatccatgtctatggactctgaagaagccatgatcaacaaattaaagcaagcctgtggttatgagtttaccagcaagctacatcggatgtatacagatatgagtgtcagcgctgatctcaacaataagttcaacaattttatcaaaaaccaagacacagtaatagatttgggaattagttttcaaatatatgttctacaggctggtgcgtggcctcttactcaggctccttcatctacgtttgcaattccccaggaattagaaaaaagtgtacagatgtttgaattattttatagccaacatttcagtggaaggaaacttacatggttacattatctgtgtacaggtgaagttaaaatgaactatttgggcaaaccatatgtagccatggttacaacataccaaatggcagttcttcttgcctttaacaacagtgaaactgtcagttataaagagcttcaggacagcactcagatgaatgaaaaggaactgacaaaaacaatcaaatcattacttgatgtgaaaatgattaaccatgattcagaaaaggaagatattgatgcagaatcttcattttcattaaatatgaactttagcagtaaaagaacaaaatttaaaattactacatcaatgcagaaagacacaccacaagaaatggagcagactagaagtgcagttgatgaggaccggaaaatgtatctccaagctgctatagttcgtatcatgaaagcacgaaaagtgcttcggcacaatgcccttattcaagaggtgattagccagtcaagagctaggtttaatcccagtatcagcatgattaagaagtgtattgaagttctgatagacaaacaatacatagaacgcagccaggcgtcggcagatgaatacagctacgtcgcgtgatgtcgctctcctccagcgtggtgtgagaagatcattgccatcaccatttggtgtgttcctgtgggaaaaagcaggactgtgcctccataatttggtcatttggcagcccctgttttctgctgtttacaacatcaccagtgccacgtcatgagcgtcaaagaaaatgcctagagatatttcaagctcatgtcattatgacatttcttaaaactttattaaaagaatgagtgaagtattgctgaaaagtggaaattcggttgggtaccatgctttttctccccttcacgtttgcagttgatgtgtctttttttttttttttaatgtatcttaaaggacataaaatttaaaaacttaaatattgtaatatgacagataacctaataattgtatctacattaaaatgacaaacatgatactgctgcttgtcaaataaaaaaaaaataaagaaatagaatgccttttttatgtggatggagtatcaggttgaccacaaaatatattgactcaaagcagctaatgcatctttagttgcgtttttatctgaatggtttaattcacttgtactcctatttaaatcctacatgaaaaatgtctagattattgttcttgactgcataggactgcattcagcataaagaatgctttatttttatggattagatatattggatctaaacattttgaatcttgaagatgtaattccatcagcagtttctggtggtgtgctactccacagacatcgcagagtgtgagcaggatgcttggtgacctcaagtctggcacagagagagcttttcattcaaaagttgtctttcttcggttgcataatccattaattctagcatagactagtaccctagctctgtggccttccctgagtcttaggaaatctatgataccaacatattccttctatatgcctcccctacctgttacccttacaaccctcctccaacagtttagatactagagtcactctcatcaatcacagatgtgcttagcaatgcataacctaaatacttttttaaaaaagaaaattgtacattgtactgggtgccacatatataaatcccattattttgtttattttatatatatatatatatataatatatatatatatatatctcaacagcagtgttaagagtactgcgatctattatccatatttattgtctatccacaccatcaccaccaccaccacacccctcctccctcaacatacaatttttctttattttaaaaaaaataagagacggggtttcgccatgtttcccaggctagtctggaacttctggcctcaagcaatcctatctctgtctcccaaagtgctgggattacaagcatgagccactgcatccatccaacacaaaatttttaaaatcggaatattttaaagcaaatcacacaaattatttcacttataatacttcagtaaggcctttaaaaaatccacagtgatattattactcctaacaaaaacaataattacttagtatcatctaatatgtggttcatatttaaatttgttgttttgagatgggtcttacaattggtttattcaattgcattttttctaactcgtgtctcaagtgttttaaaaatctactgaacttataatgacttatataatgtatttctcattttacctttcttccaaaagaggaaataatggcaaaccatataatattgtacattcactgtcaaaaagcaaacccttgttttgataacttgttgattgataaaagttttccaaa

SEQ ID NO: 362610 - DNA, 2752 bp, Homo sapiens
accattgctttccgggtggcgggggggatttggcagcagcggaagaaggagaccggagggtgtgtgttgggcaaagccggaggcagaggaggacgattgttttacggatcccgtgatcggcccgtccttctcccctttccccccctccctaccgcccctgtcccgccggggagcggcggcggccttggactttgctgtctttcctcgcggagacagatttcaacactacacttgcacaatgtctttgaaaccaagagtagtagattttgatgaaacatggaacaaacttttgacgacaataaaagccgtggtcatgttggaatacgtcgaaagagcaacatggaatgaccgtttctcagatatctatgctttatgtgtggcctatcctgaaccccttggagaaagactttatacagaaactaagatttttttggaaaatcatgttcggcatttgcataagagagttttggagtcagaagaacaagtacttgttatgtatcataggtactgggaagaatacagcaagggtgcagactatatggactgcttatataggtatctcaacacccagtttattaaaaagaataaattaacagaagcggaccttcagtatggctatggtggtgtagatatgaatgaaccacttatggaaataggagagctagcattggatatgtggaggaaattgatggttgaaccacttcaggccatccttatccgaatgctgctccgagaaatcaaaaatgatcgtggtggagaagacccaaaccagaaagtaatccatggggttattaactcctttgttcatgttgaacagtataagaaaaaattccccttaaagttttatcaggaaatttttgagtctccctttctgactgaaacaggagagtattacaaacaagaagcttcaaatttattacaagaatcaaactgctcacagtatatggaaaaggttctaggtagattaaaagatgaagaaattcgatgtcgaaaatacctacatccaagttcatatactaaggtgattcatgaatgtcaacaacgaatggtagcagaccacttacagtttttacatgcagaatgtcataatataattcgacaagagaaaaaaaatgacatggcaaatatgtacgtcttactccgtgctgtgtccactggtttacctcatatgattcaggagctgcaaaaccacatccatgatgagggccttcgagcaaccagcaaccttactcaggaaaacatgccaacactatttgtggagtcagttttggaagtgcatggtaaatttgttcagcttatcaacactgttttgaatggtgatcagcattttatgagtgcgttggataaggcccttacgtcagttgtaaattacagagaacctaagtctgtttgcaaagcacctgaactgcttgctaagtactgtgacaacttactgaagaagtcagcgaaagggatgacagagaatgaagtggaagacaggctcacgagcttcatcacagtgttcaaatacattgatgacaaggacgtctttcaaaagttctacgcaagaatgctggcaaaacgtttaattcatgggttatccatgtctatggactctgaagaagccatgatcaacaaattaaagcaagcctgtggttatgagtttaccagcaagctacatcggatgtatacagatatgagtgtcagcgctgatctcaacaataagttcaacaattttatcaaaaaccaagacacagtaatagatttgggaattagttttcaaatatatgttctacaggctggtgcgtggcctcttactcaggctccttcatctacgtttgcaattccccaggaattagaaaaaagtgtacagatgtttgaattattttatagccaacatttcagtggaaggaaacttacatggttacattatctgtgtacaggtgaagttaaaatgaactatttgggcaaaccatatgtagccatggttacaacataccaaatggcagttcttcttgcctttaacaacagtgaaactgtcagttataaagagcttcaggacagcactcagatgaatgaaaaggaactgacaaaaacaatcaaatcattacttgatgtgaaaatgattaaccatgattcagaaaaggaagatattgatgcagaatcttcattttcattaaatatgaactttagcagtaaaagaacaaaatttaaaattactacatcaatgcagaaagacacaccacaagaaatggagcagactagaagtgcagttgatgaggaccggaaaatgtatctccaagctgctatagttcgtatcatgaaagcacgaaaagtgcttcggcacaatgcccttattcaagaggtgattagccagtcaagagctaggtttaatcccagtatcagcatgattaagaagtgtattgaagttctgatagacaaacaatacatagaacgcagccaggcgtcggcagatgaatacagctacgtcgcgtgatgtcgctctcctccagcgtggtgtgagaagatcattgccatcaccatttggtgtgttcctgtgggaaaaagcaggactgtgcctccataatttggtcatttggcagcccctgttttctgctgtttacaacatcaccagtgccacgtcatgagcgtcaaagaaaatgcctagagatatttcaagctcatgtcattatgacatttcttaaaactttaagataacctaataattgtatctacattaaaatgacaaacatgatactgctgcttgtcaaat

SEQ ID NO: 362611 - DNA, 2284 bp, Homo sapiens
accattgctttccgggtggcgggggggatttggcagcagcggaagaaggagaccggagggtgtgtgttgggcaaagccggaggcagaggaggacgattgttttacggatcccgtgatcggcccgtccttctcccctttccccccctccctaccgcccctgtcccgccggggagcggcggcggccttggactttgctgtctttcctcgcggagacagatttcaacactacacttgcacaatgtctttgaaaccaagagtagtagattttgatgaaacatggaacaaacttttgacgacaataaaagccgtggtcatgttggaatacgtcgaaagagcaacatggaatgaccgtttctcagatatctatgctttatgtgtggcctatcctgaaccccttggagaaagactttatacagaaactaagatttttttggaaaatcatgttcggcatttgcataagagagttttggagtcagaagaacaagtacttgttatgtatcataggtactgggaagaatacagcaagggtgcagactatatggactgcttatataggtatctcaacacccagtttattaaaaagaataaattaacagaagcggaccttcagtatggctatggtggtgtagatatgaatgaaccacttatggaaataggagagctagcattggatatgtggaggaaattgatggttgaaccacttcaggccatccttatccgaatgctgctccgagaaatcaaaaatgatcgtggtggagaagacccaaaccagaaagtaatccatggggttattaactcctttgttcatgttgaacagtataagaaaaaattccccttaaagttttatcaggaaatttttgagtctccctttctgactgaaacaggagagtattacaaacaagaagcttcaaatttattacaagaatcaaactgctcacagtatatggaaaaggttctaggtagattaaaagatgaagaaattcgatgtcgaaaatacctacatccaagttcatatactaaggtgattcatgaatgtcaacaacgaatggtagcagaccacttacagtttttacatgcagaatgtcataatataattcgacaagagaaaaaaaatgacatggcaaatatgtacgtcttactccgtgctgtgtccactggtttacctcatatgattcaggagctgcaaaaccacatccatgatgagggccttcgagcaaccagcaaccttactcaggaaaacatgccaacactatttgtggagtcagttttggaagtgcatggtaaatttgttcagcttatcaacactgttttgaatggtgatcagcattttatgagtgcgttggataaggcccttacgtcagttgtaaattacagagaacctaagtctgtttgcaaagcacctgaactgcttgctaagtactgtgacaacttactgaagaagtcagcgaaagggatgacagagaatgaagtggaagacaggctcacgagcttcatcacagtgttcaaatacattgatgacaaggacgtctttcaaaagttctacgcaagaatgctggcaaaacgtttaattcatgggttatccatgtctatggactctgaagaagccatgatcaacaaattaaagcaagcctgtggttatgagtttaccagcaagctacatcggatgtatacagatatgagtgtcagcgctgatctcaacaataagttcaacaattttatcaaaaaccaagacacagtaatagatttgggaattagttttcaaatatatgttctacaggctggtgcgtggcctcttactcaggctccttcatctacgtttgcaattccccaggaattagaaaaaagtgtacagatgtttgaattattttatagccaacatttcagtggaaggaaacttacatggttacattatctgtgtacaggtgaagttaaaatgaactatttgggcaaaccatatgtagccatggttacaacataccaaatggcagttcttcttgcctttaacaacagtgaaactgtcagttataaagagcttcaggacagcactcagatgaatgaaaaggaactgacaaaaacaatcaaatcattacttgatgtgaaaatgattaaccatgattcagaaaaggaagatattgatgcagaatcttcattttcattaaatatgaactttagcagtaaaagaacaaaatttaaaattactacatcaatgcagaaagacacaccacaagaatatgagccaaccttaaattcgttgatgtaggccggttgtttcttccttgttttt

SEQ ID NO: 362612 - DNA, 777 bp, Homo sapiens
tccctgccgaccccggaccaaaagtagcgctgcagccgaccgaaccgcgtcctcccgccccgtcctcccctcccccacgccgggacggcctcccgggggaggccccgaggaaaaaaatccaggctcgaactccgccccctgccggccgccagcaggagtgaagcgccacaatccaacaatgaaatggaaccggggaggggcggcgggaaggttatagtgccatcatgtggatactttgttttcttcaaataaaatgtaacctttttataacagagactagaaaacccagccatcccaacacccaggctgtgcaaagaaattggggccaaacgtttttttgccatgttctgaaaaggatagaggcactctccattcctgattgttccaaggctcaagtggtcagaaatgactgggaagaagggagaaaaactcaggtggcaaaggacatggacgaaaacccatggcgacatggaaagaaaaccctgtgatatagagaggaaaagcacaggacagcttattggggagaatggaactcttctgtatcctgattgcggtgatggccacgcatggcttagagacgggctttcaccacgttgactaagctagtcttgaactcgtgacctcaggtgatccacctgcctcagcctcgctaagtctaactttcaaccagaattgtctaggagaggcaaagatataacctgttcatctggtaccactatcacccacagaatatgatatgagttctgagcttttccgattaaagaccttgtacttttg

SEQ ID NO: 362613 - DNA, 4636 bp, Homo sapiens
atccttgctggacacagtgaaggaggctgtttatgttgtggtactgggagaagcgggggactgtgccgtgtggaacgtgtagctgttgagaggtggactctgttaccattgaggatgtttggaggatgagtatgtgtggcagaggcacacataaacaggcagagaccctttgcccctgcctttctcccccaacccaaggctgacctgtgttctcccaggtctgggattctaagtgacctgctctgtgtttggtctctctcaggatgagcacaagcctgggagatggcagtgatggaaatggcctgcccaggtgcccctggctcagcagtggggcagcagaaggaactccccaaagccaaggagaagacgccgccactggggaagaaacagagctccgtctacaagcttgaggccgtggagaagagccctgtgttctgcggaaagtgggagatcctgaatgacgtgattaccaagggcacagccaaggaaggctccgaggcagggccagctgccatctctatcatcgcccaggctgagtgtgagaatagccaagagttcagccccaccttttcagaacgcattttcatcgctgggtccaaacagtacagccagtccgagagtcttgatcagatccccaacaatgtggcccatgctacagagggcaaaatggcccgtgtgtgttggaagggaaagcgtcgcagcaaagcccggaagaaacggaagaagaagagctcaaagtccctggctcatgcaggagtggccttggccaaacccctccccaggacccctgagcaggagagctgcaccatcccagtgcaggaggatgagtctccactcggcgccccatatgttagaaacaccccgcagttcaccaagcctctgaaggaaccaggccttgggcaactctgttttaagcagcttggcgagggcctacggccggctctgcctcgatcagaactccacaaactgatcagccccttgcaatgtctgaaccacgtgtggaaactgcaccacccccaggacggaggccccctgcccctgcccacgcaccccttcccctatagcagactgcctcatcccttcccattccaccctctccagccctggaaacctcaccctctggagtccttcctgggcaaactggcctgtgtagacagccagaaacccttgcctgacccacacctgagcaaactggcctgtgtagacagtccaaagcccctgcctggcccacacctggagcccagctgcctgtctcgtggtgcccatgagaagttttctgtggaggaatacctagtgcatgctctgcaaggcagcgtgagctcaagccaggcccacagcctgaccagcctggccaagacctgggcagcacggggctccagatcccgggagcccagccccaaaactgaggacaacgagggtgtcctgctcactgagaaactcaagccagtggattatgagtaccgagaagaagtccactgggccacgcaccagctccgcctgggcagaggctccttcggagaggtgcacaggatggaggacaagcagactggcttccagtgcgctgtcaaaaaggtgcggctggaagtatttcgggcagaggagctgatggcatgtgcaggattgacctcacccagaattgtccctttgtatggagctgtgagagaagggccttgggtcaacatcttcatggagctgctggaaggtggctccctgggccagctggtcaaggagcagggctgtctcccagaggaccgggccctgtactacctgggccaggccctggagggtctggaatacctccactcacgaaggattctgcatggggacgtcaaagctgacaacgtgctcctgtccagcgatgggagccacgcagccctctgtgactttggccatgctgtgtgtcttcaacctgatggcctgggaaagtccttgctcacaggggactacatccctggcacagagacccacatggctccggaggtggtgctgggcaggagctgcgacgccaaggtggatgtctggagcagctgctgtatgatgctgcacatgctcaacggctgccacccctggactcagttcttccgagggccgctctgcctcaagattgccagcgagcctccgcctgtgagggagatcccaccctcctgcgcccctctcacagcccaggccatccaagaggggctgaggaaagagcccatccaccgcgtgtctgcagcggagctgggagggaaggtgaaccgggcactacagcaagtgggaggtctgaagagcccttggaggggagaatataaagaaccaagacatccaccgccaaatcaagccaattaccaccagaccctccatgcccagccgagagagctttcgccaagggccccagggccccggccagctgaggagacaacaggcagagcccctaagctccagcctcctctcccaccagagcccccagagccaaacaagtctcctcccttgactttgagcaaggaggagtctgggatgtgggaacccttacctctgtcctccctggagccagcccctgccagaaaccccagctcaccagagcggaaagcaaccgtcccggagcaggaactgcagcagctggaaatagaattattcctcaacagcctgtcccagccattttctctggaggagcaggagcaaattctctcgtgcctcagcatcgacagcctctccctgtcggatgacagtgagaagaacccatcaaaggcctctcaaagctcgcgggacaccctgagctcaggcgtacactcctggagcagccaggccgaggctcgaagctccagctggaacatggtgctggcccgggggcggcccaccgacaccccaagctatttcaatggtgtgaaagtccaaatacagtctcttaatggtgaacacctgcacatccgggagttccaccgggtcaaagtgggagacatcgccactggcatcagcagccagatcccagctgcagccttcagcttggtgaccaaagacgggcagcctgttcgctacgacatggaggtgccagactcgggcatcgacctgcagtgcacactggcccctgatggcagcttcgcctggagctggagggtcaagcatggccagctggagaacaggccctaaccctgccctccaccgccggctccacactgccggaagcagccttcctgctcggtgcacgatgctgccctgaaacacaggctcagccgttcccaggggatctgccagccccccggctcagcagtgggaccagggcctcgcagcagcaaggtgggggcaagcagaatgcctcccaggatttcacacctgagccctgccccaccctgctgagaaaacactccgccacgtgaagagacagaggaggatggcaggagttacctcgggaaacaaacaggatcttctctgccctgctccagtcgagttggcctgacccgcttggatcagtgaccatttgctggcagacaggggagagcagcttccagcctgggtcagaaggggtgggcgagcccctcggcccctcaccctccaggctgctgtgagagtgtcaagtgtgtaagggcccaaactcaggttcagtgcagaaccaggtcagcaggtatgcccgcccgtaggttaagggggccctctaaaccccttgcctggcctcacctggccagctcaccccttttgggtgtaggggaaaagaatgcctgaccctgggaaggctccctggtagaatacaccacacttttcaggttgttgcaacacaggtcctgagttgacctctggttcagccaaggaccaaagaaggtgtgtaagtgaagtggttctcagtccccagacatgtgcccctttgctgctggctaccactcttccccagagcagcaggccccgagccccttcaggcccagcactgccccagactcgctggcactcagttccctcatctgtaaaggtgaagggtgatgcaggatatgcctgacaggaacagtctgtggatggacatgatcagtgctaaggaaagcagcagagagagacgctccggcgccccagccccactatcagtgtccagcgtgctggttccccagagcacagctcagcatcacactgacactcaccctgccctgcccctggccagagggtactgccgacggcactttgcactctgatgacctcaaagcactttcatggctgccctctggcagggcagggcagggcagtgacactgtaggagcatagcaagccaggagatggggtgaagggacacagtcttgagctgtccacatgcatgtgactcctcaaacctcttccagatttctctaagaatagcacccccttccccattgccccagcttagcctcttctcccaggggagctactcaggactcacgtagcattaaatcagctgtgaatcgtcagggggtgtctgctagcctcaacctcctggggcaggggacgccgagactccgtgggagaagctcattcccacatcttgccaagacagcctttgtccagctgtccacattgagtcagactgctcccggggagagagccccggcccccagcacataaagaactgcagccttggtactgcagagtctgggttgtagagaactctttgtaagcaataaagtttggggtgatgacaaatgtt

SEQ ID NO: 362614 - DNA, 591 bp, Homo sapiens
ccgcccctcttcactgttcctcccttccctccaccttctagctcctgagttttgttttttcattgtcaaggtgattggcagttctgtttctgtctcaccatcacaagtctgggatgtttttcatcacaaggatcagtggccgcagcccatgaacccttccctctgcttcacttcattcctctgccccctctctggtgctgcccggctcagatccctgccttcgccccagggctgcctggttgtgagggctcagctcagcagccctggcaaggtcaccagctggagagtcttcctcactgtagccctgtagccctctgctgccctggccactgaaactgtcctctctctcctgccaaccccagaaactcaagccagtggattatgagtaccgagaagaagtccactgggccacgcaccagctccgcctgggcagaggctccttcggagaggtgcacaggatggaggacaagcagactggcttccagtgcgctgtcaaaaaggtacgccagggctcaggggctgagtgaagagggaagccaggaagggggcctggtgtgttccctctgctttctgtccaggacagtcgcaggt

SEQ ID NO: 362615 - DNA, 4287 bp, Homo sapiens
  misc_feature (4)..(4): n is a, c, g, or t
ccantctgcttcctcgtgctcaatatgcaaatctgtcccttttgtgacagccagtccgagagtcttgatcagatccccaacaatgtggcccatgctacagagggcaaaatggcccgtgtgtgttggaagggaaagcgtcgcagcaaagcccggaagaaacggaagaagaagagctcaaagtccctggctcatgcaggagtggccttggccaaacccctccccaggacccctgagcaggagagctgcaccatcccagtgcaggaggatgagtctccactcggcgccccatatgttagaaacaccccgcagttcaccaagcctctgaaggaaccaggccttgggcaactctgttttaagcagcttggcgagggcctacggccggctctgcctcgatcagaactccacaaactgatcagccccttgcaatgtctgaaccacgtgtggaaactgcaccacccccaggacggaggccccctgcccctgcccacgcaccccttcccctatagcagactgcctcatcccttcccattccaccctctccagccctggaaacctcaccctctggagtccttcctgggcaaactggcctgtgtagacagccagaaacccttgcctgacccacacctgagcaaactggcctgtgtagacagtccaaagcccctgcctggcccacacctggagcccagctgcctgtctcgtggtgcccatgagaagttttctgtggaggaatacctagtgcatgctctgcaaggcagcgtgagctcaagccaggcccacagcctgaccagcctggccaagacctgggcagcacggggctccagatcccgggagcccagccccaaaactgaggacaacgagggtgtcctgctcactgagaaactcaagccagtggattatgagtaccgagaagaagtccactgggccacgcaccagctccgcctgggcagaggctccttcggagaggtgcacaggatggaggacaagcagactggcttccagtgcgctgtcaaaaaggtgcggctggaagtatttcgggcagaggagctgatggcatgtgcaggattgacctcacccagaattgtccctttgtatggagctgtgagagaagggccttgggtcaacatcttcatggagctgctggaaggtaaggagccaggtcccactctttctccaaattcagggccaagagttcccccctgagtcttgcccaagttggccttggtcactgatctatccattgttaacctcttgaccctgtgaccctgctttccactgcctgccctgtgctcttgcccttggctggcatggaggctcgggcaagtcccatgtatagcctggcctttggtctcctaggtggctccctgggccagctggtcaaggagcagggctgtctcccagaggaccgggccctgtactacctgggccaggccctggagggtctggaatacctccactcacgaaggattctgcatggggacgtcaaagctgacaacgtgctcctgtccagcgatgggagccacgcagccctctgtgactttggccatgctgtgtgtcttcaacctgatggcctgggaaagtccttgctcacaggggactacatccctggcacagagacccacatggctccggaggtggtgctgggcaggagctgcgacgccaaggtggatgtctggagcagctgctgtatgatgctgcacatgctcaacggctgccacccctggactcagttcttccgagggccgctctgcctcaagattgccagcgagcctccgcctgtgagggagatcccaccctcctgcgcccctctcacagcccaggccatccaagaggggctgaggaaagagcccatccaccgcgtgtctgcagcggagctgggagggaaggtgaaccgggcactacagcaagtgggaggtctgaagagcccttggaggggagaatataaagaaccaagacatccaccgccaaatcaagccaattaccaccagaccctccatgcccagccgagagagctttcgccaagggccccagggccccggccagctgaggagacaacaggcagagcccctaagctccagcctcctctcccaccagagcccccagagccaaacaagtctcctcccttgactttgagcaaggaggagtctgggatgtgggaacccttacctctgtcctccctggagccagcccctgccagaaaccccagctcaccagagcggaaagcaaccgtcccggagcaggaactgcagcagctggaaatagaattattcctcaacagcctgtcccagccattttctctggaggagcaggagcaaattctctcgtgcctcagcatcgacagcctctccctgtcggatgacagtgagaagaacccatcaaaggcctctcaaagctcgcgggacaccctgagctcaggcgtacactcctggagcagccaggccgaggctcgaagctccagctggaacatggtgctggcccgggggcggcccaccgacaccccaagctatttcaatggtgtgaaagtccaaatacagtctcttaatggtgaacacctgcacatccgggagttccaccgggtcaaagtgggagacatcgccactggcatcagcagccagatcccagctgcagccttcagcttggtgaccaaagacgggcagcctgttcgctacgacatggaggtgccagactcgggcatcgacctgcagtgcacactggcccctgatggcagcttcgcctggagctggagggtcaagcatggccagctggagaacaggccctaaccctgccctccaccgccggctccacactgccggaagcagccttcctgctcggtgcacgatgctgccctgaaacacaggctcagccgttcccaggggatctgccagccccccggctcagcagtgggaccagggcctcgcagcagcaaggtgggggcaagcagaatgcctcccaggatttcacacctgagccctgccccaccctgctgagaaaacactccgccacgtgaagagacagaggaggatggcaggagttacctcgggaaacaaacaggatcttctctgccctgctccagtcgagttggcctgacccgcttggatcagtgaccatttgctggcagacaggggagagcagcttccagcctgggtcagaaggggtgggcgagcccctcggcccctcaccctccaggctgctgtgagagtgtcaagtgtgtaagggcccaaactcaggttcagtgcagaaccaggtcagcaggtatgcccgcccgtaggttaagggggccctctaaaccccttgcctggcctcacctggccagctcaccccttttgggtgtaggggaaaagaatgcctgaccctgggaaggctccctggtagaatacaccacacttttcaggttgttgcaacacaggtcctgagttgacctctggttcagccaaggaccaaagaaggtgtgtaagtgaagtggttctcagtccccagacatgtgcccctttgctgctggctaccactcttccccagagcagcaggccccgagccccttcaggcccagcactgccccagactcgctggcactcagttccctcatctgtaaaggtgaagggtgatgcaggatatgcctgacaggaacagtctgtggatggacatgatcagtgctaaggaaagcagcagagagagacgctccggcgccccagccccactatcagtgtccagcgtgctggttccccagagcacagctcagcatcacactgacactcaccctgccctgcccctggccagagggtactgccgacggcactttgcactctgatgacctcaaagcactttcatggctgccctctggcagggcagggcagggcagtgacactgtaggagcatagcaagccaggagatggggtgaagggacacagtcttgagctgtccacatgcatgtgactcctcaaacctcttccagatttctctaagaatagcacccccttccccattgccccagcttagcctcttctcccaggggagctactcaggactcacgtagcattaaatcagctgtgaatcgtcagggggtgtctgctagcctcaacctcctggggcaggggacgccgagactccgtgggagaagctcattcccacatcttgccaagacagcctttgtccagctgtccacattgagtcagactgctcccggggagagagccccggcccccagcacataaagaactgcagccttggtactgcagagtctgggttgtagagaactctttgtaagcaataaagtttggggtgatgacaaatgtt

SEQ ID NO: 362616 - DNA, 4357 bp, Homo sapiens
taaattcctattttttctcctctctgctaatccaactccttttgctttaggtgagaatagccaagagttcagccccaccttttcagaacgcattttcatcgctgggtccaaacagtacagccagtccgagagtcttgatcagatccccaacaatgtggcccatgctacagagggcaaaatggcccgtgtgtgttggaagggaaagcgtcgcagcaaagcccggaagaaacggaagaagaagagctcaaagtccctggctcatgcaggagtggccttggccaaacccctccccaggacccctgagcaggagagctgcaccatcccagtgcaggaggatgagtctccactcggcgccccatatgttagaaacaccccgcagttcaccaagcctctgaaggaaccaggccttgggcaactctgttttaagcagcttggcgagggcctacggccggctctgcctcgatcagaactccacaaactgatcagccccttgcaatgtctgaaccacgtgtggaaactgcaccacccccaggacggaggccccctgcccctgcccacgcaccccttcccctatagcagactgcctcatcccttcccattccaccctctccagccctggaaacctcaccctctggagtccttcctgggcaaactggcctgtgtagacagccagaaacccttgcctgacccacacctgagcaaactggcctgtgtagacagtccaaagcccctgcctggcccacacctggagcccagctgcctgtctcgtggtgcccatgagaagttttctgtggaggaatacctagtgcatgctctgcaaggcagcgtgagctcaagccaggcccacagcctgaccagcctggccaagacctgggcagcacggggctccagatcccgggagcccagccccaaaactgaggacaacgagggtgtcctgctcactgagaaactcaagccagtggattatgagtaccgagaagaagtccactgggccacgcaccagctccgcctgggcagaggctccttcggagaggtgcacaggatggaggacaagcagactggcttccagtgcgctgtcaaaaaggtgcggctggaagtatttcgggcagaggagctgatggcatgtgcaggattgacctcacccagaattgtccctttgtatggagctgtgagagaagggccttgggtcaacatcttcatggagctgctggaaggtaaggagccaggtcccactctttctccaaattcagggccaagagttcccccctgagtcttgcccaagttggccttggtcactgatctatccattgttaacctcttgaccctgtgaccctgctttccactgcctgccctgtgctcttgcccttggctggcatggaggctcgggcaagtcccatgtatagcctggcctttggtctcctaggtggctccctgggccagctggtcaaggagcagggctgtctcccagaggaccgggccctgtactacctgggccaggccctggagggtctggaatacctccactcacgaaggattctgcatggggacgtcaaagctgacaacgtgctcctgtccagcgatgggagccacgcagccctctgtgactttggccatgctgtgtgtcttcaacctgatggcctgggaaagtccttgctcacaggggactacatccctggcacagagacccacatggctccggaggtggtgctgggcaggagctgcgacgccaaggtggatgtctggagcagctgctgtatgatgctgcacatgctcaacggctgccacccctggactcagttcttccgagggccgctctgcctcaagattgccagcgagcctccgcctgtgagggagatcccaccctcctgcgcccctctcacagcccaggccatccaagaggggctgaggaaagagcccatccaccgcgtgtctgcagcggagctgggagggaaggtgaaccgggcactacagcaagtgggaggtctgaagagcccttggaggggagaatataaagaaccaagacatccaccgccaaatcaagccaattaccaccagaccctccatgcccagccgagagagctttcgccaagggccccagggccccggccagctgaggagacaacaggcagagcccctaagctccagcctcctctcccaccagagcccccagagccaaacaagtctcctcccttgactttgagcaaggaggagtctgggatgtgggaacccttacctctgtcctccctggagccagcccctgccagaaaccccagctcaccagagcggaaagcaaccgtcccggagcaggaactgcagcagctggaaatagaattattcctcaacagcctgtcccagccattttctctggaggagcaggagcaaattctctcgtgcctcagcatcgacagcctctccctgtcggatgacagtgagaagaacccatcaaaggcctctcaaagctcgcgggacaccctgagctcaggcgtacactcctggagcagccaggccgaggctcgaagctccagctggaacatggtgctggcccgggggcggcccaccgacaccccaagctatttcaatggtgtgaaagtccaaatacagtctcttaatggtgaacacctgcacatccgggagttccaccgggtcaaagtgggagacatcgccactggcatcagcagccagatcccagctgcagccttcagcttggtgaccaaagacgggcagcctgttcgctacgacatggaggtgccagactcgggcatcgacctgcagtgcacactggcccctgatggcagcttcgcctggagctggagggtcaagcatggccagctggagaacaggccctaaccctgccctccaccgccggctccacactgccggaagcagccttcctgctcggtgcacgatgctgccctgaaacacaggctcagccgttcccaggggatctgccagccccccggctcagcagtgggaccagggcctcgcagcagcaaggtgggggcaagcagaatgcctcccaggatttcacacctgagccctgccccaccctgctgagaaaacactccgccacgtgaagagacagaggaggatggcaggagttacctcgggaaacaaacaggatcttctctgccctgctccagtcgagttggcctgacccgcttggatcagtgaccatttgctggcagacaggggagagcagcttccagcctgggtcagaaggggtgggcgagcccctcggcccctcaccctccaggctgctgtgagagtgtcaagtgtgtaagggcccaaactcaggttcagtgcagaaccaggtcagcaggtatgcccgcccgtaggttaagggggccctctaaaccccttgcctggcctcacctggccagctcaccccttttgggtgtaggggaaaagaatgcctgaccctgggaaggctccctggtagaatacaccacacttttcaggttgttgcaacacaggtcctgagttgacctctggttcagccaaggaccaaagaaggtgtgtaagtgaagtggttctcagtccccagacatgtgcccctttgctgctggctaccactcttccccagagcagcaggccccgagccccttcaggcccagcactgccccagactcgctggcactcagttccctcatctgtaaaggtgaagggtgatgcaggatatgcctgacaggaacagtctgtggatggacatgatcagtgctaaggaaagcagcagagagagacgctccggcgccccagccccactatcagtgtccagcgtgctggttccccagagcacagctcagcatcacactgacactcaccctgccctgcccctggccagagggtactgccgacggcactttgcactctgatgacctcaaagcactttcatggctgccctctggcagggcagggcagggcagtgacactgtaggagcatagcaagccaggagatggggtgaagggacacagtcttgagctgtccacatgcatgtgactcctcaaacctcttccagatttctctaagaatagcacccccttccccattgccccagcttagcctcttctcccaggggagctactcaggactcacgtagcattaaatcagctgtgaatcgtcagggggtgtctgctagcctcaacctcctggggcaggggacgccgagactccgtgggagaagctcattcccacatcttgccaagacagcctttgtccagctgtccacattgagtcagactgctcccggggagagagccccggcccccagcacataaagaactgcagccttggtactgcagagtctgggttgtagagaactctttgtaagcaataaagtttggggtgatgacaaatgtt

SEQ ID NO: 362617 - DNA, 2852 bp, Homo sapiens
gacccggcatgactcacctgttcctcttcctccccggggcggcctggcagctgacaacgtgctcctgtccagcgatgggagccacgcagccctctgtgactttggccatgctgtgtgtcttcaacctgatggcctgggaaagtccttgctcacaggggactacatccctggcacagagacccacatggctccggaggtggtgctgggcaggagctgcgacgccaaggtggatgtctggagcagctgctgtatgatgctgcacatgctcaacggctgccacccctggactcagttcttccgagggccgctctgcctcaagattgccagcgagcctccgcctgtgagggagatcccaccctcctgcgcccctctcacagcccaggccatccaagaggggctgaggaaagagcccatccaccgcgtgtctgcagcggagctgggagggaaggtgaaccgggcactacagcaagtgggaggtctgaagagcccttggaggggagaatataaagaaccaagacatccaccgccaaatcaagccaattaccaccagaccctccatgcccagccgagagagctttcgccaagggccccagggccccggccagctgaggagacaacaggcagagcccctaagctccagcctcctctcccaccagagcccccagagccaaacaagtctcctcccttgactttgagcaaggaggagtctgggatgtgggaacccttacctctgtcctccctggagccagcccctgccagaaaccccagctcaccagagcggaaagcaaccgtcccggagcaggaactgcagcagctggaaatagaattattcctcaacagcctgtcccagccattttctctggaggagcaggagcaaattctctcgtgcctcagcatcgacagcctctccctgtcggatgacagtgagaagaacccatcaaaggcctctcaaagctcgcgggacaccctgagctcaggcgtacactcctggagcagccaggccgaggctcgaagctccagctggaacatggtgctggcccgggggcggcccaccgacaccccaagctatttcaatggtgtgaaagtccaaatacagtctcttaatggtgaacacctgcacatccgggagttccaccgggtcaaagtgggagacatcgccactggcatcagcagccagatcccagctgcagccttcagcttggtgaccaaagacgggcagcctgttcgctacgacatggaggtgccagactcgggcatcgacctgcagtgcacactggcccctgatggcagcttcgcctggagctggagggtcaagcatggccagctggagaacaggccctaaccctgccctccaccgccggctccacactgccggaagcagccttcctgctcggtgcacgatgctgccctgaaacacaggctcagccgttcccaggggatctgccagccccccggctcagcagtgggaccagggcctcgcagcagcaaggtgggggcaagcagaatgcctcccaggatttcacacctgagccctgccccaccctgctgagaaaacactccgccacgtgaagagacagaggaggatggcaggagttacctcgggaaacaaacaggatcttctctgccctgctccagtcgagttggcctgacccgcttggatcagtgaccatttgctggcagacaggggagagcagcttccagcctgggtcagaaggggtgggcgagcccctcggcccctcaccctccaggctgctgtgagagtgtcaagtgtgtaagggcccaaactcaggttcagtgcagaaccaggtcagcaggtatgcccgcccgtaggttaagggggccctctaaaccccttgcctggcctcacctggccagctcaccccttttgggtgtaggggaaaagaatgcctgaccctgggaaggctccctggtagaatacaccacacttttcaggttgttgcaacacaggtcctgagttgacctctggttcagccaaggaccaaagaaggtgtgtaagtgaagtggttctcagtccccagacatgtgcccctttgctgctggctaccactcttccccagagcagcaggccccgagccccttcaggcccagcactgccccagactcgctggcactcagttccctcatctgtaaaggtgaagggtgatgcaggatatgcctgacaggaacagtctgtggatggacatgatcagtgctaaggaaagcagcagagagagacgctccggcgccccagccccactatcagtgtccagcgtgctggttccccagagcacagctcagcatcacactgacactcaccctgccctgcccctggccagagggtactgccgacggcactttgcactctgatgacctcaaagcactttcatggctgccctctggcagggcagggcagggcagtgacactgtaggagcatagcaagccaggagatggggtgaagggacacagtcttgagctgtccacatgcatgtgactcctcaaacctcttccagatttctctaagaatagcacccccttccccattgccccagcttagcctcttctcccaggggagctactcaggactcacgtagcattaaatcagctgtgaatcgtcagggggtgtctgctagcctcaacctcctggggcaggggacgccgagactccgtgggagaagctcattcccacatcttgccaagacagcctttgtccagctgtccacattgagtcagactgctcccggggagagagccccggcccccagcacataaagaactgcagccttggtactgcagagtctgggttgtagagaactctttgtaagcaataaagtttggggtgatgacaaatgtt

SEQ ID NO: 362618 - DNA, 2583 bp, Homo sapiens
atcaggaaatgagggaaggcaggcctcacctgttgtcttttgccccccagattgccagcgagcctccgcctgtgagggagatcccaccctcctgcgcccctctcacagcccaggccatccaagaggggctgaggaaagagcccatccaccgcgtgtctgcagcggagctgggagggaaggtgaaccgggcactacagcaagtgggaggtctgaagagcccttggaggggagaatataaagaaccaagacatccaccgccaaatcaagccaattaccaccagaccctccatgcccagccgagagagctttcgccaagggccccagggccccggccagctgaggagacaacaggcagagcccctaagctccagcctcctctcccaccagagcccccagagccaaacaagtctcctcccttgactttgagcaaggaggagtctgggatgtgggaacccttacctctgtcctccctggagccagcccctgccagaaaccccagctcaccagagcggaaagcaaccgtcccggagcaggaactgcagcagctggaaatagaattattcctcaacagcctgtcccagccattttctctggaggagcaggagcaaattctctcgtgcctcagcatcgacagcctctccctgtcggatgacagtgagaagaacccatcaaaggcctctcaaagctcgcgggacaccctgagctcaggcgtacactcctggagcagccaggccgaggctcgaagctccagctggaacatggtgctggcccgggggcggcccaccgacaccccaagctatttcaatggtgtgaaagtccaaatacagtctcttaatggtgaacacctgcacatccgggagttccaccgggtcaaagtgggagacatcgccactggcatcagcagccagatcccagctgcagccttcagcttggtgaccaaagacgggcagcctgttcgctacgacatggaggtgccagactcgggcatcgacctgcagtgcacactggcccctgatggcagcttcgcctggagctggagggtcaagcatggccagctggagaacaggccctaaccctgccctccaccgccggctccacactgccggaagcagccttcctgctcggtgcacgatgctgccctgaaacacaggctcagccgttcccaggggatctgccagccccccggctcagcagtgggaccagggcctcgcagcagcaaggtgggggcaagcagaatgcctcccaggatttcacacctgagccctgccccaccctgctgagaaaacactccgccacgtgaagagacagaggaggatggcaggagttacctcgggaaacaaacaggatcttctctgccctgctccagtcgagttggcctgacccgcttggatcagtgaccatttgctggcagacaggggagagcagcttccagcctgggtcagaaggggtgggcgagcccctcggcccctcaccctccaggctgctgtgagagtgtcaagtgtgtaagggcccaaactcaggttcagtgcagaaccaggtcagcaggtatgcccgcccgtaggttaagggggccctctaaaccccttgcctggcctcacctggccagctcaccccttttgggtgtaggggaaaagaatgcctgaccctgggaaggctccctggtagaatacaccacacttttcaggttgttgcaacacaggtcctgagttgacctctggttcagccaaggaccaaagaaggtgtgtaagtgaagtggttctcagtccccagacatgtgcccctttgctgctggctaccactcttccccagagcagcaggccccgagccccttcaggcccagcactgccccagactcgctggcactcagttccctcatctgtaaaggtgaagggtgatgcaggatatgcctgacaggaacagtctgtggatggacatgatcagtgctaaggaaagcagcagagagagacgctccggcgccccagccccactatcagtgtccagcgtgctggttccccagagcacagctcagcatcacactgacactcaccctgccctgcccctggccagagggtactgccgacggcactttgcactctgatgacctcaaagcactttcatggctgccctctggcagggcagggcagggcagtgacactgtaggagcatagcaagccaggagatggggtgaagggacacagtcttgagctgtccacatgcatgtgactcctcaaacctcttccagatttctctaagaatagcacccccttccccattgccccagcttagcctcttctcccaggggagctactcaggactcacgtagcattaaatcagctgtgaatcgtcagggggtgtctgctagcctcaacctcctggggcaggggacgccgagactccgtgggagaagctcattcccacatcttgccaagacagcctttgtccagctgtccacattgagtcagactgctcccggggagagagccccggcccccagcacataaagaactgcagccttggtactgcagagtctgggttgtagagaactctttgtaagcaataaagtttggggtgatgacaaatgtt

SEQ ID NO: 362619 - DNA, 3037 bp, Homo sapiens
cggtcggcggccggcggcgggagatcgcgggcgagcggagcgcaacactcgcttggttggggagatcggcgcttggccggatgagcacaagcctgggagatggcagtgatggaaatggcctgcccaggtgcccctggctcagcagtggggcagcagaaggaactccccaaagccaaggagaagacgccgccactggggaagaaacagagctccgtctacaagcttgaggccgtggagaagagccctgtgttctgcggaaagtgggagatcctgaatgacgtgattaccaagggcacagccaaggaaggctccgaggcagggccagctgccatctctatcatcgcccaggctgagtgtgagaatagccaagagttcagccccaccttttcagaacgcattttcatcgctgggtccaaacagtacagccagtccgagagtcttgatcagatccccaacaatgtggcccatgctacagagggcaaaatggcccgtgtgtgttggaagggaaagcgtcgcagcaaagcccggaagaaacggaagaagaagagctcaaagtccctggctcatgcaggagtggccttggccaaacccctccccaggacccctgagcaggagagctgcaccatcccagtgcaggaggatgagtctccactcggcgccccatatgttagaaacaccccgcagttcaccaagcctctgaaggaaccaggccttgggcaactctgttttaagcagcttggcgagggcctacggccggctctgcctcgatcagaactccacaaactgatcagccccttgcaatgtctgaaccacgtgtggaaactgcaccacccccaggacggaggccccctgcccctgcccacgcaccccttcccctatagcagactgcctcatcccttcccattccaccctctccagccctggaaacctcaccctctggagtccttcctgggcaaactggcctgtgtagacagccagaaacccttgcctgacccacacctgagcaaactggcctgtgtagacagtccaaagcccctgcctggcccacacctggagcccagctgcctgtctcgtggtgcccatgagaagttttctgtggaggaatacctagtgcatgctctgcaaggcagcgtgagctcaagccaggcccacagcctgaccagcctggccaagacctgggcagcacggggctccagatcccgggagcccagccccaaaactgaggacaacgagggtgtcctgctcactgagaaactcaagccagtggattatgagtaccgagaagaagtccactgggccacgcaccagctccgcctgggcagaggctccttcggagaggtgcacaggatggaggacaagcagactggcttccagtgcgctgtcaaaaaggtgcggctggaagtatttcgggcagaggagctgatggcatgtgcaggattgacctcacccagaattgtccctttgtatggagctgtgagagaagggccttgggtcaacatcttcatggagctgctggaaggtaaggagccaggtcccactctttctccaaattcagggccaagagttcccccctgagtcttgcccaagttggccttggtcactgatctatccattgttaacctcttgaccctgtgaccctgctttccactgcctgccctgtgctcttgcccttggctggcatggaggctcgggcaagtcccatgtatagcctggcctttggtctcctaggtggctccctgggccagctggtcaaggagcagggctgtctcccagaggaccgggccctgtactacctgggccaggccctggagggtctggaatacctccactcacgaaggattctgcatggggacgtcaaagctgacaacgtgctcctgtccagcgatgggagccacgcagccctctgtgactttggccatgctgtgtgtcttcaacctgatggcctgggaaagtccttgctcacaggggactacatccctggcacagagacccacatggctccggaggtggtgctgggcaggagctgcgacgccaaggtggatgtctggagcagctgctgtatgatgctgcacatgctcaacggctgccacccctggactcagttcttccgagggccgctctgcctcaagattgccagcgagcctccgcctgtgagggagatcccaccctcctgcgcccctctcacagcccaggccatccaagaggggctgaggaaagagcccatccaccgcgtgtctgcagcggagctgggagggaaggtgaaccgggcactacagcaagtgggaggtctgaagagcccttggaggggagaatataaagaaccaagacatccaccgccaaatcaagccaattaccaccagaccctccatgcccagccgagagagctttcgccaagggccccagggccccggccagctgaggagacaacaggcagagcccctaagctccagcctcctctcccaccagagcccccagagccaaacaagtctcctcccttgactttgagcaaggaggagtctgggatgtgggaacccttacctctgtcctccctggagccagcccctgccagaaaccccagctcaccagagcggaaagcaaccgtcccggagcaggaactgcagcagctggaaatagaattattcctcaacagcctgtcccagccattttctctggaggagcaggagcaaattctctcgtgcctcagcatcgacagcctctccctgtcggatgacagtgagaagaacccatcaaaggcctctcaaagctcgcgggacaccctgagctcaggcgtacactcctggagcagccaggccgaggctcgaagctccagctggaacatggtgctggcccgggggcggcccaccgacaccccaagctatttcaatggtgtgaaagtccaaatacagtctcttaatggtgaacacctgcacatccgggagttccaccgggtcaaagtgggagacatcgccactggcatcagcagccaggtaaggggggcaggtacactctgacgggcagagtcccagaagccaatgca

SEQ ID NO: 362620 - DNA, 2791 bp, Homo sapiens
cggtcggcggccggcggcgggagatcgcgggcgagcggagcgcaacactcgcttggttggggagatcggcgcttggccggatgagcacaagcctgggagatggcagtgatggaaatggcctgcccaggtgcccctggctcagcagtggggcagcagaaggaactccccaaagccaaggagaagacgccgccactggggaagaaacagagctccgtctacaagcttgaggccgtggagaagagccctgtgttctgcggaaagtgggagatcctgaatgacgtgattaccaagggcacagccaaggaaggctccgaggcagggccagctgccatctctatcatcgcccaggctgagtgtgagaatagccaagagttcagccccaccttttcagaacgcattttcatcgctgggtccaaacagtacagccagtccgagagtcttgatcagatccccaacaatgtggcccatgctacagagggcaaaatggcccgtgtgtgttggaagggaaagcgtcgcagcaaagcccggaagaaacggaagaagaagagctcaaagtccctggctcatgcaggagtggccttggccaaacccctccccaggacccctgagcaggagagctgcaccatcccagtgcaggaggatgagtctccactcggcgccccatatgttagaaacaccccgcagttcaccaagcctctgaaggaaccaggccttgggcaactctgttttaagcagcttggcgagggcctacggccggctctgcctcgatcagaactccacaaactgatcagccccttgcaatgtctgaaccacgtgtggaaactgcaccacccccaggacggaggccccctgcccctgcccacgcaccccttcccctatagcagactgcctcatcccttcccattccaccctctccagccctggaaacctcaccctctggagtccttcctgggcaaactggcctgtgtagacagccagaaacccttgcctgacccacacctgagcaaactggcctgtgtagacagtccaaagcccctgcctggcccacacctggagcccagctgcctgtctcgtggtgcccatgagaagttttctgtggaggaatacctagtgcatgctctgcaaggcagcgtgagctcaagccaggcccacagcctgaccagcctggccaagacctgggcagcacggggctccagatcccgggagcccagccccaaaactgaggacaacgagggtgtcctgctcactgagaaactcaagccagtggattatgagtaccgagaagaagtccactgggccacgcaccagctccgcctgggcagaggctccttcggagaggtgcacaggatggaggacaagcagactggcttccagtgcgctgtcaaaaaggtgcggctggaagtatttcgggcagaggagctgatggcatgtgcaggattgacctcacccagaattgtccctttgtatggagctgtgagagaagggccttgggtcaacatcttcatggagctgctggaaggtaaggagccaggtcccactctttctccaaattcagggccaagagttcccccctgagtcttgcccaagttggccttggtcactgatctatccattgttaacctcttgaccctgtgaccctgctttccactgcctgccctgtgctcttgcccttggctggcatggaggctcgggcaagtcccatgtatagcctggcctttggtctcctaggtggctccctgggccagctggtcaaggagcagggctgtctcccagaggaccgggccctgtactacctgggccaggccctggagggtctggaatacctccactcacgaaggattctgcatggggacgtcaaagctgacaacgtgctcctgtccagcgatgggagccacgcagccctctgtgactttggccatgctgtgtgtcttcaacctgatggcctgggaaagtccttgctcacaggggactacatccctggcacagagacccacatggctccggaggtggtgctgggcaggagctgcgacgccaaggtggatgtctggagcagctgctgtatgatgctgcacatgctcaacggctgccacccctggactcagttcttccgagggccgctctgcctcaagattgccagcgagcctccgcctgtgagggagatcccaccctcctgcgcccctctcacagcccaggccatccaagaggggctgaggaaagagcccatccaccgcgtgtctgcagcggagctgggagggaaggtgaaccgggcactacagcaagtgggaggtctgaagagcccttggaggggagaatataaagaaccaagacatccaccgccaaatcaagccaattaccaccagaccctccatgcccagccgagagagctttcgccaagggccccagggccccggccagctgaggagacaacaggcagagcccctaagctccagcctcctctcccaccagagcccccagagccaaacaagtctcctcccttgactttgagcaaggaggagtctgggatgtgggaacccttacctctgtcctccctggagccagcccctgccagaaaccccagctcaccagagcggaaagcaaccgtcccggagcaggaactgcagcagctggaaatagaattattcctcaacagcctgtcccagccattttctctggaggagcaggagcaaattctctcgtgcctcagcatcgacagcctctccctgtcggatgacagtgagaaggtgagtcggttgtggccccggagccatggctccaggggtgtggttttccc

SEQ ID NO: 362621 - DNA, 2330 bp, Homo sapiens
cggtcggcggccggcggcgggagatcgcgggcgagcggagcgcaacactcgcttggttggggagatcggcgcttggccggatgagcacaagcctgggagatggcagtgatggaaatggcctgcccaggtgcccctggctcagcagtggggcagcagaaggaactccccaaagccaaggagaagacgccgccactggggaagaaacagagctccgtctacaagcttgaggccgtggagaagagccctgtgttctgcggaaagtgggagatcctgaatgacgtgattaccaagggcacagccaaggaaggctccgaggcagggccagctgccatctctatcatcgcccaggctgagtgtgagaatagccaagagttcagccccaccttttcagaacgcattttcatcgctgggtccaaacagtacagccagtccgagagtcttgatcagatccccaacaatgtggcccatgctacagagggcaaaatggcccgtgtgtgttggaagggaaagcgtcgcagcaaagcccggaagaaacggaagaagaagagctcaaagtccctggctcatgcaggagtggccttggccaaacccctccccaggacccctgagcaggagagctgcaccatcccagtgcaggaggatgagtctccactcggcgccccatatgttagaaacaccccgcagttcaccaagcctctgaaggaaccaggccttgggcaactctgttttaagcagcttggcgagggcctacggccggctctgcctcgatcagaactccacaaactgatcagccccttgcaatgtctgaaccacgtgtggaaactgcaccacccccaggacggaggccccctgcccctgcccacgcaccccttcccctatagcagactgcctcatcccttcccattccaccctctccagccctggaaacctcaccctctggagtccttcctgggcaaactggcctgtgtagacagccagaaacccttgcctgacccacacctgagcaaactggcctgtgtagacagtccaaagcccctgcctggcccacacctggagcccagctgcctgtctcgtggtgcccatgagaagttttctgtggaggaatacctagtgcatgctctgcaaggcagcgtgagctcaagccaggcccacagcctgaccagcctggccaagacctgggcagcacggggctccagatcccgggagcccagccccaaaactgaggacaacgagggtgtcctgctcactgagaaactcaagccagtggattatgagtaccgagaagaagtccactgggccacgcaccagctccgcctgggcagaggctccttcggagaggtgcacaggatggaggacaagcagactggcttccagtgcgctgtcaaaaaggtgcggctggaagtatttcgggcagaggagctgatggcatgtgcaggattgacctcacccagaattgtccctttgtatggagctgtgagagaagggccttgggtcaacatcttcatggagctgctggaaggtaaggagccaggtcccactctttctccaaattcagggccaagagttcccccctgagtcttgcccaagttggccttggtcactgatctatccattgttaacctcttgaccctgtgaccctgctttccactgcctgccctgtgctcttgcccttggctggcatggaggctcgggcaagtcccatgtatagcctggcctttggtctcctaggtggctccctgggccagctggtcaaggagcagggctgtctcccagaggaccgggccctgtactacctgggccaggccctggagggtctggaatacctccactcacgaaggattctgcatggggacgtcaaagctgacaacgtgctcctgtccagcgatgggagccacgcagccctctgtgactttggccatgctgtgtgtcttcaacctgatggcctgggaaagtccttgctcacaggggactacatccctggcacagagacccacatggctccggaggtggtgctgggcaggagctgcgacgccaaggtggatgtctggagcagctgctgtatgatgctgcacatgctcaacggctgccacccctggactcagttcttccgagggccgctctgcctcaagattgccagcgagcctccgcctgtgagggagatcccaccctcctgcgcccctctcacagcccaggccatccaagaggggctgaggaaagagcccatccaccgcgtgtctgcagcggagctgggagggaaggtgaaccgggcactacagcaaggtagaagagccccacgctggctgacccggggggcagaaacagaggtggac

SEQ ID NO: 362622 - DNA, 2015 bp, Homo sapiens
cggtcggcggccggcggcgggagatcgcgggcgagcggagcgcaacactcgcttggttggggagatcggcgcttggccggatgagcacaagcctgggagatggcagtgatggaaatggcctgcccaggtgcccctggctcagcagtggggcagcagaaggaactccccaaagccaaggagaagacgccgccactggggaagaaacagagctccgtctacaagcttgaggccgtggagaagagccctgtgttctgcggaaagtgggagatcctgaatgacgtgattaccaagggcacagccaaggaaggctccgaggcagggccagctgccatctctatcatcgcccaggctgagtgtgagaatagccaagagttcagccccaccttttcagaacgcattttcatcgctgggtccaaacagtacagccagtccgagagtcttgatcagatccccaacaatgtggcccatgctacagagggcaaaatggcccgtgtgtgttggaagggaaagcgtcgcagcaaagcccggaagaaacggaagaagaagagctcaaagtccctggctcatgcaggagtggccttggccaaacccctccccaggacccctgagcaggagagctgcaccatcccagtgcaggaggatgagtctccactcggcgccccatatgttagaaacaccccgcagttcaccaagcctctgaaggaaccaggccttgggcaactctgttttaagcagcttggcgagggcctacggccggctctgcctcgatcagaactccacaaactgatcagccccttgcaatgtctgaaccacgtgtggaaactgcaccacccccaggacggaggccccctgcccctgcccacgcaccccttcccctatagcagactgcctcatcccttcccattccaccctctccagccctggaaacctcaccctctggagtccttcctgggcaaactggcctgtgtagacagccagaaacccttgcctgacccacacctgagcaaactggcctgtgtagacagtccaaagcccctgcctggcccacacctggagcccagctgcctgtctcgtggtgcccatgagaagttttctgtggaggaatacctagtgcatgctctgcaaggcagcgtgagctcaagccaggcccacagcctgaccagcctggccaagacctgggcagcacggggctccagatcccgggagcccagccccaaaactgaggacaacgagggtgtcctgctcactgagaaactcaagccagtggattatgagtaccgagaagaagtccactgggccacgcaccagctccgcctgggcagaggctccttcggagaggtgcacaggatggaggacaagcagactggcttccagtgcgctgtcaaaaaggtgcggctggaagtatttcgggcagaggagctgatggcatgtgcaggattgacctcacccagaattgtccctttgtatggagctgtgagagaagggccttgggtcaacatcttcatggagctgctggaaggtaaggagccaggtcccactctttctccaaattcagggccaagagttcccccctgagtcttgcccaagttggccttggtcactgatctatccattgttaacctcttgaccctgtgaccctgctttccactgcctgccctgtgctcttgcccttggctggcatggaggctcgggcaagtcccatgtatagcctggcctttggtctcctaggtggctccctgggccagctggtcaaggagcagggctgtctcccagaggaccgggccctgtactacctgggccaggccctggagggtctggaatacctccactcacgaaggattctgcatggggacgtcaaagctgacaacgtgctcctgtccagcgatgggagccacgcagccctctgtgactttggccatgctgtgtgtcttcaacctgatggcctgggaaagtccttgctcacaggtaaggccccccaccaactgccgtgccccccaatgcattcattcgccaaa

SEQ ID NO: 362623 - DNA, 1480 bp, Homo sapiens
cggtcggcggccggcggcgggagatcgcgggcgagcggagcgcaacactcgcttggttggggagatcggcgcttggccggatgagcacaagcctgggagatggcagtgatggaaatggcctgcccaggtgcccctggctcagcagtggggcagcagaaggaactccccaaagccaaggagaagacgccgccactggggaagaaacagagctccgtctacaagcttgaggccgtggagaagagccctgtgttctgcggaaagtgggagatcctgaatgacgtgattaccaagggcacagccaaggaaggctccgaggcagggccagctgccatctctatcatcgcccaggctgagtgtgagaatagccaagagttcagccccaccttttcagaacgcattttcatcgctgggtccaaacagtacagccagtccgagagtcttgatcagatccccaacaatgtggcccatgctacagagggcaaaatggcccgtgtgtgttggaagggaaagcgtcgcagcaaagcccggaagaaacggaagaagaagagctcaaagtccctggctcatgcaggagtggccttggccaaacccctccccaggacccctgagcaggagagctgcaccatcccagtgcaggaggatgagtctccactcggcgccccatatgttagaaacaccccgcagttcaccaagcctctgaaggaaccaggccttgggcaactctgttttaagcagcttggcgagggcctacggccggctctgcctcgatcagaactccacaaactgatcagccccttgcaatgtctgaaccacgtgtggaaactgcaccacccccaggacggaggccccctgcccctgcccacgcaccccttcccctatagcagactgcctcatcccttcccattccaccctctccagccctggaaacctcaccctctggagtccttcctgggcaaactggcctgtgtagacagccagaaacccttgcctgacccacacctgagcaaactggcctgtgtagacagtccaaagcccctgcctggcccacacctggagcccagctgcctgtctcgtggtgcccatgagaagttttctgtggaggaatacctagtgcatgctctgcaaggcagcgtgagctcaagccaggcccacagcctgaccagcctggccaagacctgggcagcacggggctccagatcccgggagcccagccccaaaactgaggacaacgagggtgtcctgctcactgagaaactcaagccagtggattatgagtaccgagaagaagtccactgggccacgcaccagctccgcctgggcagaggctccttcggagaggtgcacaggatggaggacaagcagactggcttccagtgcgctgtcaaaaaggtacgccagggctcaggggctgagtgaagagggaagccaggaagggggcctggtgtgttccctctgctttctgtccaggacagtcgcaggt

SEQ ID NO: 362624 - DNA, 475 bp, Homo sapiens
cggtcggcggccggcggcgggagatcgcgggcgagcggagcgcaacactcgcttggttggggagatcggcgcttggccggatgagcacaagcctgggagatggcagtgatggaaatggcctgcccaggtgcccctggctcagcagtggggcagcagaaggaactccccaaagccaaggagaagacgccgccactggggaagaaacagagctccgtctacaagcttgaggccgtggagaagagccctgtgttctgcggaaagtgggagatcctgaatgacgtgattaccaagggcacagccaaggaaggctccgaggcagggccagctgccatctctatcatcgcccaggctgagtgtgagaatagccaagagttcagccccaccttttcagaacgcattttcatcgctgggtccaaacagtacaggtaagcaggggagacaagcctgagtgggaaggtggggactggacccagcc

SEQ ID NO: 362625 - DNA, 405 bp, Homo sapiens
cggtcggcggccggcggcgggagatcgcgggcgagcggagcgcaacactcgcttggttggggagatcggcgcttggccggatgagcacaagcctgggagatggcagtgatggaaatggcctgcccaggtgcccctggctcagcagtggggcagcagaaggaactccccaaagccaaggagaagacgccgccactggggaagaaacagagctccgtctacaagcttgaggccgtggagaagagccctgtgttctgcggaaagtgggagatcctgaatgacgtgattaccaagggcacagccaaggaaggctccgaggcagggccagctgccatctctatcatcgcccaggctgagtgtaggggcctagggttgttgtgggcacggggcaggtgggtgggcctgcag

SEQ ID NO: 362626 - DNA, 1049 bp, Homo sapiens
cggtcggcggccggcggcgggagatcgcgggcgagcggagcgcaacactcgcttggttggggagatcggcgcttggccggatgagcacaagcctgggagatggcagtgatggaaatggcctgcccaggtgcccctggctcagcagtggggcagcagaaggaactccccaaagccaaggagaagacgccgccactggggaagaaacagagctccgtctacaagcttgaggccgtggagaagagccctgtgttctgcggaaagtgggagatcctgaatgacgtgattaccaagggcacagccaaggaaggctccgaggcagggccagctgccatctctatcatcgcccaggctgagtgtgagaatagccaagagttcagccccaccttttcagaacgcattttcatcgctgggtccaaacagtacagccagtccgagagtcttgatcagatccccaacaatgtggcccatgctacagagggcaaaatggcccgtgtgtgttggaagggaaagcgtcgcagcaaagcccggaagaaacggaagaagaagagctcaaagtccctgggcaacatagcgagatcgcatgtctacaaaagagtaaaaaatagaaataaaaaagaaatttcaaaagtctaaaaagatatctgtcaaagggcagttacctctgagaataggactggggaatggagacttttgctttttttggtatcatttgcattcttttataatgagcctatatttgtttgcaattaaaagtaagatcagggccgagcacggtggctcacacctgtaatcccagcactttgggaggctgaggcaggtggatcacaaggtcaggagttcaagaccagcctctggccaagatggtgaaaccccatctctactaaaaatacaaatattagccgggtgtggtggcaggtgcctgtaatcccagctactcaggaggctgaggcagagaattgcttgaacctgggaggcggaggttgcagtgagccaagatcacgccacagcactccagcctgggtgacagagcaagactcagtctcaaaaaa

SEQ ID NO: 362627 - DNA, 4662 bp, Homo sapiens
cggtcggcggccggcggcgggagatcgcgggcgagcggagcgcaacactcgcttggttggggagatcggcgcttggccggatgagcacaagcctgggagatggcagtgatggaaatggcctgcccaggtgcccctggctcagcagtggggcagcagaaggaactccccaaagccaaggagaagacgccgccactggggaagaaacagagctccgtctacaagcttgaggccgtggagaagagccctgtgttctgcggaaagtgggagatcctgaatgacgtgattaccaagggcacagccaaggaaggctccgaggcagggccagctgccatctctatcatcgcccaggctgagtgtgagaatagccaagagttcagccccaccttttcagaacgcattttcatcgctgggtccaaacagtacagccagtccgagagtcttgatcagatccccaacaatgtggcccatgctacagagggcaaaatggcccgtgtgtgttggaagggaaagcgtcgcagcaaagcccggaagaaacggaagaagaagagctcaaagtccctggctcatgcaggagtggccttggccaaacccctccccaggacccctgagcaggagagctgcaccatcccagtgcaggaggatgagtctccactcggcgccccatatgttagaaacaccccgcagttcaccaagcctctgaaggaaccaggccttgggcaactctgttttaagcagcttggcgagggcctacggccggctctgcctcgatcagaactccacaaactgatcagccccttgcaatgtctgaaccacgtgtggaaactgcaccacccccaggacggaggccccctgcccctgcccacgcaccccttcccctatagcagactgcctcatcccttcccattccaccctctccagccctggaaacctcaccctctggagtccttcctgggcaaactggcctgtgtagacagccagaaacccttgcctgacccacacctgagcaaactggcctgtgtagacagtccaaagcccctgcctggcccacacctggagcccagctgcctgtctcgtggtgcccatgagaagttttctgtggaggaatacctagtgcatgctctgcaaggcagcgtgagctcaagccaggcccacagcctgaccagcctggccaagacctgggcagcacggggctccagatcccgggagcccagccccaaaactgaggacaacgagggtgtcctgctcactgagaaactcaagccagtggattatgagtaccgagaagaagtccactgggccacgcaccagctccgcctgggcagaggctccttcggagaggtgcacaggatggaggacaagcagactggcttccagtgcgctgtcaaaaaggtgcggctggaagtatttcgggcagaggagctgatggcatgtgcaggattgacctcacccagaattgtccctttgtatggagctgtgagagaagggccttgggtcaacatcttcatggagctgctggaaggtaaggagccaggtcccactctttctccaaattcagggccaagagttcccccctgagtcttgcccaagttggccttggtcactgatctatccattgttaacctcttgaccctgtgaccctgctttccactgcctgccctgtgctcttgcccttggctggcatggaggctcgggcaagtcccatgtatagcctggcctttggtctcctaggtggctccctgggccagctggtcaaggagcagggctgtctcccagaggaccgggccctgtactacctgggccaggccctggagggtctggaatacctccactcacgaaggattctgcatggggacgtcaaagctgacaacgtgctcctgtccagcgatgggagccacgcagccctctgtgactttggccatgctgtgtgtcttcaacctgatggcctgggaaagtccttgctcacaggggactacatccctggcacagagacccacatggctccggaggtggtgctgggcaggagctgcgacgccaaggtggatgtctggagcagctgctgtatgatgctgcacatgctcaacggctgccacccctggactcagttcttccgagggccgctctgcctcaagattgccagcgagcctccgcctgtgagggagatcccaccctcctgcgcccctctcacagcccaggccatccaagaggggctgaggaaagagcccatccaccgcgtgtctgcagcggagctgggagggaaggtgaaccgggcactacagcaagtgggaggtctgaagagcccttggaggggagaatataaagaaccaagacatccaccgccaaatcaagccaattaccaccagaccctccatgcccagccgagagagctttcgccaagggccccagggccccggccagctgaggagacaacaggcagagcccctaagctccagcctcctctcccaccagagcccccagagccaaacaagtctcctcccttgactttgagcaaggaggagtctgggatgtgggaacccttacctctgtcctccctggagccagcccctgccagaaaccccagctcaccagagcggaaagcaaccgtcccggagcaggaactgcagcagctggaaatagaattattcctcaacagcctgtcccagccattttctctggaggagcaggagcaaattctctcgtgcctcagcatcgacagcctctccctgtcggatgacagtgagaagaacccatcaaaggcctctcaaagctcgcgggacaccctgagctcaggcgtacactcctggagcagccaggccgaggctcgaagctccagctggaacatggtgctggcccgggggcggcccaccgacaccccaagctatttcaatggtgtgaaagtccaaatacagtctcttaatggtgaacacctgcacatccgggagttccaccgggtcaaagtgggagacatcgccactggcatcagcagccagatcccagctgcagccttcagcttggtgaccaaagacgggcagcctgttcgctacgacatggaggtgccagactcgggcatcgacctgcagtgcacactggcccctgatggcagcttcgcctggagctggagggtcaagcatggccagctggagaacaggccctaaccctgccctccaccgccggctccacactgccggaagcagccttcctgctcggtgcacgatgctgccctgaaacacaggctcagccgttcccaggggatctgccagccccccggctcagcagtgggaccagggcctcgcagcagcaaggtgggggcaagcagaatgcctcccaggatttcacacctgagccctgccccaccctgctgagaaaacactccgccacgtgaagagacagaggaggatggcaggagttacctcgggaaacaaacaggatcttctctgccctgctccagtcgagttggcctgacccgcttggatcagtgaccatttgctggcagacaggggagagcagcttccagcctgggtcagaaggggtgggcgagcccctcggcccctcaccctccaggctgctgtgagagtgtcaagtgtgtaagggcccaaactcaggttcagtgcagaaccaggtcagcaggtatgcccgcccgtaggttaagggggccctctaaaccccttgcctggcctcacctggccagctcaccccttttgggtgtaggggaaaagaatgcctgaccctgggaaggctccctggtagaatacaccacacttttcaggttgttgcaacacaggtcctgagttgacctctggttcagccaaggaccaaagaaggtgtgtaagtgaagtggttctcagtccccagacatgtgcccctttgctgctggctaccactcttccccagagcagcaggccccgagccccttcaggcccagcactgccccagactcgctggcactcagttccctcatctgtaaaggtgaagggtgatgcaggatatgcctgacaggaacagtctgtggatggacatgatcagtgctaaggaaagcagcagagagagacgctccggcgccccagccccactatcagtgtccagcgtgctggttccccagagcacagctcagcatcacactgacactcaccctgccctgcccctggccagagggtactgccgacggcactttgcactctgatgacctcaaagcactttcatggctgccctctggcagggcagggcagggcagtgacactgtaggagcatagcaagccaggagatggggtgaagggacacagtcttgagctgtccacatgcatgtgactcctcaaacctcttccagatttctctaagaatagcacccccttccccattgccccagcttagcctcttctcccaggggagctactcaggactcacgtagcattaaatcagctgtgaatcgtcagggggtgtctgctagcctcaacctcctggggcaggggacgccgagactccgtgggagaagctcattcccacatcttgccaagacagcctttgtccagctgtccacattgagtcagactgctcccggggagagagccccggcccccagcacataaagaactgcagccttggtactgcagagtctgggttgtagagaactctttgtaagcaataaagtttggggtgatgacaaatgtt

SEQ ID NO: 362628 - DNA, 3508 bp, Homo sapiens
tgcacacaggcagcactccagaactttaattaagtacaagaagttgctcctgataccaagggcacgggatacacaatttagcctctgagggtccagcaggccccccaggcccctgcatcaccactggaaacagcagcagcctctgtgtgtggagcactagggtgctgacaggatgccagggacccagctctggtcccctcaccctgtcttaacagctgcctctgggcccttgcaggtgcggctggaagtatttcgggcagaggagctgatggcatgtgcaggattgacctcacccagaattgtccctttgtatggagctgtgagagaagggccttgggtcaacatcttcatggagctgctggaaggtaaggagccaggtcccactctttctccaaattcagggccaagagttcccccctgagtcttgcccaagttggccttggtcactgatctatccattgttaacctcttgaccctgtgaccctgctttccactgcctgccctgtgctcttgcccttggctggcatggaggctcgggcaagtcccatgtatagcctggcctttggtctcctaggtggctccctgggccagctggtcaaggagcagggctgtctcccagaggaccgggccctgtactacctgggccaggccctggagggtctggaatacctccactcacgaaggattctgcatggggacgtcaaagctgacaacgtgctcctgtccagcgatgggagccacgcagccctctgtgactttggccatgctgtgtgtcttcaacctgatggcctgggaaagtccttgctcacaggggactacatccctggcacagagacccacatggctccggaggtggtgctgggcaggagctgcgacgccaaggtggatgtctggagcagctgctgtatgatgctgcacatgctcaacggctgccacccctggactcagttcttccgagggccgctctgcctcaagattgccagcgagcctccgcctgtgagggagatcccaccctcctgcgcccctctcacagcccaggccatccaagaggggctgaggaaagagcccatccaccgcgtgtctgcagcggagctgggagggaaggtgaaccgggcactacagcaagtgggaggtctgaagagcccttggaggggagaatataaagaaccaagacatccaccgccaaatcaagccaattaccaccagaccctccatgcccagccgagagagctttcgccaagggccccagggccccggccagctgaggagacaacaggcagagcccctaagctccagcctcctctcccaccagagcccccagagccaaacaagtctcctcccttgactttgagcaaggaggagtctgggatgtgggaacccttacctctgtcctccctggagccagcccctgccagaaaccccagctcaccagagcggaaagcaaccgtcccggagcaggaactgcagcagctggaaatagaattattcctcaacagcctgtcccagccattttctctggaggagcaggagcaaattctctcgtgcctcagcatcgacagcctctccctgtcggatgacagtgagaagaacccatcaaaggcctctcaaagctcgcgggacaccctgagctcaggcgtacactcctggagcagccaggccgaggctcgaagctccagctggaacatggtgctggcccgggggcggcccaccgacaccccaagctatttcaatggtgtgaaagtccaaatacagtctcttaatggtgaacacctgcacatccgggagttccaccgggtcaaagtgggagacatcgccactggcatcagcagccagatcccagctgcagccttcagcttggtgaccaaagacgggcagcctgttcgctacgacatggaggtgccagactcgggcatcgacctgcagtgcacactggcccctgatggcagcttcgcctggagctggagggtcaagcatggccagctggagaacaggccctaaccctgccctccaccgccggctccacactgccggaagcagccttcctgctcggtgcacgatgctgccctgaaacacaggctcagccgttcccaggggatctgccagccccccggctcagcagtgggaccagggcctcgcagcagcaaggtgggggcaagcagaatgcctcccaggatttcacacctgagccctgccccaccctgctgagaaaacactccgccacgtgaagagacagaggaggatggcaggagttacctcgggaaacaaacaggatcttctctgccctgctccagtcgagttggcctgacccgcttggatcagtgaccatttgctggcagacaggggagagcagcttccagcctgggtcagaaggggtgggcgagcccctcggcccctcaccctccaggctgctgtgagagtgtcaagtgtgtaagggcccaaactcaggttcagtgcagaaccaggtcagcaggtatgcccgcccgtaggttaagggggccctctaaaccccttgcctggcctcacctggccagctcaccccttttgggtgtaggggaaaagaatgcctgaccctgggaaggctccctggtagaatacaccacacttttcaggttgttgcaacacaggtcctgagttgacctctggttcagccaaggaccaaagaaggtgtgtaagtgaagtggttctcagtccccagacatgtgcccctttgctgctggctaccactcttccccagagcagcaggccccgagccccttcaggcccagcactgccccagactcgctggcactcagttccctcatctgtaaaggtgaagggtgatgcaggatatgcctgacaggaacagtctgtggatggacatgatcagtgctaaggaaagcagcagagagagacgctccggcgccccagccccactatcagtgtccagcgtgctggttccccagagcacagctcagcatcacactgacactcaccctgccctgcccctggccagagggtactgccgacggcactttgcactctgatgacctcaaagcactttcatggctgccctctggcagggcagggcagggcagtgacactgtaggagcatagcaagccaggagatggggtgaagggacacagtcttgagctgtccacatgcatgtgactcctcaaacctcttccagatttctctaagaatagcacccccttccccattgccccagcttagcctcttctcccaggggagctactcaggactcacgtagcattaaatcagctgtgaatcgtcagggggtgtctgctagcctcaacctcctggggcaggggacgccgagactccgtgggagaagctcattcccacatcttgccaagacagcctttgtccagctgtccacattgagtcagactgctcccggggagagagccccggcccccagcacataaagaactgcagccttggtactgcagagtctgggttgtagagaactctttgtaagcaataaagtttggggtgatgacaaatgtt

SEQ ID NO: 362629 - DNA, 4076 bp, Homo sapiens
tgtccctgggccctggccctctgtgctgatagctgtgtttccccccgcaggaggatgagtctccactcggcgccccatatgttagaaacaccccgcagttcaccaagcctctgaaggaaccaggccttgggcaactctgttttaagcagcttggcgagggcctacggccggctctgcctcgatcagaactccacaaactgatcagccccttgcaatgtctgaaccacgtgtggaaactgcaccacccccaggacggaggccccctgcccctgcccacgcaccccttcccctatagcagactgcctcatcccttcccattccaccctctccagccctggaaacctcaccctctggagtccttcctgggcaaactggcctgtgtagacagccagaaacccttgcctgacccacacctgagcaaactggcctgtgtagacagtccaaagcccctgcctggcccacacctggagcccagctgcctgtctcgtggtgcccatgagaagttttctgtggaggaatacctagtgcatgctctgcaaggcagcgtgagctcaagccaggcccacagcctgaccagcctggccaagacctgggcagcacggggctccagatcccgggagcccagccccaaaactgaggacaacgagggtgtcctgctcactgagaaactcaagccagtggattatgagtaccgagaagaagtccactgggccacgcaccagctccgcctgggcagaggctccttcggagaggtgcacaggatggaggacaagcagactggcttccagtgcgctgtcaaaaaggtgcggctggaagtatttcgggcagaggagctgatggcatgtgcaggattgacctcacccagaattgtccctttgtatggagctgtgagagaagggccttgggtcaacatcttcatggagctgctggaaggtaaggagccaggtcccactctttctccaaattcagggccaagagttcccccctgagtcttgcccaagttggccttggtcactgatctatccattgttaacctcttgaccctgtgaccctgctttccactgcctgccctgtgctcttgcccttggctggcatggaggctcgggcaagtcccatgtatagcctggcctttggtctcctaggtggctccctgggccagctggtcaaggagcagggctgtctcccagaggaccgggccctgtactacctgggccaggccctggagggtctggaatacctccactcacgaaggattctgcatggggacgtcaaagctgacaacgtgctcctgtccagcgatgggagccacgcagccctctgtgactttggccatgctgtgtgtcttcaacctgatggcctgggaaagtccttgctcacaggggactacatccctggcacagagacccacatggctccggaggtggtgctgggcaggagctgcgacgccaaggtggatgtctggagcagctgctgtatgatgctgcacatgctcaacggctgccacccctggactcagttcttccgagggccgctctgcctcaagattgccagcgagcctccgcctgtgagggagatcccaccctcctgcgcccctctcacagcccaggccatccaagaggggctgaggaaagagcccatccaccgcgtgtctgcagcggagctgggagggaaggtgaaccgggcactacagcaagtgggaggtctgaagagcccttggaggggagaatataaagaaccaagacatccaccgccaaatcaagccaattaccaccagaccctccatgcccagccgagagagctttcgccaagggccccagggccccggccagctgaggagacaacaggcagagcccctaagctccagcctcctctcccaccagagcccccagagccaaacaagtctcctcccttgactttgagcaaggaggagtctgggatgtgggaacccttacctctgtcctccctggagccagcccctgccagaaaccccagctcaccagagcggaaagcaaccgtcccggagcaggaactgcagcagctggaaatagaattattcctcaacagcctgtcccagccattttctctggaggagcaggagcaaattctctcgtgcctcagcatcgacagcctctccctgtcggatgacagtgagaagaacccatcaaaggcctctcaaagctcgcgggacaccctgagctcaggcgtacactcctggagcagccaggccgaggctcgaagctccagctggaacatggtgctggcccgggggcggcccaccgacaccccaagctatttcaatggtgtgaaagtccaaatacagtctcttaatggtgaacacctgcacatccgggagttccaccgggtcaaagtgggagacatcgccactggcatcagcagccagatcccagctgcagccttcagcttggtgaccaaagacgggcagcctgttcgctacgacatggaggtgccagactcgggcatcgacctgcagtgcacactggcccctgatggcagcttcgcctggagctggagggtcaagcatggccagctggagaacaggccctaaccctgccctccaccgccggctccacactgccggaagcagccttcctgctcggtgcacgatgctgccctgaaacacaggctcagccgttcccaggggatctgccagccccccggctcagcagtgggaccagggcctcgcagcagcaaggtgggggcaagcagaatgcctcccaggatttcacacctgagccctgccccaccctgctgagaaaacactccgccacgtgaagagacagaggaggatggcaggagttacctcgggaaacaaacaggatcttctctgccctgctccagtcgagttggcctgacccgcttggatcagtgaccatttgctggcagacaggggagagcagcttccagcctgggtcagaaggggtgggcgagcccctcggcccctcaccctccaggctgctgtgagagtgtcaagtgtgtaagggcccaaactcaggttcagtgcagaaccaggtcagcaggtatgcccgcccgtaggttaagggggccctctaaaccccttgcctggcctcacctggccagctcaccccttttgggtgtaggggaaaagaatgcctgaccctgggaaggctccctggtagaatacaccacacttttcaggttgttgcaacacaggtcctgagttgacctctggttcagccaaggaccaaagaaggtgtgtaagtgaagtggttctcagtccccagacatgtgcccctttgctgctggctaccactcttccccagagcagcaggccccgagccccttcaggcccagcactgccccagactcgctggcactcagttccctcatctgtaaaggtgaagggtgatgcaggatatgcctgacaggaacagtctgtggatggacatgatcagtgctaaggaaagcagcagagagagacgctccggcgccccagccccactatcagtgtccagcgtgctggttccccagagcacagctcagcatcacactgacactcaccctgccctgcccctggccagagggtactgccgacggcactttgcactctgatgacctcaaagcactttcatggctgccctctggcagggcagggcagggcagtgacactgtaggagcatagcaagccaggagatggggtgaagggacacagtcttgagctgtccacatgcatgtgactcctcaaacctcttccagatttctctaagaatagcacccccttccccattgccccagcttagcctcttctcccaggggagctactcaggactcacgtagcattaaatcagctgtgaatcgtcagggggtgtctgctagcctcaacctcctggggcaggggacgccgagactccgtgggagaagctcattcccacatcttgccaagacagcctttgtccagctgtccacattgagtcagactgctcccggggagagagccccggcccccagcacataaagaactgcagccttggtactgcagagtctgggttgtagagaactctttgtaagcaataaagtttggggtgatgacaaatgtt

SEQ ID NO: 362630 - DNA, 3773 bp, Homo sapiens
ccgcccctcttcactgttcctcccttccctccaccttctagctcctgagttttgttttttcattgtcaaggtgattggcagttctgtttctgtctcaccatcacaagtctgggatgtttttcatcacaaggatcagtggccgcagcccatgaacccttccctctgcttcacttcattcctctgccccctctctggtgctgcccggctcagatccctgccttcgccccagggctgcctggttgtgagggctcagctcagcagccctggcaaggtcaccagctggagagtcttcctcactgtagccctgtagccctctgctgccctggccactgaaactgtcctctctctcctgccaaccccagaaactcaagccagtggattatgagtaccgagaagaagtccactgggccacgcaccagctccgcctgggcagaggctccttcggagaggtgcacaggatggaggacaagcagactggcttccagtgcgctgtcaaaaaggtgcggctggaagtatttcgggcagaggagctgatggcatgtgcaggattgacctcacccagaattgtccctttgtatggagctgtgagagaagggccttgggtcaacatcttcatggagctgctggaaggtaaggagccaggtcccactctttctccaaattcagggccaagagttcccccctgagtcttgcccaagttggccttggtcactgatctatccattgttaacctcttgaccctgtgaccctgctttccactgcctgccctgtgctcttgcccttggctggcatggaggctcgggcaagtcccatgtatagcctggcctttggtctcctaggtggctccctgggccagctggtcaaggagcagggctgtctcccagaggaccgggccctgtactacctgggccaggccctggagggtctggaatacctccactcacgaaggattctgcatggggacgtcaaagctgacaacgtgctcctgtccagcgatgggagccacgcagccctctgtgactttggccatgctgtgtgtcttcaacctgatggcctgggaaagtccttgctcacaggggactacatccctggcacagagacccacatggctccggaggtggtgctgggcaggagctgcgacgccaaggtggatgtctggagcagctgctgtatgatgctgcacatgctcaacggctgccacccctggactcagttcttccgagggccgctctgcctcaagattgccagcgagcctccgcctgtgagggagatcccaccctcctgcgcccctctcacagcccaggccatccaagaggggctgaggaaagagcccatccaccgcgtgtctgcagcggagctgggagggaaggtgaaccgggcactacagcaagtgggaggtctgaagagcccttggaggggagaatataaagaaccaagacatccaccgccaaatcaagccaattaccaccagaccctccatgcccagccgagagagctttcgccaagggccccagggccccggccagctgaggagacaacaggcagagcccctaagctccagcctcctctcccaccagagcccccagagccaaacaagtctcctcccttgactttgagcaaggaggagtctgggatgtgggaacccttacctctgtcctccctggagccagcccctgccagaaaccccagctcaccagagcggaaagcaaccgtcccggagcaggaactgcagcagctggaaatagaattattcctcaacagcctgtcccagccattttctctggaggagcaggagcaaattctctcgtgcctcagcatcgacagcctctccctgtcggatgacagtgagaagaacccatcaaaggcctctcaaagctcgcgggacaccctgagctcaggcgtacactcctggagcagccaggccgaggctcgaagctccagctggaacatggtgctggcccgggggcggcccaccgacaccccaagctatttcaatggtgtgaaagtccaaatacagtctcttaatggtgaacacctgcacatccgggagttccaccgggtcaaagtgggagacatcgccactggcatcagcagccagatcccagctgcagccttcagcttggtgaccaaagacgggcagcctgttcgctacgacatggaggtgccagactcgggcatcgacctgcagtgcacactggcccctgatggcagcttcgcctggagctggagggtcaagcatggccagctggagaacaggccctaaccctgccctccaccgccggctccacactgccggaagcagccttcctgctcggtgcacgatgctgccctgaaacacaggctcagccgttcccaggggatctgccagccccccggctcagcagtgggaccagggcctcgcagcagcaaggtgggggcaagcagaatgcctcccaggatttcacacctgagccctgccccaccctgctgagaaaacactccgccacgtgaagagacagaggaggatggcaggagttacctcgggaaacaaacaggatcttctctgccctgctccagtcgagttggcctgacccgcttggatcagtgaccatttgctggcagacaggggagagcagcttccagcctgggtcagaaggggtgggcgagcccctcggcccctcaccctccaggctgctgtgagagtgtcaagtgtgtaagggcccaaactcaggttcagtgcagaaccaggtcagcaggtatgcccgcccgtaggttaagggggccctctaaaccccttgcctggcctcacctggccagctcaccccttttgggtgtaggggaaaagaatgcctgaccctgggaaggctccctggtagaatacaccacacttttcaggttgttgcaacacaggtcctgagttgacctctggttcagccaaggaccaaagaaggtgtgtaagtgaagtggttctcagtccccagacatgtgcccctttgctgctggctaccactcttccccagagcagcaggccccgagccccttcaggcccagcactgccccagactcgctggcactcagttccctcatctgtaaaggtgaagggtgatgcaggatatgcctgacaggaacagtctgtggatggacatgatcagtgctaaggaaagcagcagagagagacgctccggcgccccagccccactatcagtgtccagcgtgctggttccccagagcacagctcagcatcacactgacactcaccctgccctgcccctggccagagggtactgccgacggcactttgcactctgatgacctcaaagcactttcatggctgccctctggcagggcagggcagggcagtgacactgtaggagcatagcaagccaggagatggggtgaagggacacagtcttgagctgtccacatgcatgtgactcctcaaacctcttccagatttctctaagaatagcacccccttccccattgccccagcttagcctcttctcccaggggagctactcaggactcacgtagcattaaatcagctgtgaatcgtcagggggtgtctgctagcctcaacctcctggggcaggggacgccgagactccgtgggagaagctcattcccacatcttgccaagacagcctttgtccagctgtccacattgagtcagactgctcccggggagagagccccggcccccagcacataaagaactgcagccttggtactgcagagtctgggttgtagagaactctttgtaagcaataaagtttggggtgatgacaaatgtt

SEQ ID NO: 362631 - DNA, 1971 bp, Homo sapiens
  misc_feature (26)..(26): n is a, c, g, or t
ggatcctggagcccagggccctgagnccgtacccaatcctgttgtttcagaacccatcaaaggcctctcaaagctcgcgggacaccctgagctcaggcgtacactcctggagcagccaggccgaggctcgaagctccagctggaacatggtgctggcccgggggcggcccaccgacaccccaagctatttcaatggtgtgaaagtccaaatacagtctcttaatggtgaacacctgcacatccgggagttccaccgggtcaaagtgggagacatcgccactggcatcagcagccagatcccagctgcagccttcagcttggtgaccaaagacgggcagcctgttcgctacgacatggaggtgccagactcgggcatcgacctgcagtgcacactggcccctgatggcagcttcgcctggagctggagggtcaagcatggccagctggagaacaggccctaaccctgccctccaccgccggctccacactgccggaagcagccttcctgctcggtgcacgatgctgccctgaaacacaggctcagccgttcccaggggatctgccagccccccggctcagcagtgggaccagggcctcgcagcagcaaggtgggggcaagcagaatgcctcccaggatttcacacctgagccctgccccaccctgctgagaaaacactccgccacgtgaagagacagaggaggatggcaggagttacctcgggaaacaaacaggatcttctctgccctgctccagtcgagttggcctgacccgcttggatcagtgaccatttgctggcagacaggggagagcagcttccagcctgggtcagaaggggtgggcgagcccctcggcccctcaccctccaggctgctgtgagagtgtcaagtgtgtaagggcccaaactcaggttcagtgcagaaccaggtcagcaggtatgcccgcccgtaggttaagggggccctctaaaccccttgcctggcctcacctggccagctcaccccttttgggtgtaggggaaaagaatgcctgaccctgggaaggctccctggtagaatacaccacacttttcaggttgttgcaacacaggtcctgagttgacctctggttcagccaaggaccaaagaaggtgtgtaagtgaagtggttctcagtccccagacatgtgcccctttgctgctggctaccactcttccccagagcagcaggccccgagccccttcaggcccagcactgccccagactcgctggcactcagttccctcatctgtaaaggtgaagggtgatgcaggatatgcctgacaggaacagtctgtggatggacatgatcagtgctaaggaaagcagcagagagagacgctccggcgccccagccccactatcagtgtccagcgtgctggttccccagagcacagctcagcatcacactgacactcaccctgccctgcccctggccagagggtactgccgacggcactttgcactctgatgacctcaaagcactttcatggctgccctctggcagggcagggcagggcagtgacactgtaggagcatagcaagccaggagatggggtgaagggacacagtcttgagctgtccacatgcatgtgactcctcaaacctcttccagatttctctaagaatagcacccccttccccattgccccagcttagcctcttctcccaggggagctactcaggactcacgtagcattaaatcagctgtgaatcgtcagggggtgtctgctagcctcaacctcctggggcaggggacgccgagactccgtgggagaagctcattcccacatcttgccaagacagcctttgtccagctgtccacattgagtcagactgctcccggggagagagccccggcccccagcacataaagaactgcagccttggtactgcagagtctgggttgtagagaactctttgtaagcaataaagtttggggtgatgacaaatgtt

SEQ ID NO: 362632 - DNA, 1826 bp, Homo sapiens
  misc_feature (15)..(15): n is a, c, g, or t
ttggggagccagcanccgctctcctgactatcaccttgtccgccttctaggtgtgaaagtccaaatacagtctcttaatggtgaacacctgcacatccgggagttccaccgggtcaaagtgggagacatcgccactggcatcagcagccagatcccagctgcagccttcagcttggtgaccaaagacgggcagcctgttcgctacgacatggaggtgccagactcgggcatcgacctgcagtgcacactggcccctgatggcagcttcgcctggagctggagggtcaagcatggccagctggagaacaggccctaaccctgccctccaccgccggctccacactgccggaagcagccttcctgctcggtgcacgatgctgccctgaaacacaggctcagccgttcccaggggatctgccagccccccggctcagcagtgggaccagggcctcgcagcagcaaggtgggggcaagcagaatgcctcccaggatttcacacctgagccctgccccaccctgctgagaaaacactccgccacgtgaagagacagaggaggatggcaggagttacctcgggaaacaaacaggatcttctctgccctgctccagtcgagttggcctgacccgcttggatcagtgaccatttgctggcagacaggggagagcagcttccagcctgggtcagaaggggtgggcgagcccctcggcccctcaccctccaggctgctgtgagagtgtcaagtgtgtaagggcccaaactcaggttcagtgcagaaccaggtcagcaggtatgcccgcccgtaggttaagggggccctctaaaccccttgcctggcctcacctggccagctcaccccttttgggtgtaggggaaaagaatgcctgaccctgggaaggctccctggtagaatacaccacacttttcaggttgttgcaacacaggtcctgagttgacctctggttcagccaaggaccaaagaaggtgtgtaagtgaagtggttctcagtccccagacatgtgcccctttgctgctggctaccactcttccccagagcagcaggccccgagccccttcaggcccagcactgccccagactcgctggcactcagttccctcatctgtaaaggtgaagggtgatgcaggatatgcctgacaggaacagtctgtggatggacatgatcagtgctaaggaaagcagcagagagagacgctccggcgccccagccccactatcagtgtccagcgtgctggttccccagagcacagctcagcatcacactgacactcaccctgccctgcccctggccagagggtactgccgacggcactttgcactctgatgacctcaaagcactttcatggctgccctctggcagggcagggcagggcagtgacactgtaggagcatagcaagccaggagatggggtgaagggacacagtcttgagctgtccacatgcatgtgactcctcaaacctcttccagatttctctaagaatagcacccccttccccattgccccagcttagcctcttctcccaggggagctactcaggactcacgtagcattaaatcagctgtgaatcgtcagggggtgtctgctagcctcaacctcctggggcaggggacgccgagactccgtgggagaagctcattcccacatcttgccaagacagcctttgtccagctgtccacattgagtcagactgctcccggggagagagccccggcccccagcacataaagaactgcagccttggtactgcagagtctgggttgtagagaactctttgtaagcaataaagtttggggtgatgacaaatgtt

SEQ ID NO: 362633 - DNA, 4712 bp, Homo sapiens
cggtcggcggccggcggcgggagatcgcgggcgagcggagcgcaacactcgcttggttggggagatcggcgcttggccggatgagcacaagcctgggagatggcagtgatggaaatggcctgcccaggtgcccctggctcagcagtggggcagcagaaggaactccccaaagccaaggagaagacgccgccactggggaagaaacagagctccgtctacaagcttgaggccgtggagaagagccctgtgttctgcggaaagtgggagatcctgaatgacgtgattaccaagggcacagccaaggaaggctccgaggcagggccagctgccatctctatcatcgcccaggctgagtgtgagaatagccaagagttcagccccaccttttcagaacgcattttcatcgctgggtccaaacagtacagccagtccgagagtcttgatcagatccccaacaatgtggcccatgctacagagggcaaaatggcccgtgtgtgttggaagggaaagcgtcgcagcaaagcccggaagaaacggaagaagaagagctcaaagtccctggctcatgcaggagtggccttggccaaacccctccccaggacccctgagcaggagagctgcaccatcccagtgcaggaggatgagtctccactcggcgccccatatgttagaaacaccccgcagttcaccaagcctctgaaggaaccaggccttgggcaactctgttttaagcagcttggcgagggcctacggccggctctgcctcgatcagaactccacaaactgatcagccccttgcaatgtctgaaccacgtgtggaaactgcaccacccccaggacggaggccccctgcccctgcccacgcaccccttcccctatagcagactgcctcatcccttcccattccaccctctccagccctggaaacctcaccctctggagtccttcctgggcaaactggcctgtgtagacagccagaaacccttgcctgacccacacctgagcaaactggcctgtgtagacagtccaaagcccctgcctggcccacacctggagcccagctgcctgtctcgtggtgcccatgagaagttttctgtggaggaatacctagtgcatgctctgcaaggcagcgtgagctcaagccaggcccacagcctgaccagcctggccaagacctgggcagcacggggctccagatcccgggagcccagccccaaaactgaggacaacgagggtgtcctgctcactgagaaactcaagccagtggattatgagtaccgagaagaagtccactgggccacgcaccagctccgcctgggcagaggctccttcggagaggtgcacaggatggaggacaagcagactggcttccagtgcgctgtcaaaaaggtgcggctggaagtatttcgggcagaggagctgatggcatgtgcaggattgacctcacccagaattgtccctttgtatggagctgtgagagaagggccttgggtcaacatcttcatggagctgctggaaggtaaggagccaggtcccactctttctccaaattcagggccaagagttcccccctgagtcttgcccaagttggccttggtcactgatctatccattgttaacctcttgaccctgtgaccctgctttccactgcctgccctgtgctcttgcccttggctggcatggaggctcgggcaagtcccatgtatagcctggcctttggtctcctaggtggctccctgggccagctggtcaaggagcagggctgtctcccagaggaccgggccctgtactacctgggccaggccctggagggtctggaatacctccactcacgaaggattctgcatggggacgtcaaagctgacaacgtgctcctgtccagcgatgggagccacgcagccctctgtgactttggccatgctgtgtgtcttcaacctgatggcctgggaaagtccttgctcacaggggactacatccctggcacagagacccacatggctccggaggtggtgctgggcaggagctgcgacgccaaggtggatgtctggagcagctgctgtatgatgctgcacatgctcaacggctgccacccctggactcagttcttccgagggccgctctgcctcaagattgccagcgagcctccgcctgtgagggagatcccaccctcctgcgcccctctcacagcccaggccatccaagaggggctgaggaaagagcccatccaccgcgtgtctgcagcggagctgggagggaaggtgaaccgggcactacagcaagtgggaggtctgaagagcccttggaggggagaatataaagaaccaagacatccaccgccaaatcaagccaattaccaccagaccctccatgcccagccgagagagctttcgccaagggccccagggccccggccagctgaggagacaacaggcagagcccctaagctccagcctcctctcccaccagagcccccagagccaaacaagtctcctcccttgactttgagcaaggaggagtctgggatgtgggaacccttacctctgtcctccctggagccagcccctgccagaaaccccagctcaccagagcggaaagcaaccgtcccggagcaggaactgcagcagctggaaatagaattattcctcaacagcctgtcccagccattttctctggaggagcaggagcaaattctctcgtgcctcagcatcgacagcctctccctgtcggatgacagtgagaagaacccatcaaaggcctctcaaagctcgcgggacaccctgagctcaggcgtacactcctggagcagccaggccgaggctcgaagctccagctggaacatggtgctggcccgggggcggcccaccgacaccccaagctatttcaatggtgtgaaagtccaaatacagtctcttaatggtgaacacctgcacatccgggagttccaccgggtcaaagtgggagacatcgccactggcatcagcagccagatcccagctgcagccttcagcttggtgaccaaagacgggcagcctgttcgctacgacatggaggtgccagactcgggcatcgacctgcagtgcacactggcccctgatggcagcttcgcctggagctggagggtcaagcatggccagctggagaacaggccctaaccctgccctccaccgccggctccacactgccggaagcagccttcctgctcggtgcacgatgctgccctgaaacacaggctcagccgttcccaggggatctgccagccccccggctcagcagtgggaccagggcctcgcagcagcaaggtgggggcaagcagaatgcctcccaggatttcacacctgagccctgccccaccctgctgagaaaacactccgccacgtgaagagacagaggaggatggcaggagttacctcgggaaacaaacaggatcttctctgccctgctccagtcgagttggcctgacccgcttggatcagtgaccatttgctggcagacaggggagagcagcttccagcctgggtcagaaggggtgggcgagcccctcggcccctcaccctccaggctgctgtgagagtgtcaagtgtgtaagggcccaaactcaggttcagtgcagaaccaggtcagcaggtatgcccgcccgtaggttaagggggccctctaaaccccttgcctggcctcacctggccagctcaccccttttgggtgtaggggaaaagaatgcctgaccctgggaaggctccctggtagaatacaccacacttttcaggttgttgcaacacaggtcctgagttgacctctggttcagccaaggaccaaagaaggtgtgtaagtgaagtggttctcagtccccagacatgtgcccctttgctgctggctaccactcttccccagagcagcaggccccgagccccttcaggcccagcactgccccagactcgctggcactcagttccctcatctgtaaaggtgaagggtgatgcaggatatgcctgacaggaacagtctgtggatggacatgatcagtgctaaggaaagcagcagagagagacgctccggcgccccagccccactatcagtgtccagcgtgctggttccccagagcacagctcagcatcacactgacactcaccctgccctgcccctggccagagggtactgccgacggcactttgcactctgatgacctcaaagcactttcatggctgccctctggcagggcagggcagggcagtgacactgtaggagcatagcaagccaggagatggggtgaagggacacagtcttgagctgtccacatgcatgtgactcctcaaacctcttccagatttctctaagaatagcacccccttccccattgccccagcttagcctcttctcccaggggagctactcaggactcacgtagcattaaatcagctgtgaatcgtcagggggtgtctgctagcctcaacctcctggggcaggggacgccgagactccgtgggagaagctcattcccacatcttgccaagacagcctttgtccagctgtccacattgagtcagactgctcccggggagagagccccggcccccagcacataaagaactgcagccttggtactgcagagtctgggttgtagagaactctttgtaagcaataaagtttggggtgatgacaaatgtttccaggccatcggtgtcctctctcttgcctgccggcctgctgaacctcac

SEQ ID NO: 362634 - DNA, 2936 bp, Homo sapiens
cggtcggcggccggcggcgggagatcgcgggcgagcggagcgcaacactcgcttggttggggagatcggcgcttggccggatgagcacaagcctgggagatggcagtgatggaaatggcctgcccaggtgcccctggctcagcagtggggcagcagaaggaactccccaaagccaaggagaagacgccgccactggggaagaaacagagctccgtctacaagcttgaggccgtggagaagagccctgtgttctgcggaaagtgggagatcctgaatgacgtgattaccaagggcacagccaaggaaggctccgaggcagggccagctgccatctctatcatcgcccaggctgagtgtgagaatagccaagagttcagccccaccttttcagaacgcattttcatcgctgggtccaaacagtacagccagtccgagagtcttgatcagatccccaacaatgtggcccatgctacagagggcaaaatggcccgtgtgtgttggaagggaaagcgtcgcagcaaagcccggaagaaacggaagaagaagagctcaaagtccctggctcatgcaggagtggccttggccaaacccctccccaggacccctgagcaggagagctgcaccatcccagtgcaggaggatgagtctccactcggcgccccatatgttagaaacaccccgcagttcaccaagcctctgaaggaaccaggccttgggcaactctgttttaagcagcttggcgagggcctacggccggctctgcctcgatcagaactccacaaactgatcagccccttgcaatgtctgaaccacgtgtggaaactgcaccacccccaggacggaggccccctgcccctgcccacgcaccccttcccctatagcagactgcctcatcccttcccattccaccctctccagccctggaaacctcaccctctggagtccttcctgggcaaactggcctgtgtagacagccagaaacccttgcctgacccacacctgagcaaactggcctgtgtagacagtccaaagcccctgcctggcccacacctggagcccagctgcctgtctcgtggtgcccatgagaagttttctgtggaggaatacctagtgcatgctctgcaaggcagcgtgagctcaagccaggcccacagcctgaccagcctggccaagacctgggcagcacggggctccagatcccgggagcccagccccaaaactgaggacaacgagggtgtcctgctcactgagaaactcaagccagtggattatgagtaccgagaagaagtccactgggccacgcaccagctccgcctgggcagaggctccttcggagaggtgcacaggatggaggacaagcagactggcttccagtgcgctgtcaaaaaggtgcggctggaagtatttcgggcagaggagctgatggcatgtgcaggattgacctcacccagaattgtccctttgtatggagctgtgagagaagggccttgggtcaacatcttcatggagctgctggaaggtaaggagccaggtcccactctttctccaaattcagggccaagagttcccccctgagtcttgcccaagttggccttggtcactgatctatccattgttaacctcttgaccctgtgaccctgctttccactgcctgccctgtgctcttgcccttggctggcatggaggctcgggcaagtcccatgtatagcctggcctttggtctcctaggtggctccctgggccagctggtcaaggagcagggctgtctcccagaggaccgggccctgtactacctgggccaggccctggagggtctggaatacctccactcacgaaggattctgcatggggacgtcaaagctgacaacgtgctcctgtccagcgatgggagccacgcagccctctgtgactttggccatgctgtgtgtcttcaacctgatggcctgggaaagtccttgctcacaggggactacatccctggcacagagacccacatggctccggaggtggtgctgggcaggagctgcgacgccaaggtggatgtctggagcagctgctgtatgatgctgcacatgctcaacggctgccacccctggactcagttcttccgagggccgctctgcctcaagattgccagcgagcctccgcctgtgagggagatcccaccctcctgcgcccctctcacagcccaggccatccaagaggggctgaggaaagagcccatccaccgcgtgtctgcagcggagctgggagggaaggtgaaccgggcactacagcaagtgggaggtctgaagagcccttggaggggagaatataaagaaccaagacatccaccgccaaatcaagccaattaccaccagaccctccatgcccagccgagagagctttcgccaagggccccagggccccggccagctgaggagacaacaggcagagcccctaagctccagcctcctctcccaccagagcccccagagccaaacaagtctcctcccttgactttgagcaaggaggagtctgggatgtgggaacccttacctctgtcctccctggagccagcccctgccagaaaccccagctcaccagagcggaaagcaaccgtcccggagcaggaactgcagcagctggaaatagaattattcctcaacagcctgtcccagccattttctctggaggagcaggagcaaattctctcgtgcctcagcatcgacagcctctccctgtcggatgacagtgagaagaacccatcaaaggcctctcaaagctcgcgggacaccctgagctcaggcgtacactcctggagcagccaggccgaggctcgaagctccagctggaacatggtgctggcccgggggcggcccaccgacaccccaagctatttcaatggtacagtccaattcccacctgctcagcagtccccgtggcagctgatctgc

SEQ ID NO: 362635 - DNA, 1910 bp, Homo sapiens
cggtcggcggccggcggcgggagatcgcgggcgagcggagcgcaacactcgcttggttggggagatcggcgcttggccggatgagcacaagcctgggagatggcagtgatggaaatggcctgcccaggtgcccctggctcagcagtggggcagcagaaggaactccccaaagccaaggagaagacgccgccactggggaagaaacagagctccgtctacaagcttgaggccgtggagaagagccctgtgttctgcggaaagtgggagatcctgaatgacgtgattaccaagggcacagccaaggaaggctccgaggcagggccagctgccatctctatcatcgcccaggctgagtgtgagaatagccaagagttcagccccaccttttcagaacgcattttcatcgctgggtccaaacagtacagccagtccgagagtcttgatcagatccccaacaatgtggcccatgctacagagggcaaaatggcccgtgtgtgttggaagggaaagcgtcgcagcaaagcccggaagaaacggaagaagaagagctcaaagtccctggctcatgcaggagtggccttggccaaacccctccccaggacccctgagcaggagagctgcaccatcccagtgcaggaggatgagtctccactcggcgccccatatgttagaaacaccccgcagttcaccaagcctctgaaggaaccaggccttgggcaactctgttttaagcagcttggcgagggcctacggccggctctgcctcgatcagaactccacaaactgatcagccccttgcaatgtctgaaccacgtgtggaaactgcaccacccccaggacggaggccccctgcccctgcccacgcaccccttcccctatagcagactgcctcatcccttcccattccaccctctccagccctggaaacctcaccctctggagtccttcctgggcaaactggcctgtgtagacagccagaaacccttgcctgacccacacctgagcaaactggcctgtgtagacagtccaaagcccctgcctggcccacacctggagcccagctgcctgtctcgtggtgcccatgagaagttttctgtggaggaatacctagtgcatgctctgcaaggcagcgtgagctcaagccaggcccacagcctgaccagcctggccaagacctgggcagcacggggctccagatcccgggagcccagccccaaaactgaggacaacgagggtgtcctgctcactgagaaactcaagccagtggattatgagtaccgagaagaagtccactgggccacgcaccagctccgcctgggcagaggctccttcggagaggtgcacaggatggaggacaagcagactggcttccagtgcgctgtcaaaaaggtgcggctggaagtatttcgggcagaggagctgatggcatgtgcaggattgacctcacccagaattgtccctttgtatggagctgtgagagaagggccttgggtcaacatcttcatggagctgctggaaggtaaggagccaggtcccactctttctccaaattcagggccaagagttcccccctgagtcttgcccaagttggccttggtcactgatctatccattgttaacctcttgaccctgtgaccctgctttccactgcctgccctgtgctcttgcccttggctggcatggaggctcgggcaagtcccatgtatagcctggcctttggtctcctaggtggctccctgggccagctggtcaaggagcagggctgtctcccagaggaccgggccctgtactacctgggccaggccctggagggtctggaatacctccactcacgaaggattctgcatggggacgtcaaaggtaaggcccaggccccacggccctgatccccagcaggctcttctctcaca

SEQ ID NO: 362636 - DNA, 2179 bp, Homo sapiens
cggtcggcggccggcggcgggagatcgcgggcgagcggagcgcaacactcgcttggttggggagatcggcgcttggccggatgagcacaagcctgggagatggcagtgatggaaatggcctgcccaggtgcccctggctcagcagtggggcagcagaaggaactccccaaagccaaggagaagacgccgccactggggaagaaacagagctccgtctacaagcttgaggccgtggagaagagccctgtgttctgcggaaagtgggagatcctgaatgacgtgattaccaagggcacagccaaggaaggctccgaggcagggccagctgccatctctatcatcgcccaggctgagtgtgagaatagccaagagttcagccccaccttttcagaacgcattttcatcgctgggtccaaacagtacagccagtccgagagtcttgatcagatccccaacaatgtggcccatgctacagagggcaaaatggcccgtgtgtgttggaagggaaagcgtcgcagcaaagcccggaagaaacggaagaagaagagctcaaagtccctggctcatgcaggagtggccttggccaaacccctccccaggacccctgagcaggagagctgcaccatcccagtgcaggaggatgagtctccactcggcgccccatatgttagaaacaccccgcagttcaccaagcctctgaaggaaccaggccttgggcaactctgttttaagcagcttggcgagggcctacggccggctctgcctcgatcagaactccacaaactgatcagccccttgcaatgtctgaaccacgtgtggaaactgcaccacccccaggacggaggccccctgcccctgcccacgcaccccttcccctatagcagactgcctcatcccttcccattccaccctctccagccctggaaacctcaccctctggagtccttcctgggcaaactggcctgtgtagacagccagaaacccttgcctgacccacacctgagcaaactggcctgtgtagacagtccaaagcccctgcctggcccacacctggagcccagctgcctgtctcgtggtgcccatgagaagttttctgtggaggaatacctagtgcatgctctgcaaggcagcgtgagctcaagccaggcccacagcctgaccagcctggccaagacctgggcagcacggggctccagatcccgggagcccagccccaaaactgaggacaacgagggtgtcctgctcactgagaaactcaagccagtggattatgagtaccgagaagaagtccactgggccacgcaccagctccgcctgggcagaggctccttcggagaggtgcacaggatggaggacaagcagactggcttccagtgcgctgtcaaaaaggtgcggctggaagtatttcgggcagaggagctgatggcatgtgcaggattgacctcacccagaattgtccctttgtatggagctgtgagagaagggccttgggtcaacatcttcatggagctgctggaaggtaaggagccaggtcccactctttctccaaattcagggccaagagttcccccctgagtcttgcccaagttggccttggtcactgatctatccattgttaacctcttgaccctgtgaccctgctttccactgcctgccctgtgctcttgcccttggctggcatggaggctcgggcaagtcccatgtatagcctggcctttggtctcctaggtggctccctgggccagctggtcaaggagcagggctgtctcccagaggaccgggccctgtactacctgggccaggccctggagggtctggaatacctccactcacgaaggattctgcatggggacgtcaaagctgacaacgtgctcctgtccagcgatgggagccacgcagccctctgtgactttggccatgctgtgtgtcttcaacctgatggcctgggaaagtccttgctcacaggggactacatccctggcacagagacccacatggctccggaggtggtgctgggcaggagctgcgacgccaaggtggatgtctggagcagctgctgtatgatgctgcacatgctcaacggctgccacccctggactcagttcttccgagggccgctctgcctcaaggtcggtgacggcacccagcatggccaacagggggagctgcagggccctgg

SEQ ID NO: 362637 - DNA, 1301 bp, Homo sapiens
cggtcggcggccggcggcgggagatcgcgggcgagcggagcgcaacactcgcttggttggggagatcggcgcttggccggatgagcacaagcctgggagatggcagtgatggaaatggcctgcccaggtgcccctggctcagcagtggggcagcagaaggaactccccaaagccaaggagaagacgccgccactggggaagaaacagagctccgtctacaagcttgaggccgtggagaagagccctgtgttctgcggaaagtgggagatcctgaatgacgtgattaccaagggcacagccaaggaaggctccgaggcagggccagctgccatctctatcatcgcccaggctgagtgtgagaatagccaagagttcagccccaccttttcagaacgcattttcatcgctgggtccaaacagtacagccagtccgagagtcttgatcagatccccaacaatgtggcccatgctacagagggcaaaatggcccgtgtgtgttggaagggaaagcgtcgcagcaaagcccggaagaaacggaagaagaagagctcaaagtccctggctcatgcaggagtggccttggccaaacccctccccaggacccctgagcaggagagctgcaccatcccagtgcaggaggatgagtctccactcggcgccccatatgttagaaacaccccgcagttcaccaagcctctgaaggaaccaggccttgggcaactctgttttaagcagcttggcgagggcctacggccggctctgcctcgatcagaactccacaaactgatcagccccttgcaatgtctgaaccacgtgtggaaactgcaccacccccaggacggaggccccctgcccctgcccacgcaccccttcccctatagcagactgcctcatcccttcccattccaccctctccagccctggaaacctcaccctctggagtccttcctgggcaaactggcctgtgtagacagccagaaacccttgcctgacccacacctgagcaaactggcctgtgtagacagtccaaagcccctgcctggcccacacctggagcccagctgcctgtctcgtggtgcccatgagaagttttctgtggaggaatacctagtgcatgctctgcaaggcagcgtgagctcaagccaggcccacagcctgaccagcctggccaagacctgggcagcacggggctccagatcccgggagcccagccccaaaactgaggacaacgagggtgtcctgctcactgaggtaactaatcccccggcacctgtatatgtccctctaccagcaacctgggg

SEQ ID NO: 362638 - DNA, 686 bp, Homo sapiens
cggtcggcggccggcggcgggagatcgcgggcgagcggagcgcaacactcgcttggttggggagatcggcgcttggccggatgagcacaagcctgggagatggcagtgatggaaatggcctgcccaggtgcccctggctcagcagtggggcagcagaaggaactccccaaagccaaggagaagacgccgccactggggaagaaacagagctccgtctacaagcttgaggccgtggagaagagccctgtgttctgcggaaagtgggagatcctgaatgacgtgattaccaagggcacagccaaggaaggctccgaggcagggccagctgccatctctatcatcgcccaggctgagtgtgagaatagccaagagttcagccccaccttttcagaacgcattttcatcgctgggtccaaacagtacagccagtccgagagtcttgatcagatccccaacaatgtggcccatgctacagagggcaaaatggcccgtgtgtgttggaagggaaagcgtcgcagcaaagcccggaagaaacggaagaagaagagctcaaagtccctggctcatgcaggagtggccttggccaaacccctccccaggacccctgagcaggagagctgcaccatcccagtgcaggtgagaccctccacccactgcccagaccccaggttcatggggccttgaaa

SEQ ID NO: 362639 - DNA, 1586 bp, Homo sapiens
  misc_feature (617)..(617): n is a, c, g, or t
aaaaaaaaagtaaagggaaacagacatgaacactaggtgacatggagtgttaggggcgctatggtagaagtctgcagagagtgcaatgggcgtccaaatgaggaagtgatcacttgcacaagagtgggaggcttggctggaaaggcttctctgaataggatgacatttgatctgtgttttgaagggcatcgttggcaaggtaagtaatccaattaaaggaggttgcctcagctaaagcacagtatgctcaaaggtgcggatcatttgaaaatttgagttcaggtgcagtaggggtaaggtaagtatccaacagaatttcctacaatgatggaaatgttctatattgtcactgtccaatacggtagcctctagccacatttggccagtacaactgaagaattgaatattaactttcatttaattctagctaatttaaatttaaatagtttcatcagttagtggctaccatattgaacagtgcaggtttagagataaacagaggccagttgcaggagggtcttgcatcccattgaggaggactgaattttcttctgcagggccttctgtggtctgcagaaagggcagtacacaggcagtaatattatcagctttgcctntgggagtgccccagcctggaagcagataatacagttaggagattcccataacctgcctgagtgagagcattagtaattagggaaggaaatggatgtgagacttgctgagaagggctggacaggcttagtgacaggtctgagtgtgaggggagagggagtgggggaagtgggatcaggtttgagccagctattaaatcaatgccaattcatcccataaagaatgcagagagtgggacaggtttggagagtgtaaggaacatggctgtgctgtagccaagcaggcatagggtagcaggaataggccgaggtaaacagcctagacatctcagcgggattggggtgcaagtgcacagtcctgtgtcttatatagtcacagccatgtaggcataacatagagcagctccccacctggctctcagccactagtgtttgtgtagtgtataaatgtaacactgaccctgtgaaggggctgctgaataaagccatgtctcatttacctgctgtctctccagtgttcttccagctccctgccccacatccacccactgtcctcagacctcagctggggctgcaccccaaccctgagtgtgacagagagaagatgagtgttagagatcatgatcctgaagtgctgacgagaaattcaggaagcctgcaagcctagaggtcagctcagtggccaccttctgaagcccagggcaccattggaagctgcctagtttgaggcacggatggaagaggaaaacactgagaacaacatccctcttcctgaggaatgcatacaagggtgcttgggggtgggttggggatcccaaggcaggagagccaaagctggagtcagaggaagctcttcttctgaaacctgtaatttcaatgtcttttcctttcccttcaaaattgtaatttccttctgaaatcattctaaccctttagtaaagacattaatttaaagatgtttaaaaaaaaaac

SEQ ID NO: 362640 - DNA, 3901 bp, Homo sapiens
  misc_feature (1346)..(1346): n is a, c, g, or t
  misc_feature (1547)..(1547): n is a, c, g, or t
  misc_feature (2581)..(2582): n is a, c, g, or t
  misc_feature (3244)..(3244): n is a, c, g, or t
aaattgcttattaagcctcaggtttcttcacttacaaaatgaggataataattgcacctggtccacagggtcatgacatggattcagtagaaagctcagcagtgtacctgacttaacagttgttcacactaagatctttaaactttacaatggtgaaaaggcaatatgcattccatagaactcatacaaccattttgttcttaactttcagtaaaatattcaataaatattcaataaactaattcaaaaaattactttattacaaaataggctttgtgttagaggattttgcccaactgcaagctaatggaagtgttctgagcacattcaaggtaggctaggctgagctgtgatgttcagtggattaggtattaaatgcatttttaacttacaataatttcaacttataatgaatttatcaggacttgatcccgccataagtcaaggagcatctgtacaccaactgttggttattatttttcatccccacaagacagatatagttctgcatttctcatgcagattctacaggcctttattctaattttttaatgtgccaattttatcatatttggtttcttcagtctttaatatattcatgtagatgtctgtgaattatagtctatctatgcttgtaggctttaaaatatatttagtcaatggtgggtagaaattttattttagcttaaaaaattaatcttataaaatgcctgctgacatttcatgtaagaattcttttactcaattcatgtttttctcttcttccctgtggagtatatttattgactgcagatggaagcacattgctaaggaatggaaagctgcaagatagaacatgcccttcacctgcgtggttgcatagaaaccagtcgtttgtccaaatcttaaagaactcaagtggaaagcatacttaaaaatgtaaaggttagaatcacaaactacagtttgaattgaaatgactgaaagattgtttcaagaatataagaattctatctaaaagaagtgaatgaaaggtatattctggtaagtcctttataattatgattttgaacaaactgctttaaattatgctatagcatgaactgagaaggaaaaaagtgaatagaaggatatcaggattgctgaagcacagaacccagaacaacagtccaaaccaatgatggaggtgaaactaagatagcagccacaaccagaagttgattcagaaagaattaattcgggctgggttgtggtcatttatacctgtaatcccagcactttgggaggctaaggcagctggattgcctgagcctaggagtttgagaccagcctgagcaacatgacaaaaccctgattctaccaaaaanaaaaaaaaaaactagcctgtggtggcaagcgcctctagtcccagctactggggaggctgaggtgggaggatggcttgagttcaggcaggggaggttgcagtgagctgaggtccttccactgaactccagtttgggggacagagcgagacactgtctcaagaaagaaagaaagaaagaattggctgggcatggtggctcacncctgtaatcccagcactttgggaggccaatgcaggtggattgcttgaggacaggagttcaagaccagcctggccaacatggcgaaaccccatctctactaaaaatacaaaacttagctgggcatggtggcccgggcctgtaatcccagctacttgggaggctgagacaggcgaatcacttgaacccaggatgtggaggttgcagtgagcccagactgccactgcattccagcctgggagaaagaaaaaaagaaagaaagggagggagggaaggagtcaggaaggaaggaaggaagggattgattcagagacaaaacagaaatagaccttgtttttcgtgattaaaatatgctaaaagcaatagctaagattgcagctgaagagtatgaatataatagtagcccacaaaataccacagcattgtggttgttgctgtcgttggtcttagtctttgtctctatcttggttttggtatagatattattgtttgcaaggtactaaactagctcattataaatttcaggttaaaaaataagcagcaaggatatctggagacattctgacaataaatgcaatgatagagcactagccttttcactatagaccaatagaaatggaagcagtagttgtggggcatgaatatacagacacaagaatcagtggcacagaatagaatttccagaaacagataccaatgcacttatgcatttgttaatttagtatatgacaaagatcgctgctgtggtttgtatgtgtccctcagatttcatgtgttggcaacttaatccccaatgtgatagcattgaagggtgaggcctttaagaggagattggggctgggcacggtggctcacatttgtaataccagaactttgagaggctgaggcgggtggatcacttgaggtcaggagtttgatatcagcctggccaacatagagaaaccccgtctctactaaatatacaaaaattaactgggcatggtgaccacacctgtaatgccagctacttgggaggctgaggcaggagaatcgcttgnnctgaggaggtggaggttgcagtgagctgagatcgccccactgcactccagtctgggtgacagaatgacactccatctcaaaaaaaaaaaaaaaaaaggacaggaagaatgatctgagctagcatagtcagcacattcagcccacttcctattgtgaagcccctgtagagaaccccccccaacccgcaagaaggctctcacctgctgtggcccctcaaccttggacttctagtttgaggtattctgttataagcaacagaaaacaaactaatataatggcatttcaaagtagtggaaaaaaacatgacattcagttaatggtttgaaggcaactggagagttattgaggtgaaatattattgaatcctctcttataatacatcaaaatatattccaagtagatcaaagtttacaagtaaaaataaaactgcaaaagtatgaaaagaagtcatgtaagaatttttacataaatcagattgaggaagaccttctatttttaacacaaaacccaggggtgaaacagtattaataaaaaattgatgacttcaacttcataaaaatttgtttaaagcttctaggtcaaaaatcataggcttcggtggaatattgctgtaaaagaaattttttaaaaacagaaaaaagaaagaaaaactacaggcaagntcaaaagataaaccacaaacctgagaaaaatatttgcgtctcctatcacagacaaaggacttatttcttgactatataaggaactcttaagcatcaataagaaatagattaacaacactataggaaagtagattaaaattttacatagaaaatataaaaataactaaacatcattgaaatataggaaagatttctcaatcactcaaaataaatgcaaattaaaactacactgagaagactttttaaaatctatgagactggcaaaaataataaaattataaaactgtcttggtgaaagtatggaattcaatttggcaatatctttggcatatatatatcttttgccccagaaattccacttccgggaatttatcctacagatactcttgtacatgcagaataacatatggactagattgtcattatggtattatctgttaaaaaaaaaaaaaggaccaaacaatctaaatataactggttacataaattatgatacagctttccagtggaataataagcttctattaaaaaaagagaatgggctgggtacaatggctcatgcctatgatcccagcactttggaaggctgggaggattgcttgagcccaggactttgagaagaccagcctgactaacatagggatatcctgtctctac

SEQ ID NO: 362641 - DNA, 1885 bp, Homo sapiens
tcgggagcgcgcactgtgtggtaccgggaatcggccattatggcggggcggggcgtctcgggcgaggagaggaggtgaccccgcgaaagataataaatcatcattgatcaagatgtcttcagcacctgagcctccaacattcaaaaaggaaccacccaaagaaaaagagtttcaaagcccagggctcagaggggtgcgcacaacaaccttatttcgtgctgtgaatccagagctcttcattaaacctaacaaacctgtaatggctttcggattggtaactctttcactttgcgtggcatatattggttatctacatgcaatacaagagaataaaaaggacctctatgaagctattgatagtgaggggcacagttatatgaggcggaaaacatccaaatgggattagtagtgctggttagtgcagatggacctttattaaaggttctgaaatcttcaaatgaaagaccttgtgagtgtacagtatcatgtttcttgttctagaacatgctaatgaagagagaagatagcagttgcaaccagacaactgtcgtaaattttgtcctttcacagctgcagccattatctcattctttttccacagagtgagcgtcataatatttttctttccttacctcttataaaagtgccatgagaatggaagttgtttttgttaattattaaattctgtataataaaagtacccatgctgttaaatttgcatgatgttttaaatattttaagatgaattatgccggtgcagctgtcgtgaaagtttacttgtgttttgctacttgcaaaggaaatgttcatgttctccctggcatagaacctatatttttaaagaaagataaatagaaattttaaggcctgaagtcaatattaaaaatatgagatatgagaaactgagttggctctgacaagtagtttttatagtgtcacaaatggttcatatatttcagtttccattttagctatttttgggacagaattttattttaatggaaaagatccttccactcagctactaaaataaggattaagaatatcccagagtaattggagtttttctttaaaaaaaaaaaaagtatgttttactgaggtatgatgattttgactacaactaaatgttatctattttagtgtttatgttaattaatgttaattaattttgtttatgttaatttgtgttaattaatgttactgtaatgttataaacataagaccaagtgttcttatagttatttaaaaactacaactactcaatggataaggaatagataaggtctccttattgtaccttttttttcttttgaagtttatatgccagcaggcctttttgtttttttccttttcagaatgtttcttattctctgaagcatcagcattttgaagtgtcttttatggaagtggggacagaaatgggggtaaaaatgagtgtaaacaaagcctagccctacggtcagtacccactggaggtgagaagcagaatggccttggttgtcctggcacctggcccagggcctaggacagaggtcaaggctaggcccctgtgtctggccagattctgccttatagaattcaaatctttcttacaagggttctggacccgtttcatttctagatatatacctaattctccaaatcattgtcattgggcctcagtagtaaatcttacctctgaagtcttgcttcagtcgctattaatattaccaagtaataataacagcacaggcagagtttatcataatgttatttttaatttgtcatactttattatggttttgtaaggtacatgaaaatgtaattatgtgtgatttgtaggtattaaagaacttagctaattgaatttacatggaactaaataaaatctttactactgagcccc

SEQ ID NO: 362642 - DNA, 2461 bp, Homo sapiens
tcgggagcgcgcactgtgtggtaccgggaatcggccattatggcggggcggggcgtctcgggcgaggagaggaggtgaccccgcgaaagataataaatcatcattgatcaagatgtcttcagcacctgagcctccaacattcaaaaaggaaccacccaaagaaaaagagtttcaaagcccagggctcagaggggtgcgcacaacaaccttatttcgtgctgtgaatccagagctcttcattaaacctaacaaacctgtaatggctttcggattggtaactctttcactttgcgtggcatatattggttatctacatgcaatacaagagaataaaaaggacctctatgaagctattgatagtgaggggcacagttatatgaggcggaaaacatccaaatgggattagtagtgctggttagtgcagatggacctttattaaaggttctgaaatcttcaaatgaaagaccttgtgagtgtacagtatcatgtttcttgttctagaacatgctaatgaagagagaagatagcagttgcaaccagacaactgtcgtaaattttgtcctttcacagctgcagccattatctcattctttttccacagagtgagcgtcataatatttttctttccttacctcttataaaagtgccatgagaatggaagttgtttttgttaattattaaattctgtataataaaagtacccatgctgttaaatttgcatgatgttttaaatattttaagatgaattatgccggtgcagctgtcgtgaaagtttacttgtgttttgctacttgcaaaggaaatgttcatgttctccctggcatagaacctatatttttaaagaaagataaatagaaattttaaggcctgaagtcaatattaaaaatatgagatatgagaaactgagttggctctgacaagtagtttttatagtgtcacaaatggttcatatatttcagtttccattttagctatttttgggacagaattttattttaatggaaaagatccttccactcagctactaaaataaggattaagaatatcccagagtaattggagtttttctttaaaaaaaaaaaaagtatgttttactgaggtatgatgattttgactacaactaaatgttatctattttagtgtttatgttaattaatgttaattaattttgtttatgttaatttgtgttaattaatgttactgtaatgttataaacataagaccaagtgttcttatagttatttaaaaactacaactactcaatggataaggaatagataaggtctccttattgtaccttttttttcttttgaagtttatatgccagcaggcctttttgtttttttccttttcagaatgtttcttattctctgaagcatcagcattttgaagtgtcttttatggaagtggggacagaaatgggggtaaaaatgagtgtaaacaaagcctagccctacggtcagtacccactggaggtgagaagcagaatggccttggttgtcctggcacctggcccagggcctaggacagaggtcaaggctaggcccctgtgtctggccagattctgccttatagaattcaaatctttcttacaagggttctggacccgtttcatttctagatatatacctaattctccaaatcattgtcattgggcctcagtagtaaatcttacctctgaagtcttgcttcagtcgctattaatattaccaagtaataataacagcacaggcagagtttatcataatgttatttttaatttgtcatactttattatggttttgtaaggtacatgaaaatgtaattatgtgtgatttgtaggtattaaagaacttagctaattgaatttacatggaactaaataaaatctttactactgagccccaaatatgtatttgctatgcctgtctgtataatgtacttcatatagtttaaaatgcacttcagtgatacaaaatcccttttaaagactcttttgtttttgttttccctgtgtattttggctatcacaaaactagggttcttctgtttttaacttatgcatttaatgacacattgccatcttttagaattttttactattcaacagaataagctgatgtttggtggcagaggagttattagttgcgtgaactgtcaagagattgcagtgcaggagggcaacagaaactgtacaaggtgcagacttgagtcatgtaagatctatgtgaatgaaccaaagtaactagagtcagtcaagcacaaagctgtgaaaagtagtgtgtggaaagaatcatactgaattttaggaacaagtacctgactatgatactttttacagagtggctacaagttgtaggacagtctttgtgtgtgctgagtgtcaacagctgcctgcctatgtgttgatgttttcatcctttctttgttgaatgagggtataaccatcaaaaataaaatacctttcaaatagtccaaagat

SEQ ID NO: 362643 - DNA, 2131 bp, Homo sapiens
ctcccccgcccctctccctacctcccgctcctcccttcgcttccgctcccgactccccctgtcatccgcccctgtcacgcctacactcccccacttatcacgtccctcacctccgccaccgcgctatcccaccccgccccgccttgttccatgcacacacgcctcgcacacacgcccaatccgttctctagccccctcgggaataccccgggggaaatccacgatattcgtgcccacacgccgctttcctgttctctcccctcgccagcgagggttttttccacacccgcctgcaccctaagccccagtccctttcttaattaccaccgctacagataataaatcatcattgatcaagatgtcttcagcacctgagcctccaacattcaaaaaggaaccacccaaagaaaaagagtttcaaagcccagggctcagaggggtgcgcacaacaaccttatttcgtgctgtgaatccagagctcttcattaaacctaacaaacctgtaatggctttcggattggtaactctttcactttgcgtggcatatattggttatctacatgcaatacaagagaataaaaaggacctctatgaagctattgatagtgaggggcacagttatatgaggcggaaaacatccaaatgggattagtagtgctggttagtgcagatggacctttattaaaggttctgaaatcttcaaatgaaagaccttgtgagtgtacagtatcatgtttcttgttctagaacatgctaatgaagagagaagatagcagttgcaaccagacaactgtcgtaaattttgtcctttcacagctgcagccattatctcattctttttccacagagtgagcgtcataatatttttctttccttacctcttataaaagtgccatgagaatggaagttgtttttgttaattattaaattctgtataataaaagtacccatgctgttaaatttgcatgatgttttaaatattttaagatgaattatgccggtgcagctgtcgtgaaagtttacttgtgttttgctacttgcaaaggaaatgttcatgttctccctggcatagaacctatatttttaaagaaagataaatagaaattttaaggcctgaagtcaatattaaaaatatgagatatgagaaactgagttggctctgacaagtagtttttatagtgtcacaaatggttcatatatttcagtttccattttagctatttttgggacagaattttattttaatggaaaagatccttccactcagctactaaaataaggattaagaatatcccagagtaattggagtttttctttaaaaaaaaaaaaagtatgttttactgaggtatgatgattttgactacaactaaatgttatctattttagtgtttatgttaattaatgttaattaattttgtttatgttaatttgtgttaattaatgttactgtaatgttataaacataagaccaagtgttcttatagttatttaaaaactacaactactcaatggataaggaatagataaggtctccttattgtaccttttttttcttttgaagtttatatgccagcaggcctttttgtttttttccttttcagaatgtttcttattctctgaagcatcagcattttgaagtgtcttttatggaagtggggacagaaatgggggtaaaaatgagtgtaaacaaagcctagccctacggtcagtacccactggaggtgagaagcagaatggccttggttgtcctggcacctggcccagggcctaggacagaggtcaaggctaggcccctgtgtctggccagattctgccttatagaattcaaatctttcttacaagggttctggacccgtttcatttctagatatatacctaattctccaaatcattgtcattgggcctcagtagtaaatcttacctctgaagtcttgcttcagtcgctattaatattaccaagtaataataacagcacaggcagagtttatcataatgttatttttaatttgtcatactttattatggttttgtaaggtacatgaaaatgtaattatgtgtgatttgtaggtattaaagaacttagctaattgaatttacatggaactaaataaaatctttactactgagcccc

SEQ ID NO: 362644 - DNA, 915 bp, Homo sapiens
tcgggagcgcgcactgtgtggtaccgggaatcggccattatggcggggcggggcgtctcgggcgaggagaggaggtgaccccgcgaaagataataaatcatcattgatcaagatgtcttcagcacctgagcctccaacattcaaaaaggaaccacccaaagaaaaagagtttcaaagcccagggctcagaggggtgcgcacaacaaccttatttcgtgctgtgaatccagagctcttcattaaacctaacaaacctgtaatggctttcggattggtaactctttcactttgcgtggcatatattggttatctacatgcaatacaagagaataaaaaggacctctatgaagctattgatagtgaggggcacagttatatgaggcggaaaacatccaaatgggattagtagtgctggttagtgcagatggacctttattaaaggttctgaaatcttcaaatgaaagaccttgtgagtgtacagtatcatgtttcttgttctagaacatgctaatgaagagagaagatagcagttgcaaccagacaactgtcgtaaattttgtcctttcacagctgcagccattatctcattctttttccacagagtgagcgtcataatatttttctttccttacctcttataaaagtgccatgagaatggaagttgtttttgttaattattaaattctgtataataaaagtacccatgctgttaaatttgcatgatgttttaaatattttaagatgaattatgccggtgcagctgtcgtgaaagtttacttgtgttttgctacttgcaaaggaaatgttcatgttctccctggcatagaacctatatttttaaagaaagataaatagaatgcgatgcggcaagctttctttttccttgaatacgtcaactatagtaatccagcgtga

SEQ ID NO: 362645 - DNA, 754 bp, Homo sapiens
  misc_feature (698)..(698): n is a, c, g, or t
  misc_feature (701)..(701): n is a, c, g, or t
tcgggagcgcgcactgtgtggtaccgggaatcggccattatggcggggcggggcgtctcgggcgaggagaggaggtgaccccgcgaaagataataaatcatcattgatcaagatgtcttcagcacctgagcctccaacattcaaaaaggaaccacccaaagaaaaagagtttcaaagcccagggctcagaggggtgcgcacaacaaccttatttcgtgctgtgaatccagagctcttcattaaacctaacaaacctgtaatggctttcggattggtaactctttcactttgcgtggcatatattggttatctacatgcaatacaagagaataaaaaggacctctatgaagctattgatagtgaggggcacagttatatgaggcggaaaacatccaaatgggattagtagtgctggttagtgcagatggacctttattaaaggttctgaaatcttcaaatgaaagaccttgtgagtgtacagtatcatgtttcttgttctagaacatgctaatgaagagagaagatagcagttgcaaccagacaactgtcgtaaattttgtcctttcacagctgcagccattatctcattctttttccacagagtgagcgtcataatatttttctttccttacctcttataaaagtgccatgagaatggaagttgtttttgttaattattaaattctgtataataaaanccnatgcggccagtcttttctcctatttgtttatcacacatagatttaaacattcg

SEQ ID NO: 362646 - DNA, 855 bp, Homo sapiens
tcgggagcgcgcactgtgtggtaccgggaatcggccattatggcggggcggggcgtctcgggcgaggagaggaggtgaccccgcgaaagataataaatcatcattgatcaagatgtcttcagcacctgagcctccaacattcaaaaaggaaccacccaaagaaaaagagtttcaaagcccagggctcagaggggtgcgcacaacaaccttatttcgtgctgtgaatccagagctcttcattaaacctaacaaacctgtaatggctttcggattggtaactctttcactttgcgtggcatatattggttatctacatgcaatacaagagaataaaaaggacctctatgaagctattgatagtgaggggcacagttatatgaggcggaaaacatccaaatgggattagtagtgctggttagtgcagatggacctttattaaaggttctgaaatcttcaaatgaaagaccttgtgagtgtacagtatcatgtttcttgttctagaacatgctaatgaagagagaagatagcagttgcaaccagacaactgtcgtaaattttgtcctttcacagctgcagccattatctcattctttttccacagagtgagcgtcataatatttttctttccttacctcttataaaagtgccatgagaatggaagttgtttttgttaattattaaattctgtataataaaaatgtgcaaaaaaaaaaaaaaaaaaaaaaaattggggggcggggcggaaagttttaaacatttgttgggggggcccagttggaagggaaaggcaagaacggcgaagggggtcccaaaaacggggcgggttgaaaaagggtggggggttaaggaggtggg

SEQ ID NO: 362647 - DNA, 774 bp, Homo sapiens
tcgggagcgcgcactgtgtggtaccgggaatcggccattatggcggggcggggcgtctcgggcgaggagaggaggtgaccccgcgaaagataataaatcatcattgatcaagatgtcttcagcacctgagcctccaacattcaaaaaggaaccacccaaagaaaaagagtttcaaagcccagggctcagaggggtgcgcacaacaaccttatttcgtgctgtgaatccagagctcttcattaaacctaacaaacctgtaatggctttcggattggtaactctttcactttgcgtggcatatattggttatctacatgcaatacaagagaataaaaaggacctctatgaagctattgatagtgaggggcacagttatatgaggcggaaaacatccaaatgggattagtagtgctggttagtgcagatggacctttattaaaggttctgaaatcttcaaatgaaagaccttgtgagtgtacagtatcatgtttcttgttctagaacatgctaatgaagagagaagatagcagttgcaaccagacaactgtcgtaaattttgtcctttcacagctgcagccattatctcattctttttccacagagtgagcgtcataatatttttctttccttacctcttataaaagtgccatgagaatggaagttgtttttgttaattattaaattctgtataataaaacactgtcgaaagtactgggttggattggcaggaggttgtctccgggtaaactttttcgagcaatagcaatcagggga

SEQ ID NO: 362648 - DNA, 1654 bp, Homo sapiens
aaattgcttattaagcctcaggtttcttcacttacaaaatgaggataataattgcacctggtccacagggtcatgacatggattcagtagaaagctcagcagtgtacctgacttaacagttgttcacactaagatctttaaactttacaatggtgaaaaggcaatatgcattccatagaactcatacaaccattttgttcttaactttcagtaaaatattcaataaatattcaataaactaattcaaaaaattactttattacaaaataggctttgtgttagaggattttgcccaactgcaagctaatggaagtgttctgagcacattcaaggtaggctaggctgagctgtgatgttcagtggattaggtattaaatgcatttttaacttacaataatttcaacttataatgaatttatcaggacttgatcccgccataagtcaaggagcatctgtacaccaactgttggttattatttttcatccccacaagacagatatagttctgcatttctcatgcagattctacaggcctttattctaattttttaatgtgccaattttatcatatttggtttcttcagtctttaatatattcatgtagatgtctgtgaattatagtctatctatgcttgtaggctttaaaatatatttagtcaatggtgggtagaaattttattttagcttaaaaaattaatcttataaaatgcctgctgacatttcatgtaagaattcttttactcaattcatgtttttctcttcttccctgtggagtatatttattgactgcagatggaagcacattgctaaggaatggaaagctgcaagatagaacatgcccttcacctgcgtggttgcatagaaaccagtcgtttgtccaaatcttaaagaactcaagtggaaagcatacttaaaaatgtaaaggttagaatcacaaactacagtttgaattgaaatgactgaaagattgtttcaagaatataagaattctatctaaaagaagtgaatgaaaggtatattctggctggagtgcaatggcgcgatctcagctcaccgcaacctccacctcccggcttcagcagtgtatgtatgaggaagtgcccacaggagtgtgcctccgggatgaagcaaagcaacagagatccaagcaggagaggctgcaacaggctggagatatgcagagtcttcatgggggagtgttcttccagctccctgccccacatccacccactgtcctcagacctcagctggggctgcaccccaaccctgagtgtgacagagagaagatgagtgttagagatcatgatcctgaagtgctgacgagaaattcaggaagcctgcaagcctagaggtcagctcagtggccaccttctgaagcccagggcaccattggaagctgcctagtttgaggcacggatggaagaggaaaacactgagaacaacatccctcttcctgaggaatgcatacaagggtgcttgggggtgggttggggatcccaaggcaggagagccaaagctggagtcagaggaagctcttcttctgaaacctgtaatttcaatgtcttttcctttcccttcaaaattgtaatttccttctgaaatcattctaaccctttagtaaagacattaatttaaagatgtttaaaaaaaaaac

SEQ ID NO: 362649 - DNA, 1289 bp, Homo sapiens
tcgggagcgcgcactgtgtggtaccgggaatcggccattatggcggggcggggcgtctcgggcgaggagaggaggtgaccccgcgaaagataataaatcatcattgatcaagatgtcttcagcacctgagcctccaacattcaaaaaggaaccacccaaagaaaaagagtttcaaagcccagggctcagaggggtgcgcacaacaaccttatttcgtgctgtgaatccagagctcttcattaaacctgaactttccatcttacctactttttggactttaagaccataaaggacttcctctgctgaggacccaaactgaaccccaaggccagacagtattcttgatataccactgtatgctgcacagtatatttattgactgcagatggaagcacattgctaaggaatggaaagctgcaagatagaacatgcccttcacctgcgtggttgcatagaaaccagtcgtttgtccaaatcttaaagaactcaagtggaaagcatacttaaaaatgtaaaggttagaatcacaaactacagtttgaattgaaatgactgaaagattgtttcaagaatataagaattctatctaaaagaagtgaatgaaaggtatattctggctggagtgcaatggcgcgatctcagctcaccgcaacctccacctcccggcttcaggtgattctcctgcctcagcctcctgagtagctgggattacagcagtgtatgtatgaggaagtgcccacaggagtgtgcctccgggatgaagcaaagcaacagagatccaagcaggagaggctgcaacaggctggagatatgcagagtcttcatgggggagtgttcttccagctccctgccccacatccacccactgtcctcagacctcagctggggctgcaccccaaccctgagtgtgacagagagaagatgagtgttagagatcatgatcctgaagtgctgacgagaaattcaggaagcctgcaagcctagaggtcagctcagtggccaccttctgaagcccagggcaccattggaagctgcctagtttgaggcacggatggaagaggaaaacactgagaacaacatccctcttcctgaggaatgcatacaagggtgcttgggggtgggttggggatcccaaggcaggagagccaaagctggagtcagaggaagctcttcttctgaaacctgtaatttcaatgtcttttcctttcccttcaaaattgtaatttccttctgaaatcattctaaccctttagtaaagacattaatttaaagatgtttaaaaaaaaaac

SEQ ID NO: 362650 - DNA, 304 bp, Homo sapiens
ataaatcatcattgatcaagatgtcttcagcacctgagcctccaacattcaaaaaggaaccacccaaagaaaaagagtttcaaagcccagggctcagaggggtgcgcacaacaaccttatttcgtgctgtgaatccagagctcttcattaaacctgtaagaaatacatccaggataagactttgtgtttaatccaaccagactgtcagaaagttctaattttcttgtatttgattttatcatggaaattttatgttgacaagtaagacctctctgtgaataaaagcaggtggaaggacgattgt

SEQ ID NO: 362651 - DNA, 407 bp, Homo sapiens
aaaagcaggaaaacaacctttgcccaccacttttattttgagatgaaaattaaaataatgaacaaaattaacaaattaaagttaaagcaccatttacaaagtacattatacaaagtaataagataactgacaatcacatttggtatgtatctgggttggaattcaaagaaggaatttaagaattactttttaaagaaatttatcagagaagcacaattatgaagggaaaaaatatattattttgtttttagataataaatcatcattgatcaagatgtcttcagcacctgagcctccaacattcaaaaaggaaccacccaaagaaaaagagtttcaaagcccagggctcagaggggtgcgcacaacaaccttatttcgtgctgtgaatccagagctcttcattaaac

SEQ ID NO: 362652 - DNA, 2119 bp, Homo sapiens
  misc_feature (314)..(314): n is a, c, g, or t
  misc_feature (318)..(318): n is a, c, g, or t
ctctcagccatcctcaccagctcttccctctcctcccccttcccctcttctgcgaccggctaccgcttgcccaccaccccgcccccgcacccccctcccgccctggccgcacctcactgccctgccactacccccatcctggttccccatcgcaattgcacccggctaaatcctcacaacgtctttgcacgccatggaataccccccgtggcatcccagacttttttgcccaaaagccctcccatgttatatgctaggcgggcagggctttgcaccacagttcgaacataaccggcattactttttaattaccnccgntccagataataaatcatcattgatcaagatgtcttcagcacctgagcctccaacattcaaaaaggaaccacccaaagaaaaagagtttcaaagcccagggctcagaggggtgcgcacaacaaccttatttcgtgctgtgaatccagagctcttcattaaacctaacaaacctgtaatggctttcggattggtaactctttcactttgcgtggcatatattggttatctacatgcaatacaagagaataaaaaggacctctatgaagctattgatagtgaggggcacagttatatgaggcggaaaacatccaaatgggattagtagtgctggttagtgcagatggacctttattaaaggttctgaaatcttcaaatgaaagaccttgtgagtgtacagtatcatgtttcttgttctagaacatgctaatgaagagagaagatagcagttgcaaccagacaactgtcgtaaattttgtcctttcacagctgcagccattatctcattctttttccacagagtgagcgtcataatatttttctttccttacctcttataaaagtgccatgagaatggaagttgtttttgttaattattaaattctgtataataaaagtacccatgctgttaaatttgcatgatgttttaaatattttaagatgaattatgccggtgcagctgtcgtgaaagtttacttgtgttttgctacttgcaaaggaaatgttcatgttctccctggcatagaacctatatttttaaagaaagataaatagaaattttaaggcctgaagtcaatattaaaaatatgagatatgagaaactgagttggctctgacaagtagtttttatagtgtcacaaatggttcatatatttcagtttccattttagctatttttgggacagaattttattttaatggaaaagatccttccactcagctactaaaataaggattaagaatatcccagagtaattggagtttttctttaaaaaaaaaaaaagtatgttttactgaggtatgatgattttgactacaactaaatgttatctattttagtgtttatgttaattaatgttaattaattttgtttatgttaatttgtgttaattaatgttactgtaatgttataaacataagaccaagtgttcttatagttatttaaaaactacaactactcaatggataaggaatagataaggtctccttattgtaccttttttttcttttgaagtttatatgccagcaggcctttttgtttttttccttttcagaatgtttcttattctctgaagcatcagcattttgaagtgtcttttatggaagtggggacagaaatgggggtaaaaatgagtgtaaacaaagcctagccctacggtcagtacccactggaggtgagaagcagaatggccttggttgtcctggcacctggcccagggcctaggacagaggtcaaggctaggcccctgtgtctggccagattctgccttatagaattcaaatctttcttacaagggttctggacccgtttcatttctagatatatacctaattctccaaatcattgtcattgggcctcagtagtaaatcttacctctgaagtcttgcttcagtcgctattaatattaccaagtaataataacagcacaggcagagtttatcataatgttatttttaatttgtcatactttattatggttttgtaaggtacatgaaaatgtaattatgtgtgatttgtaggtattaaagaacttagctaattgaatttacatggaactaaataaaatctttactactgagcccc

SEQ ID NO: 362653 - DNA, 777 bp, Homo sapiens
tcgggagcgcgcactgtgtggtaccgggaatcggccattatggcggggcggggcgtctcgggcgaggagaggaggtgaccccgcgaaagataataaatcatcattgatcaagatgtcttcagcacctgagcctccaacattcaaaaaggaaccacccaaagaaaaagagtttcaaagcccagggctcagaggggtgcgcacaacaaccttatttcgtgctgtgaatccagagctcttcattaaacctaatgtttcttattctctgaagcatcagcattttgaagtgtcttttatggaagtggggacagaaatgggggtaaaaatgagtgtaaacaaagcctagccctacggtcagtacccactggaggtgagaagcagaatggccttggttgtcctggcacctggcccagggcctaggacagaggtcaaggctaggcccctgtgtctggccagattctgccttatagaattcaaatctttcttacaagggttctggacccgtttcatttctagatatatacctaattctccaaatcattgtcattgggcctcagtagtaaatcttacctctgaagtcttgcttcagtcgctattaatattaccaagtaataataacagcacaggcagagtttatcataatgttatttttaatttgtcatactttattatggttttgtaaggtacatgaaaatgtaattatgtgtgatttgtaggtattaaagaacttagctaattgaatttacatggaactaaataaaatctttactactgagcccc

SEQ ID NO: 362654 - DNA, 214 bp, Homo sapiens
acttgaaagattgtcccctaccgtctgggagcaagggcataaacatataaataaataatatacagttcagatggaaaagatacagtacaaagataaggtactaaggcagccccaaggaaggagacacctgtttatctgggggaagatagctctaatcgaggaagacttcacatagctgtcttagtcttaaaagatgaaaaaaaatttgtcaaaa

SEQ ID NO: 362655 - DNA, 2215 bp, Homo sapiens
  misc_feature (725)..(725): n is a, c, g, or t
  misc_feature (744)..(744): n is a, c, g, or t
  misc_feature (753)..(753): n is a, c, g, or t
actgctagctcaagtaaatagtttgttcaaatggccttcgtttctcatactcattgtacaaagggtctgtaaactaggacagtcttagtgatgataaggctatgcaggcaactctgtcacagccaagaggcctttgattgcttgactttcatattcttaaaggaggactggagctgtagcttcttgattctctgtaaagccatatgacctcgagctattttccccctcctgaaatcagtggtgttgagttccatgttaaagggtttatgtgtggcagttggagtgtgatatcaggagttagggccatagggttgctggttctctctatccttggacaagtgactgcctgtctcccagcctccatttgcctatgtgatgagtggggggatcttctatttatgaatggtgagacaagaaaccctgtatggtgggagctttggaaatacagcatttcaggagttcttcagtaggggttcagtctgctagctcacaaaaagactggaaacatgatcattggagctcccggctctggagatgcagagtagctcagggccggggagtggggaggtagcaggatgtattctacggcccagaactgccacagcaaatgctctttttgcattttgaatgaaataagagggattctggaattttcattgatttagggtggtttatggtcagtattgaactgctcagcttcaggaaacctggttctttcagtacantgtccattgctacatacgngtttatttnattctctgcttctgatgattgtagcctgaagtataatgcatttttttcctttggggtttattaaacatgacttctttgcttcattagaatgtagaaattagttgtttccctaaaaccttctgaaggaggcagtcagctacttttcccttacagagttaattttcttcagctgctaaactccatgacactcgtgatgagtcctcaaatcttagtaaaattgggtacaaagaatcaggaaatatatatagtaagtaacaattgtaccaaaaattataatgggccatggaattgcttcatattgaaattataaataatctgtaatgctattaatactagaataatggtagcgcttctcatcttcagggtgcctcgtgagattaaccatggtggttatgctggtgacgtgtttacataaaacctgtgctttctgaatgtgtgttgcagtcttaacattcttgaaatctttgcagaccagttctcaagatgggataggaaagctggactctaggttaccaagtgaaatcggcccgactcctcctgtgttgagactagtcatctactgttccttccattgagacagaactgttgcctgtgtttttactagtcctgttgaatgcaatggatggtattttgaattcctgggttaaaaacagaattgaaaatctgaaatgcctttacagagcgggcagctaaagttgctgagcagcaggagagagagcgagcagcacagcaacagcagccgagtgcttctccccgagcaggcacccctgtgggggctctcatgggggtggtgccaccaccaacaccaatggggatgctcaatcagcagttgacacctgttgcaggtaaaaacaggagctaagaccatttttttccactttaagaaattccttcattttttttttctccaataaggagtaggccacagtctattgccttttctcatgacagattcaaagtttgaagtcatccatgttgtcctatattgcctttcccatatgggcaatgcctcccttctgccccagaaatgggccctgggcccaaccctggtaattggtagggagcagctcttccctggctgtgggcatggtctggtgatgttctccaccccagcctgctcttgatagagcactatagcagaaaatatgaaagtagaccctgaattctgttctagagggactcccaagagaaaacacaaaactagtctttaggtggtgttgattttcccatctcattccagtattcagtttgccttgttctgctgcagccatccttaaaagactgaccgtttaaaaggattttttgacaatgaattgtaaatcctttcttggtcaccaatgtgcatgactgctaaatagaatacaaagtccttattcaattcattgtgcccactctgtaatgcttttctatttaattacattaaactgcattttctgttagtatcccagtcacatatttaaga

SEQ ID NO: 362656 - DNA, 7224 bp, Homo sapiens
acggcagcggccgcggccggaggagcaatagcagcagccgtggcggccacggggcggggcgcggcggtcggtgaccgcggccggggctgcaggcggcggagcggctggaagaagttggattccatgggttccaagagaagaagagctacctccccttccagcagtgtcagcggggactttgatgatgggcaccattctgtgtcaacaccaggcccaagcaggaaaaggaggagactttccaatcttccaactgtagatcctattgccgtgtgccatgaactctataataccatccgagactataaggatgaacagggcagacttctctgtgagctcttcattagggcaccaaagcgaagaaatcaaccagactattatgaagtggtttctcagcccattgacttgatgaaaatccaacagaaactaaaaatggaagagtatgatgatgttaatttgctgactgctgacttccagcttctttttaacaatgcaaagtcctattataagccagattctcctgaatataaagccgcttgcaaactctgggatttgtaccttcgaacaagaaatgagtttgttcagaaaggagaagcagatgacgaagatgatgatgaagatgggcaagacaatcagggcacagtgactgaaggatcttctccagcttacttgaaggagatcctggagcagcttcttgaagccatagttgtagctacaaatccatcaggacgtctcattagcgaactttttcagaaactgccttctaaagtgcaatatccagattattatgcaataattaaggagcctatagatctcaagaccattgcccagaggatacagaatggaagctacaaaagtattcatgcaatggccaaagatatagatctcctcgcaaaaaatgccaaaacttataatgagcctggctctcaagtattcaaggatgcaaattcaattaaaaaaatattttatatgaaaaaggctgaaattgaacatcatgaaatggctaagtcaagtcttcgaatgaggactccatccaacttggctgcagccagactgacaggtccttcacacagtaaaggcagccttggtgaagagagaaatcccactagcaagtattaccgtaataaaagagcagtacaaggaggtcgtttatcagcaattacaatggcacttcaatatggctcagaaagtgaagaagatgctgctttagctgctgcacgctatgaagagggagagtcagaagcagaaagcatcacttcctttatggatgtttcaaatcctttttatcagctttatgacacagttaggagttgtcggaataaccaagggcagctaatagctgaacctttttaccatttgccttcaaagaaaaaataccctgattattaccagcaaattaaaatgcccatatcactacaacagatccgaacaaaactgaagaatcaagaatatgaaactttagatcatttggagtgtgatctgaatttaatgtttgaaaatgccaaacgctataatgtgcccaattcagccatctacaagcgagttctaaaattgcagcaagttatgcaggcaaagaagaaagagcttgccaggagagacgatatcgaggacggagacagcatgatctcttcagccacctctgatactggtagtgccaaaagaaaaagtaaaaagaacataagaaagcagcgaatgaaaatcttattcaatgttgttcttgaagctcgagagccaggttcaggcagaagactttgtgacctatttatggttaaaccatccaaaaaggactatcctgattattataaaatcatcttggagccaatggacttgaaaataattgagcataacatccgcaatgacaaatatgctggtgaagagggaatgatagaagacatgaagctgatgttccggaatgccaggcactataatgaggagggctcccaggtttataatgatgcacatatcctggagaagttactcaaggagaaaaggaaagagctgggcccactgcctgatgatgatgacatggcttctcccaaactcaagctgagtaggaagagtggcatttctcctaaaaaatcaaaatacatgactccaatgcagcagaaactaaatgaggtctatgaagctgtaaagaactatactgataagaggggtcgccgcctcagtgccatatttctgaggcttccctctagatctgagttgcctgactactatctgactattaaaaagcccatggacatggaaaaaattcgaagtcacatgatggccaacaagtaccaagatattgactctatggttgaggactttgtcatgatgtttaataatgcctgtacatacaatgagccggagtctttgatctacaaagatgctcttgttctacacaaagtcctgcttgaaacacgcagagacctggagggagatgaggactctcatgtcccaaatgtgactttgctgattcaagagcttatccacaatctttttgtgtcagtcatgagtcatcaggatgatgagggaagatgctacagcgattctttagcagaaattcctgctgtggatcccaactttcctaacaaaccaccccttacatttgacataattaggaagaatgttgaaaataatcgctaccgtcggcttgatttatttcaagagcatatgtttgaagtattggaacgagcaagaaggatgaatcggacagattcagaaatatatgaagatgcagtagaacttcagcagttttttattaaaattcgtgatgaactctgcaaaaatggagagattcttctttcaccggcactcagctataccacaaaacatttgcataatgatgtggagaaagagagaaaggaaaaattgccaaaagaaatagaggaagataaactaaaacgagaagaagaaaaaagagaagctgaaaagagtgaagattcctctggtgctgcaggcctctcaggcttacatcgcacatacagccaggactgtagctttaaaaacagcatgtaccatgttggagattacgtctatgtggaacctgcagaggccaacctacaaccacatatcgtctgtattgaaagactgtgggaggattcagctggtgaaaaatggttgtatggctgttggttttaccgaccaaatgaaacattccacctggctacacgaaaatttctagaaaaagaagtttttaagagtgactattacaacaaagttccagttagtaaaattctaggcaagtgtgtggtcatgtttgtcaaggaatactttaagttatgcccagaaaacttccgagatgaggatgtttttgtctgtgaatcacggtattctgccaaaaccaaatcttttaagaaaattaaactgtggaccatgcccatcagctcagtcaggtttgtccctcgggatgtgcctctgcctgtggttcgcgtggcctctgtatttgcaaatgcagataaaggtgatgatgagaagaatacagacaactcagaggacagtcgagctgaagacaattttaacttggaaaaggaaaaagaagatgtccctgtggaaatgtccaatggtgaaccaggttgccactactttgagcagctccattacaatgacatgtggctgaaggttggcgactgtgtcttcatcaagtcccatggcctggtgcgtcctcgtgtgggcagaattgaaaaagtatgggttcgagatggagctgcatatttttatggccccatcttcattcacccagaagaaacagagcatgagcccacaaaaatgttctacaaaaaagaagtatttctgagtaatctggaagaaacctgccccatgacatgtattctcggaaagtgtgctgtgttgtcattcaaggacttcctctcctgcaggccaactgaaataccagaaaatgacattctgctttgtgagagccgctacaatgagagcgacaagcagatgaagaaattcaaaggattgaagaggttttcactctctgctaaagtggtagatgatgaaatttactacttcagaaaaccaattgttcctcagaaggagccatcacctttgctggaaaagaagatccagttgctagaagctaaatttgccgagttagaaggtggagatgatgatattgaagagatgggagaagaagatagtgaggtcattgaacctccttctctacctcagcttcagacccccctggccagtgagctggacctcatgccctacacacccccacagtctaccccaaagtctgccaaaggcagtgcaaagaaggaaggctccaaacggaaaatcaacatgagtggctacatcctgttcagcagtgagatgagggctgtgattaaggcccaacacccagactactctttcggggagctcagccgcctggtggggacagaatggagaaatcttgagacagccaagaaagcagaatatgaaggcatgatgggtggctatccgccaggccttccacctttgcagggcccagttgatggccttgttagcatgggcagcatgcagccacttcaccctggggggcctccaccccaccatcttccgccaggtgtgcctggcctcccgggcatcccaccaccgggtgtgatgaaccaaggagtggcccctatggtagggactccagcaccaggtggaagtccatatggacaacaggtgggagttttggggcctccagggcagcaggcaccacctccatatcccggcccacatccagctggaccccctgtcatacagcagccaacaacacccatgtttgtagctcccccaccaaagacccagcggcttcttcactcagaggcctacctgaaatacattgaaggactcagtgcggagtccaacagcattagcaagtgggatcagacactggcagctcgaagacgcgacgtccatttgtcgaaagaacaggagagccgcctaccctctcactggctgaaaagcaaaggggcccacaccaccatggcagatgccctctggcgccttcgagatttgatgctccgggacaccctcaacattcgccaagcatacaacctagaaaatgtttaatcacatcattacgtttcttttatatagaagcataaagagttgtggatcagtagccattttagttactgggggtggggggaaggaacaaaggaggataatttttattgcattttactgtacatcacaaggccatttttatatacggacacttttaataagctatttcaatttgtttgttatattaagttgactttatcaaatacacaaagatttttttgcatatgtttccttcgtttaaaaccagtttcataattggttgtatatgtagacttggagttttatctttttacttgttgccatggaactgaaaccattagaggtttttgtcttggcttggggtttttgttttcttggttttgggtttttttatatatatatataaaagaacaaaatgaaaaaaaacacacacacacaagagtttacagattagtttaaattgataatgaaatgtgaagtttgtcctagtttacatcttagagaggggagtatacttgtgtttgtttcatgtgcctgaatatcttaagccactttctgcaaaagctgtttcttacagatgaagtgctttctttgaaaggtggttatttaggttttagatgtttaatagacacagcacatttgctctattaactcagaggctcactacagaaatatgtaatcagtgctgtgcatctgtctgcagctaatgtacctcctggacaccaggaggggaaaaagcactttttcaattgtgctgagttagacatctgtgagttagactatggtgtcagtgatttttgcagaacacgtgcacaaccctgaggtatgtttaatctaggcaggtacgtttaaggatattttgatctatttataatgaattcacaatttatgcctataaatttcagatgatttaaaattttaaacctgttacattgaaaaacattgaagttcgtcttgaagaaagcattaaggtatgcatggaggtgatttatttttaaacataacacctaacctaacatgggtaagagagtatggaactagatatgagctgtataagaagcataattgtgaacaagtagattgattgccttcatatacaagtatgttttagtattccttatttccttattatcagatgtattttttcttttaagtttcaatgttgttataattctcaaccagaaatttaatactttctaaaatattttttaaatttagcttgtgcttttgaattacaggagaagggaatcataatttaataaaacgcttactagaaagaccattacagatcccaaacacttgggtttggtgaccctgtctttcttatatgaccctacaataaacatttgaaggcagcataggatggcagacagtaggaacattgtttcacttggcggcatgtttttgaaacctgctttatagtaactgggtgattgccattgtggtagagcttccactgctgtttataatctgagagagttaatctcagaggatgcttttttccttttaatctgctatgaatcagtacccagatgtttaattactgtacttattaaatcatgagggcaaaagagtgtagaatggaaaaaagtctcttgtatctagatactttaaatatgggaggccctttaacttaattgcctttagtcaaccactggatttgaatttgcatcaagtattttaaataatattgaatttaaaaaaatgtattgcagtagtgtgtcagtaccttattgttaaagtgagtcagataaatcttcaattcctggctatttgggcaattgaatcatcatggactgtataatgcaatcagattattttgtttctagacatccttgaattacaccaaagaacatgaaatttagttgtggttaaattatttatttatttcatgcattcattttatttcccttaaggtctggatgagacttctttggggagcctctaaaaaaatttttcactgggggccacgtgggtcattagaagccagagctctcctccaggctccttcccagtgcctagaggtgctataggaaacatagatccagccaggggcttccctaaagcagtgcagcaccggcccagggcatcactagacaggccctaattaagttttttttaaaaagcctgtgtatttattttagaatcatgtttttctgtatattaacttgggggatatcgttaatatttaggatataagatttgaggtcagccatcttc

SEQ ID NO: 362657 - DNA, 7012 bp, Homo sapiens
acggcagcggccgcggccggaggagcaatagcagcagccgtggcggccacggggcggggcgcggcggtcggtgaccgcggccggggctgcaggcggcggagcggctggaagaagttggattccatgggttccaagagaagaagagctacctccccttccagcagtgtcagcggggactttgatgatgggcaccattctgtgtcaacaccaggcccaagcaggaaaaggaggagactttccaatcttccaactgtagatcctattgccgtgtgccatgaactctataataccatccgagactataaggatgaacagggcagacttctctgtgagctcttcattagggcaccaaagcgaagaaatcaaccagactattatgaagtggtttctcagcccattgacttgatgaaaatccaacagaaactaaaaatggaagagtatgatgatgttaatttgctgactgctgacttccagcttctttttaacaatgcaaagtcctattataagccagattctcctgaatataaagccgcttgcaaactctgggatttgtaccttcgaacaagaaatgagtttgttcagaaaggagaagcagatgacgaagatgatgatgaagatgggcaagacaatcagggcacagtgactgaaggatcttctccagcttacttgaaggagatcctggagcagcttcttgaagccatagttgtagctacaaatccatcaggacgtctcattagcgaactttttcagaaactgccttctaaagtgcaatatccagattattatgcaataattaaggagcctatagatctcaagaccattgcccagaggatacagaatggaagctacaaaagtattcatgcaatggccaaagatatagatctcctcgcaaaaaatgccaaaacttataatgagcctggctctcaagtattcaaggatgcaaattcaattaaaaaaatattttatatgaaaaaggctgaaattgaacatcatgaaatggctaagtcaagtcttcgaatgaggactccatccaacttggctgcagccagactgacaggtccttcacacagtaaaggcagccttggtgaagagagaaatcccactagcaagtattaccgtaataaaagagcagtacaaggaggtcgtttatcagcaattacaatggcacttcaatatggctcagaaagtgaagaagatgctgctttagctgctgcacgctatgaagagggagagtcagaagcagaaagcatcacttcctttatggatgtttcaaatcctttttatcagctttatgacacagttaggagttgtcggaataaccaagggcagctaatagctgaacctttttaccatttgccttcaaagaaaaaataccctgattattaccagcaaattaaaatgcccatatcactacaacagatccgaacaaaactgaagaatcaagaatatgaaactttagatcatttggagtgtgatctgaatttaatgtttgaaaatgccaaacgctataatgtgcccaattcagccatctacaagcgagttctaaaattgcagcaagttatgcaggcaaagaagaaagagcttgccaggagagacgatatcgaggacggagacagcatgatctcttcagccacctctgatactggtagtgccaaaagaaaaagtaaaaagaacataagaaagcagcgaatgaaaatcttattcaatgttgttcttgaagctcgagagccaggttcaggcagaagactttgtgacctatttatggttaaaccatccaaaaaggactatcctgattattataaaatcatcttggagccaatggacttgaaaataattgagcataacatccgcaatgacaaatatgctggtgaagagggaatgatagaagacatgaagctgatgttccggaatgccaggcactataatgaggagggctcccaggtttataatgatgcacatatcctggagaagttactcaaggagaaaaggaaagagctgggcccactgcctgatgatgatgacatggcttctcccaaactcaagctgagtaggaagagtggcatttctcctaaaaaatcaaaatacatgactccaatgcagcagaaactaaatgaggtctatgaagctgtaaagaactatactgataagaggggtcgccgcctcagtgccatatttctgaggcttccctctagatctgagttgcctgactactatctgactattaaaaagcccatggacatggaaaaaattcgaagtcacatgatggccaacaagtaccaagatattgactctatggttgaggactttgtcatgatgtttaataatgcctgtacatacaatgagccggagtctttgatctacaaagatgctcttgttctacacaaagtcctgcttgaaacacgcagagacctggagggagatgaggactctcatgtcccaaatgtgactttgctgattcaagagcttatccacaatctttttgtgtcagtcatgagtcatcaggatgatgagggaagatgctacagcgattctttagcagaaattcctgctgtggatcccaactttcctaacaaaccaccccttacatttgacataattaggaagaatgttgaaaataatcgctaccgtcggcttgatttatttcaagagcatatgtttgaagtattggaacgagcaagaaggatgaatcgaagctgaaaagagtgaagattcctctggtgctgcaggcctctcaggcttacatcgcacatacagccaggactgtagctttaaaaacagcatgtaccatgttggagattacgtctatgtggaacctgcagaggccaacctacaaccacatatcgtctgtattgaaagactgtgggaggattcagctggtgaaaaatggttgtatggctgttggttttaccgaccaaatgaaacattccacctggctacacgaaaatttctagaaaaagaagtttttaagagtgactattacaacaaagttccagttagtaaaattctaggcaagtgtgtggtcatgtttgtcaaggaatactttaagttatgcccagaaaacttccgagatgaggatgtttttgtctgtgaatcacggtattctgccaaaaccaaatcttttaagaaaattaaactgtggaccatgcccatcagctcagtcaggtttgtccctcgggatgtgcctctgcctgtggttcgcgtggcctctgtatttgcaaatgcagataaaggtgatgatgagaagaatacagacaactcagaggacagtcgagctgaagacaattttaacttggaaaaggaaaaagaagatgtccctgtggaaatgtccaatggtgaaccaggttgccactactttgagcagctccattacaatgacatgtggctgaaggttggcgactgtgtcttcatcaagtcccatggcctggtgcgtcctcgtgtgggcagaattgaaaaagtatgggttcgagatggagctgcatatttttatggccccatcttcattcacccagaagaaacagagcatgagcccacaaaaatgttctacaaaaaagaagtatttctgagtaatctggaagaaacctgccccatgacatgtattctcggaaagtgtgctgtgttgtcattcaaggacttcctctcctgcaggccaactgaaataccagaaaatgacattctgctttgtgagagccgctacaatgagagcgacaagcagatgaagaaattcaaaggattgaagaggttttcactctctgctaaagtggtagatgatgaaatttactacttcagaaaaccaattgttcctcagaaggagccatcacctttgctggaaaagaagatccagttgctagaagctaaatttgccgagttagaaggtggagatgatgatattgaagagatgggagaagaagatagtgaggtcattgaacctccttctctacctcagcttcagacccccctggccagtgagctggacctcatgccctacacacccccacagtctaccccaaagtctgccaaaggcagtgcaaagaaggaaggctccaaacggaaaatcaacatgagtggctacatcctgttcagcagtgagatgagggctgtgattaaggcccaacacccagactactctttcggggagctcagccgcctggtggggacagaatggagaaatcttgagacagccaagaaagcagaatatgaaggcatgatgggtggctatccgccaggccttccacctttgcagggcccagttgatggccttgttagcatgggcagcatgcagccacttcaccctggggggcctccaccccaccatcttccgccaggtgtgcctggcctcccgggcatcccaccaccgggtgtgatgaaccaaggagtggcccctatggtagggactccagcaccaggtggaagtccatatggacaacaggtgggagttttggggcctccagggcagcaggcaccacctccatatcccggcccacatccagctggaccccctgtcatacagcagccaacaacacccatgtttgtagctcccccaccaaagacccagcggcttcttcactcagaggcctacctgaaatacattgaaggactcagtgcggagtccaacagcattagcaagtgggatcagacactggcagctcgaagacgcgacgtccatttgtcgaaagaacaggagagccgcctaccctctcactggctgaaaagcaaaggggcccacaccaccatggcagatgccctctggcgccttcgagatttgatgctccgggacaccctcaacattcgccaagcatacaacctagaaaatgtttaatcacatcattacgtttcttttatatagaagcataaagagttgtggatcagtagccattttagttactgggggtggggggaaggaacaaaggaggataatttttattgcattttactgtacatcacaaggccatttttatatacggacacttttaataagctatttcaatttgtttgttatattaagttgactttatcaaatacacaaagatttttttgcatatgtttccttcgtttaaaaccagtttcataattggttgtatatgtagacttggagttttatctttttacttgttgccatggaactgaaaccattagaggtttttgtcttggcttggggtttttgttttcttggttttgggtttttttatatatatatataaaagaacaaaatgaaaaaaaacacacacacacaagagtttacagattagtttaaattgataatgaaatgtgaagtttgtcctagtttacatcttagagaggggagtatacttgtgtttgtttcatgtgcctgaatatcttaagccactttctgcaaaagctgtttcttacagatgaagtgctttctttgaaaggtggttatttaggttttagatgtttaatagacacagcacatttgctctattaactcagaggctcactacagaaatatgtaatcagtgctgtgcatctgtctgcagctaatgtacctcctggacaccaggaggggaaaaagcactttttcaattgtgctgagttagacatctgtgagttagactatggtgtcagtgatttttgcagaacacgtgcacaaccctgaggtatgtttaatctaggcaggtacgtttaaggatattttgatctatttataatgaattcacaatttatgcctataaatttcagatgatttaaaattttaaacctgttacattgaaaaacattgaagttcgtcttgaagaaagcattaaggtatgcatggaggtgatttatttttaaacataacacctaacctaacatgggtaagagagtatggaactagatatgagctgtataagaagcataattgtgaacaagtagattgattgccttcatatacaagtatgttttagtattccttatttccttattatcagatgtattttttcttttaagtttcaatgttgttataattctcaaccagaaatttaatactttctaaaatattttttaaatttagcttgtgcttttgaattacaggagaagggaatcataatttaataaaacgcttactagaaagaccattacagatcccaaacacttgggtttggtgaccctgtctttcttatatgaccctacaataaacatttgaaggcagcataggatggcagacagtaggaacattgtttcacttggcggcatgtttttgaaacctgctttatagtaactgggtgattgccattgtggtagagcttccactgctgtttataatctgagagagttaatctcagaggatgcttttttccttttaatctgctatgaatcagtacccagatgtttaattactgtacttattaaatcatgagggcaaaagagtgtagaatggaaaaaagtctcttgtatctagatactttaaatatgggaggccctttaacttaattgcctttagtcaaccactggatttgaatttgcatcaagtattttaaataatattgaatttaaaaaaatgtattgcagtagtgtgtcagtaccttattgttaaagtgagtcagataaatcttcaattcctggctatttgggcaattgaatcatcatggactgtataatgcaatcagattattttgtttctagacatccttgaattacaccaaagaacatgaaatttagttgtggttaaattatttatttatttcatgcattcattttatttcccttaaggtctggatgagacttctttggggagcctctaaaaaaatttttcactgggggccacgtgggtcattagaagccagagctctcctccaggctccttcccagtgcctagaggtgctataggaaacatagatccagccaggggcttccctaaagcagtgcagcaccggcccagggcatcactagacaggccctaattaagttttttttaaaaagcctgtgtatttattttagaatcatgtttttctgtatattaacttgggggatatcgttaatatttaggatataagatttgaggtcagccatcttc

SEQ ID NO: 362658 - DNA, 7366 bp, Homo sapiens
acggcagcggccgcggccggaggagcaatagcagcagccgtggcggccacggggcggggcgcggcggtcggtgaccgcggccggggctgcaggcggcggagcggctggcttgccaacacttggtgtcacatgtgagcctcccacatgtattcactctccattccagctctgtgattgaactctgctcttattgactagggggcagttgggcaggcatgcctcattcctggaattgacagtcattcctaataagaagttggattccatgggttccaagagaagaagagctacctccccttccagcagtgtcagcggggactttgatgatgggcaccattctgtgtcaacaccaggcccaagcaggaaaaggaggagactttccaatcttccaactgtagatcctattgccgtgtgccatgaactctataataccatccgagactataaggatgaacagggcagacttctctgtgagctcttcattagggcaccaaagcgaagaaatcaaccagactattatgaagtggtttctcagcccattgacttgatgaaaatccaacagaaactaaaaatggaagagtatgatgatgttaatttgctgactgctgacttccagcttctttttaacaatgcaaagtcctattataagccagattctcctgaatataaagccgcttgcaaactctgggatttgtaccttcgaacaagaaatgagtttgttcagaaaggagaagcagatgacgaagatgatgatgaagatgggcaagacaatcagggcacagtgactgaaggatcttctccagcttacttgaaggagatcctggagcagcttcttgaagccatagttgtagctacaaatccatcaggacgtctcattagcgaactttttcagaaactgccttctaaagtgcaatatccagattattatgcaataattaaggagcctatagatctcaagaccattgcccagaggatacagaatggaagctacaaaagtattcatgcaatggccaaagatatagatctcctcgcaaaaaatgccaaaacttataatgagcctggctctcaagtattcaaggatgcaaattcaattaaaaaaatattttatatgaaaaaggctgaaattgaacatcatgaaatggctaagtcaagtcttcgaatgaggactccatccaacttggctgcagccagactgacaggtccttcacacagtaaaggcagccttggtgaagagagaaatcccactagcaagtattaccgtaataaaagagcagtacaaggaggtcgtttatcagcaattacaatggcacttcaatatggctcagaaagtgaagaagatgctgctttagctgctgcacgctatgaagagggagagtcagaagcagaaagcatcacttcctttatggatgtttcaaatcctttttatcagctttatgacacagttaggagttgtcggaataaccaagggcagctaatagctgaacctttttaccatttgccttcaaagaaaaaataccctgattattaccagcaaattaaaatgcccatatcactacaacagatccgaacaaaactgaagaatcaagaatatgaaactttagatcatttggagtgtgatctgaatttaatgtttgaaaatgccaaacgctataatgtgcccaattcagccatctacaagcgagttctaaaattgcagcaagttatgcaggcaaagaagaaagagcttgccaggagagacgatatcgaggacggagacagcatgatctcttcagccacctctgatactggtagtgccaaaagaaaaagtaaaaagaacataagaaagcagcgaatgaaaatcttattcaatgttgttcttgaagctcgagagccaggttcaggcagaagactttgtgacctatttatggttaaaccatccaaaaaggactatcctgattattataaaatcatcttggagccaatggacttgaaaataattgagcataacatccgcaatgacaaatatgctggtgaagagggaatgatagaagacatgaagctgatgttccggaatgccaggcactataatgaggagggctcccaggtttataatgatgcacatatcctggagaagttactcaaggagaaaaggaaagagctgggcccactgcctgatgatgatgacatggcttctcccaaactcaagctgagtaggaagagtggcatttctcctaaaaaatcaaaatacatgactccaatgcagcagaaactaaatgaggtctatgaagctgtaaagaactatactgataagaggggtcgccgcctcagtgccatatttctgaggcttccctctagatctgagttgcctgactactatctgactattaaaaagcccatggacatggaaaaaattcgaagtcacatgatggccaacaagtaccaagatattgactctatggttgaggactttgtcatgatgtttaataatgcctgtacatacaatgagccggagtctttgatctacaaagatgctcttgttctacacaaagtcctgcttgaaacacgcagagacctggagggagatgaggactctcatgtcccaaatgtgactttgctgattcaagagcttatccacaatctttttgtgtcagtcatgagtcatcaggatgatgagggaagatgctacagcgattctttagcagaaattcctgctgtggatcccaactttcctaacaaaccaccccttacatttgacataattaggaagaatgttgaaaataatcgctaccgtcggcttgatttatttcaagagcatatgtttgaagtattggaacgagcaagaaggatgaatcggacagattcagaaatatatgaagatgcagtagaacttcagcagttttttattaaaattcgtgatgaactctgcaaaaatggagagattcttctttcaccggcactcagctataccacaaaacatttgcataatgatgtggagaaagagagaaaggaaaaattgccaaaagaaatagaggaagataaactaaaacgagaagaagaaaaaagagaagctgaaaagagtgaagattcctctggtgctgcaggcctctcaggcttacatcgcacatacagccaggactgtagctttaaaaacagcatgtaccatgttggagattacgtctatgtggaacctgcagaggccaacctacaaccacatatcgtctgtattgaaagactgtgggaggattcagctggtgaaaaatggttgtatggctgttggttttaccgaccaaatgaaacattccacctggctacacgaaaatttctagaaaaagaagtttttaagagtgactattacaacaaagttccagttagtaaaattctaggcaagtgtgtggtcatgtttgtcaaggaatactttaagttatgcccagaaaacttccgagatgaggatgtttttgtctgtgaatcacggtattctgccaaaaccaaatcttttaagaaaattaaactgtggaccatgcccatcagctcagtcaggtttgtccctcgggatgtgcctctgcctgtggttcgcgtggcctctgtatttgcaaatgcagataaaggtgatgatgagaagaatacagacaactcagaggacagtcgagctgaagacaattttaacttggaaaaggaaaaagaagatgtccctgtggaaatgtccaatggtgaaccaggttgccactactttgagcagctccattacaatgacatgtggctgaaggttggcgactgtgtcttcatcaagtcccatggcctggtgcgtcctcgtgtgggcagaattgaaaaagtatgggttcgagatggagctgcatatttttatggccccatcttcattcacccagaagaaacagagcatgagcccacaaaaatgttctacaaaaaagaagtatttctgagtaatctggaagaaacctgccccatgacatgtattctcggaaagtgtgctgtgttgtcattcaaggacttcctctcctgcaggccaactgaaataccagaaaatgacattctgctttgtgagagccgctacaatgagagcgacaagcagatgaagaaattcaaaggattgaagaggttttcactctctgctaaagtggtagatgatgaaatttactacttcagaaaaccaattgttcctcagaaggagccatcacctttgctggaaaagaagatccagttgctagaagctaaatttgccgagttagaaggtggagatgatgatattgaagagatgggagaagaagatagtgaggtcattgaacctccttctctacctcagcttcagacccccctggccagtgagctggacctcatgccctacacacccccacagtctaccccaaagtctgccaaaggcagtgcaaagaaggaaggctccaaacggaaaatcaacatgagtggctacatcctgttcagcagtgagatgagggctgtgattaaggcccaacacccagactactctttcggggagctcagccgcctggtggggacagaatggagaaatcttgagacagccaagaaagcagaatatgaaggcatgatgggtggctatccgccaggccttccacctttgcagggcccagttgatggccttgttagcatgggcagcatgcagccacttcaccctggggggcctccaccccaccatcttccgccaggtgtgcctggcctcccgggcatcccaccaccgggtgtgatgaaccaaggagtggcccctatggtagggactccagcaccaggtggaagtccatatggacaacaggtgggagttttggggcctccagggcagcaggcaccacctccatatcccggcccacatccagctggaccccctgtcatacagcagccaacaacacccatgtttgtagctcccccaccaaagacccagcggcttcttcactcagaggcctacctgaaatacattgaaggactcagtgcggagtccaacagcattagcaagtgggatcagacactggcagctcgaagacgcgacgtccatttgtcgaaagaacaggagagccgcctaccctctcactggctgaaaagcaaaggggcccacaccaccatggcagatgccctctggcgccttcgagatttgatgctccgggacaccctcaacattcgccaagcatacaacctagaaaatgtttaatcacatcattacgtttcttttatatagaagcataaagagttgtggatcagtagccattttagttactgggggtggggggaaggaacaaaggaggataatttttattgcattttactgtacatcacaaggccatttttatatacggacacttttaataagctatttcaatttgtttgttatattaagttgactttatcaaatacacaaagatttttttgcatatgtttccttcgtttaaaaccagtttcataattggttgtatatgtagacttggagttttatctttttacttgttgccatggaactgaaaccattagaggtttttgtcttggcttggggtttttgttttcttggttttgggtttttttatatatatatataaaagaacaaaatgaaaaaaaacacacacacacaagagtttacagattagtttaaattgataatgaaatgtgaagtttgtcctagtttacatcttagagaggggagtatacttgtgtttgtttcatgtgcctgaatatcttaagccactttctgcaaaagctgtttcttacagatgaagtgctttctttgaaaggtggttatttaggttttagatgtttaatagacacagcacatttgctctattaactcagaggctcactacagaaatatgtaatcagtgctgtgcatctgtctgcagctaatgtacctcctggacaccaggaggggaaaaagcactttttcaattgtgctgagttagacatctgtgagttagactatggtgtcagtgatttttgcagaacacgtgcacaaccctgaggtatgtttaatctaggcaggtacgtttaaggatattttgatctatttataatgaattcacaatttatgcctataaatttcagatgatttaaaattttaaacctgttacattgaaaaacattgaagttcgtcttgaagaaagcattaaggtatgcatggaggtgatttatttttaaacataacacctaacctaacatgggtaagagagtatggaactagatatgagctgtataagaagcataattgtgaacaagtagattgattgccttcatatacaagtatgttttagtattccttatttccttattatcagatgtattttttcttttaagtttcaatgttgttataattctcaaccagaaatttaatactttctaaaatattttttaaatttagcttgtgcttttgaattacaggagaagggaatcataatttaataaaacgcttactagaaagaccattacagatcccaaacacttgggtttggtgaccctgtctttcttatatgaccctacaataaacatttgaaggcagcataggatggcagacagtaggaacattgtttcacttggcggcatgtttttgaaacctgctttatagtaactgggtgattgccattgtggtagagcttccactgctgtttataatctgagagagttaatctcagaggatgcttttttccttttaatctgctatgaatcagtacccagatgtttaattactgtacttattaaatcatgagggcaaaagagtgtagaatggaaaaaagtctcttgtatctagatactttaaatatgggaggccctttaacttaattgcctttagtcaaccactggatttgaatttgcatcaagtattttaaataatattgaatttaaaaaaatgtattgcagtagtgtgtcagtaccttattgttaaagtgagtcagataaatcttcaattcctggctatttgggcaattgaatcatcatggactgtataatgcaatcagattattttgtttctagacatccttgaattacaccaaagaacatgaaatttagttgtggttaaattatttatttatttcatgcattcattttatttcccttaaggtctggatgagacttctttggggagcctctaaaaaaatttttcactgggggccacgtgggtcattagaagccagagctctcctccaggctccttcccagtgcctagaggtgctataggaaacatagatccagccaggggcttccctaaagcagtgcagcaccggcccagggcatcactagacaggccctaattaagttttttttaaaaagcctgtgtatttattttagaatcatgtttttctgtatattaacttgggggatatcgttaatatttaggatataagatttgaggtcagccatcttc

SEQ ID NO: 362659 - DNA, 7315 bp, Homo sapiens
acggcagcggccgcggccggaggagcaatagcagcagccgtggcggccacggggcggggcgcggcggtcggtgaccgcggccggggctgcaggcggcggagcggctggtgagccaggagtttggtagcaggtgtccagctgaagacttggtgacagagtctatttaaatgtaagaacatggctgattatttcttatagaaagaagttggattccatgggttccaagagaagaagagctacctccccttccagcagtgtcagcggggactttgatgatgggcaccattctgtgtcaacaccaggcccaagcaggaaaaggaggagactttccaatcttccaactgtagatcctattgccgtgtgccatgaactctataataccatccgagactataaggatgaacagggcagacttctctgtgagctcttcattagggcaccaaagcgaagaaatcaaccagactattatgaagtggtttctcagcccattgacttgatgaaaatccaacagaaactaaaaatggaagagtatgatgatgttaatttgctgactgctgacttccagcttctttttaacaatgcaaagtcctattataagccagattctcctgaatataaagccgcttgcaaactctgggatttgtaccttcgaacaagaaatgagtttgttcagaaaggagaagcagatgacgaagatgatgatgaagatgggcaagacaatcagggcacagtgactgaaggatcttctccagcttacttgaaggagatcctggagcagcttcttgaagccatagttgtagctacaaatccatcaggacgtctcattagcgaactttttcagaaactgccttctaaagtgcaatatccagattattatgcaataattaaggagcctatagatctcaagaccattgcccagaggatacagaatggaagctacaaaagtattcatgcaatggccaaagatatagatctcctcgcaaaaaatgccaaaacttataatgagcctggctctcaagtattcaaggatgcaaattcaattaaaaaaatattttatatgaaaaaggctgaaattgaacatcatgaaatggctaagtcaagtcttcgaatgaggactccatccaacttggctgcagccagactgacaggtccttcacacagtaaaggcagccttggtgaagagagaaatcccactagcaagtattaccgtaataaaagagcagtacaaggaggtcgtttatcagcaattacaatggcacttcaatatggctcagaaagtgaagaagatgctgctttagctgctgcacgctatgaagagggagagtcagaagcagaaagcatcacttcctttatggatgtttcaaatcctttttatcagctttatgacacagttaggagttgtcggaataaccaagggcagctaatagctgaacctttttaccatttgccttcaaagaaaaaataccctgattattaccagcaaattaaaatgcccatatcactacaacagatccgaacaaaactgaagaatcaagaatatgaaactttagatcatttggagtgtgatctgaatttaatgtttgaaaatgccaaacgctataatgtgcccaattcagccatctacaagcgagttctaaaattgcagcaagttatgcaggcaaagaagaaagagcttgccaggagagacgatatcgaggacggagacagcatgatctcttcagccacctctgatactggtagtgccaaaagaaaaagtaaaaagaacataagaaagcagcgaatgaaaatcttattcaatgttgttcttgaagctcgagagccaggttcaggcagaagactttgtgacctatttatggttaaaccatccaaaaaggactatcctgattattataaaatcatcttggagccaatggacttgaaaataattgagcataacatccgcaatgacaaatatgctggtgaagagggaatgatagaagacatgaagctgatgttccggaatgccaggcactataatgaggagggctcccaggtttataatgatgcacatatcctggagaagttactcaaggagaaaaggaaagagctgggcccactgcctgatgatgatgacatggcttctcccaaactcaagctgagtaggaagagtggcatttctcctaaaaaatcaaaatacatgactccaatgcagcagaaactaaatgaggtctatgaagctgtaaagaactatactgataagaggggtcgccgcctcagtgccatatttctgaggcttccctctagatctgagttgcctgactactatctgactattaaaaagcccatggacatggaaaaaattcgaagtcacatgatggccaacaagtaccaagatattgactctatggttgaggactttgtcatgatgtttaataatgcctgtacatacaatgagccggagtctttgatctacaaagatgctcttgttctacacaaagtcctgcttgaaacacgcagagacctggagggagatgaggactctcatgtcccaaatgtgactttgctgattcaagagcttatccacaatctttttgtgtcagtcatgagtcatcaggatgatgagggaagatgctacagcgattctttagcagaaattcctgctgtggatcccaactttcctaacaaaccaccccttacatttgacataattaggaagaatgttgaaaataatcgctaccgtcggcttgatttatttcaagagcatatgtttgaagtattggaacgagcaagaaggatgaatcggacagattcagaaatatatgaagatgcagtagaacttcagcagttttttattaaaattcgtgatgaactctgcaaaaatggagagattcttctttcaccggcactcagctataccacaaaacatttgcataatgatgtggagaaagagagaaaggaaaaattgccaaaagaaatagaggaagataaactaaaacgagaagaagaaaaaagagaagctgaaaagagtgaagattcctctggtgctgcaggcctctcaggcttacatcgcacatacagccaggactgtagctttaaaaacagcatgtaccatgttggagattacgtctatgtggaacctgcagaggccaacctacaaccacatatcgtctgtattgaaagactgtgggaggattcagctggtgaaaaatggttgtatggctgttggttttaccgaccaaatgaaacattccacctggctacacgaaaatttctagaaaaagaagtttttaagagtgactattacaacaaagttccagttagtaaaattctaggcaagtgtgtggtcatgtttgtcaaggaatactttaagttatgcccagaaaacttccgagatgaggatgtttttgtctgtgaatcacggtattctgccaaaaccaaatcttttaagaaaattaaactgtggaccatgcccatcagctcagtcaggtttgtccctcgggatgtgcctctgcctgtggttcgcgtggcctctgtatttgcaaatgcagataaaggtgatgatgagaagaatacagacaactcagaggacagtcgagctgaagacaattttaacttggaaaaggaaaaagaagatgtccctgtggaaatgtccaatggtgaaccaggttgccactactttgagcagctccattacaatgacatgtggctgaaggttggcgactgtgtcttcatcaagtcccatggcctggtgcgtcctcgtgtgggcagaattgaaaaagtatgggttcgagatggagctgcatatttttatggccccatcttcattcacccagaagaaacagagcatgagcccacaaaaatgttctacaaaaaagaagtatttctgagtaatctggaagaaacctgccccatgacatgtattctcggaaagtgtgctgtgttgtcattcaaggacttcctctcctgcaggccaactgaaataccagaaaatgacattctgctttgtgagagccgctacaatgagagcgacaagcagatgaagaaattcaaaggattgaagaggttttcactctctgctaaagtggtagatgatgaaatttactacttcagaaaaccaattgttcctcagaaggagccatcacctttgctggaaaagaagatccagttgctagaagctaaatttgccgagttagaaggtggagatgatgatattgaagagatgggagaagaagatagtgaggtcattgaacctccttctctacctcagcttcagacccccctggccagtgagctggacctcatgccctacacacccccacagtctaccccaaagtctgccaaaggcagtgcaaagaaggaaggctccaaacggaaaatcaacatgagtggctacatcctgttcagcagtgagatgagggctgtgattaaggcccaacacccagactactctttcggggagctcagccgcctggtggggacagaatggagaaatcttgagacagccaagaaagcagaatatgaaggcatgatgggtggctatccgccaggccttccacctttgcagggcccagttgatggccttgttagcatgggcagcatgcagccacttcaccctggggggcctccaccccaccatcttccgccaggtgtgcctggcctcccgggcatcccaccaccgggtgtgatgaaccaaggagtggcccctatggtagggactccagcaccaggtggaagtccatatggacaacaggtgggagttttggggcctccagggcagcaggcaccacctccatatcccggcccacatccagctggaccccctgtcatacagcagccaacaacacccatgtttgtagctcccccaccaaagacccagcggcttcttcactcagaggcctacctgaaatacattgaaggactcagtgcggagtccaacagcattagcaagtgggatcagacactggcagctcgaagacgcgacgtccatttgtcgaaagaacaggagagccgcctaccctctcactggctgaaaagcaaaggggcccacaccaccatggcagatgccctctggcgccttcgagatttgatgctccgggacaccctcaacattcgccaagcatacaacctagaaaatgtttaatcacatcattacgtttcttttatatagaagcataaagagttgtggatcagtagccattttagttactgggggtggggggaaggaacaaaggaggataatttttattgcattttactgtacatcacaaggccatttttatatacggacacttttaataagctatttcaatttgtttgttatattaagttgactttatcaaatacacaaagatttttttgcatatgtttccttcgtttaaaaccagtttcataattggttgtatatgtagacttggagttttatctttttacttgttgccatggaactgaaaccattagaggtttttgtcttggcttggggtttttgttttcttggttttgggtttttttatatatatatataaaagaacaaaatgaaaaaaaacacacacacacaagagtttacagattagtttaaattgataatgaaatgtgaagtttgtcctagtttacatcttagagaggggagtatacttgtgtttgtttcatgtgcctgaatatcttaagccactttctgcaaaagctgtttcttacagatgaagtgctttctttgaaaggtggttatttaggttttagatgtttaatagacacagcacatttgctctattaactcagaggctcactacagaaatatgtaatcagtgctgtgcatctgtctgcagctaatgtacctcctggacaccaggaggggaaaaagcactttttcaattgtgctgagttagacatctgtgagttagactatggtgtcagtgatttttgcagaacacgtgcacaaccctgaggtatgtttaatctaggcaggtacgtttaaggatattttgatctatttataatgaattcacaatttatgcctataaatttcagatgatttaaaattttaaacctgttacattgaaaaacattgaagttcgtcttgaagaaagcattaaggtatgcatggaggtgatttatttttaaacataacacctaacctaacatgggtaagagagtatggaactagatatgagctgtataagaagcataattgtgaacaagtagattgattgccttcatatacaagtatgttttagtattccttatttccttattatcagatgtattttttcttttaagtttcaatgttgttataattctcaaccagaaatttaatactttctaaaatattttttaaatttagcttgtgcttttgaattacaggagaagggaatcataatttaataaaacgcttactagaaagaccattacagatcccaaacacttgggtttggtgaccctgtctttcttatatgaccctacaataaacatttgaaggcagcataggatggcagacagtaggaacattgtttcacttggcggcatgtttttgaaacctgctttatagtaactgggtgattgccattgtggtagagcttccactgctgtttataatctgagagagttaatctcagaggatgcttttttccttttaatctgctatgaatcagtacccagatgtttaattactgtacttattaaatcatgagggcaaaagagtgtagaatggaaaaaagtctcttgtatctagatactttaaatatgggaggccctttaacttaattgcctttagtcaaccactggatttgaatttgcatcaagtattttaaataatattgaatttaaaaaaatgtattgcagtagtgtgtcagtaccttattgttaaagtgagtcagataaatcttcaattcctggctatttgggcaattgaatcatcatggactgtataatgcaatcagattattttgtttctagacatccttgaattacaccaaagaacatgaaatttagttgtggttaaattatttatttatttcatgcattcattttatttcccttaaggtctggatgagacttctttggggagcctctaaaaaaatttttcactgggggccacgtgggtcattagaagccagagctctcctccaggctccttcccagtgcctagaggtgctataggaaacatagatccagccaggggcttccctaaagcagtgcagcaccggcccagggcatcactagacaggccctaattaagttttttttaaaaagcctgtgtatttattttagaatcatgtttttctgtatattaacttgggggatatcgttaatatttaggatataagatttgaggtcagccatcttc

SEQ ID NO: 362660 - DNA, 5247 bp, Homo sapiens
acggcagcggccgcggccggaggagcaatagcagcagccgtggcggccacggggcggggcgcggcggtcggtgaccgcggccggggctgcaggcggcggagcggctggaagaagttggattccatgggttccaagagaagaagagctacctccccttccagcagtgtcagcggggactttgatgatgggcaccattctgtgtcaacaccaggcccaagcaggaaaaggaggagactttccaatcttccaactgtagatcctattgccgtgtgccatgaactctataataccatccgagactataaggatgaacagggcagacttctctgtgagctcttcattagggcaccaaagcgaagaaatcaaccagactattatgaagtggtttctcagcccattgacttgatgaaaatccaacagaaactaaaaatggaagagtatgatgatgttaatttgctgactgctgacttccagcttctttttaacaatgcaaagtcctattataagccagattctcctgaatataaagccgcttgcaaactctgggatttgtaccttcgaacaagaaatgagtttgttcagaaaggagaagcagatgacgaagatgatgatgaagatgggcaagacaatcagggcacagtgactgaaggatcttctccagcttacttgaaggagatcctggagcagcttcttgaagccatagttgtagctacaaatccatcaggacgtctcattagcgaactttttcagaaactgccttctaaagtgcaatatccagattattatgcaataattaaggagcctatagatctcaagaccattgcccagaggatacagaatggaagctacaaaagtattcatgcaatggccaaagatatagatctcctcgcaaaaaatgccaaaacttataatgagcctggctctcaagtattcaaggatgcaaattcaattaaaaaaatattttatatgaaaaaggctgaaattgaacatcatgaaatggctaagtcaagtcttcgaatgaggactccatccaacttggctgcagccagactgacaggtccttcacacagtaaaggcagccttggtgaagagagaaatcccactagcaagtattaccgtaataaaagagcagtacaaggaggtcgtttatcagcaattacaatggcacttcaatatggctcagaaagtgaagaagatgctgctttagctgctgcacgctatgaagagggagagtcagaagcagaaagcatcacttcctttatggatgtttcaaatcctttttatcagctttatgacacagttaggagttgtcggaataaccaagggcagctaatagctgaacctttttaccatttgccttcaaagaaaaaataccctgattattaccagcaaattaaaatgcccatatcactacaacagatccgaacaaaactgaagaatcaagaatatgaaactttagatcatttggagtgtgatctgaatttaatgtttgaaaatgccaaacgctataatgtgcccaattcagccatctacaagcgagttctaaaattgcagcaagttatgcaggcaaagaagaaagagcttgccaggagagacgatatcgaggacggagacagcatgatctcttcagccacctctgatactggtagtgccaaaagaaaaagtaaaaagaacataagaaagcagcgaatgaaaatcttattcaatgttgttcttgaagctcgagagccaggttcaggcagaagactttgtgacctatttatggttaaaccatccaaaaaggactatcctgattattataaaatcatcttggagccaatggacttgaaaataattgagcataacatccgcaatgacaaatatgctggtgaagagggaatgatagaagacatgaagctgatgttccggaatgccaggcactataatgaggagggctcccaggtttataatgatgcacatatcctggagaagttactcaaggagaaaaggaaagagctgggcccactgcctgatgatgatgacatggcttctcccaaactcaagctgagtaggaagagtggcatttctcctaaaaaatcaaaatacatgactccaatgcagcagaaactaaatgaggtctatgaagctgtaaagaactatactgataagaggggtcgccgcctcagtgccatatttctgaggcttccctctagatctgagttgcctgactactatctgactattaaaaagcccatggacatggaaaaaattcgaagtcacatgatggccaacaagtaccaagatattgactctatggttgaggactttgtcatgatgtttaataatgcctgtacatacaatgagccggagtctttgatctacaaagatgctcttgttctacacaaagtcctgcttgaaacacgcagagacctggagggagatgaggactctcatgtcccaaatgtgactttgctgattcaagagcttatccacaatctttttgtgtcagtcatgagtcatcaggatgatgagggaagatgctacagcgattctttagcagaaattcctgctgtggatcccaactttcctaacaaaccaccccttacatttgacataattaggaagaatgttgaaaataatcgctaccgtcggcttgatttatttcaagagcatatgtttgaagtattggaacgagcaagaaggatgaatcggacagattcagaaatatatgaagatgcagtagaacttcagcagttttttattaaaattcgtgatgaactctgcaaaaatggagagattcttctttcaccggcactcagctataccacaaaacatttgcataatgatgtggagaaagagagaaaggaaaaattgccaaaagaaatagaggaagataaactaaaacgagaagaagaaaaaagagaagctgaaaagagtgaagattcctctggtgctgcaggcctctcaggcttacatcgcacatacagccaggactgtagctttaaaaacagcatgtaccatgttggagattacgtctatgtggaacctgcagaggccaacctacaaccacatatcgtctgtattgaaagactgtgggaggattcagctggtgaaaaatggttgtatggctgttggttttaccgaccaaatgaaacattccacctggctacacgaaaatttctagaaaaagaagtttttaagagtgactattacaacaaagttccagttagtaaaattctaggcaagtgtgtggtcatgtttgtcaaggaatactttaagttatgcccagaaaacttccgagatgaggatgtttttgtctgtgaatcacggtattctgccaaaaccaaatcttttaagaaaattaaactgtggaccatgcccatcagctcagtcaggtttgtccctcgggatgtgcctctgcctgtggttcgcgtggcctctgtatttgcaaatgcagataaaggtgatgatgagaagaatacagacaactcagaggacagtcgagctgaagacaattttaacttggaaaaggaaaaagaagatgtccctgtggaaatgtccaatggtgaaccaggttgccactactttgagcagctccattacaatgacatgtggctgaaggttggcgactgtgtcttcatcaagtcccatggcctggtgcgtcctcgtgtgggcagaattgaaaaagtatgggttcgagatggagctgcatatttttatggccccatcttcattcacccagaagaaacagagcatgagcccacaaaaatgttctacaaaaaagaagtatttctgagtaatctggaagaaacctgccccatgacatgtattctcggaaagtgtgctgtgttgtcattcaaggacttcctctcctgcaggccaactgaaataccagaaaatgacattctgctttgtgagagccgctacaatgagagcgacaagcagatgaagaaattcaaaggattgaagaggttttcactctctgctaaagtggtagatgatgaaatttactacttcagaaaaccaattgttcctcagaaggagccatcacctttgctggaaaagaagatccagttgctagaagctaaatttgccgagttagaaggtggagatgatgatattgaagagatgggagaagaagatagtgaggtcattgaacctccttctctacctcagcttcagacccccctggccagtgagctggacctcatgccctacacacccccacagtctaccccaaagtctgccaaaggcagtgcaaagaaggaaggctccaaacggaaaatcaacatgagtggctacatcctgttcagcagtgagatgagggctgtgattaaggcccaacacccagactactctttcggggagctcagccgcctggtggggacagaatggagaaatcttgagacagccaagaaagcagaatatgaaggcatgatgggtggctatccgccaggccttccacctttgcagggcccagttgatggccttgttagcatgggcagcatgcagccacttcaccctggggggcctccaccccaccatcttccgccaggtgtgcctggcctcccgggcatcccaccaccgggtgtgatgaaccaaggagtggcccctatggtagggactccagcaccaggtggaagtccatatggacaacaggtgggagttttggggcctccagggcagcaggcaccacctccatatcccggcccacatccagctggaccccctgtcatacagcagccaacaacacccatgtttgtagctcccccaccaaagacccagcggcttcttcactcagaggcctacctgaaatacattgaaggactcagtgcggagtccaacagcattagcaagtgggatcagacactggcagctcgaagacgcgacgtccatttgtcgaaagaacaggagagccgcctaccctctcactggctgaaaagcaaaggggcccacaccaccatggcagatgccctctggcgccttcgagatttgatgctccgggacaccctcaacattcgccaagcatacaacctagaaaatgtttaatcacatcattacgtttcttttatatagaagcataaagagttgtggatcagtagccattttagttactgggggtggggggaaggaacaaaggaggataatttttattgcattttactgtacatcacaaggccatttttatatacggacacttttaataagctatttcaatttgtttgttatattaagttgactttatcaaatacacaaagatttttttgc

SEQ ID NO: 362661 - DNA, 7149 bp, Homo sapiens
acggcagcggccgcggccggaggagcaatagcagcagccgtggcggccacggggcggggcgcggcggtcggtgaccgcggccggggctgcaggcggcggagcggctggaagaagttggattccatgggttccaagagaagaagagctacctccccttccagcagtgtcagcggggactttgatgatgggcaccattctgtgtcaacaccaggcccaagcaggaaaaggaggagactttccaatcttccaactgtagatcctattgccgtgtgccatgaactctataataccatccgagactataaggatgaacagggcagacttctctgtgagctcttcattagggcaccaaagcgaagaaatcaaccagactattatgaagtggtttctcagcccattgacttgatgaaaatccaacagaaactaaaaatggaagagtatgatgatgttaatttgctgactgctgacttccagcttctttttaacaatgcaaagtcctattataagccagattctcctgaatataaagccgcttgcaaactctgggatttgtaccttcgaacaagaaatgagtttgttcagaaaggagaagcagatgacgaagatgatgatgaagatgggcaagacaatcagggcacagtgactgaaggatcttctccagcttacttgaaggagatcctggagcagcttcttgaagccatagttgtagctacaaatccatcaggacgtctcattagcgaactttttcagaaactgccttctaaagtgcaatatccagattattatgcaataattaaggagcctatagatctcaagaccattgcccagaggatacagaatggaagctacaaaagtattcatgcaatggccaaagatatagatctcctcgcaaaaaatgccaaaacttataatgagcctggctctcaagtattcaaggatgcaaattcaattaaaaaaatattttatatgaaaaaggctgaaattgaacatcatgaaatggctaagtcaagtcttcgaatgaggactccatccaacttggctgcagccagactgacaggtccttcacacagtaaaggcagccttggtgaagagagaaatcccactagcaagtattaccgtaataaaagagcagtacaaggaggtcgtttatcagcaattacaatggcacttcaatatggctcagaaagtgaagaagatgctgctttagctgctgcacgctatgaagagggagagtcagaagcagaaagcatcacttcctttatggatgtttcaaatcctttttatcagctttatgacacagttaggagttgtcggaataaccaagggcagctaatagctgaacctttttaccatttgccttcaaagaaaaaataccctgattattaccagcaaattaaaatgcccatatcactacaacagatccgaacaaaactgaagaatcaagaatatgaaactttagatcatttggagtgtgatctgaatttaatgtttgaaaatgccaaacgctataatgtgcccaattcagccatctacaagcgagttctaaaattgcagcaagttatgcaggcaaagaagaaagagcttgccaggagagacgatatcgaggacggagacagcatgatctcttcagccacctctgatactggtagtgccaaaagaaaaagtaaaaagaacataagaaagcagcgaatgaaaatcttattcaatgttgttcttgaagctcgagagccaggttcaggcagaagactttgtgacctatttatggttaaaccatccaaaaaggactatcctgattattataaaatcatcttggagccaatggacttgaaaataattgagcataacatccgcaatgacaaatatgctggtgaagagggaatgatagaagacatgaagctgatgttccggaatgccaggcactataatgaggagggctcccaggtttataatgatgcacatatcctggagaagttactcaaggagaaaaggaaagagctgggcccactgcctgatgatgatgacatggcttctcccaaactcaagctgagtaggaagagtggcatttctcctaaaaaatcaaaatacatgactccaatgcagcagaaactaaatgaggtctatgaagctgtaaagaactatactgataagaggggtcgccgcctcagtgccatatttctgaggcttccctctagatctgagttgcctgactactatctgactattaaaaagcccatggacatggaaaaaattcgaagtcacatgatggccaacaagtaccaagatattgactctatggttgaggactttgtcatgatgtttaataatgcctgtacatacaatgagccggagtctttgatctacaaagatgctcttgttctacacaaagtcctgcttgaaacacgcagagacctggagggagatgaggactctcatgtcccaaatgtgactttgctgattcaagagcttatccacaatctttttgtgtcagtcatgagtcatcaggatgatgagggaagatgctacagcgattctttagcagaaattcctgctgtggatcccaactttcctaacaaaccaccccttacatttgacataattaggaagaatgttgaaaataatcgctaccgtcggcttgatttatttcaagagcatatgtttgaagtattggaacgagcaagaaggatgaatcggacagattcagaaatatatgaagatgcagtagaacttcagcagttttttattaaaattcgtgatgaactctgcaaaaatggagagattcttctttcaccggcactcagctataccacaaaacatttgcataatgatgtggagaaagagagaaaggaaaaattgccaaaagaaatagaggaagataaactaaaacgagaagaagaaaaaagagaagctgaaaagagtgaagattcctctggtgctgcaggcctctcaggcttacatcgcacatacagccaggactgtagctttaaaaacagcatgtaccatgttggagattacgtctatgtggaacctgcagaggccaacctacaaccacatatcgtctgtattgaaagactgtgggaggattcagctgaaaaagaagtttttaagagtgactattacaacaaagttccagttagtaaaattctaggcaagtgtgtggtcatgtttgtcaaggaatactttaagttatgcccagaaaacttccgagatgaggatgtttttgtctgtgaatcacggtattctgccaaaaccaaatcttttaagaaaattaaactgtggaccatgcccatcagctcagtcaggtttgtccctcgggatgtgcctctgcctgtggttcgcgtggcctctgtatttgcaaatgcagataaaggtgatgatgagaagaatacagacaactcagaggacagtcgagctgaagacaattttaacttggaaaaggaaaaagaagatgtccctgtggaaatgtccaatggtgaaccaggttgccactactttgagcagctccattacaatgacatgtggctgaaggttggcgactgtgtcttcatcaagtcccatggcctggtgcgtcctcgtgtgggcagaattgaaaaagtatgggttcgagatggagctgcatatttttatggccccatcttcattcacccagaagaaacagagcatgagcccacaaaaatgttctacaaaaaagaagtatttctgagtaatctggaagaaacctgccccatgacatgtattctcggaaagtgtgctgtgttgtcattcaaggacttcctctcctgcaggccaactgaaataccagaaaatgacattctgctttgtgagagccgctacaatgagagcgacaagcagatgaagaaattcaaaggattgaagaggttttcactctctgctaaagtggtagatgatgaaatttactacttcagaaaaccaattgttcctcagaaggagccatcacctttgctggaaaagaagatccagttgctagaagctaaatttgccgagttagaaggtggagatgatgatattgaagagatgggagaagaagatagtgaggtcattgaacctccttctctacctcagcttcagacccccctggccagtgagctggacctcatgccctacacacccccacagtctaccccaaagtctgccaaaggcagtgcaaagaaggaaggctccaaacggaaaatcaacatgagtggctacatcctgttcagcagtgagatgagggctgtgattaaggcccaacacccagactactctttcggggagctcagccgcctggtggggacagaatggagaaatcttgagacagccaagaaagcagaatatgaaggcatgatgggtggctatccgccaggccttccacctttgcagggcccagttgatggccttgttagcatgggcagcatgcagccacttcaccctggggggcctccaccccaccatcttccgccaggtgtgcctggcctcccgggcatcccaccaccgggtgtgatgaaccaaggagtggcccctatggtagggactccagcaccaggtggaagtccatatggacaacaggtgggagttttggggcctccagggcagcaggcaccacctccatatcccggcccacatccagctggaccccctgtcatacagcagccaacaacacccatgtttgtagctcccccaccaaagacccagcggcttcttcactcagaggcctacctgaaatacattgaaggactcagtgcggagtccaacagcattagcaagtgggatcagacactggcagctcgaagacgcgacgtccatttgtcgaaagaacaggagagccgcctaccctctcactggctgaaaagcaaaggggcccacaccaccatggcagatgccctctggcgccttcgagatttgatgctccgggacaccctcaacattcgccaagcatacaacctagaaaatgtttaatcacatcattacgtttcttttatatagaagcataaagagttgtggatcagtagccattttagttactgggggtggggggaaggaacaaaggaggataatttttattgcattttactgtacatcacaaggccatttttatatacggacacttttaataagctatttcaatttgtttgttatattaagttgactttatcaaatacacaaagatttttttgcatatgtttccttcgtttaaaaccagtttcataattggttgtatatgtagacttggagttttatctttttacttgttgccatggaactgaaaccattagaggtttttgtcttggcttggggtttttgttttcttggttttgggtttttttatatatatatataaaagaacaaaatgaaaaaaaacacacacacacaagagtttacagattagtttaaattgataatgaaatgtgaagtttgtcctagtttacatcttagagaggggagtatacttgtgtttgtttcatgtgcctgaatatcttaagccactttctgcaaaagctgtttcttacagatgaagtgctttctttgaaaggtggttatttaggttttagatgtttaatagacacagcacatttgctctattaactcagaggctcactacagaaatatgtaatcagtgctgtgcatctgtctgcagctaatgtacctcctggacaccaggaggggaaaaagcactttttcaattgtgctgagttagacatctgtgagttagactatggtgtcagtgatttttgcagaacacgtgcacaaccctgaggtatgtttaatctaggcaggtacgtttaaggatattttgatctatttataatgaattcacaatttatgcctataaatttcagatgatttaaaattttaaacctgttacattgaaaaacattgaagttcgtcttgaagaaagcattaaggtatgcatggaggtgatttatttttaaacataacacctaacctaacatgggtaagagagtatggaactagatatgagctgtataagaagcataattgtgaacaagtagattgattgccttcatatacaagtatgttttagtattccttatttccttattatcagatgtattttttcttttaagtttcaatgttgttataattctcaaccagaaatttaatactttctaaaatattttttaaatttagcttgtgcttttgaattacaggagaagggaatcataatttaataaaacgcttactagaaagaccattacagatcccaaacacttgggtttggtgaccctgtctttcttatatgaccctacaataaacatttgaaggcagcataggatggcagacagtaggaacattgtttcacttggcggcatgtttttgaaacctgctttatagtaactgggtgattgccattgtggtagagcttccactgctgtttataatctgagagagttaatctcagaggatgcttttttccttttaatctgctatgaatcagtacccagatgtttaattactgtacttattaaatcatgagggcaaaagagtgtagaatggaaaaaagtctcttgtatctagatactttaaatatgggaggccctttaacttaattgcctttagtcaaccactggatttgaatttgcatcaagtattttaaataatattgaatttaaaaaaatgtattgcagtagtgtgtcagtaccttattgttaaagtgagtcagataaatcttcaattcctggctatttgggcaattgaatcatcatggactgtataatgcaatcagattattttgtttctagacatccttgaattacaccaaagaacatgaaatttagttgtggttaaattatttatttatttcatgcattcattttatttcccttaaggtctggatgagacttctttggggagcctctaaaaaaatttttcactgggggccacgtgggtcattagaagccagagctctcctccaggctccttcccagtgcctagaggtgctataggaaacatagatccagccaggggcttccctaaagcagtgcagcaccggcccagggcatcactagacaggccctaattaagttttttttaaaaagcctgtgtatttattttagaatcatgtttttctgtatattaacttgggggatatcgttaatatttaggatataagatttgaggtcagccatcttc

SEQ ID NO: 362662 - DNA, 7132 bp, Homo sapiens
acggcagcggccgcggccggaggagcaatagcagcagccgtggcggccacggggcggggcgcggcggtcggtgaccgcggccggggctgcaggcggcggagcggctggaagaagttggattccatgggttccaagagaagaagagctacctccccttccagcagtgtcagcggggactttgatgatgggcaccattctgtgtcaacaccaggcccaagcaggaaaaggaggagactttccaatcttccaactgtagatcctattgccgtgtgccatgaactctataataccatccgagactataaggatgaacagggcagacttctctgtgagctcttcattagggcaccaaagcgaagaaatcaaccagactattatgaagtggtttctcagcccattgacttgatgaaaatccaacagaaactaaaaatggaagagtatgatgatgttaatttgctgactgctgacttccagcttctttttaacaatgcaaagtcctattataagccagattctcctgaatataaagccgcttgcaaactctgggatttgtaccttcgaacaagaaatgagtttgttcagaaaggagaagcagatgacgaagatgatgatgaagatgggcaagacaatcagggcacagtgactgaaggatcttctccagcttacttgaaggagatcctggagcagcttcttgaagccatagttgtagctacaaatccatcaggacgtctcattagcgaactttttcagaaactgccttctaaagtgcaatatccagattattatgcaataattaaggagcctatagatctcaagaccattgcccagaggatacagaatggaagctacaaaagtattcatgcaatggccaaagatatagatctcctcgcaaaaaatgccaaaacttataatgagcctggctctcaagtattcaaggatgcaaattcaattaaaaaaatattttatatgaaaaaggctgaaattgaacatcatgaaatggctaagtcaagtcttcgaatgaggactccatccaacttggctgcagccagactgacaggtccttcacacagtaaaggcagccttggtgaagagagaaatcccactagcaagtattaccgctgcacgctatgaagagggagagtcagaagcagaaagcatcacttcctttatggatgtttcaaatcctttttatcagctttatgacacagttaggagttgtcggaataaccaagggcagctaatagctgaacctttttaccatttgccttcaaagaaaaaataccctgattattaccagcaaattaaaatgcccatatcactacaacagatccgaacaaaactgaagaatcaagaatatgaaactttagatcatttggagtgtgatctgaatttaatgtttgaaaatgccaaacgctataatgtgcccaattcagccatctacaagcgagttctaaaattgcagcaagttatgcaggcaaagaagaaagagcttgccaggagagacgatatcgaggacggagacagcatgatctcttcagccacctctgatactggtagtgccaaaagaaaaagtaaaaagaacataagaaagcagcgaatgaaaatcttattcaatgttgttcttgaagctcgagagccaggttcaggcagaagactttgtgacctatttatggttaaaccatccaaaaaggactatcctgattattataaaatcatcttggagccaatggacttgaaaataattgagcataacatccgcaatgacaaatatgctggtgaagagggaatgatagaagacatgaagctgatgttccggaatgccaggcactataatgaggagggctcccaggtttataatgatgcacatatcctggagaagttactcaaggagaaaaggaaagagctgggcccactgcctgatgatgatgacatggcttctcccaaactcaagctgagtaggaagagtggcatttctcctaaaaaatcaaaatacatgactccaatgcagcagaaactaaatgaggtctatgaagctgtaaagaactatactgataagaggggtcgccgcctcagtgccatatttctgaggcttccctctagatctgagttgcctgactactatctgactattaaaaagcccatggacatggaaaaaattcgaagtcacatgatggccaacaagtaccaagatattgactctatggttgaggactttgtcatgatgtttaataatgcctgtacatacaatgagccggagtctttgatctacaaagatgctcttgttctacacaaagtcctgcttgaaacacgcagagacctggagggagatgaggactctcatgtcccaaatgtgactttgctgattcaagagcttatccacaatctttttgtgtcagtcatgagtcatcaggatgatgagggaagatgctacagcgattctttagcagaaattcctgctgtggatcccaactttcctaacaaaccaccccttacatttgacataattaggaagaatgttgaaaataatcgctaccgtcggcttgatttatttcaagagcatatgtttgaagtattggaacgagcaagaaggatgaatcggacagattcagaaatatatgaagatgcagtagaacttcagcagttttttattaaaattcgtgatgaactctgcaaaaatggagagattcttctttcaccggcactcagctataccacaaaacatttgcataatgatgtggagaaagagagaaaggaaaaattgccaaaagaaatagaggaagataaactaaaacgagaagaagaaaaaagagaagctgaaaagagtgaagattcctctggtgctgcaggcctctcaggcttacatcgcacatacagccaggactgtagctttaaaaacagcatgtaccatgttggagattacgtctatgtggaacctgcagaggccaacctacaaccacatatcgtctgtattgaaagactgtgggaggattcagctggtgaaaaatggttgtatggctgttggttttaccgaccaaatgaaacattccacctggctacacgaaaatttctagaaaaagaagtttttaagagtgactattacaacaaagttccagttagtaaaattctaggcaagtgtgtggtcatgtttgtcaaggaatactttaagttatgcccagaaaacttccgagatgaggatgtttttgtctgtgaatcacggtattctgccaaaaccaaatcttttaagaaaattaaactgtggaccatgcccatcagctcagtcaggtttgtccctcgggatgtgcctctgcctgtggttcgcgtggcctctgtatttgcaaatgcagataaaggtgatgatgagaagaatacagacaactcagaggacagtcgagctgaagacaattttaacttggaaaaggaaaaagaagatgtccctgtggaaatgtccaatggtgaaccaggttgccactactttgagcagctccattacaatgacatgtggctgaaggttggcgactgtgtcttcatcaagtcccatggcctggtgcgtcctcgtgtgggcagaattgaaaaagtatgggttcgagatggagctgcatatttttatggccccatcttcattcacccagaagaaacagagcatgagcccacaaaaatgttctacaaaaaagaagtatttctgagtaatctggaagaaacctgccccatgacatgtattctcggaaagtgtgctgtgttgtcattcaaggacttcctctcctgcaggccaactgaaataccagaaaatgacattctgctttgtgagagccgctacaatgagagcgacaagcagatgaagaaattcaaaggattgaagaggttttcactctctgctaaagtggtagatgatgaaatttactacttcagaaaaccaattgttcctcagaaggagccatcacctttgctggaaaagaagatccagttgctagaagctaaatttgccgagttagaaggtggagatgatgatattgaagagatgggagaagaagatagtgaggtcattgaacctccttctctacctcagcttcagacccccctggccagtgagctggacctcatgccctacacacccccacagtctaccccaaagtctgccaaaggcagtgcaaagaaggaaggctccaaacggaaaatcaacatgagtggctacatcctgttcagcagtgagatgagggctgtgattaaggcccaacacccagactactctttcggggagctcagccgcctggtggggacagaatggagaaatcttgagacagccaagaaagcagaatatgaaggcatgatgggtggctatccgccaggccttccacctttgcagggcccagttgatggccttgttagcatgggcagcatgcagccacttcaccctggggggcctccaccccaccatcttccgccaggtgtgcctggcctcccgggcatcccaccaccgggtgtgatgaaccaaggagtggcccctatggtagggactccagcaccaggtggaagtccatatggacaacaggtgggagttttggggcctccagggcagcaggcaccacctccatatcccggcccacatccagctggaccccctgtcatacagcagccaacaacacccatgtttgtagctcccccaccaaagacccagcggcttcttcactcagaggcctacctgaaatacattgaaggactcagtgcggagtccaacagcattagcaagtgggatcagacactggcagctcgaagacgcgacgtccatttgtcgaaagaacaggagagccgcctaccctctcactggctgaaaagcaaaggggcccacaccaccatggcagatgccctctggcgccttcgagatttgatgctccgggacaccctcaacattcgccaagcatacaacctagaaaatgtttaatcacatcattacgtttcttttatatagaagcataaagagttgtggatcagtagccattttagttactgggggtggggggaaggaacaaaggaggataatttttattgcattttactgtacatcacaaggccatttttatatacggacacttttaataagctatttcaatttgtttgttatattaagttgactttatcaaatacacaaagatttttttgcatatgtttccttcgtttaaaaccagtttcataattggttgtatatgtagacttggagttttatctttttacttgttgccatggaactgaaaccattagaggtttttgtcttggcttggggtttttgttttcttggttttgggtttttttatatatatatataaaagaacaaaatgaaaaaaaacacacacacacaagagtttacagattagtttaaattgataatgaaatgtgaagtttgtcctagtttacatcttagagaggggagtatacttgtgtttgtttcatgtgcctgaatatcttaagccactttctgcaaaagctgtttcttacagatgaagtgctttctttgaaaggtggttatttaggttttagatgtttaatagacacagcacatttgctctattaactcagaggctcactacagaaatatgtaatcagtgctgtgcatctgtctgcagctaatgtacctcctggacaccaggaggggaaaaagcactttttcaattgtgctgagttagacatctgtgagttagactatggtgtcagtgatttttgcagaacacgtgcacaaccctgaggtatgtttaatctaggcaggtacgtttaaggatattttgatctatttataatgaattcacaatttatgcctataaatttcagatgatttaaaattttaaacctgttacattgaaaaacattgaagttcgtcttgaagaaagcattaaggtatgcatggaggtgatttatttttaaacataacacctaacctaacatgggtaagagagtatggaactagatatgagctgtataagaagcataattgtgaacaagtagattgattgccttcatatacaagtatgttttagtattccttatttccttattatcagatgtattttttcttttaagtttcaatgttgttataattctcaaccagaaatttaatactttctaaaatattttttaaatttagcttgtgcttttgaattacaggagaagggaatcataatttaataaaacgcttactagaaagaccattacagatcccaaacacttgggtttggtgaccctgtctttcttatatgaccctacaataaacatttgaaggcagcataggatggcagacagtaggaacattgtttcacttggcggcatgtttttgaaacctgctttatagtaactgggtgattgccattgtggtagagcttccactgctgtttataatctgagagagttaatctcagaggatgcttttttccttttaatctgctatgaatcagtacccagatgtttaattactgtacttattaaatcatgagggcaaaagagtgtagaatggaaaaaagtctcttgtatctagatactttaaatatgggaggccctttaacttaattgcctttagtcaaccactggatttgaatttgcatcaagtattttaaataatattgaatttaaaaaaatgtattgcagtagtgtgtcagtaccttattgttaaagtgagtcagataaatcttcaattcctggctatttgggcaattgaatcatcatggactgtataatgcaatcagattattttgtttctagacatccttgaattacaccaaagaacatgaaatttagttgtggttaaattatttatttatttcatgcattcattttatttcccttaaggtctggatgagacttctttggggagcctctaaaaaaatttttcactgggggccacgtgggtcattagaagccagagctctcctccaggctccttcccagtgcctagaggtgctataggaaacatagatccagccaggggcttccctaaagcagtgcagcaccggcccagggcatcactagacaggccctaattaagttttttttaaaaagcctgtgtatttattttagaatcatgtttttctgtatattaacttgggggatatcgttaatatttaggatataagatttgaggtcagccatcttc

SEQ ID NO: 362663 - DNA, 7068 bp, Homo sapiens
acggcagcggccgcggccggaggagcaatagcagcagccgtggcggccacggggcggggcgcggcggtcggtgaccgcggccggggctgcaggcggcggagcggctggaagaagttggattccatgggttccaagagaagaagagctacctccccttccagcagtgtcagcggggactttgatgatgggcaccattctgtgtcaacaccaggcccaagcaggaaaaggaggagactttccaatcttccaactgtagatcctattgccgtgtgccatgaactctataataccatccgagactataaggatgaacagggcagacttctctgtgagctcttcattagggcaccaaagcgaagaaatcaaccagactattatgaagtggtttctcagcccattgacttgatgaaaatccaacagaaactaaaaatggaagagtatgatgatgttaatttgctgactgctgacttccagcttctttttaacaatgcaaagtcctattataagccagattctcctgaatataaagccgcttgcaaactctgggatttgtaccttcgaacaagaaatgagtttgttcagaaaggagaagcagatgacgaagatgatgatgaagatgggcaagacaatcagggcacagtgactgaaggatcttctccagcttacttgaaggagatcctggagcagcttcttgaagccatagttgtagctacaaatccatcaggacgtctcattagcgaactttttcagaaactgccttctaaagtgcaatatccagattattatgcaataattaaggagcctatagatctcaagaccattgcccagaggatacagaatggaagctacaaaagtattcatgcaatggccaaagatatagatctcctcgcaaaaaatgccaaaacttataatgagcctggctctcaagtattcaaggatgcaaattcaattaaaaaaatattttatatgaaaaaggctgaaattgaacatcatgaaatggctaagtcaagtcttcgaatgaggactccatccaacttggctgcagccagactgacaggtccttcacacagtaaaggcagccttggtgaagagagaaatcccactagcaagtattaccgtaataaaagagcagtacaaggaggtcgtttatcagcaattacaatggcacttcaatatggctcagaaagtgaagaagatgctgctttagctgctgcacgctatgaagagggagagtcagaagcagaaagcatcacttcctttatggatgtttcaaatcctttttatcagctttatgacacagttaggagttgtcggaataaccaagggcagctaatagctgaacctttttaccatttgccttcaaagaaaaaataccctgattattaccagcaaattaaaatgcccatatcactacaacagatccgaacaaaactgaagaatcaagaatatgaaactttagatcatttggagtgtgatctgaatttaatgtttgaaaatgccaaacgctataatgtgcccaattcagccatctacaagcgagttctaaaattgcagcaagttatgcaggcaaagaagaaagagcttgccaggagagacgatatcgaggacggagacagcatgatctcttcagccacctctgatactggtagtgccaaaagaaaaagtaaaaagaacataagaaagcagcgaatgaaaatcttattcaatgttgttcttgaagctcgagagccaggttcaggcagaagactttgtgacctatttatggttaaaccatccaaaaaggactatcctgattattataaaatcatcttggagccaatggacttgaaaataattgagcataacatccgcaatgacaaatatgctggtgaagagggaatgatagaagacatgaagctgatgttccggaatgccaggcactataatgaggagggctcccaggtttataatgatgcacatatcctggagaagttactcaaggagaaaaggaaagagctgggcccactgcctgatgatgatgacatggcttctcccaaactcaagctgagtaggaagagtggcatttctcctaaaaaatcaaaatacatgactccaatgcagcagaaactaaatgaggtctatgaagctgtaaagaactatactgataagaggggtcgccgcctcagtgccatatttctgaggcttccctctagatctgagttgcctgactactatctgactattaaaaagcccatggacatggaaaaaattcgaagtcacatgatggccaacaagtaccaagatattgactctatggttgaggactttgtcatgatgtttaataatgcctgtacatacaatgagccggagtctttgatctacaaagatgctcttgttctacacaaagtcctgcttgaaacacgcagagacctggagggagatgaggactctcatgtcccaaatgtgactttgctgattcaagagcttatccacaatctttttgtgtcagtcatgagtcatcaggatgatgagggaagatgctacagcgattctttagcagaaattcctgctgtggatcccaactttcctaacaaaccaccccttacatttgacataattaggaagaatgttgaaaataatcgctaccgtcggcttgatttatttcaagagcatatgtttgaagtattggaacgagcaagaaggatgaatcggacagattcagaaatatatgaagatgcagtagaacttcagcagttttttattaaaattcgtgatgaactctgcaaaaatggagagattcttctttcaccggcactcagctataccacaaaacatttgcataatgatgtggagaaagagagaaaggaaaaattgccaaaagaaatagaggaagataaactaaaacgagaagaagaaaaaagagaagctgaaaagagtgaagattcctctggtgctgcaggcctctcaggcttacatcgcacatacagccaggactgtagctttaaaaacagcatgtaccatgttggagattacgtctatgtggaacctgcagaggccaacctacaaccacatatcgtctgtattgaaagactgtgggaggattcagctggtgaaaaatggttgtatggctgttggttttaccgaccaaatgaaacattccacctggctacacgaaaatttctagaaaaagaagtttttaagagtgactattacaacaaagttccagttagtaaaattctaggcaagtgtgtggtcatgtttgtcaaggaatactttaagttatgcccagaaaacttccgagatgaggatgtttttgtctgtgaatcacggtattctgccaaaaccaaatcttttaagaaaattaaactgtggaccatgcccatcagctcagtcaggtttgtccctcgggatgtgcctctgcctgtggttcgcgtggcctctgtatttgcaaatgcagataaaggtgatgatgagaagaatacagacaactcagaggacagtcgagctgaagacaattttaacttggaaaaggaaaaagaagatgtccctgtggaaatgtccaatggtgaaccaggttgccactactttgagcagctccattacaatgacatgtggctgaaggttggcgactgtgtcttcatcaagtcccatggcctggtgcgtcctcgtgtgggcagaattgaaaaagtatgggttcgagatggagctgcatatttttatggccccatcttcattcacccagaagaaacagagcatgagcccacaaaaatgttctacaaaaaagaagtatttctgagtaatctggaagaaacctgccccatgacatgtattctcggaaagtgtgctgtgttgtcattcaaggacttcctctcctgcaggccaactgaaataccagaaaatgacattctgctttgtgagagccgctacaatgagagcgacaagcagatgaagaaattcaaaggattgaagaggttttcactctctgctaaagtggtagatgatgaaatttactacttcagaaaaccaattgttcctcagaaggagccatcacctttgctggaaaagaagatccagttgctagaagctaaatttgccgagttagaaggtggagatgatgatattgaagagatgggagaagaagatagtgaggtcattgaacctccttctctacctcagcttcagacccccctggccagtgagctggacctcatgccctacacacccccacagtctaccccaaagtctgccaaaggcagtgcaaagaaggaaggctccaaacggaaaatcaacatgagtggctacatcctgttcagcagtgagatgagggctgtgattaaggcccaacacccagactactctttcggggagctcagccgcctggtggggacagaatggagaaatcttgagacagccaagaaagcagaatatgaaggtgtgatgaaccaaggagtggcccctatggtagggactccagcaccaggtggaagtccatatggacaacaggtgggagttttggggcctccagggcagcaggcaccacctccatatcccggcccacatccagctggaccccctgtcatacagcagccaacaacacccatgtttgtagctcccccaccaaagacccagcggcttcttcactcagaggcctacctgaaatacattgaaggactcagtgcggagtccaacagcattagcaagtgggatcagacactggcagctcgaagacgcgacgtccatttgtcgaaagaacaggagagccgcctaccctctcactggctgaaaagcaaaggggcccacaccaccatggcagatgccctctggcgccttcgagatttgatgctccgggacaccctcaacattcgccaagcatacaacctagaaaatgtttaatcacatcattacgtttcttttatatagaagcataaagagttgtggatcagtagccattttagttactgggggtggggggaaggaacaaaggaggataatttttattgcattttactgtacatcacaaggccatttttatatacggacacttttaataagctatttcaatttgtttgttatattaagttgactttatcaaatacacaaagatttttttgcatatgtttccttcgtttaaaaccagtttcataattggttgtatatgtagacttggagttttatctttttacttgttgccatggaactgaaaccattagaggtttttgtcttggcttggggtttttgttttcttggttttgggtttttttatatatatatataaaagaacaaaatgaaaaaaaacacacacacacaagagtttacagattagtttaaattgataatgaaatgtgaagtttgtcctagtttacatcttagagaggggagtatacttgtgtttgtttcatgtgcctgaatatcttaagccactttctgcaaaagctgtttcttacagatgaagtgctttctttgaaaggtggttatttaggttttagatgtttaatagacacagcacatttgctctattaactcagaggctcactacagaaatatgtaatcagtgctgtgcatctgtctgcagctaatgtacctcctggacaccaggaggggaaaaagcactttttcaattgtgctgagttagacatctgtgagttagactatggtgtcagtgatttttgcagaacacgtgcacaaccctgaggtatgtttaatctaggcaggtacgtttaaggatattttgatctatttataatgaattcacaatttatgcctataaatttcagatgatttaaaattttaaacctgttacattgaaaaacattgaagttcgtcttgaagaaagcattaaggtatgcatggaggtgatttatttttaaacataacacctaacctaacatgggtaagagagtatggaactagatatgagctgtataagaagcataattgtgaacaagtagattgattgccttcatatacaagtatgttttagtattccttatttccttattatcagatgtattttttcttttaagtttcaatgttgttataattctcaaccagaaatttaatactttctaaaatattttttaaatttagcttgtgcttttgaattacaggagaagggaatcataatttaataaaacgcttactagaaagaccattacagatcccaaacacttgggtttggtgaccctgtctttcttatatgaccctacaataaacatttgaaggcagcataggatggcagacagtaggaacattgtttcacttggcggcatgtttttgaaacctgctttatagtaactgggtgattgccattgtggtagagcttccactgctgtttataatctgagagagttaatctcagaggatgcttttttccttttaatctgctatgaatcagtacccagatgtttaattactgtacttattaaatcatgagggcaaaagagtgtagaatggaaaaaagtctcttgtatctagatactttaaatatgggaggccctttaacttaattgcctttagtcaaccactggatttgaatttgcatcaagtattttaaataatattgaatttaaaaaaatgtattgcagtagtgtgtcagtaccttattgttaaagtgagtcagataaatcttcaattcctggctatttgggcaattgaatcatcatggactgtataatgcaatcagattattttgtttctagacatccttgaattacaccaaagaacatgaaatttagttgtggttaaattatttatttatttcatgcattcattttatttcccttaaggtctggatgagacttctttggggagcctctaaaaaaatttttcactgggggccacgtgggtcattagaagccagagctctcctccaggctccttcccagtgcctagaggtgctataggaaacatagatccagccaggggcttccctaaagcagtgcagcaccggcccagggcatcactagacaggccctaattaagttttttttaaaaagcctgtgtatttattttagaatcatgtttttctgtatattaacttgggggatatcgttaatatttaggatataagatttgaggtcagccatcttc

SEQ ID NO: 362664 - DNA, 5149 bp, Homo sapiens
gcggccgctccaacatcagaatgggcagaaactaaatgaggtctatgaagctgtaaagaactatactgataagaggggtcgccgcctcagtgccatatttctgaggcttccctctagatctgagttgcctgactactatctgactattaaaaagcccatggacatggaaaaaattcgaagtcacatgatggccaacaagtaccaagatattgactctatggttgaggactttgtcatgatgtttaataatgcctgtacatacaatgagccggagtctttgatctacaaagatgctcttgttctacacaaagtcctgcttgaaacacgcagagacctggagggagatgaggactctcatgtcccaaatgtgactttgctgattcaagagcttatccacaatctttttgtgtcagtcatgagtcatcaggatgatgagggaagatgctacagcgattctttagcagaaattcctgctgtggatcccaactttcctaacaaaccaccccttacatttgacataattaggaagaatgttgaaaataatcgctaccgtcggcttgatttatttcaagagcatatgtttgaagtattggaacgagcaagaaggatgaatcggacagattcagaaatatatgaagatgcagtagaacttcagcagttttttattaaaattcgtgatgaactctgcaaaaatggagagattcttctttcaccggcactcagctataccacaaaacatttgcataatgatgtggagaaagagagaaaggaaaaattgccaaaagaaatagaggaagataaactaaaacgagaagaagaaaaaagagaagctgaaaagagtgaagattcctctggtgctgcaggcctctcaggcttacatcgcacatacagccaggactgtagctttaaaaacagcatgtaccatgttggagattacgtctatgtggaacctgcagaggccaacctacaaccacatatcgtctgtattgaaagactgtgggaggattcagctggtgaaaaatggttgtatggctgttggttttaccgaccaaatgaaacattccacctggctacacgaaaatttctagaaaaagaagtttttaagagtgactattacaacaaagttccagttagtaaaattctaggcaagtgtgtggtcatgtttgtcaaggaatactttaagttatgcccagaaaacttccgagatgaggatgtttttgtctgtgaatcacggtattctgccaaaaccaaatcttttaagaaaattaaactgtggaccatgcccatcagctcagtcaggtttgtccctcgggatgtgcctctgcctgtggttcgcgtggcctctgtatttgcaaatgcagataaaggtgatgatgagaagaatacagacaactcagaggacagtcgagctgaagacaattttaacttggaaaaggaaaaagaagatgtccctgtggaaatgtccaatggtgaaccaggttgccactactttgagcagctccattacaatgacatgtggctgaaggttggcgactgtgtcttcatcaagtcccatggcctggtgcgtcctcgtgtgggcagaattgaaaaagtatgggttcgagatggagctgcatatttttatggccccatcttcattcacccagaagaaacagagcatgagcccacaaaaatgttctacaaaaaagaagtatttctgagtaatctggaagaaacctgccccatgacatgtattctcggaaagtgtgctgtgttgtcattcaaggacttcctctcctgcaggccaactgaaataccagaaaatgacattctgctttgtgagagccgctacaatgagagcgacaagcagatgaagaaattcaaaggattgaagaggttttcactctctgctaaagtggtagatgatgaaatttactacttcagaaaaccaattgttcctcagaaggagccatcacctttgctggaaaagaagatccagttgctagaagctaaatttgccgagttagaaggtggagatgatgatattgaagagatgggagaagaagatagtgaggtcattgaacctccttctctacctcagcttcagacccccctggccagtgagctggacctcatgccctacacacccccacagtctaccccaaagtctgccaaaggcagtgcaaagaaggaaggctccaaacggaaaatcaacatgagtggctacatcctgttcagcagtgagatgagggctgtgattaaggcccaacacccagactactctttcggggagctcagccgcctggtggggacagaatggagaaatcttgagacagccaagaaagcagaatatgaaggcatgatgggtggctatccgccaggccttccacctttgcagggcccagttgatggccttgttagcatgggcagcatgcagccacttcaccctggggggcctccaccccaccatcttccgccaggtgtgcctggcctcccgggcatcccaccaccgggtgtgatgaaccaaggagtggcccctatggtagggactccagcaccaggtggaagtccatatggacaacaggtgggagttttggggcctccagggcagcaggcaccacctccatatcccggcccacatccagctggaccccctgtcatacagcagccaacaacacccatgtttgtagctcccccaccaaagacccagcggcttcttcactcagaggcctacctgaaatacattgaaggactcagtgcggagtccaacagcattagcaagtgggatcagacactggcagctcgaagacgcgacgtccatttgtcgaaagaacaggagagccgcctaccctctcactggctgaaaagcaaaggggcccacaccaccatggcagatgccctctggcgccttcgagatttgatgctccgggacaccctcaacattcgccaagcatacaacctagaaaatgtttaatcacatcattacgtttcttttatatagaagcataaagagttgtggatcagtagccattttagttactgggggtggggggaaggaacaaaggaggataatttttattgcattttactgtacatcacaaggccatttttatatacggacacttttaataagctatttcaatttgtttgttatattaagttgactttatcaaatacacaaagatttttttgcatatgtttccttcgtttaaaaccagtttcataattggttgtatatgtagacttggagttttatctttttacttgttgccatggaactgaaaccattagaggtttttgtcttggcttggggtttttgttttcttggttttgggtttttttatatatatatataaaagaacaaaatgaaaaaaaacacacacacacaagagtttacagattagtttaaattgataatgaaatgtgaagtttgtcctagtttacatcttagagaggggagtatacttgtgtttgtttcatgtgcctgaatatcttaagccactttctgcaaaagctgtttcttacagatgaagtgctttctttgaaaggtggttatttaggttttagatgtttaatagacacagcacatttgctctattaactcagaggctcactacagaaatatgtaatcagtgctgtgcatctgtctgcagctaatgtacctcctggacaccaggaggggaaaaagcactttttcaattgtgctgagttagacatctgtgagttagactatggtgtcagtgatttttgcagaacacgtgcacaaccctgaggtatgtttaatctaggcaggtacgtttaaggatattttgatctatttataatgaattcacaatttatgcctataaatttcagatgatttaaaattttaaacctgttacattgaaaaacattgaagttcgtcttgaagaaagcattaaggtatgcatggaggtgatttatttttaaacataacacctaacctaacatgggtaagagagtatggaactagatatgagctgtataagaagcataattgtgaacaagtagattgattgccttcatatacaagtatgttttagtattccttatttccttattatcagatgtattttttcttttaagtttcaatgttgttataattctcaaccagaaatttaatactttctaaaatattttttaaatttagcttgtgcttttgaattacaggagaagggaatcataatttaataaaacgcttactagaaagaccattacagatcccaaacacttgggtttggtgaccctgtctttcttatatgaccctacaataaacatttgaaggcagcataggatggcagacagtaggaacattgtttcacttggcggcatgtttttgaaacctgctttatagtaactgggtgattgccattgtggtagagcttccactgctgtttataatctgagagagttaatctcagaggatgcttttttccttttaatctgctatgaatcagtacccagatgtttaattactgtacttattaaatcatgagggcaaaagagtgtagaatggaaaaaagtctcttgtatctagatactttaaatatgggaggccctttaacttaattgcctttagtcaaccactggatttgaatttgcatcaagtattttaaataatattgaatttaaaaaaatgtattgcagtagtgtgtcagtaccttattgttaaagtgagtcagataaatcttcaattcctggctatttgggcaattgaatcatcatggactgtataatgcaatcagattattttgtttctagacatccttgaattacaccaaagaacatgaaatttagttgtggttaaattatttatttatttcatgcattcattttatttcccttaaggtctggatgagacttctttggggagcctctaaaaaaatttttcactgggggccacgtgggtcattagaagccagagctctcctccaggctccttcccagtgcctagaggtgctataggaaacatagatccagccaggggcttccctaaagcagtgcagcaccggcccagggcatcactagacaggccctaattaagttttttttaaaaagcctgtgtatttattttagaatcatgtttttctgtatattaacttgggggatatcgttaatatttaggatataagatttgaggtcagccatcttc

SEQ ID NO: 362665 - DNA, 7333 bp, Homo sapiens
acggcagcggccgcggccggaggagcaatagcagcagccgtggcggccacggggcggggcgcggcggtcggtgaccgcggccggggctgcaggcggcggagcggctggaagaagttggattccatgggttccaagagaagaagagctacctccccttccagcagtgtcagcggggactttgatgatgggcaccattctgtgtcaacaccaggcccaagcaggaaaaggaggagactttccaatcttccaactgtagatcctattgccgtgtgccatgaactctataataccatccgagactataaggatgaacagggcagacttctctgtgagctcttcattagggcaccaaagcgaagaaatcaaccagactattatgaagtggtttctcagcccattgacttgatgaaaatccaacagaaactaaaaatggaagagtatgatgatgttaatttgctgactgctgacttccagcttctttttaacaatgcaaagtcctattataagccagattctcctgaatataaagccgcttgcaaactctgggatttgtaccttcgaacaagaaatgagtttgttcagaaaggagaagcagatgacgaagatgatgatgaagatgggcaagacaatcagggcacagtgactgaaggatcttctccagcttacttgaaggagatcctggagcagcttcttgaagccatagttgtagctacaaatccatcaggacgtctcattagcgaactttttcagaaactgccttctaaagtgcaatatccagattattatgcaataattaaggagcctatagatctcaagaccattgcccagaggatacagaatggaagctacaaaagtattcatgcaatggccaaagatatagatctcctcgcaaaaaatgccaaaacttataatgagcctggctctcaagtattcaaggatgcaaattcaattaaaaaaatattttatatgaaaaaggctgaaattgaacatcatgaaatggctaagtcaagtcttcgaatgaggactccatccaacttggctgcagccagactgacaggtccttcacacagtaaaggcagccttggtgaagagagaaatcccactagcaagtattaccgtaataaaagagcagtacaaggaggtcgtttatcagcaattacaatggcacttcaatatggctcagaaagtgaagaagatgctgctttagctgctgcacgctatgaagagggagagtcagaagcagaaagcatcacttcctttatggatgtttcaaatcctttttatcagctttatgacacagttaggagttgtcggaataaccaagggcagctaatagctgaacctttttaccatttgccttcaaagaaaaaataccctgattattaccagcaaattaaaatgcccatatcactacaacagatccgaacaaaactgaagaatcaagaatatgaaactttagatcatttggagtgtgatctgaatttaatgtttgaaaatgccaaacgctataatgtgcccaattcagccatctacaagcgagttctaaaattgcagcaagttatgcaggcaaagaagaaagagcttgccaggagagacgatatcgaggacggagacagcatgatctcttcagccacctctgatactggtagtgccaaaagaaaaagtaaaaagaacataagaaagcagcgaatgaaaatcttattcaatgttgttcttgaagctcgagagccaggttcaggcagaagactttgtgacctatttatggttaaaccatccaaaaaggactatcctgattattataaaatcatcttggagccaatggacttgaaaataattgagcataacatccgcaatgacaaatatgctggtgaagagggaatgatagaagacatgaagctgatgttccggaatgccaggcactataatgaggagggctcccaggtttataatgatgcacatatcctggagaagttactcaaggagaaaaggaaagagctgggcccactgcctgatgatgatgacatggcttctcccaaactcaagctgagtaggaagagtggcatttctcctaaaaaatcaaaatacatgactccaatgcagcagaaactaaatgaggtctatgaagctgtaaagaactatactgataagaggggtcgccgcctcagtgccatatttctgaggcttccctctagatctgagttgcctgactactatctgactattaaaaagcccatggacatggaaaaaattcgaagtcacatgatggccaacaagtaccaagatattgactctatggttgaggactttgtcatgatgtttaataatgcctgtacatacaatgagccggagtctttgatctacaaagatgctcttgttctacacaaagtcctgcttgaaacacgcagagacctggagggagatgaggactctcatgtcccaaatgtgactttgctgattcaagagcttatccacaatctttttgtgtcagtcatgagtcatcaggatgatgagggaagatgctacagcgattctttagcagaaattcctgctgtggatcccaactttcctaacaaaccaccccttacatttgacataattaggaagaatgttgaaaataatcgctaccgtcggcttgatttatttcaagagcatatgtttgaagtattggaacgagcaagaaggatgaatcggacagattcagaaatatatgaagatgcagtagaacttcagcagttttttattaaaattcgtgatgaactctgcaaaaatggagagattcttctttcaccggcactcagctataccacaaaacatttgcataatgatgtggagaaagagagaaaggaaaaattgccaaaagaaatagaggaagataaactaaaacgagaagaagaaaaaagagaagctgaaaagagtgaagattcctctggtgctgcaggcctctcaggcttacatcgcacatacagccaggactgtagctttaaaaacagcatgtaccatgttggagattacgtctatgtggaacctgcagaggccaacctacaaccacatatcgtctgtattgaaagactgtgggaggattcagctggtgaaaaatggttgtatggctgttggttttaccgaccaaatgaaacattccacctggctacacgaaaatttctagaaaaagaagtttttaagagtgactattacaacaaagttccagttagtaaaattctaggcaagtgtgtggtcatgtttgtcaaggaatactttaagttatgcccagaaaacttccgagatgaggatgtttttgtctgtgaatcacggtattctgccaaaaccaaatcttttaagaaaattaaactgtggaccatgcccatcagctcagtcaggtttgtccctcgggatgtgcctctgcctgtggttcgcgtggcctctgtatttgcaaatgcagataaaggtgatgatgagaagaatacagacaactcagaggacagtcgagctgaagacaattttaacttggaaaaggaaaaagaagatgtccctgtggaaatgtccaatggtgaaccaggttgccactactttgagcagctccattacaatgacatgtggctgaaggttggcgactgtgtcttcatcaagtcccatggcctggtgcgtcctcgtgtgggcagaattgaaaaagtatgggttcgagatggagctgcatatttttatggccccatcttcattcacccagaagaaacagagcatgagcccacaaaaatgttctacaaaaaagaagtatttctgagtaatctggaagaaacctgccccatgacatgtattctcggaaagtgtgctgtgttgtcattcaaggacttcctctcctgcaggccaactgaaataccagaaaatgacattctgctttgtgagagccgctacaatgagagcgacaagcagatgaagaaattcaaaggattgaagaggttttcactctctgctaaagtggtagatgatgaaatttactacttcagaaaaccaattgttcctcagaaggagccatcacctttgctggaaaagaagatccagttgctagaagctaaatttgccgagttagaaggtggagatgatgatattgaagagatgggagaagaagatagtgaggtcattgaacctccttctctacctcagcttcagacccccctggccagtgagctggacctcatgccctacacacccccacagtctaccccaaagtctgccaaaggcagtgcaaagaaggaaggctccaaacggaaaatcaacatgagtggctacatcctgttcagcagtgagatgagggctgtgattaaggcccaacacccagactactctttcggggagctcagccgcctggtggggacagaatggagaaatcttgagacagccaagaaagcagaatatgaaggcatgatgggtggctatccgccaggccttccacctttgcagggcccagttgatggccttgttagcatgggcagcatgcagccacttcaccctggggggcctccaccccaccatcttccgccaggtgtgcctggcctcccgggcatcccaccaccgggtgtgatgaaccaaggagtggcccctatggtagggactccagcaccaggtggaagtccatatggacaacaggtgagcctcccagtttgattttctaggacttgacagaattcgagttatccttctcagaacatgtgcagagtctctttttgcctcaccatgtggtcctgtgctctttcaggtgggagttttggggcctccagggcagcaggcaccacctccatatcccggcccacatccagctggaccccctgtcatacagcagccaacaacacccatgtttgtagctcccccaccaaagacccagcggcttcttcactcagaggcctacctgaaatacattgaaggactcagtgcggagtccaacagcattagcaagtgggatcagacactggcagctcgaagacgcgacgtccatttgtcgaaagaacaggagagccgcctaccctctcactggctgaaaagcaaaggggcccacaccaccatggcagatgccctctggcgccttcgagatttgatgctccgggacaccctcaacattcgccaagcatacaacctagaaaatgtttaatcacatcattacgtttcttttatatagaagcataaagagttgtggatcagtagccattttagttactgggggtggggggaaggaacaaaggaggataatttttattgcattttactgtacatcacaaggccatttttatatacggacacttttaataagctatttcaatttgtttgttatattaagttgactttatcaaatacacaaagatttttttgcatatgtttccttcgtttaaaaccagtttcataattggttgtatatgtagacttggagttttatctttttacttgttgccatggaactgaaaccattagaggtttttgtcttggcttggggtttttgttttcttggttttgggtttttttatatatatatataaaagaacaaaatgaaaaaaaacacacacacacaagagtttacagattagtttaaattgataatgaaatgtgaagtttgtcctagtttacatcttagagaggggagtatacttgtgtttgtttcatgtgcctgaatatcttaagccactttctgcaaaagctgtttcttacagatgaagtgctttctttgaaaggtggttatttaggttttagatgtttaatagacacagcacatttgctctattaactcagaggctcactacagaaatatgtaatcagtgctgtgcatctgtctgcagctaatgtacctcctggacaccaggaggggaaaaagcactttttcaattgtgctgagttagacatctgtgagttagactatggtgtcagtgatttttgcagaacacgtgcacaaccctgaggtatgtttaatctaggcaggtacgtttaaggatattttgatctatttataatgaattcacaatttatgcctataaatttcagatgatttaaaattttaaacctgttacattgaaaaacattgaagttcgtcttgaagaaagcattaaggtatgcatggaggtgatttatttttaaacataacacctaacctaacatgggtaagagagtatggaactagatatgagctgtataagaagcataattgtgaacaagtagattgattgccttcatatacaagtatgttttagtattccttatttccttattatcagatgtattttttcttttaagtttcaatgttgttataattctcaaccagaaatttaatactttctaaaatattttttaaatttagcttgtgcttttgaattacaggagaagggaatcataatttaataaaacgcttactagaaagaccattacagatcccaaacacttgggtttggtgaccctgtctttcttatatgaccctacaataaacatttgaaggcagcataggatggcagacagtaggaacattgtttcacttggcggcatgtttttgaaacctgctttatagtaactgggtgattgccattgtggtagagcttccactgctgtttataatctgagagagttaatctcagaggatgcttttttccttttaatctgctatgaatcagtacccagatgtttaattactgtacttattaaatcatgagggcaaaagagtgtagaatggaaaaaagtctcttgtatctagatactttaaatatgggaggccctttaacttaattgcctttagtcaaccactggatttgaatttgcatcaagtattttaaataatattgaatttaaaaaaatgtattgcagtagtgtgtcagtaccttattgttaaagtgagtcagataaatcttcaattcctggctatttgggcaattgaatcatcatggactgtataatgcaatcagattattttgtttctagacatccttgaattacaccaaagaacatgaaatttagttgtggttaaattatttatttatttcatgcattcattttatttcccttaaggtctggatgagacttctttggggagcctctaaaaaaatttttcactgggggccacgtgggtcattagaagccagagctctcctccaggctccttcccagtgcctagaggtgctataggaaacatagatccagccaggggcttccctaaagcagtgcagcaccggcccagggcatcactagacaggccctaattaagttttttttaaaaagcctgtgtatttattttagaatcatgtttttctgtatattaacttgggggatatcgttaatatttaggatataagatttgaggtcagccatcttc

SEQ ID NO: 362666 - DNA, 5193 bp, Homo sapiens
acggcagcggccgcggccggaggagcaatagcagcagccgtggcggccacggggcggggcgcggcggtcggtgaccgcggccggggctgcaggcggcggagcggctggaagaagttggattccatgggttccaagagaagaagagctacctccccttccagcagtgtcagcggggactttgatgatgggcaccattctgtgtcaacaccaggcccaagcaggaaaaggaggagactttccaatcttccaactgtagatcctattgccgtgtgccatgaactctataataccatccgagactataaggatgaacagggcagacttctctgtgagctcttcattagggcaccaaagcgaagaaatcaaccagactattatgaagtggtttctcagcccattgacttgatgaaaatccaacagaaactaaaaatggaagagtatgatgatgttaatttgctgactgctgacttccagcttctttttaacaatgcaaagtcctattataagccagattctcctgaatataaagccgcttgcaaactctgggatttgtaccttcgaacaagaaatgagtttgttcagaaaggagaagcagatgacgaagatgatgatgaagatgggcaagacaatcagggcacagtgactgaaggatcttctccagcttacttgaaggagatcctggagcagcttcttgaagccatagttgtagctacaaatccatcaggacgtctcattagcgaactttttcagaaactgccttctaaagtgcaatatccagattattatgcaataattaaggagcctatagatctcaagaccattgcccagaggatacagaatggaagctacaaaagtattcatgcaatggccaaagatatagatctcctcgcaaaaaatgccaaaacttataatgagcctggctctcaagtattcaaggatgcaaattcaattaaaaaaatattttatatgaaaaaggctgaaattgaacatcatgaaatggctaagtcaagtcttcgaatgaggactccatccaacttggctgcagccagactgacaggtccttcacacagtaaaggcagccttggtgaagagagaaatcccactagcaagtattaccgtaataaaagagcagtacaaggaggtcgtttatcagcaattacaatggcacttcaatatggctcagaaagtgaagaagatgctgctttagctgctgcacgctatgaagagggagagtcagaagcagaaagcatcacttcctttatggatgtttcaaatcctttttatcagctttatgacacagttaggagttgtcggaataaccaagggcagctaatagctgaacctttttaccatttgccttcaaagaaaaaataccctgattattaccagcaaattaaaatgcccatatcactacaacagatccgaacaaaactgaagaatcaagaatatgaaactttagatcatttggagtgtgatctgaatttaatgtttgaaaatgccaaacgctataatgtgcccaattcagccatctacaagcgagttctaaaattgcagcaagttatgcaggcaaagaagaaagagcttgccaggagagacgatatcgaggacggagacagcatgatctcttcagccacctctgatactggtagtgccaaaagaaaaagtaaaaagaacataagaaagcagcgaatgaaaatcttattcaatgttgttcttgaagctcgagagccaggttcaggcagaagactttgtgacctatttatggttaaaccatccaaaaaggactatcctgattattataaaatcatcttggagccaatggacttgaaaataattgagcataacatccgcaatgacaaatatgctggtgaagagggaatgatagaagacatgaagctgatgttccggaatgccaggcactataatgaggagggctcccaggtttataatgatgcacatatcctggagaagttactcaaggagaaaaggaaagagctgggcccactgcctgatgatgatgacatggcttctcccaaactcaagctgagtaggaagagtggcatttctcctaaaaaatcaaaatacatgactccaatgcagcagaaactaaatgaggtctatgaagctgtaaagaactatactgataagaggggtcgccgcctcagtgccatatttctgaggcttccctctagatctgagttgcctgactactatctgactattaaaaagcccatggacatggaaaaaattcgaagtcacatgatggccaacaagtaccaagatattgactctatggttgaggactttgtcatgatgtttaataatgcctgtacatacaatgagccggagtctttgatctacaaagatgctcttgttctacacaaagtcctgcttgaaacacgcagagacctggagggagatgaggactctcatgtcccaaatgtgactttgctgattcaagagcttatccacaatctttttgtgtcagtcatgagtcatcaggatgatgagggaagatgctacagcgattctttagcagaaattcctgctgtggatcccaactttcctaacaaaccaccccttacatttgacataattaggaagaatgttgaaaataatcgctaccgtcggcttgatttatttcaagagcatatgtttgaagtattggaacgagcaagaaggatgaatcggacagattcagaaatatatgaagatgcagtagaacttcagcagttttttattaaaattcgtgatgaactctgcaaaaatggagagattcttctttcaccggcactcagctataccacaaaacatttgcataatgatgtggagaaagagagaaaggaaaaattgccaaaagaaatagaggaagataaactaaaacgagaagaagaaaaaagagaagctgaaaagagtgaagattcctctggtgctgcaggcctctcaggcttacatcgcacatacagccaggactgtagctttaaaaacagcatgtaccatgttggagattacgtctatgtggaacctgcagaggccaacctacaaccacatatcgtctgtattgaaagactgtgggaggattcagctggtgaaaaatggttgtatggctgttggttttaccgaccaaatgaaacattccacctggctacacgaaaatttctagaaaaagaagtttttaagagtgactattacaacaaagttccagttagtaaaattctaggcaagtgtgtggtcatgtttgtcaaggaatactttaagttatgcccagaaaacttccgagatgaggatgtttttgtctgtgaatcacggtattctgccaaaaccaaatcttttaagaaaattaaactgtggaccatgcccatcagctcagtcaggtttgtccctcgggatgtgcctctgcctgtggttcgcgtggcctctgtatttgcaaatgcagataaaggtgatgatgagaagaatacagacaactcagaggacagtcgagctgaagacaattttaacttggaaaaggaaaaagaagatgtccctgtggaaatgtccaatggtgaaccaggttgccactactttgagcagctccattacaatgacatgtggctgaaggttggcgactgtgtcttcatcaagtcccatggcctggtgcgtcctcgtgtgggcagaattgaaaaagtatgggttcgagatggagctgcatatttttatggccccatcttcattcacccagaagaaacagagcatgagcccacaaaaatgttctacaaaaaagaagtatttctgagtaatctggaagaaacctgccccatgacatgtattctcggaaagtgtgctgtgttgtcattcaaggacttcctctcctgcaggccaactgaaataccagaaaatgacattctgctttgtgagagccgctacaatgagagcgacaagcagatgaagaaattcaaaggattgaagaggttttcactctctgctaaagtggtagatgatgaaatttactacttcagaaaaccaattgttcctcagaaggagccatcacctttgctggaaaagaagatccagttgctagaagctaaatttgccgagttagaaggtggagatgatgatattgaagagatgggagaagaagatagtgaggtcattgaacctccttctctacctcagcttcagacccccctggccagtgagctggacctcatgccctacacacccccacagtctaccccaaagtctgccaaaggcagtgcaaagaaggaaggctccaaacggaaaatcaacatgagtggctacatcctgttcagcagtgagatgagggctgtgattaaggcccaacacccagactactctttcggggagctcagccgcctggtggggacagaatggagaaatcttgagacagccaagaaagcagaatatgaagagcgggcagctaaagttgctgagcagcaggagagagagcgagcagcacagcaacagcagccgagtgcttctccccgagcaggcacccctgtgggggctctcatgggggtggtgccaccaccaacaccaatggggatgctcaatcagcagttgacacctgttgcaggtaaaaacaggagctaagaccatttttttccactttaagaaattccttcattttttttttctccaataaggagtaggccacagtctattgccttttctcatgacagattcaaagtttgaagtcatccatgttgtcctatattgcctttcccatatgggcaatgcctcccttctgccccagaaatgggccctgggcccaaccctggtaattggtagggagcagctcttccctggctgtgggcatggtctggtgatgttctccaccccagcctgctcttgatagagcactatagcagaaaatatgaaagtagaccctgaattctgttctagagggactcccaagagaaaacacaaaactagtctttaggtggtgttgattttcccatctcattccagtattcagtttgccttgttctgctgcagccatccttaaaagactgaccgtttaaaaggattttttgacaatgaattgtaaatcctttcttggtcaccaatgtgcatgactgctaaatagaatacaaagtccttattcaattcattgtgcccactctgtaatgcttttctatttaattacattaaactgcattttctgttagtatcccagtcacatatttaaga

SEQ ID NO: 362667 - DNA, 7335 bp, Homo sapiens
acggcagcggccgcggccggaggagcaatagcagcagccgtggcggccacggggcggggcgcggcggtcggtgaccgcggccggggctgcaggcggcggagcggctggaagaagttggattccatgggttccaagagaagaagagctacctccccttccagcagtgtcagcggggactttgatgatgggcaccattctgtgtcaacaccaggcccaagcaggaaaaggaggagactttccaatcttccaactgtagatcctattgccgtgtgccatgaactctataataccatccgagactataaggatgaacagggcagacttctctgtgagctcttcattagggcaccaaagcgaagaaatcaaccagactattatgaagtggtttctcagcccattgacttgatgaaaatccaacagaaactaaaaatggaagagtatgatgatgttaatttgctgactgctgacttccagcttctttttaacaatgcaaagtcctattataagccagattctcctgaatataaagccgcttgcaaactctgggatttgtaccttcgaacaagaaatgagtttgttcagaaaggagaagcagatgacgaagatgatgatgaagatgggcaagacaatcagggcacagtgactgaaggatcttctccagcttacttgaaggagatcctggagcagcttcttgaagccatagttgtagctacaaatccatcaggacgtctcattagcgaactttttcagaaactgccttctaaagtgcaatatccagattattatgcaataattaaggagcctatagatctcaagaccattgcccagaggatacagaatggaagctacaaaagtattcatgcaatggccaaagatatagatctcctcgcaaaaaatgccaaaacttataatgagcctggctctcaagtattcaaggatgcaaattcaattaaaaaaatattttatatgaaaaaggctgaaattgaacatcatgaaatggctaagtcaagtcttcgaatgaggactccatccaacttggctgcagccagactgacaggtccttcacacagtaaaggcagccttggtgaagagagaaatcccactagcaagtattaccgtaataaaagagcagtacaaggaggtcgtttatcagcaattacaatggcacttcaatatggctcagaaagtgaagaagatgctgctttagctgctgcacgctatgaagagggagagtcagaagcagaaagcatcacttcctttatggatgtttcaaatcctttttatcagctttatgacacagttaggagttgtcggaataaccaagggcagctaatagctgaacctttttaccatttgccttcaaagaaaaaataccctgattattaccagcaaattaaaatgcccatatcactacaacagatccgaacaaaactgaagaatcaagaatatgaaactttagatcatttggagtgtgatctgaatttaatgtttgaaaatgccaaacgctataatgtgcccaattcagccatctacaagcgagttctaaaattgcagcaagttatgcaggcaaagaagaaagagcttgccaggagagacgatatcgaggacggagacagcatgatctcttcagccacctctgatactggtagtgccaaaagaaaaagtaaaaagaacataagaaagcagcgaatgaaaatcttattcaatgttgttcttgaagctcgagagccaggttcaggcagaagactttgtgacctatttatggttaaaccatccaaaaaggactatcctgattattataaaatcatcttggagccaatggacttgaaaataattgagcataacatccgcaatgacaaatatgctggtgaagagggaatgatagaagacatgaagctgatgttccggaatgccaggcactataatgaggagggctcccaggtttataatgatgcacatatcctggagaagttactcaaggagaaaaggaaagagctgggcccactgcctgatgatgatgacatggcttctcccaaactcaagctgagtaggaagagtggcatttctcctaaaaaatcaaaatacatgactccaatgcagcagaaactaaatgaggtctatgaagctgtaaagaactatactgataagaggggtcgccgcctcagtgccatatttctgaggcttccctctagatctgagttgcctgactactatctgactattaaaaagcccatggacatggaaaaaattcgaagtcacatgatggccaacaagtaccaagatattgactctatggttgaggactttgtcatgatgtttaataatgcctgtacatacaatgagccggagtctttgatctacaaagatgctcttgttctacacaaagtcctgcttgaaacacgcagagacctggagggagatgaggactctcatgtcccaaatgtgactttgctgattcaagagcttatccacaatctttttgtgtcagtcatgagtcatcaggatgatgagggaagatgctacagcgattctttagcagaaattcctgctgtggatcccaactttcctaacaaaccaccccttacatttgacataattaggaagaatgttgaaaataatcgctaccgtcggcttgatttatttcaagagcatatgtttgaagtattggaacgagcaagaaggatgaatcggacagattcagaaatatatgaagatgcagtagaacttcagcagttttttattaaaattcgtgatgaactctgcaaaaatggagagattcttctttcaccggcactcagctataccacaaaacatttgcataatgatgtggagaaagagagaaaggaaaaattgccaaaagaaatagaggaagataaactaaaacgagaagaagaaaaaagagaagctgaaaagagtgaagattcctctggtgctgcaggcctctcaggcttacatcgcacatacagccaggactgtagctttaaaaacagcatgtaccatgttggagattacgtctatgtggaacctgcagaggccaacctacaaccacatatcgtctgtattgaaagactgtgggaggattcagctggtgaaaaatggttgtatggctgttggttttaccgaccaaatgaaacattccacctggctacacgaaaatttctagaaaaagaagtttttaagagtgactattacaacaaagttccagttagtaaaattctaggcaagtgtgtggtcatgtttgtcaaggaatactttaagttatgcccagaaaacttccgagatgaggatgtttttgtctgtgaatcacggtattctgccaaaaccaaatcttttaagaaaattaaactgtggaccatgcccatcagctcagtcaggtttgtccctcgggatgtgcctctgcctgtggttcgcgtggcctctgtatttgcaaatgcagataaaggtgatgatgagaagaatacagacaactcagaggacagtcgagctgaagacaattttaacttggaaaaggaaaaagaagatgtccctgtggaaatgtccaatggtgaaccaggttgccactactttgagcagctccattacaatgacatgtggctgaaggttggcgactgtgtcttcatcaagtcccatggcctggtgcgtcctcgtgtgggcagaattgaaaaagtatgggttcgagatggagctgcatatttttatggccccatcttcattcacccagaagaaacagagcatgagcccacaaaaatgttctacaaaaaagaagtatttctgagtaatctggaagaaacctgccccatgacatgtattctcggaaagtgtgctgtgttgtcattcaaggacttcctctcctgcaggccaactgaaataccagaaaatgacattctgctttgtgagagccgctacaatgagagcgacaagcagatgaagaaattcaaaggattgaagaggttttcactctctgctaaagtggtagatgatgaaatttactacttcagaaaaccaattgttcctcagaaggagccatcacctttgctggaaaagaagatccagttgctagaagctaaatttgccgagttagaaggtggagatgatgatattgaagagatgggagaagaagatagtgaggtcattgaacctccttctctacctcagcttcagacccccctggccagtgagctggacctcatgccctacacacccccacagtctaccccaaagtctgccaaaggcagtgcaaagaaggaaggctccaaacggaaaatcaacatgagtggctacatcctgttcagcagtgagatgagggctgtgattaaggcccaacacccagactactctttcggggagctcagccgcctggtggggacagaatggagaaatcttgagacagccaagaaagcagaatatgaagagcgggcagctaaagttgctgagcagcaggagagagagcgagcagcacagcaacagcagccgagtgcttctccccgagcaggcacccctgtgggggctctcatgggggtggtgccaccaccaacaccaatggggatgctcaatcagcagttgacacctgttgcaggcatgatgggtggctatccgccaggccttccacctttgcagggcccagttgatggccttgttagcatgggcagcatgcagccacttcaccctggggggcctccaccccaccatcttccgccaggtgtgcctggcctcccgggcatcccaccaccgggtgtgatgaaccaaggagtggcccctatggtagggactccagcaccaggtggaagtccatatggacaacaggtgggagttttggggcctccagggcagcaggcaccacctccatatcccggcccacatccagctggaccccctgtcatacagcagccaacaacacccatgtttgtagctcccccaccaaagacccagcggcttcttcactcagaggcctacctgaaatacattgaaggactcagtgcggagtccaacagcattagcaagtgggatcagacactggcagctcgaagacgcgacgtccatttgtcgaaagaacaggagagccgcctaccctctcactggctgaaaagcaaaggggcccacaccaccatggcagatgccctctggcgccttcgagatttgatgctccgggacaccctcaacattcgccaagcatacaacctagaaaatgtttaatcacatcattacgtttcttttatatagaagcataaagagttgtggatcagtagccattttagttactgggggtggggggaaggaactacggacacttttaataagctatttcaatttgtttgttatattaagttgactttatcaaatacacaaagatttttttgcatatgtttccttcgtttaaaaccagtttcataattggttgtatatgtagacttggagttttatctttttacttgttgccatggaactgaaaccattagaggtttttgtcttggcttggggtttttgttttcttggttttgggtttttttatatatatatataaaagaacaaaatgaaaaaaaacacacacacacaagagtttacagattagtttaaattgataatgaaatgtgaagtttgtcctagtttacatcttagagaggggagtatacttgtgtttgtttcatgtgcctgaatatcttaagccactttctgcaaaagctgtttcttacagatgaagtgctttctttgaaaggtggttatttaggttttagatgtttaatagacacagcacatttgctctattaactcagaggctcactacagaaatatgtaatcagtgctgtgcatctgtctgcagctaatgtacctcctggacaccaggaggggaaaaagcactttttcaattgtgctgagttagacatctgtgagttagactatggtgtcagtgatttttgcagaacacgtgcacaaccctgaggtatgtttaatctaggcaggtacgtttaaggatattttgatctatttataatgaattcacaatttatgcctataaatttcagatgatttaaaattttaaacctgttacattgaaaaacattgaagttcgtcttgaagaaagcattaaggtatgcatggaggtgatttatttttaaacataacacctaacctaacatgggtaagagagtatggaactagatatgagctgtataagaagcataattgtgaacaagtagattgattgccttcatatacaagtatgttttagtattccttatttccttattatcagatgtattttttcttttaagtttcaatgttgttataattctcaaccagaaatttaatactttctaaaatattttttaaatttagcttgtgcttttgaattacaggagaagggaatcataatttaataaaacgcttactagaaagaccattacagatcccaaacacttgggtttggtgaccctgtctttcttatatgaccctacaataaacatttgaaggcagcataggatggcagacagtaggaacattgtttcacttggcggcatgtttttgaaacctgctttatagtaactgggtgattgccattgtggtagagcttccactgctgtttataatctgagagagttaatctcagaggatgcttttttccttttaatctgctatgaatcagtacccagatgtttaattactgtacttattaaatcatgagggcaaaagagtgtagaatggaaaaaagtctcttgtatctagatactttaaatatgggaggccctttaacttaattgcctttagtcaaccactggatttgaatttgcatcaagtattttaaataatattgaatttaaaaaaatgtattgcagtagtgtgtcagtaccttattgttaaagtgagtcagataaatcttcaattcctggctatttgggcaattgaatcatcatggactgtataatgcaatcagattattttgtttctagacatccttgaattacaccaaagaacatgaaatttagttgtggttaaattatttatttatttcatgcattcattttatttcccttaaggtctggatgagacttctttggggagcctctaaaaaaatttttcactgggggccacgtgggtcattagaagccagagctctcctccaggctccttcccagtgcctagaggtgctataggaaacatagatccagccaggggcttccctaaagcagtgcagcaccggcccagggcatcactagacaggccctaattaagttttttttaaaaagcctgtgtatttattttagaatcatgtttttctgtatattaacttgggggatatcgttaatatttaggatataagatttgaggtcagccatcttc

SEQ ID NO: 362668 - DNA, 1300 bp, Homo sapiens
atggcttgatctcagctcactgcaacctctacctcctgggttcaagcaattatcctgcctcagcctcccgagtaactgggattacaggcgccaccaccacactcggctaattttttgtatttttaatggacacagggtttcgccatgttggccaggttgatcttgaactcctgacctcaggtgatccacccaccttggcctcccaaagttgctgggattacaggtgtgagccaccgcgcccggctggcttctgaaattttgagcagttaaccaaatgtaatgttttgatgcaccataagacctttctgtcttacagtctaccccaaagtctgccaaaggcagtgcaaagaaggaaggctccaaacggaaaatcaacatgagtggctacatcctgttcagcagtgagatgagggctgtgattaaggcccaacacccagactactctttcggggagctcagccgcctggtggggacagaatggagaaatcttgagacagccaagaaagcagaatatgaagagcgggcagctaaagttgctgagcagcaggagagagagcgagcagcacagcaacagcagccgagtgcttctccccgagcaggcacccctgtgggggctctcatgggggtggtgccaccaccaacaccaatggggatgctcaatcagcagttgacacctgttgcaggtaaaaacaggagctaagaccatttttttccactttaagaaattccttcattttttttttctccaataaggagtaggccacagtctattgccttttctcatgacagattcaaagtttgaagtcatccatgttgtcctatattgcctttcccatatgggcaatgcctcccttctgccccagaaatgggccctgggcccaaccctggtaattggtagggagcagctcttccctggctgtgggcatggtctggtgatgttctccaccccagcctgctcttgatagagcactatagcagaaaatatgaaagtagaccctgaattctgttctagagggactcccaagagaaaacacaaaactagtctttaggtggtgttgattttcccatctcattccagtattcagtttgccttgttctgctgcagccatccttaaaagactgaccgtttaaaaggattttttgacaatgaattgtaaatcctttcttggtcaccaatgtgcatgactgctaaatagaatacaaagtccttattcaattcattgtgcccactctgtaatgcttttctatttaattacattaaactgcattttctgttagtatcccagtcacatatttaaga

SEQ ID NO: 362669 - DNA, 383 bp, Homo sapiens
taccttgagcgtccagtggagaagaaaggtttttgaagaaaacaacacatgtaaatgtgtttcaggacttttgttaaaacctgcagtgattctactacagtggttctcaaacattaacatgcatgtctgtgcattagaatcacctgggaagcttaaaaacaaaccagttaaggcctaggctctcccacagatagagtgattttattgctctgtagtgaggctggttttggttttctttaagctcccaactatcataaactgtctttttaaaacttctttatggatgcattttataccttaatgaaaagtttttagaaaataattgaagtatatttttggaatgtaggtttataatgatgcacatatcctggagaagttactca

SEQ ID NO: 362670 - DNA, 449 bp, Homo sapiens
attgccgtgtgccatgaactctataataccatccgagactataaggatgaacagggcagacttctctgtgagctcttcattagggcaccaaagcgaaggtgagttcgaagcacatcagtacagttgcgggggatttggtccagagtccatgtgtattaaagtgtttggaaattgagctttttgttggcaggaatggcttaaatgatactggggtccaattttagtctttagtctttagtaatcaagctgtagtgaagctttttttaaattaaaaatctgttgagccaggcacagtaacatgcacctataatcccagctacttgattttttgagccaggcacaggagcatgcacttgtaatcccagctacatgggagactaaggcaagagaattgcttgatccaaggagtatgacaccagcctgggcaacataatgagaccccgtctctt

SEQ ID NO: 362671 - DNA, 485 bp, Homo sapiens
caattaaagaagcatttaatagaatttaacatataattgaggtgtttaaaagaaacagcttgtatgtcaatggatactcttgatgctgttataggacagattcagaaatatatgaagatgcagtagaacttcagcagttttttattaaaattcgtgatgaactctgcaaaaatggagagattcttctttcaccggcactcagctataccacaaaacatttgcataatgatgtggagaaagagagaaaggaaaaattgccaaaagaaatagaggaagataaactaaaacgagaagaagaaaaaagaggttggtttcttttcattttattgaatatgaaaaaatgcactgtcttctagctgttctcataattagctgtggaaaagagtcctgtttgtatgaatgaaaactcagggtattgactatattagagtagacgcaatgagatggaaatatttttatagttatcaatttggtcatcagacctg

SEQ ID NO: 362672 - DNA, 7073 bp, Homo sapiens
acggcagcggccgcggccggaggagcaatagcagcagccgtggcggccacggggcggggcgcggcggtcggtgaccgcggccggggctgcaggcggcggagcggctggaagaagttggattccatgggttccaagagaagaagagctacctccccttccagcagtgtcagcggggactttgatgatgggcaccattctgtgtcaacaccaggcccaagcaggaaaaggaggagactttccaatcttccaactgtagatcctattgccgtgtgccatgaactctataataccatccgagactataaggatgaacagggcagacttctctgtgagctcttcattagggcaccaaagcgaagaaatcaaccagactattatgaagtggtttctcagcccattgacttgatgaaaatccaacagaaactaaaaatggaagagtatgatgatgttaatttgctgactgctgacttccagcttctttttaacaatgcaaagtcctattataagccagattctcctgaatataaagccgcttgcaaactctgggatttgtaccttcgaacaagaaatgagtttgttcagaaaggagaagcagatgacgaagatgatgatgaagatgggcaagacaatcagggcacagtgactgaaggatcttctccagcttacttgaaggagatcctggagcagcttcttgaagccatagttgtagctacaaatccatcaggacgtctcattagcgaactttttcagaaactgccttctaaagtgcaatatccagattattatgcaataattaaggagcctatagatctcaagaccattgcccagaggatacagaatggaagctacaaaagtattcatgcaatggccaaagatatagatctcctcgcaaaaaatgccaaaacttataatgagcctggctctcaagtattcaaggatgcaaattcaattaaaaaaatattttatatgaaaaaggctgaaattgaacatcatgaaatggctaagtcaagtcttcgaatgaggactccatccaacttggctgcagccagactgacaggtccttcacacagtaaaggcagccttggtgaagagagaaatcccactagcaagtattaccgtaataaaagagcagtacaaggaggtcgtttatcagcaattacaatggcacttcaatatggctcagaaagtgaagaagatgctgctttagctgctgcacgctatgaagagggagagtcagaagcagaaagcatcacttcctttatggatgtttcaaatcctttttatcagctttatgacacagttaggagttgtcggaataaccaagggcagctaatagctgaacctttttaccatttgccttcaaagaaaaaataccctgattattaccagcaaattaaaatgcccatatcactacaacagatccgaacaaaactgaagaatcaagaatatgaaactttagatcatttggagtgtgatctgaatttaatgtttgaaaatgccaaacgctataatgtgcccaattcagccatctacaagcgagttctaaaattgcagcaagttatgcaggcaaagaagaaagagcttgccaggagagacgatatcgaggacggagacagcatgatctcttcagccacctctgatactggtagtgccaaaagaaaaagtaaaaagaacataagaaagcagcgaatgaaaatcttattcaatgttgttcttgaagctcgagagccaggttcaggcagaagactttgtgacctatttatggttaaaccatccaaaaaggactatcctgattattataaaatcatcttggagccaatggacttgaaaataattgagcataacatccgcaatgacaaatatgctggtgaagagggaatgatagaagacatgaagctgatgttccggaatgccaggcactataatgaggagggctcccaggtttataatgatgcacatatcctggagaagttactcaaggagaaaaggaaagagctgggcccactgcctgatgatgatgacatggcttctcccaaactcaagctgagtaggaagagtggcatttctcctaaaaaatcaaaatacatgactccaatgcagcagaaactaaatgaggtctatgaagctgtaaagaactatactgataagaggggtcgccgcctcagtgccatatttctgaggcttccctctagatctgagttgcctgactactatctgactattaaaaagcccatggacatggaaaaaattcgaagtcacatgatggccaacaagtaccaagatattgactctatggttgaggactttgtcatgatgtttaataatgcctgtacatacaatgagccggagtctttgatctacaaagatgctcttgttctacacaaagtcctgcttgaaacacgcagagacctggagggagatgaggactctcatgtcccaaatgtgactttgctgattcaagagcttatccacaatctttttgtgtcagtcatgagtcatcaggatgatgagggaagatgctacagcgattctttagcagaaattcctgctgtggatcccaactttcctaacaaaccaccccttacatttgacataattaggaagaatgttgaaaataatcgctaccgtcggcttgatttatttcaagagcatatgtttgaagtattggaacgagcaagaaggatgaatcggacagattcagaaatatatgaagatgcagtagaacttcagcagttttttattaaaattcgtgatgaactctgcaaaaatggagagattcttctttcaccggcactcagctataccacaaaacatttgcataatgatgtggagaaagagagaaaggaaaaattgccaaaagaaatagaggaagataaactaaaacgagaagaagaaaaaagagaagctgaaaagagtgaagattcctctggtgctgcaggcctctcaggcttacatcgcacatacagccaggactgtagctttaaaaacagcatgtaccatgttggagattacgtctatgtggaacctgcagaggccaacctacaaccacatatcgtctgtattgaaagactgtgggaggattcagctgaaaaagaagtttttaagagtgactattacaacaaagttccagttagtaaaattctaggcaagtgtgtggtcatgtttgtcaaggaatactttaagttatgcccagaaaacttccgagatgaggatgtttttgtctgtgaatcacggtattctgccaaaaccaaatcttttaagaaaattaaactgtggaccatgcccatcagctcagtcaggtttgtccctcgggatgtgcctctgcctgtggttcgcgtggcctctgtatttgcaaatgcagataaaggtgatgatgagaagaatacagacaactcagaggacagtcgagctgaagacaattttaacttggaaaaggaaaaagaagatgtccctgtggaaatgtccaatggtgaaccaggttgccactactttgagcagctccattacaatgacatgtggctgaaggttggcgactgtgtcttcatcaagtcccatggcctggtgcgtcctcgtgtgggcagaattgaaaaagtatgggttcgagatggagctgcatatttttatggccccatcttcattcacccagaagaaacagagcatgagcccacaaaaatgttctacaaaaaagaagtatttctgagtaatctggaagaaacctgccccatgacatgtattctcggaaagtgtgctgtgttgtcattcaaggacttcctctcctgcaggccaactgaaataccagaaaatgacattctgctttgtgagagccgctacaatgagagcgacaagcagatgaagaaattcaaaggattgaagaggttttcactctctgctaaagtggtagatgatgaaatttactacttcagaaaaccaattgttcctcagaaggagccatcacctttgctggaaaagaagatccagttgctagaagctaaatttgccgagttagaaggtggagatgatgatattgaagagatgggagaagaagatagtgaggtcattctaccccaaagtctgccaaaggcagtgcaaagaaggaaggctccaaacggaaaatcaacatgagtggctacatcctgttcagcagtgagatgagggctgtgattaaggcccaacacccagactactctttcggggagctcagccgcctggtggggacagaatggagaaatcttgagacagccaagaaagcagaatatgaaggcatgatgggtggctatccgccaggccttccacctttgcagggcccagttgatggccttgttagcatgggcagcatgcagccacttcaccctggggggcctccaccccaccatcttccgccaggtgtgcctggcctcccgggcatcccaccaccgggtgtgatgaaccaaggagtggcccctatggtagggactccagcaccaggtggaagtccatatggacaacaggtgggagttttggggcctccagggcagcaggcaccacctccatatcccggcccacatccagctggaccccctgtcatacagcagccaacaacacccatgtttgtagctcccccaccaaagacccagcggcttcttcactcagaggcctacctgaaatacattgaaggactcagtgcggagtccaacagcattagcaagtgggatcagacactggcagctcgaagacgcgacgtccatttgtcgaaagaacaggagagccgcctaccctctcactggctgaaaagcaaaggggcccacaccaccatggcagatgccctctggcgccttcgagatttgatgctccgggacaccctcaacattcgccaagcatacaacctagaaaatgtttaatcacatcattacgtttcttttatatagaagcataaagagttgtggatcagtagccattttagttactgggggtggggggaaggaacaaaggaggataatttttattgcattttactgtacatcacaaggccatttttatatacggacacttttaataagctatttcaatttgtttgttatattaagttgactttatcaaatacacaaagatttttttgcatatgtttccttcgtttaaaaccagtttcataattggttgtatatgtagacttggagttttatctttttacttgttgccatggaactgaaaccattagaggtttttgtcttggcttggggtttttgttttcttggttttgggtttttttatatatatatataaaagaacaaaatgaaaaaaaacacacacacacaagagtttacagattagtttaaattgataatgaaatgtgaagtttgtcctagtttacatcttagagaggggagtatacttgtgtttgtttcatgtgcctgaatatcttaagccactttctgcaaaagctgtttcttacagatgaagtgctttctttgaaaggtggttatttaggttttagatgtttaatagacacagcacatttgctctattaactcagaggctcactacagaaatatgtaatcagtgctgtgcatctgtctgcagctaatgtacctcctggacaccaggaggggaaaaagcactttttcaattgtgctgagttagacatctgtgagttagactatggtgtcagtgatttttgcagaacacgtgcacaaccctgaggtatgtttaatctaggcaggtacgtttaaggatattttgatctatttataatgaattcacaatttatgcctataaatttcagatgatttaaaattttaaacctgttacattgaaaaacattgaagttcgtcttgaagaaagcattaaggtatgcatggaggtgatttatttttaaacataacacctaacctaacatgggtaagagagtatggaactagatatgagctgtataagaagcataattgtgaacaagtagattgattgccttcatatacaagtatgttttagtattccttatttccttattatcagatgtattttttcttttaagtttcaatgttgttataattctcaaccagaaatttaatactttctaaaatattttttaaatttagcttgtgcttttgaattacaggagaagggaatcataatttaataaaacgcttactagaaagaccattacagatcccaaacacttgggtttggtgaccctgtctttcttatatgaccctacaataaacatttgaaggcagcataggatggcagacagtaggaacattgtttcacttggcggcatgtttttgaaacctgctttatagtaactgggtgattgccattgtggtagagcttccactgctgtttataatctgagagagttaatctcagaggatgcttttttccttttaatctgctatgaatcagtacccagatgtttaattactgtacttattaaatcatgagggcaaaagagtgtagaatggaaaaaagtctcttgtatctagatactttaaatatgggaggccctttaacttaattgcctttagtcaaccactggatttgaatttgcatcaagtattttaaataatattgaatttaaaaaaatgtattgcagtagtgtgtcagtaccttattgttaaagtgagtcagataaatcttcaattcctggctatttgggcaattgaatcatcatggactgtataatgcaatcagattattttgtttctagacatccttgaattacaccaaagaacatgaaatttagttgtggttaaattatttatttatttcatgcattcattttatttcccttaaggtctggatgagacttctttggggagcctctaaaaaaatttttcactgggggccacgtgggtcattagaagccagagctctcctccaggctccttcccagtgcctagaggtgctataggaaacatagatccagccaggggcttccctaaagcagtgcagcaccggcccagggcatcactagacaggccctaattaagttttttttaaaaagcctgtgtatttattttagaatcatgtttttctgtatattaacttgggggatatcgttaatatttaggatataagatttgaggtcagccatcttc

SEQ ID NO: 362673 - DNA, 7129 bp, Homo sapiens
acggcagcggccgcggccggaggagcaatagcagcagccgtggcggccacggggcggggcgcggcggtcggtgaccgcggccggggctgcaggcggcggagcggctggaagaagttggattccatgggttccaagagaagaagagctacctccccttccagcagtgtcagcggggactttgatgatgggcaccattctgtgtcaacaccaggcccaagcaggaaaaggaggagactttccaatcttccaactgtagatcctattgccgtgtgccatgaactctataataccatccgagactataaggatgaacagggcagacttctctgtgagctcttcattagggcaccaaagcgaagaaatcaaccagactattatgaagtggtttctcagcccattgacttgatgaaaatccaacagaaactaaaaatggaagagtatgatgatgttaatttgctgactgctgacttccagcttctttttaacaatgcaaagtcctattataagccagattctcctgaatataaagccgcttgcaaactctgggatttgtaccttcgaacaagaaatgagtttgttcagaaaggagaagcagatgacgaagatgatgatgaagatgggcaagacaatcagggcacagtgactgaaggatcttctccagcttacttgaaggagatcctggagcagcttcttgaagccatagttgtagctacaaatccatcaggacgtctcattagcgaactttttcagaaactgccttctaaagtgcaatatccagattattatgcaataattaaggagcctatagatctcaagaccattgcccagaggatacagaatggaagctacaaaagtattcatgcaatggccaaagatatagatctcctcgcaaaaaatgccaaaacttataatgagcctggctctcaagtattcaaggatgcaaattcaattaaaaaaatattttatatgaaaaaggctgaaattgaacatcatgaaatggctaagtcaagtcttcgaatgaggtaataaaagagcagtacaaggaggtcgtttatcagcaattacaatggcacttcaatatggctcagaaagtgaagaagatgctgctttagctgctgcacgctatgaagagggagagtcagaagcagaaagcatcacttcctttatggatgtttcaaatcctttttatcagctttatgacacagttaggagttgtcggaataaccaagggcagctaatagctgaacctttttaccatttgccttcaaagaaaaaataccctgattattaccagcaaattaaaatgcccatatcactacaacagatccgaacaaaactgaagaatcaagaatatgaaactttagatcatttggagtgtgatctgaatttaatgtttgaaaatgccaaacgctataatgtgcccaattcagccatctacaagcgagttctaaaattgcagcaagttatgcaggcaaagaagaaagagcttgccaggagagacgatatcgaggacggagacagcatgatctcttcagccacctctgatactggtagtgccaaaagaaaaagtaaaaagaacataagaaagcagcgaatgaaaatcttattcaatgttgttcttgaagctcgagagccaggttcaggcagaagactttgtgacctatttatggttaaaccatccaaaaaggactatcctgattattataaaatcatcttggagccaatggacttgaaaataattgagcataacatccgcaatgacaaatatgctggtgaagagggaatgatagaagacatgaagctgatgttccggaatgccaggcactataatgaggagggctcccaggtttataatgatgcacatatcctggagaagttactcaaggagaaaaggaaagagctgggcccactgcctgatgatgatgacatggcttctcccaaactcaagctgagtaggaagagtggcatttctcctaaaaaatcaaaatacatgactccaatgcagcagaaactaaatgaggtctatgaagctgtaaagaactatactgataagaggggtcgccgcctcagtgccatatttctgaggcttccctctagatctgagttgcctgactactatctgactattaaaaagcccatggacatggaaaaaattcgaagtcacatgatggccaacaagtaccaagatattgactctatggttgaggactttgtcatgatgtttaataatgcctgtacatacaatgagccggagtctttgatctacaaagatgctcttgttctacacaaagtcctgcttgaaacacgcagagacctggagggagatgaggactctcatgtcccaaatgtgactttgctgattcaagagcttatccacaatctttttgtgtcagtcatgagtcatcaggatgatgagggaagatgctacagcgattctttagcagaaattcctgctgtggatcccaactttcctaacaaaccaccccttacatttgacataattaggaagaatgttgaaaataatcgctaccgtcggcttgatttatttcaagagcatatgtttgaagtattggaacgagcaagaaggatgaatcggacagattcagaaatatatgaagatgcagtagaacttcagcagttttttattaaaattcgtgatgaactctgcaaaaatggagagattcttctttcaccggcactcagctataccacaaaacatttgcataatgatgtggagaaagagagaaaggaaaaattgccaaaagaaatagaggaagataaactaaaacgagaagaagaaaaaagagaagctgaaaagagtgaagattcctctggtgctgcaggcctctcaggcttacatcgcacatacagccaggactgtagctttaaaaacagcatgtaccatgttggagattacgtctatgtggaacctgcagaggccaacctacaaccacatatcgtctgtattgaaagactgtgggaggattcagctggtgaaaaatggttgtatggctgttggttttaccgaccaaatgaaacattccacctggctacacgaaaatttctagaaaaagaagtttttaagagtgactattacaacaaagttccagttagtaaaattctaggcaagtgtgtggtcatgtttgtcaaggaatactttaagttatgcccagaaaacttccgagatgaggatgtttttgtctgtgaatcacggtattctgccaaaaccaaatcttttaagaaaattaaactgtggaccatgcccatcagctcagtcaggtttgtccctcgggatgtgcctctgcctgtggttcgcgtggcctctgtatttgcaaatgcagataaaggtgatgatgagaagaatacagacaactcagaggacagtcgagctgaagacaattttaacttggaaaaggaaaaagaagatgtccctgtggaaatgtccaatggtgaaccaggttgccactactttgagcagctccattacaatgacatgtggctgaaggttggcgactgtgtcttcatcaagtcccatggcctggtgcgtcctcgtgtgggcagaattgaaaaagtatgggttcgagatggagctgcatatttttatggccccatcttcattcacccagaagaaacagagcatgagcccacaaaaatgttctacaaaaaagaagtatttctgagtaatctggaagaaacctgccccatgacatgtattctcggaaagtgtgctgtgttgtcattcaaggacttcctctcctgcaggccaactgaaataccagaaaatgacattctgctttgtgagagccgctacaatgagagcgacaagcagatgaagaaattcaaaggattgaagaggttttcactctctgctaaagtggtagatgatgaaatttactacttcagaaaaccaattgttcctcagaaggagccatcacctttgctggaaaagaagatccagttgctagaagctaaatttgccgagttagaaggtggagatgatgatattgaagagatgggagaagaagatagtgaggtcattgaacctccttctctacctcagcttcagacccccctggccagtgagctggacctcatgccctacacacccccacagtctaccccaaagtctgccaaaggcagtgcaaagaaggaaggctccaaacggaaaatcaacatgagtggctacatcctgttcagcagtgagatgagggctgtgattaaggcccaacacccagactactctttcggggagctcagccgcctggtggggacagaatggagaaatcttgagacagccaagaaagcagaatatgaaggcatgatgggtggctatccgccaggccttccacctttgcagggcccagttgatggccttgttagcatgggcagcatgcagccacttcaccctggggggcctccaccccaccatcttccgccaggtgtgcctggcctcccgggcatcccaccaccgggtgtgatgaaccaaggagtggcccctatggtagggactccagcaccaggtggaagtccatatggacaacaggtgggagttttggggcctccagggcagcaggcaccacctccatatcccggcccacatccagctggaccccctgtcatacagcagccaacaacacccatgtttgtagctcccccaccaaagacccagcggcttcttcactcagaggcctacctgaaatacattgaaggactcagtgcggagtccaacagcattagcaagtgggatcagacactggcagctcgaagacgcgacgtccatttgtcgaaagaacaggagagccgcctaccctctcactggctgaaaagcaaaggggcccacaccaccatggcagatgccctctggcgccttcgagatttgatgctccgggacaccctcaacattcgccaagcatacaacctagaaaatgtttaatcacatcattacgtttcttttatatagaagcataaagagttgtggatcagtagccattttagttactgggggtggggggaaggaacaaaggaggataatttttattgcattttactgtacatcacaaggccatttttatatacggacacttttaataagctatttcaatttgtttgttatattaagttgactttatcaaatacacaaagatttttttgcatatgtttccttcgtttaaaaccagtttcataattggttgtatatgtagacttggagttttatctttttacttgttgccatggaactgaaaccattagaggtttttgtcttggcttggggtttttgttttcttggttttgggtttttttatatatatatataaaagaacaaaatgaaaaaaaacacacacacacaagagtttacagattagtttaaattgataatgaaatgtgaagtttgtcctagtttacatcttagagaggggagtatacttgtgtttgtttcatgtgcctgaatatcttaagccactttctgcaaaagctgtttcttacagatgaagtgctttctttgaaaggtggttatttaggttttagatgtttaatagacacagcacatttgctctattaactcagaggctcactacagaaatatgtaatcagtgctgtgcatctgtctgcagctaatgtacctcctggacaccaggaggggaaaaagcactttttcaattgtgctgagttagacatctgtgagttagactatggtgtcagtgatttttgcagaacacgtgcacaaccctgaggtatgtttaatctaggcaggtacgtttaaggatattttgatctatttataatgaattcacaatttatgcctataaatttcagatgatttaaaattttaaacctgttacattgaaaaacattgaagttcgtcttgaagaaagcattaaggtatgcatggaggtgatttatttttaaacataacacctaacctaacatgggtaagagagtatggaactagatatgagctgtataagaagcataattgtgaacaagtagattgattgccttcatatacaagtatgttttagtattccttatttccttattatcagatgtattttttcttttaagtttcaatgttgttataattctcaaccagaaatttaatactttctaaaatattttttaaatttagcttgtgcttttgaattacaggagaagggaatcataatttaataaaacgcttactagaaagaccattacagatcccaaacacttgggtttggtgaccctgtctttcttatatgaccctacaataaacatttgaaggcagcataggatggcagacagtaggaacattgtttcacttggcggcatgtttttgaaacctgctttatagtaactgggtgattgccattgtggtagagcttccactgctgtttataatctgagagagttaatctcagaggatgcttttttccttttaatctgctatgaatcagtacccagatgtttaattactgtacttattaaatcatgagggcaaaagagtgtagaatggaaaaaagtctcttgtatctagatactttaaatatgggaggccctttaacttaattgcctttagtcaaccactggatttgaatttgcatcaagtattttaaataatattgaatttaaaaaaatgtattgcagtagtgtgtcagtaccttattgttaaagtgagtcagataaatcttcaattcctggctatttgggcaattgaatcatcatggactgtataatgcaatcagattattttgtttctagacatccttgaattacaccaaagaacatgaaatttagttgtggttaaattatttatttatttcatgcattcattttatttcccttaaggtctggatgagacttctttggggagcctctaaaaaaatttttcactgggggccacgtgggtcattagaagccagagctctcctccaggctccttcccagtgcctagaggtgctataggaaacatagatccagccaggggcttccctaaagcagtgcagcaccggcccagggcatcactagacaggccctaattaagttttttttaaaaagcctgtgtatttattttagaatcatgtttttctgtatattaacttgggggatatcgttaatatttaggatataagatttgaggtcagccatcttc

SEQ ID NO: 362674 - DNA, 7434 bp, Homo sapiens
gtcgcccatatttgattttgagctccaaaatggaagattggaaaatatgttttgaagagcttgccaacacttggtgtcacatgtgagcctcccacatgtattcactctccattccagctctgtgattgaactctgctcttattgactagggggcagttgggcaggcatgcctcattcctggaattgacagtcattcctaatttttgaatatactaacactgaatcagcacttctaaagcccttccttctcccactggcttcacttggctttcagacataatgaggagactggcttttcgaggcgctggttgtgctctgaagaagttggattccatgggttccaagagaagaagagctacctccccttccagcagtgtcagcggggactttgatgatgggcaccattctgtgtcaacaccaggcccaagcaggaaaaggaggagactttccaatcttccaactgtagatcctattgccgtgtgccatgaactctataataccatccgagactataaggatgaacagggcagacttctctgtgagctcttcattagggcaccaaagcgaagaaatcaaccagactattatgaagtggtttctcagcccattgacttgatgaaaatccaacagaaactaaaaatggaagagtatgatgatgttaatttgctgactgctgacttccagcttctttttaacaatgcaaagtcctattataagccagattctcctgaatataaagccgcttgcaaactctgggatttgtaccttcgaacaagaaatgagtttgttcagaaaggagaagcagatgacgaagatgatgatgaagatgggcaagacaatcagggcacagtgactgaaggatcttctccagcttacttgaaggagatcctggagcagcttcttgaagccatagttgtagctacaaatccatcaggacgtctcattagcgaactttttcagaaactgccttctaaagtgcaatatccagattattatgcaataattaaggagcctatagatctcaagaccattgcccagaggatacagaatggaagctacaaaagtattcatgcaatggccaaagatatagatctcctcgcaaaaaatgccaaaacttataatgagcctggctctcaagtattcaaggatgcaaattcaattaaaaaaatattttatatgaaaaaggctgaaattgaacatcatgaaatggctaagtcaagtcttcgaatgaggactccatccaacttggctgcagccagactgacaggtccttcacacagtaaaggcagccttggtgaagagagaaatcccactagcaagtattaccgtaataaaagagcagtacaaggaggtcgtttatcagcaattacaatggcacttcaatatggctcagaaagtgaagaagatgctgctttagctgctgcacgctatgaagagggagagtcagaagcagaaagcatcacttcctttatggatgtttcaaatcctttttatcagctttatgacacagttaggagttgtcggaataaccaagggcagctaatagctgaacctttttaccatttgccttcaaagaaaaaataccctgattattaccagcaaattaaaatgcccatatcactacaacagatccgaacaaaactgaagaatcaagaatatgaaactttagatcatttggagtgtgatctgaatttaatgtttgaaaatgccaaacgctataatgtgcccaattcagccatctacaagcgagttctaaaattgcagcaagttatgcaggcaaagaagaaagagcttgccaggagagacgatatcgaggacggagacagcatgatctcttcagccacctctgatactggtagtgccaaaagaaaaagtaaaaagaacataagaaagcagcgaatgaaaatcttattcaatgttgttcttgaagctcgagagccaggttcaggcagaagactttgtgacctatttatggttaaaccatccaaaaaggactatcctgattattataaaatcatcttggagccaatggacttgaaaataattgagcataacatccgcaatgacaaatatgctggtgaagagggaatgatagaagacatgaagctgatgttccggaatgccaggcactataatgaggagggctcccaggtttataatgatgcacatatcctggagaagttactcaaggagaaaaggaaagagctgggcccactgcctgatgatgatgacatggcttctcccaaactcaagctgagtaggaagagtggcatttctcctaaaaaatcaaaatacatgactccaatgcagcagaaactaaatgaggtctatgaagctgtaaagaactatactgataagaggggtcgccgcctcagtgccatatttctgaggcttccctctagatctgagttgcctgactactatctgactattaaaaagcccatggacatggaaaaaattcgaagtcacatgatggccaacaagtaccaagatattgactctatggttgaggactttgtcatgatgtttaataatgcctgtacatacaatgagccggagtctttgatctacaaagatgctcttgttctacacaaagtcctgcttgaaacacgcagagacctggagggagatgaggactctcatgtcccaaatgtgactttgctgattcaagagcttatccacaatctttttgtgtcagtcatgagtcatcaggatgatgagggaagatgctacagcgattctttagcagaaattcctgctgtggatcccaactttcctaacaaaccaccccttacatttgacataattaggaagaatgttgaaaataatcgctaccgtcggcttgatttatttcaagagcatatgtttgaagtattggaacgagcaagaaggatgaatcggacagattcagaaatatatgaagatgcagtagaacttcagcagttttttattaaaattcgtgatgaactctgcaaaaatggagagattcttctttcaccggcactcagctataccacaaaacatttgcataatgatgtggagaaagagagaaaggaaaaattgccaaaagaaatagaggaagataaactaaaacgagaagaagaaaaaagagaagctgaaaagagtgaagattcctctggtgctgcaggcctctcaggcttacatcgcacatacagccaggactgtagctttaaaaacagcatgtaccatgttggagattacgtctatgtggaacctgcagaggccaacctacaaccacatatcgtctgtattgaaagactgtgggaggattcagctggtgaaaaatggttgtatggctgttggttttaccgaccaaatgaaacattccacctggctacacgaaaatttctagaaaaagaagtttttaagagtgactattacaacaaagttccagttagtaaaattctaggcaagtgtgtggtcatgtttgtcaaggaatactttaagttatgcccagaaaacttccgagatgaggatgtttttgtctgtgaatcacggtattctgccaaaaccaaatcttttaagaaaattaaactgtggaccatgcccatcagctcagtcaggtttgtccctcgggatgtgcctctgcctgtggttcgcgtggcctctgtatttgcaaatgcagataaaggtgatgatgagaagaatacagacaactcagaggacagtcgagctgaagacaattttaacttggaaaaggaaaaagaagatgtccctgtggaaatgtccaatggtgaaccaggttgccactactttgagcagctccattacaatgacatgtggctgaaggttggcgactgtgtcttcatcaagtcccatggcctggtgcgtcctcgtgtgggcagaattgaaaaagtatgggttcgagatggagctgcatatttttatggccccatcttcattcacccagaagaaacagagcatgagcccacaaaaatgttctacaaaaaagaagtatttctgagtaatctggaagaaacctgccccatgacatgtattctcggaaagtgtgctgtgttgtcattcaaggacttcctctcctgcaggccaactgaaataccagaaaatgacattctgctttgtgagagccgctacaatgagagcgacaagcagatgaagaaattcaaaggattgaagaggttttcactctctgctaaagtggtagatgatgaaatttactacttcagaaaaccaattgttcctcagaaggagccatcacctttgctggaaaagaagatccagttgctagaagctaaatttgccgagttagaaggtggagatgatgatattgaagagatgggagaagaagatagtgaggtcattgaacctccttctctacctcagcttcagacccccctggccagtgagctggacctcatgccctacacacccccacagtctaccccaaagtctgccaaaggcagtgcaaagaaggaaggctccaaacggaaaatcaacatgagtggctacatcctgttcagcagtgagatgagggctgtgattaaggcccaacacccagactactctttcggggagctcagccgcctggtggggacagaatggagaaatcttgagacagccaagaaagcagaatatgaaggcatgatgggtggctatccgccaggccttccacctttgcagggcccagttgatggccttgttagcatgggcagcatgcagccacttcaccctggggggcctccaccccaccatcttccgccaggtgtgcctggcctcccgggcatcccaccaccgggtgtgatgaaccaaggagtggcccctatggtagggactccagcaccaggtggaagtccatatggacaacaggtgggagttttggggcctccagggcagcaggcaccacctccatatcccggcccacatccagctggaccccctgtcatacagcagccaacaacacccatgtttgtagctcccccaccaaagacccagcggcttcttcactcagaggcctacctgaaatacattgaaggactcagtgcggagtccaacagcattagcaagtgggatcagacactggcagctcgaagacgcgacgtccatttgtcgaaagaacaggagagccgcctaccctctcactggctgaaaagcaaaggggcccacaccaccatggcagatgccctctggcgccttcgagatttgatgctccgggacaccctcaacattcgccaagcatacaacctagaaaatgtttaatcacatcattacgtttcttttatatagaagcataaagagttgtggatcagtagccattttagttactgggggtggggggaaggaacaaaggaggataatttttattgcattttactgtacatcacaaggccatttttatatacggacacttttaataagctatttcaatttgtttgttatattaagttgactttatcaaatacacaaagatttttttgcatatgtttccttcgtttaaaaccagtttcataattggttgtatatgtagacttggagttttatctttttacttgttgccatggaactgaaaccattagaggtttttgtcttggcttggggtttttgttttcttggttttgggtttttttatatatatatataaaagaacaaaatgaaaaaaaacacacacacacaagagtttacagattagtttaaattgataatgaaatgtgaagtttgtcctagtttacatcttagagaggggagtatacttgtgtttgtttcatgtgcctgaatatcttaagccactttctgcaaaagctgtttcttacagatgaagtgctttctttgaaaggtggttatttaggttttagatgtttaatagacacagcacatttgctctattaactcagaggctcactacagaaatatgtaatcagtgctgtgcatctgtctgcagctaatgtacctcctggacaccaggaggggaaaaagcactttttcaattgtgctgagttagacatctgtgagttagactatggtgtcagtgatttttgcagaacacgtgcacaaccctgaggtatgtttaatctaggcaggtacgtttaaggatattttgatctatttataatgaattcacaatttatgcctataaatttcagatgatttaaaattttaaacctgttacattgaaaaacattgaagttcgtcttgaagaaagcattaaggtatgcatggaggtgatttatttttaaacataacacctaacctaacatgggtaagagagtatggaactagatatgagctgtataagaagcataattgtgaacaagtagattgattgccttcatatacaagtatgttttagtattccttatttccttattatcagatgtattttttcttttaagtttcaatgttgttataattctcaaccagaaatttaatactttctaaaatattttttaaatttagcttgtgcttttgaattacaggagaagggaatcataatttaataaaacgcttactagaaagaccattacagatcccaaacacttgggtttggtgaccctgtctttcttatatgaccctacaataaacatttgaaggcagcataggatggcagacagtaggaacattgtttcacttggcggcatgtttttgaaacctgctttatagtaactgggtgattgccattgtggtagagcttccactgctgtttataatctgagagagttaatctcagaggatgcttttttccttttaatctgctatgaatcagtacccagatgtttaattactgtacttattaaatcatgagggcaaaagagtgtagaatggaaaaaagtctcttgtatctagatactttaaatatgggaggccctttaacttaattgcctttagtcaaccactggatttgaatttgcatcaagtattttaaataatattgaatttaaaaaaatgtattgcagtagtgtgtcagtaccttattgttaaagtgagtcagataaatcttcaattcctggctatttgggcaattgaatcatcatggactgtataatgcaatcagattattttgtttctagacatccttgaattacaccaaagaacatgaaatttagttgtggttaaattatttatttatttcatgcattcattttatttcccttaaggtctggatgagacttctttggggagcctctaaaaaaatttttcactgggggccacgtgggtcattagaagccagagctctcctccaggctccttcccagtgcctagaggtgctataggaaacatagatccagccaggggcttccctaaagcagtgcagcaccggcccagggcatcactagacaggccctaattaagttttttttaaaaagcctgtgtatttattttagaatcatgtttttctgtatattaacttgggggatatcgttaatatttaggatataagatttgaggtcagccatcttc

SEQ ID NO: 362675 - DNA, 7317 bp, Homo sapiens
gtcgcccatatttgattttgagctccaaaatggaagattggaaaatatgttttgaagagcttgccaacacttggtgtcacatgtgagcctcccacatgtattcactctccattccagctctgtgattgaactctgctcttattgactagggggcagttgggcaggcatgcctcattcctggaattgacagtcattcctaataagaagttggattccatgggttccaagagaagaagagctacctccccttccagcagtgtcagcggggactttgatgatgggcaccattctgtgtcaacaccaggcccaagcaggaaaaggaggagactttccaatcttccaactgtagatcctattgccgtgtgccatgaactctataataccatccgagactataaggatgaacagggcagacttctctgtgagctcttcattagggcaccaaagcgaagaaatcaaccagactattatgaagtggtttctcagcccattgacttgatgaaaatccaacagaaactaaaaatggaagagtatgatgatgttaatttgctgactgctgacttccagcttctttttaacaatgcaaagtcctattataagccagattctcctgaatataaagccgcttgcaaactctgggatttgtaccttcgaacaagaaatgagtttgttcagaaaggagaagcagatgacgaagatgatgatgaagatgggcaagacaatcagggcacagtgactgaaggatcttctccagcttacttgaaggagatcctggagcagcttcttgaagccatagttgtagctacaaatccatcaggacgtctcattagcgaactttttcagaaactgccttctaaagtgcaatatccagattattatgcaataattaaggagcctatagatctcaagaccattgcccagaggatacagaatggaagctacaaaagtattcatgcaatggccaaagatatagatctcctcgcaaaaaatgccaaaacttataatgagcctggctctcaagtattcaaggatgcaaattcaattaaaaaaatattttatatgaaaaaggctgaaattgaacatcatgaaatggctaagtcaagtcttcgaatgaggactccatccaacttggctgcagccagactgacaggtccttcacacagtaaaggcagccttggtgaagagagaaatcccactagcaagtattaccgtaataaaagagcagtacaaggaggtcgtttatcagcaattacaatggcacttcaatatggctcagaaagtgaagaagatgctgctttagctgctgcacgctatgaagagggagagtcagaagcagaaagcatcacttcctttatggatgtttcaaatcctttttatcagctttatgacacagttaggagttgtcggaataaccaagggcagctaatagctgaacctttttaccatttgccttcaaagaaaaaataccctgattattaccagcaaattaaaatgcccatatcactacaacagatccgaacaaaactgaagaatcaagaatatgaaactttagatcatttggagtgtgatctgaatttaatgtttgaaaatgccaaacgctataatgtgcccaattcagccatctacaagcgagttctaaaattgcagcaagttatgcaggcaaagaagaaagagcttgccaggagagacgatatcgaggacggagacagcatgatctcttcagccacctctgatactggtagtgccaaaagaaaaagtaaaaagaacataagaaagcagcgaatgaaaatcttattcaatgttgttcttgaagctcgagagccaggttcaggcagaagactttgtgacctatttatggttaaaccatccaaaaaggactatcctgattattataaaatcatcttggagccaatggacttgaaaataattgagcataacatccgcaatgacaaatatgctggtgaagagggaatgatagaagacatgaagctgatgttccggaatgccaggcactataatgaggagggctcccaggtttataatgatgcacatatcctggagaagttactcaaggagaaaaggaaagagctgggcccactgcctgatgatgatgacatggcttctcccaaactcaagctgagtaggaagagtggcatttctcctaaaaaatcaaaatacatgactccaatgcagcagaaactaaatgaggtctatgaagctgtaaagaactatactgataagaggggtcgccgcctcagtgccatatttctgaggcttccctctagatctgagttgcctgactactatctgactattaaaaagcccatggacatggaaaaaattcgaagtcacatgatggccaacaagtaccaagatattgactctatggttgaggactttgtcatgatgtttaataatgcctgtacatacaatgagccggagtctttgatctacaaagatgctcttgttctacacaaagtcctgcttgaaacacgcagagacctggagggagatgaggactctcatgtcccaaatgtgactttgctgattcaagagcttatccacaatctttttgtgtcagtcatgagtcatcaggatgatgagggaagatgctacagcgattctttagcagaaattcctgctgtggatcccaactttcctaacaaaccaccccttacatttgacataattaggaagaatgttgaaaataatcgctaccgtcggcttgatttatttcaagagcatatgtttgaagtattggaacgagcaagaaggatgaatcggacagattcagaaatatatgaagatgcagtagaacttcagcagttttttattaaaattcgtgatgaactctgcaaaaatggagagattcttctttcaccggcactcagctataccacaaaacatttgcataatgatgtggagaaagagagaaaggaaaaattgccaaaagaaatagaggaagataaactaaaacgagaagaagaaaaaagagaagctgaaaagagtgaagattcctctggtgctgcaggcctctcaggcttacatcgcacatacagccaggactgtagctttaaaaacagcatgtaccatgttggagattacgtctatgtggaacctgcagaggccaacctacaaccacatatcgtctgtattgaaagactgtgggaggattcagctggtgaaaaatggttgtatggctgttggttttaccgaccaaatgaaacattccacctggctacacgaaaatttctagaaaaagaagtttttaagagtgactattacaacaaagttccagttagtaaaattctaggcaagtgtgtggtcatgtttgtcaaggaatactttaagttatgcccagaaaacttccgagatgaggatgtttttgtctgtgaatcacggtattctgccaaaaccaaatcttttaagaaaattaaactgtggaccatgcccatcagctcagtcaggtttgtccctcgggatgtgcctctgcctgtggttcgcgtggcctctgtatttgcaaatgcagataaaggtgatgatgagaagaatacagacaactcagaggacagtcgagctgaagacaattttaacttggaaaaggaaaaagaagatgtccctgtggaaatgtccaatggtgaaccaggttgccactactttgagcagctccattacaatgacatgtggctgaaggttggcgactgtgtcttcatcaagtcccatggcctggtgcgtcctcgtgtgggcagaattgaaaaagtatgggttcgagatggagctgcatatttttatggccccatcttcattcacccagaagaaacagagcatgagcccacaaaaatgttctacaaaaaagaagtatttctgagtaatctggaagaaacctgccccatgacatgtattctcggaaagtgtgctgtgttgtcattcaaggacttcctctcctgcaggccaactgaaataccagaaaatgacattctgctttgtgagagccgctacaatgagagcgacaagcagatgaagaaattcaaaggattgaagaggttttcactctctgctaaagtggtagatgatgaaatttactacttcagaaaaccaattgttcctcagaaggagccatcacctttgctggaaaagaagatccagttgctagaagctaaatttgccgagttagaaggtggagatgatgatattgaagagatgggagaagaagatagtgaggtcattgaacctccttctctacctcagcttcagacccccctggccagtgagctggacctcatgccctacacacccccacagtctaccccaaagtctgccaaaggcagtgcaaagaaggaaggctccaaacggaaaatcaacatgagtggctacatcctgttcagcagtgagatgagggctgtgattaaggcccaacacccagactactctttcggggagctcagccgcctggtggggacagaatggagaaatcttgagacagccaagaaagcagaatatgaaggcatgatgggtggctatccgccaggccttccacctttgcagggcccagttgatggccttgttagcatgggcagcatgcagccacttcaccctggggggcctccaccccaccatcttccgccaggtgtgcctggcctcccgggcatcccaccaccgggtgtgatgaaccaaggagtggcccctatggtagggactccagcaccaggtggaagtccatatggacaacaggtgggagttttggggcctccagggcagcaggcaccacctccatatcccggcccacatccagctggaccccctgtcatacagcagccaacaacacccatgtttgtagctcccccaccaaagacccagcggcttcttcactcagaggcctacctgaaatacattgaaggactcagtgcggagtccaacagcattagcaagtgggatcagacactggcagctcgaagacgcgacgtccatttgtcgaaagaacaggagagccgcctaccctctcactggctgaaaagcaaaggggcccacaccaccatggcagatgccctctggcgccttcgagatttgatgctccgggacaccctcaacattcgccaagcatacaacctagaaaatgtttaatcacatcattacgtttcttttatatagaagcataaagagttgtggatcagtagccattttagttactgggggtggggggaaggaacaaaggaggataatttttattgcattttactgtacatcacaaggccatttttatatacggacacttttaataagctatttcaatttgtttgttatattaagttgactttatcaaatacacaaagatttttttgcatatgtttccttcgtttaaaaccagtttcataattggttgtatatgtagacttggagttttatctttttacttgttgccatggaactgaaaccattagaggtttttgtcttggcttggggtttttgttttcttggttttgggtttttttatatatatatataaaagaacaaaatgaaaaaaaacacacacacacaagagtttacagattagtttaaattgataatgaaatgtgaagtttgtcctagtttacatcttagagaggggagtatacttgtgtttgtttcatgtgcctgaatatcttaagccactttctgcaaaagctgtttcttacagatgaagtgctttctttgaaaggtggttatttaggttttagatgtttaatagacacagcacatttgctctattaactcagaggctcactacagaaatatgtaatcagtgctgtgcatctgtctgcagctaatgtacctcctggacaccaggaggggaaaaagcactttttcaattgtgctgagttagacatctgtgagttagactatggtgtcagtgatttttgcagaacacgtgcacaaccctgaggtatgtttaatctaggcaggtacgtttaaggatattttgatctatttataatgaattcacaatttatgcctataaatttcagatgatttaaaattttaaacctgttacattgaaaaacattgaagttcgtcttgaagaaagcattaaggtatgcatggaggtgatttatttttaaacataacacctaacctaacatgggtaagagagtatggaactagatatgagctgtataagaagcataattgtgaacaagtagattgattgccttcatatacaagtatgttttagtattccttatttccttattatcagatgtattttttcttttaagtttcaatgttgttataattctcaaccagaaatttaatactttctaaaatattttttaaatttagcttgtgcttttgaattacaggagaagggaatcataatttaataaaacgcttactagaaagaccattacagatcccaaacacttgggtttggtgaccctgtctttcttatatgaccctacaataaacatttgaaggcagcataggatggcagacagtaggaacattgtttcacttggcggcatgtttttgaaacctgctttatagtaactgggtgattgccattgtggtagagcttccactgctgtttataatctgagagagttaatctcagaggatgcttttttccttttaatctgctatgaatcagtacccagatgtttaattactgtacttattaaatcatgagggcaaaagagtgtagaatggaaaaaagtctcttgtatctagatactttaaatatgggaggccctttaacttaattgcctttagtcaaccactggatttgaatttgcatcaagtattttaaataatattgaatttaaaaaaatgtattgcagtagtgtgtcagtaccttattgttaaagtgagtcagataaatcttcaattcctggctatttgggcaattgaatcatcatggactgtataatgcaatcagattattttgtttctagacatccttgaattacaccaaagaacatgaaatttagttgtggttaaattatttatttatttcatgcattcattttatttcccttaaggtctggatgagacttctttggggagcctctaaaaaaatttttcactgggggccacgtgggtcattagaagccagagctctcctccaggctccttcccagtgcctagaggtgctataggaaacatagatccagccaggggcttccctaaagcagtgcagcaccggcccagggcatcactagacaggccctaattaagttttttttaaaaagcctgtgtatttattttagaatcatgtttttctgtatattaacttgggggatatcgttaatatttaggatataagatttgaggtcagccatcttc

SEQ ID NO: 362676 - DNA, 7170 bp, Homo sapiens
acggcagcggccgcggccggaggagcaatagcagcagccgtggcggccacggggcggggcgcggcggtcggtgaccgcggccggggctgcaggcggcggagcggctggaagaagttggattccatgggttccaagagaagaagagctacctccccttccagcagtgtcagcggggactttgatgatgggcaccattctgtgtcaacaccaggcccaagcaggaaaaggaggagactttccaatcttccaactgtagatcctattgccgtgtgccatgaactctataataccatccgagactataaggatgaacagggcagacttctctgtgagctcttcattagggcaccaaagcgaagaaatcaaccagactattatgaagtggtttctcagcccattgacttgatgaaaatccaacagaaactaaaaatggaagagtatgatgatgttaatttgctgactgctgacttccagcttctttttaacaatgcaaagtcctattataagccagattctcctgaatataaagccgcttgcaaactctgggatttgtaccttcgaacaagaaatgagtttgttcagaaaggagaagcagatgacgaagatgatgatgaagatgggcaagacaatcagggcacagtgactgaaggatcttctccagcttacttgaaggagatcctggagcagcttcttgaagccatagttgtagctacaaatccatcaggacgtctcattagcgaactttttcagaaactgccttctaaagtgcaatatccagattattatgcaataattaaggagcctatagatctcaagaccattgcccagaggatacagaatggaagctacaaaagtattcatgcaatggccaaagatatagatctcctcgcaaaaaatgccaaaacttataatgagcctggctctcaagtattcaaggatgcaaattcaattaaaaaaatattttatatgaaaaaggctgaaattgaacatcatgaaatggctaagtcaagtcttcgaatgaggactccatccaacttggctgcagccagactgacaggtccttcacacagtaaaggcagccttggtgaagagagaaatcccactagcaagtattaccgtaataaaagagcagtacaaggaggtcgtttatcagcaattacaatggcacttcaatatggctcagaaagtgaagaagatgctgctttagctgctgcacgctatgaagagggagagtcagaagcagaaagcatcacttcctttatggatgtttcaaatcctttttatcagctttatgacacagttaggagttgtcggaataaccaagggcagctaatagctgaacctttttaccatttgccttcaaagaaaaaataccctgattattaccagcaaattaaaatgcccatatcactacaacagatccgaacaaaactgaagaatcaagaatatgaaactttagatcatttggagtgtgatctgaatttaatgtttgaaaatgccaaacgctataatgtgcccaattcagccatctacaagcgagttctaaaattgcagcaagttatgcaggcaaagaagaaagagcttgccaggagagacgatatcgaggacggagacagcatgatctcttcagccacctctgatactggtagtgccaaaagaaaaagtaaaaagaacataagaaagcagcgaatgaaaatcttattcaatgttgttcttgaagctcgagagccaggttcaggcagaagactttgtgacctatttatggttaaaccatccaaaaaggactatcctgattattataaaatcatcttggagccaatggacttgaaaataattgagcataacatccgcaatgacaaatatgctggtgaagagggaatgatagaagacatgaagctgatgttccggaatgccaggcactataatgaggagggctcccaggtttataatgatgcacatatcctggagaagttactcaaggagaaaaggaaagagctgggcccactgcctgatgatgatgacatggcttctcccaaactcaagctgagtaggaagagtggcatttctcctaaaaaatcaaaatacatgactccaatgcagcagaaactaaatgaggtctatgaagctgtaaagaactatactgataagaggggtcgccgcctcagtgccatatttctgaggcttccctctagatctgagttgcctgactactatctgactattaaaaagcccatggacatggaaaaaattcgaagtcacatgatggccaacaagtaccaagatattgactctatggttgaggactttgtcatgatgtttaataatgcctgtacatacaatgagccggagtctttgatctacaaagatgctcttgttctacacaaagtcctgcttgaaacacgcagagacctggagggagatgaggactctcatgtcccaaatgtgactttgctgattcaagagcttatccacaatctttttgtgtcagtcatgagtcatcaggatgatgagggaagatgctacagcgattctttagcagaaattcctgctgtggatcccaactttcctaacaaaccaccccttacatttgacataattaggaagaatgttgaaaataatcgctaccgtcggcttgatttatttcaagagcatatgtttgaagtattggaacgagcaagaaggatgaatcggacagattcagaaatatatgaagatgcagtagaacttcagcagttttttattaaaattcgtgatgaactctgcaaaaatggagagattcttctttcaccggcactcagctataccacaaaacatttgcataatgatgtggagaaagagagaaaggaaaaattgccaaaagaaatagaggaagataaactaaaacgagaagaagaaaaaagagaagctgaaaagagtgaagattcctctggtgctgcaggcctctcaggcttacatcgcacatacagccaggactgtagctttaaaaacagcatgtaccatgttggagattacgtctatgtggaacctgcagaggccaacctacaaccacatatcgtctgtattgaaagactgtgggaggattcagctggtgaaaaatggttgtatggctgttggttttaccgaccaaatgaaacattccacctggctacacgaaaatttctagaaaaagaagtttttaagagtgactattacaacaaagttccagttagtaaaattctaggcaagtgtgtggtcatgtttgtcaaggaatactttaagttatgcccagaaaacttccgagatgaggatgtttttgtctgtgaatcacggtattctgccaaaaccaaatcttttaagaaaattaaactgtggaccatgcccatcagctcagtcaggtttgtccctcgggatgtgcctctgcctgtggttcgcgtggcctctgtatttgcaaatgcagataaaggtgatgatgagaagaatacagacaactcagaggacagtcgagctgaagacaattttaacttggaaaaggaaaaagaagatgtccctgtggaaatgtccaatggtgaaccaggttgccactactttgagcagctccattacaatgacatgtggctgaaggttggcgactgtgtcttcatcaagtcccatggcctggtgcgtcctcgtgtgggcagaattgaaaaagtatgggttcgagatggagctgcatatttttatggccccatcttcattcacccagaagaaacagagcatgagcccacaaaaatgttctacaaaaaagaagtatttctgagtaatctggaagaaacctgccccatgacatgtattctcggaaagtgtgctgtgttgtcattcaaggacttcctctcctgcaggccaactgaaataccagaaaatgacattctgctttgtgagagccgctacaatgagagcgacaagcagatgaagaaattcaaaggattgaagaggttttcactctctgctaaagtggtagatgatgaaatttactacttcagaaaaccaattgttcctcagaaggagccatcacctttgctggaaaagaagatccagttgctagaagctaaatttgccgagttagaaggtggagatgatgatattgaagagatgggagaagaagatagtgaggtcattgaacctccttctctacctcagcttcagacccccctggccagtgagctggacctcatgccctacacacccccacagtctaccccaaagtctgccaaaggcagtgcaaagaaggaaggctccaaacggaaaatcaacatgagtggctacatcctgttcagcagtgagatgagggctgtgattaaggcccaacacccagactactctttcggggagctcagccgcctggtggggacagaatggagaaatcttgagacagccaagaaagcagaatatgaaggcatgatgggtggctatccgccaggccttccacctttgcagggcccagttgatggccttgttagcatgggcagcatgcagccacttcaccctggggggcctccaccccaccatcttccgccaggtgtgcctggcctcccgggcatcccaccaccgggtgtgatgaaccaaggagtggcccctatggtagggactccagcaccaggtggaagtccatatggacaacaggtgggagttttggggcctccagggcagcaggcaccacctccatatcccggcccacatccagctggaccccctgtcatacagcagccaacaacacccatgtttgtagctcccccaccaaagacccagcggcttcttcactcagaggcctacctgaaatacattgaaggactcagtgcggagtccaacagcattagcaagtgggatcagacactggcagctcgaagacgcgacgtccatttgtcgaaagaacaggagagccgcctaccctctcactggctgaaaagcaaaggggcccacaccaccatggcagatgccctctggcgccttcgagatttgatgctccgggacaccctcaacattcgccaagcatacaacctagaaaatgtttaatcacatcattacgtttcttttatatagaagcataaagagttgtggatcagtagccattttagttactgggggtggggggaaggaactacggacacttttaataagctatttcaatttgtttgttatattaagttgactttatcaaatacacaaagatttttttgcatatgtttccttcgtttaaaaccagtttcataattggttgtatatgtagacttggagttttatctttttacttgttgccatggaactgaaaccattagaggtttttgtcttggcttggggtttttgttttcttggttttgggtttttttatatatatatataaaagaacaaaatgaaaaaaaacacacacacacaagagtttacagattagtttaaattgataatgaaatgtgaagtttgtcctagtttacatcttagagaggggagtatacttgtgtttgtttcatgtgcctgaatatcttaagccactttctgcaaaagctgtttcttacagatgaagtgctttctttgaaaggtggttatttaggttttagatgtttaatagacacagcacatttgctctattaactcagaggctcactacagaaatatgtaatcagtgctgtgcatctgtctgcagctaatgtacctcctggacaccaggaggggaaaaagcactttttcaattgtgctgagttagacatctgtgagttagactatggtgtcagtgatttttgcagaacacgtgcacaaccctgaggtatgtttaatctaggcaggtacgtttaaggatattttgatctatttataatgaattcacaatttatgcctataaatttcagatgatttaaaattttaaacctgttacattgaaaaacattgaagttcgtcttgaagaaagcattaaggtatgcatggaggtgatttatttttaaacataacacctaacctaacatgggtaagagagtatggaactagatatgagctgtataagaagcataattgtgaacaagtagattgattgccttcatatacaagtatgttttagtattccttatttccttattatcagatgtattttttcttttaagtttcaatgttgttataattctcaaccagaaatttaatactttctaaaatattttttaaatttagcttgtgcttttgaattacaggagaagggaatcataatttaataaaacgcttactagaaagaccattacagatcccaaacacttgggtttggtgaccctgtctttcttatatgaccctacaataaacatttgaaggcagcataggatggcagacagtaggaacattgtttcacttggcggcatgtttttgaaacctgctttatagtaactgggtgattgccattgtggtagagcttccactgctgtttataatctgagagagttaatctcagaggatgcttttttccttttaatctgctatgaatcagtacccagatgtttaattactgtacttattaaatcatgagggcaaaagagtgtagaatggaaaaaagtctcttgtatctagatactttaaatatgggaggccctttaacttaattgcctttagtcaaccactggatttgaatttgcatcaagtattttaaataatattgaatttaaaaaaatgtattgcagtagtgtgtcagtaccttattgttaaagtgagtcagataaatcttcaattcctggctatttgggcaattgaatcatcatggactgtataatgcaatcagattattttgtttctagacatccttgaattacaccaaagaacatgaaatttagttgtggttaaattatttatttatttcatgcattcattttatttcccttaaggtctggatgagacttctttggggagcctctaaaaaaatttttcactgggggccacgtgggtcattagaagccagagctctcctccaggctccttcccagtgcctagaggtgctataggaaacatagatccagccaggggcttccctaaagcagtgcagcaccggcccagggcatcactagacaggccctaattaagttttttttaaaaagcctgtgtatttattttagaatcatgtttttctgtatattaacttgggggatatcgttaatatttaggatataagatttgaggtcagccatcttc

SEQ ID NO: 362677 - DNA, 3243 bp, Homo sapiens
tatagaggatcctcgaattatcatcctgcttgaatgaacctccttctctacctcagcttcagacccccctggccagtgagctggacctcatgccctacacacccccacagtctaccccaaagtctgccaaaggcagtgcaaagaaggaaggctccaaacggaaaatcaacatgagtggctacatcctgttcagcagtgagatgagggctgtgattaaggcccaacacccagactactctttcggggagctcagccgcctggtggggacagaatggagaaatcttgagacagccaagaaagcagaatatgaagagcgggcagctaaagttgctgagcagcaggagagagagcgagcagcacagcaacagcagccgagtgcttctccccgagcaggcacccctgtgggggctctcatgggggtggtgccaccaccaacaccaatggggatgctcaatcagcagttgacacctgttgcaggtgtgatgaaccaaggagtggcccctatggtagggactccagcaccaggtggaagtccatatggacaacaggtgagcctcccagtttgattttctaggacttgacagaattcgagttatccttctcagaacatgtgcagagtctctttttgcctcaccatgtggtcctgtgctctttcaggtgggagttttggggcctccagggcagcaggcaccacctccatatcccggcccacatccagctggaccccctgtcatacagcagccaacaacacccatgtttgtagctcccccaccaaagacccagcggcttcttcactcagaggcctacctgaaatacattgaaggactcagtgcggagtccaacagcattagcaagtgggatcagacactggcagctcgaagacgcgacgtccatttgtcgaaagaacaggagagccgcctaccctctcactggctgaaaagcaaaggggcccacaccaccatggcagatgccctctggcgccttcgagatttgatgctccgggacaccctcaacattcgccaagcatacaacctagaaaatgtttaatcacatcattacgtttcttttatatagaagcataaagagttgtggatcagtagccattttagttactgggggtggggggaaggaacaaaggaggataatttttattgcattttactgtacatcacaaggccatttttatatacggacacttttaataagctatttcaatttgtttgttatattaagttgactttatcaaatacacaaagatttttttgcatatgtttccttcgtttaaaaccagtttcataattggttgtatatgtagacttggagttttatctttttacttgttgccatggaactgaaaccattagaggtttttgtcttggcttggggtttttgttttcttggttttgggtttttttatatatatatataaaagaacaaaatgaaaaaaaacacacacacacaagagtttacagattagtttaaattgataatgaaatgtgaagtttgtcctagtttacatcttagagaggggagtatacttgtgtttgtttcatgtgcctgaatatcttaagccactttctgcaaaagctgtttcttacagatgaagtgctttctttgaaaggtggttatttaggttttagatgtttaatagacacagcacatttgctctattaactcagaggctcactacagaaatatgtaatcagtgctgtgcatctgtctgcagctaatgtacctcctggacaccaggaggggaaaaagcactttttcaattgtgctgagttagacatctgtgagttagactatggtgtcagtgatttttgcagaacacgtgcacaaccctgaggtatgtttaatctaggcaggtacgtttaaggatattttgatctatttataatgaattcacaatttatgcctataaatttcagatgatttaaaattttaaacctgttacattgaaaaacattgaagttcgtcttgaagaaagcattaaggtatgcatggaggtgatttatttttaaacataacacctaacctaacatgggtaagagagtatggaactagatatgagctgtataagaagcataattgtgaacaagtagattgattgccttcatatacaagtatgttttagtattccttatttccttattatcagatgtattttttcttttaagtttcaatgttgttataattctcaaccagaaatttaatactttctaaaatattttttaaatttagcttgtgcttttgaattacaggagaagggaatcataatttaataaaacgcttactagaaagaccattacagatcccaaacacttgggtttggtgaccctgtctttcttatatgaccctacaataaacatttgaaggcagcataggatggcagacagtaggaacattgtttcacttggcggcatgtttttgaaacctgctttatagtaactgggtgattgccattgtggtagagcttccactgctgtttataatctgagagagttaatctcagaggatgcttttttccttttaatctgctatgaatcagtacccagatgtttaattactgtacttattaaatcatgagggcaaaagagtgtagaatggaaaaaagtctcttgtatctagatactttaaatatgggaggccctttaacttaattgcctttagtcaaccactggatttgaatttgcatcaagtattttaaataatattgaatttaaaaaaatgtattgcagtagtgtgtcagtaccttattgttaaagtgagtcagataaatcttcaattcctggctatttgggcaattgaatcatcatggactgtataatgcaatcagattattttgtttctagacatccttgaattacaccaaagaacatgaaatttagttgtggttaaattatttatttatttcatgcattcattttatttcccttaaggtctggatgagacttctttggggagcctctaaaaaaatttttcactgggggccacgtgggtcattagaagccagagctctcctccaggctccttcccagtgcctagaggtgctataggaaacatagatccagccaggggcttccctaaagcagtgcagcaccggcccagggcatcactagacaggccctaattaagttttttttaaaaagcctgtgtatttattttagaatcatgtttttctgtatattaacttgggggatatcgttaatatttaggatataagatttgaggtcagccatcttc

SEQ ID NO: 362678 - DNA, 517 bp, Homo sapiens
gtagattttacatgaagatattcccgtttccgacgaaattctcaaatctatgcaaatatcctcatgcagattctacaaaaagagtgtttcaaaactgctctatgaaaagacatgttcaactccgttacttgagtacacacaacacagacaagtttctgagaatgcttctgtctagttttcatgggatgatatatcctttttcaaaataggcctcaaagtgctccaaatgtccacttccagatactacaaaaagagtgtttcaaacctgctctatgaaaggaaggttcaactctgtgacttgcatggaaacgtcacaaagaagtttctgagaatgcttctgtctactttttaaacgaagatattcccatttccaacgaaatcctcaaagctatgcaaacatccacttgcagattctacaaaaagagtgattcaaaactgctctatcaaaagaaaggttcaactctgttagttgagtacaaacatgacaaacaagtttctgagaatgattctgtctagt

SEQ ID NO: 362679 - DNA, 1423 bp, Homo sapiens
aagcggaggggcgctccggccagtgattggctggaggtttgttaactattcatgagggggcgggccgagcggggcggcctttgttaagcagcgagggcgcgaccgcgggtactctgctgccggcttctcggagcggcgctgggcgaccagagcagggtcgagatgtcctacatcccgggccagccggtcaccgccgtggtgcaaagagttgaaattcacaagctgcgtcaaggtgagaacttaatcctgggtttcagcattggaggtggaatcgaccaggacccttcccagaatcccttctctgaagacaagacggacaagggtatttatgtcacacgggtgtctgaaggaggccctgctgaaatcgctgggctgcagattggagacaagatcatgcaggtgaacggctgggacatgaccatggtcacacacgaccaggcccgcaagcggctcaccaagcgctcggaggaggtggtgcgtctgctggtgacgcggcagtcgctgcagaaggccgtgcagcagtccatgctgtcctagcagccaccaccatctgcgactcctgcctgccgcctctctgtacagtaacgccacttccacactctgtccccatctggcttctgctgaccgctgggccccagctcagaagggctatagctggtcccagaggcctggcctggccttccttcccttctcccatccctggcctggggcctctgggaccagctttctctcctggacaccgaggattggaaataagggcctggagctgagtagtagccagtctgctgtgaccacaggctcaggtccgaccctgctgcttggccacagcagtggctgggcaagtgggaaccactatctcttgggagcccccaaaagctgggaaatgctggaggaaccaggcctttcccgcttttgcctggctgcagggttcggctccgcccctgccccccagccctcgtgtgtccacaccgcagtgcctctgcccctcgggggactggacacacatcctgccagaggcgctacgaagctttgcccagatgaagccaggtgggctccgcgttcactcccactctcccgaggggtgctggcctccccagggtttgccttcttacggatttagacgaggttcgaggctcacctatcagggcagctctcaggattgtcattttcctctttgcctgtgggtttaacttttgtatttttttaatcacaagtttgatacaaaatgtttttatcgtactctttggagatgcccattctacttttgaatttagcttttactaattcgcatctggaagctcagcaagtgcacaagccttactttggttaccgtggaaaccactgccgcccctccccgatgtggtgcgctcaataaaaatgctggaattcaaaaaaaaaaacaacaacaaacgagcaaacaaag

SEQ ID NO: 362680 - DNA, 1656 bp, Homo sapiens
aagcggaggggcgctccggccagtgattggctggaggtttgttaactattcatgagggggcgggccgagcggggcggcctttgttaagcagcgagggcgcgaccgcgggtactctgctgccggcttctcggagcggcgctgggcgaccagagcagggtcgagatgtcctacatcccgggccagccggtcaccgccgtggtgcaaagagttgaaattcacaagctgcgtcaaggtgagaacttaatcctgggtttcagcattggaggtggaatcgaccaggacccttcccagaatcccttctctgaagacaagacggacaagggtatttatgtcacacgggtgtctgaaggaggccctgctgaaatcgctgggctgcagattggagacaagatcatgcaggtgaacggctgggacatgaccatggtcacacacgaccaggcccgcaagcggctcaccaagcgctcggaggaggtggtgcgtctgctggtgacgcggcagtcgctgcagaaggccgtgcagcagtccatgctgtcctagcagccaccaccatctgcgactcctgcctgccgcctctctgtacagtaacgccacttccacactctgtccccatctggcttctgctgaccgctgggccccagctcagaagggctatagctggtcccagaggcctggcctggccttccttcccttctcccatccctggcctggggcctctgggaccagctttctctcctggacaccgaggattggaaataagggcctggagctgagtagtagccagtctgctgtgaccacaggctcaggtccgaccctgctgcttggccacagcagtggctgggcaagtgggaaccactatctcttgggagcccccaaaagctgggaaatgctggaggaaccaggcctttcccgcttttgcctggctgcagggttcggctccgcccctgccccccagccctcgtgtgtccacaccgcagtgcctctgcccctcgggggactggacacacatcctgccagaggcgctacgaagctttgcccagatgaagccaggtgggctccgcgttcactcccactctcccgaggggtgctggcctccccagggtttgccttcttacggatttagacgaggttcgaggctcacctatcagggcagctctcaggattgtcattttcctctttgcctgtgggtttaacttttgtatttttttaatcacaagtttgatacaaaaaaaaaaaaaaaaaaaaaaaaaaaaaaaaaaaaaaaaaaaaaaaaataagaattcataaatgctatttttaaatagaaaacatccaatacaaaaccatgtgccttgaccaaacaaagcctttaaatgccaaaatgcaaatcgagccgaaaaattatgtggggggtccctaggcccaattccccttatgggggggattaaaaaattccatggccttgatctttataacccttggctgtgtaaaaccttggtgcacccccaataaattccgtttagccaacagacctttatataccctgttgaattaaattcaaaaacctccacgcttaagccccaattcccaaaatccttggactccccaaattgtttaactaattttgtagggcctcaccctcatattttttattctccaccattgcccctcaaacggtaa

SEQ ID NO: 362681 - DNA, 1300 bp, Homo sapiens
aagcggaggggcgctccggccagtgattggctggaggtttgttaactattcatgagggggcgggccgagcggggcggcctttgttaagcagcgagggcgcgaccgcgggtactctgctgccggcttctcggagcggcgctgggcgaccagagcagggtcgagatgtcctacatcccgggccagccggtcaccgccgtggtgcaaagagttgaaattcacaagctgcgtcaaggtgagaacttaatcctgggtttcagcattggaggtggaatcgaccaggacccttcccagaatcccttctctgaagacaagacggacaagggtatttatgtcacacgggtgtctgaaggaggccctgctgaaatcgctgggctgcagattggagacaagatcatgcaggtgaacggctgggacatgaccatggtcacacacgaccaggcccgcaagcggctcaccaagcgctcggaggaggtggtgcgtctgctggtgacgcggcagtcgctgcagaaggccgtgcagcagtccatgctgtcctagcagccaccaccatctgcgactcctgcctgccgcctctctgtacagtaacgccacttccacactctgtccccatctggcttctgctgaccggaccagctttctctcctggacaccgaggattggaaataagggcctggagctgagtagtagccagtctgctgtgaccacaggctcaggtccgaccctgctgcttggccacagcagtggctgggcaagtgggaaccactatctcttgggagcccccaaaagctgggaaatgctggaggaaccaggcctttcccgcttttgcctggctgcagggttcggctccgcccctgccccccagccctcgtgtgtccacaccgcagtgcctctgcccctcgggggactggacacacatcctgccagaggcgctacgaagctttgcccagatgaagccaggtgggctccgcgttcactcccactctcccgaggggtgctggcctccccagggtttgccttcttacggatttagacgaggttcgaggctcacctatcagggcagctctcaggattgtcattttcctctttgcctgtgggtttaacttttgtatttttttaatcacaagtttgatacaaaatgtttttatcgtactctttggagatgcccattctacttttgaatttagcttttactaattcgcatctggaagctcagcaagtgcacaagccttactttggttaccgtggaaaccactgccgcccctccccgatgtggtgcgctcaataaaaatgctggaattca

SEQ ID NO: 362682 - DNA, 1320 bp, Homo sapiens
aagcggaggggcgctccggccagtgattggctggaggtttgttaactattcatgagggggcgggccgagcggggcggcctttgttaagcagcgagggcgcgaccgcgggtactctgctgccggcttctcggagcggcgctgggcgaccagagcagggtcgagatgtcctacatcccgggccagccggtcaccgccgtggtgcaaagagttgaaattcacaagctgcgtcaaggtgagaacttaatcctgggtttcagcattggaggtggaatcgaccaggacccttcccagaatcccttctctgaagacaagacggacaagggtatttatgtcacacgggtgtctgaaggaggccctgctgaaatcgctgggctgcagattggagacaagatcatgcaggtgaacggctgggacatgaccatggtcacacacgaccaggcccgcaagcggctcaccaagcgctcggaggaggtggtgcgtctgctggtgacgcggcagtcgctgcagaaggccgtgcagcagtccatgctgtcctagcagccaccaccatctgcgactcctgcctgccgcctctctgtacagtaacgccacttccacactctgtccccatctggcttctgctgaccgctgggccccagctcagaagggaccagctttctctcctggacaccgaggattggaaataagggcctggagctgagtagtagccagtctgctgtgaccacaggctcaggtccgaccctgctgcttggccacagcagtggctgggcaagtgggaaccactatctcttgggagcccccaaaagctgggaaatgctggaggaaccaggcctttcccgcttttgcctggctgcagggttcggctccgcccctgccccccagccctcgtgtgtccacaccgcagtgcctctgcccctcgggggactggacacacatcctgccagaggcgctacgaagctttgcccagatgaagccaggtgggctccgcgttcactcccactctcccgaggggtgctggcctccccagggtttgccttcttacggatttagacgaggttcgaggctcacctatcagggcagctctcaggattgtcattttcctctttgcctgtgggtttaacttttgtatttttttaatcacaagtttgatacaaaatgtttttatcgtactctttggagatgcccattctacttttgaatttagcttttactaattcgcatctggaagctcagcaagtgcacaagccttactttggttaccgtggaaaccactgccgcccctccccgatgtggtgcgctcaataaaaatgctggaattca

SEQ ID NO: 362683 - DNA, 1312 bp, Homo sapiens
aagcggaggggcgctccggccagtgattggctggaggtttgttaactattcatgagggggcgggccgagcggggcggcctttgttaagcagcgagggcgcgaccgcgggtactctgctgccggcttctcggagcggcgctgggcgaccagagcagggtcgagatgtcctacatcccgggccagccggtcaccgccgtggtgcaaagagttgaaattcacaagctgcgtcaaggtgagaacttaatcctgggtttcagcattggaggtggaatcgaccaggacccttcccagaatcccttctctgaagacaagacggacaaggtgaacggctgggacatgaccatggtcacacacgaccaggcccgcaagcggctcaccaagcgctcggaggaggtggtgcgtctgctggtgacgcggcagtcgctgcagaaggccgtgcagcagtccatgctgtcctagcagccaccaccatctgcgactcctgcctgccgcctctctgtacagtaacgccacttccacactctgtccccatctggcttctgctgaccgctgggccccagctcagaagggctatagctggtcccagaggcctggcctggccttccttcccttctcccatccctggcctggggcctctgggaccagctttctctcctggacaccgaggattggaaataagggcctggagctgagtagtagccagtctgctgtgaccacaggctcaggtccgaccctgctgcttggccacagcagtggctgggcaagtgggaaccactatctcttgggagcccccaaaagctgggaaatgctggaggaaccaggcctttcccgcttttgcctggctgcagggttcggctccgcccctgccccccagccctcgtgtgtccacaccgcagtgcctctgcccctcgggggactggacacacatcctgccagaggcgctacgaagctttgcccagatgaagccaggtgggctccgcgttcactcccactctcccgaggggtgctggcctccccagggtttgccttcttacggatttagacgaggttcgaggctcacctatcagggcagctctcaggattgtcattttcctctttgcctgtgggtttaacttttgtatttttttaatcacaagtttgatacaaaatgtttttatcgtactctttggagatgcccattctacttttgaatttagcttttactaattcgcatctggaagctcagcaagtgcacaagccttactttggttaccgtggaaaccactgccgcccctccccgatgtggtgcgctcaataaaaatgctggaattca

SEQ ID NO: 362684 - DNA, 1284 bp, Homo sapiens
aagcggaggggcgctccggccagtgattggctggaggtttgttaactattcatgagggggcgggccgagcggggcggcctttgttaagcagcgagggcgcgaccgcgggtactctgctgccggcttctcggagcggcgctgggcgaccagagcagggtcgagatgtcctacatcccgggccagccggtcaccgccgtggtgcaaagagttgaaattcacaagctgcgtcaaggtgagaacttaatcctgggtttcagcattggaggtggaatcgaccaggacccttcccagaatcccttctctgaagacaagacggacaagggtatttatgtcacacgggtgtctgaaggaggccctgctgaaatcgctgggctgcagattggagacaagatcatgcaggtgaacggctgggacatgaccatggtcacacacgaccaggcccgcaagcggctcaccaagcgctcggaggaggtggtgcgtctgctggtgacgcggcagtcgctgcagaaggccgtgcagcagtccatgctgtcctagcagccaccaccatctgcgactcctgcctgccgcctctctgtacagtaacgccacttccacactctgtccccatctggcttctgctgaccgctgggccccagctcagaagggctatagctggtcccagaggcctggcctggccttccttcccttctcccatccctggcctggggcctctggcacagcagtggctgggcaagtgggaaccactatctcttgggagcccccaaaagctgggaaatgctggaggaaccaggcctttcccgcttttgcctggctgcagggttcggctccgcccctgccccccagccctcgtgtgtccacaccgcagtgcctctgcccctcgggggactggacacacatcctgccagaggcgctacgaagctttgcccagatgaagccaggtgggctccgcgttcactcccactctcccgaggggtgctggcctccccagggtttgccttcttacggatttagacgaggttcgaggctcacctatcagggcagctctcaggattgtcattttcctctttgcctgtgggtttaacttttgtatttttttaatcacaagtttgatacaaaatgtttttatcgtactctttggagatgcccattctacttttgaatttagcttttactaattcgcatctggaagctcagcaagtgcacaagccttactttggttaccgtggaaaccactgccgcccctccccgatgtggtgcgctcaataaaaatgctggaattca

SEQ ID NO: 362685 - DNA, 895 bp, Homo sapiens
aagcggaggggcgctccggccagtgattggctggaggtttgttaactattcatgagggggcgggccgagcggggcggcctttgttaagcagcgagggcgcgaccgcgggtactctgctgccggcttctcggagcggcgctgggcgaccagagcagggtcgagatgtcctacatcccgggccagccggtcaccgccgtggtgcaaagagttgaaattcacaaggaccagctttctctcctggacaccgaggattggaaataagggcctggagctgagtagtagccagtctgctgtgaccacaggctcaggtccgaccctgctgcttggccacagcagtggctgggcaagtgggaaccactatctcttgggagcccccaaaagctgggaaatgctggaggaaccaggcctttcccgcttttgcctggctgcagggttcggctccgcccctgccccccagccctcgtgtgtccacaccgcagtgcctctgcccctcgggggactggacacacatcctgccagaggcgctacgaagctttgcccagatgaagccaggtgggctccgcgttcactcccactctcccgaggggtgctggcctccccagggtttgccttcttacggatttagacgaggttcgaggctcacctatcagggcagctctcaggattgtcattttcctctttgcctgtgggtttaacttttgtatttttttaatcacaagtttgatacaaaatgtttttatcgtactctttggagatgcccattctacttttgaatttagcttttactaattcgcatctggaagctcagcaagtgcacaagccttactttggttaccgtggaaaccactgccgcccctccccgatgtggtgcgctcaataaaaatgctggaattca

SEQ ID NO: 362686 - DNA, 851 bp, Homo sapiens
aagcggaggggcgctccggccagtgattggctggaggtttgttaactattcatgagggggcgggccgagcggggcggcctttgttaagcagcgagggcgcgaccgcgggtactctgctgccggcttctcggagcggcgctgggcgaccagagcagggtcgagatgtcctacatcccgggaccagctttctctcctggacaccgaggattggaaataagggcctggagctgagtagtagccagtctgctgtgaccacaggctcaggtccgaccctgctgcttggccacagcagtggctgggcaagtgggaaccactatctcttgggagcccccaaaagctgggaaatgctggaggaaccaggcctttcccgcttttgcctggctgcagggttcggctccgcccctgccccccagccctcgtgtgtccacaccgcagtgcctctgcccctcgggggactggacacacatcctgccagaggcgctacgaagctttgcccagatgaagccaggtgggctccgcgttcactcccactctcccgaggggtgctggcctccccagggtttgccttcttacggatttagacgaggttcgaggctcacctatcagggcagctctcaggattgtcattttcctctttgcctgtgggtttaacttttgtatttttttaatcacaagtttgatacaaaatgtttttatcgtactctttggagatgcccattctacttttgaatttagcttttactaattcgcatctggaagctcagcaagtgcacaagccttactttggttaccgtggaaaccactgccgcccctccccgatgtggtgcgctcaataaaaatgctggaattca

SEQ ID NO: 362687 - DNA, 886 bp, Homo sapiens
aagcggaggggcgctccggccagtgattggctggaggtttgttaactattcatgagggggcgggccgagcggggcggcctttgttaagcagcgagggcgcgaccgcgggtactctgctgccggcttctcggagcggcgctgggcgaccagagcagggtcgagatgtcctacatcccgggaccagctttctctcctggacaccgaggattggaaataagggcctggagctgagtagtagccagtctgctgtgaccacaggctcaggtccgaccctgctgcttggccacagcagtggctgggcaagtgggaaccactatctcttgggagcccccaaaagctgggaaatgctggaggaaccaggcctttcccgcttttgcctggctgcagggttcggctccgcccctgccccccagccctcgtgtgtccacaccgcagtgcctctgcccctcgggggactggacacacatcctgccagaggcgctacgaagctttgcccagatgaagccaggtgggctccgcgttcactcccactctcccgaggggtgctggcctccccagggtttgccttcttacggatttagacgaggttcgaggctcacctatcagggcagctctcaggattgtcattttcctctttgcctgtgggtttaacttttgtatttttttaatcacaagtttgatacaaaatgtttttatcgtactctttggagatgcccattctacttttgaatttagcttttactaattcgcatctggaagctcagcaagtgcacaagccttactttggttaccgtggaaaccactgccgcccctccccgatgtggtgcgctcaataaaaatgctggaattcaaagcccaaaaaaaaaaaaaggggggggcccaaaat

SEQ ID NO: 362688 - DNA, 1390 bp, Homo sapiens
aagcggaggggcgctccggccagtgattggctggaggtttgttaactattcatgagggggcgggccgagcggggcggcctttgttaagcagcgagggcgcgaccgcgggtactctgctgccggcttctcggagcggcgctgggcgaccagagcagggtcgagatgtcctacatcccgggccagccggtcaccgccgtggtgcaaagagttgaaattcacaagctgcgtcaaggtgagaacttaatcctgggtttcagcattggaggtggaatcgaccaggacccttcccagaatcccttctctgaagacaagacggacaagggtatttatgtcacacgggtgtctgaaggaggccctgctgaaatcgctgggctgcagattggagacaagatcatgcaggtgaacggctgggacatgaccatggtcacacacgaccaggcccgcaagcggctcaccaagcgctcggaggaggtggtgcgtctgctggtgacgcggcagtcgctgcagaaggccgtgcagcagtccatgctgtcctagcagccaccaccatctgcgactcctgcctgccgcctctctgtacagtaacgccacttccacactctgtccccatctggcttctgctgaccgctgggccccagctcagaagggctatagctggtcccagaggcctggcctggccttccttcccttctcccatccctggcctggggcctctgggaccagctttctctcctggacaccgaggattggaaataagggcctggagctgagtagtagccagtctgctgtgaccacaggctcaggtccgaccctgctgcttggccacagcagtggctgggcaagtgggaaccactatctcttgggagcccccaaaagctgggaaatgctggaggaaccaggcctttcccgcttttgcctggctgcagggttcggctccgcccctgccccccagccctcgtgtgtccacaccgcagtgcctctgcccctcgggggactggacacacatcctgccagaggcgctacgaagctttgcccagatgaagccaggtgggctccgcgttcactcccactctcccgaggggtgctggcctccccagggtttgccttcttacggatttagacgaggttcgaggctcacctatcagggcagctctcaggattgtcattttcctctttgcctgtgggtttaacttttgtatttttttaatcacaagtttgatacaaaatgtttttatcgtactctttggagatgcccattctacttttgaatttagcttttactaattcgcatctggaagctcagcaagtgcacaagccttactttggttaccgtggaaaccactgccgcccctccccgatgtggtgcgctcaataaaaatgctggaattca

SEQ ID NO: 362689 - DNA, 1425 bp, Homo sapiens
aagcggaggggcgctccggccagtgattggctggaggtttgttaactattcatgagggggcgggccgagcggggcggcctttgttaagcagcgagggcgcgaccgcgggtactctgctgccggcttctcggagcggcgctgggcgaccagagcagggtcgagatgtcctacatcccgggccagccggtcaccgccgtggtgcaaagagttgaaattcacaagctgcgtcaaggtgagaacttaatcctgggtttcagcattggaggtggaatcgaccaggacccttcccagaatcccttctctgaagacaagacggacaagggtatttatgtcacacgggtgtctgaaggaggccctgctgaaatcgctgggctgcagattggagacaagatcatgcaggtgaacggctgggacatgaccatggtcacacacgaccaggcccgcaagcggctcaccaagcgctcggaggaggtggtgcgtctgctggtgacgcggcagtcgctgcagaaggccgtgcagcagtccatgctgtcctagcagccaccaccatctgcgactcctgcctgccgcctctctgtacagtaacgccacttccacactctgtccccatctggcttctgctgaccgctgggccccagctcagaagggctatagctggtcccagaggcctggcctggccttccttcccttctcccatccctggcctggggcctctgggaccagctttctctcctggacaccgaggattggaaataagggcctggagctgagtagtagccagtctgctgtgaccacaggctcaggtccgaccctgctgcttggccacagcagtggctgggcaagtgggaaccactatctcttgggagcccccaaaagctgggaaatgctggaggaaccaggcctttcccgcttttgcctggctgcagggttcggctccgcccctgccccccagccctcgtgtgtccacaccgcagtgcctctgcccctcgggggactggacacacatcctgccagaggcgctacgaagctttgcccagatgaagccaggtgggctccgcgttcactcccactctcccgaggggtgctggcctccccagggtttgccttcttacggatttagacgaggttcgaggctcacctatcagggcagctctcaggattgtcattttcctctttgcctgtgggtttaacttttgtatttttttaatcacaagtttgatacaaaatgtttttatcgtactctttggagatgcccattctacttttgaatttagcttttactaattcgcatctggaagctcagcaagtgcacaagccttactttggttaccgtggaaaccactgccgcccctccccgatgtggtgcgctcaataaaaatgctggaattcaaagcccaaaaaaaaaaaaaggggggggcccaaaat

SEQ ID NO: 362690 - DNA, 2105 bp, Homo sapiens
aagcggaggggcgctccggccagtgattggctggaggtttgttaactattcatgagggggcgggccgagcggggcggcctttgttaagcagcgagggcgcgaccgcgggtactctgctgccggcttctcggagcggcgctgggcgaccagagcagggtcgagatgtcctacatcccgggccagccggtcaccgccgtggtgcaaagagttgaaattcacaagctgcgtcaaggtgagaacttaatcctgggtttcagcattggaggtggaatcgaccaggacccttcccagaatcccttctctgaagacaagacggacaaggtgagggggtctggggtcctgggaccgctccatggggcacaggggcctgagatggtgggtctctgcttcctgggcctgcatggaaggaacagacttcatctctcaaaccatgctctctaagaaggcatcggaagtgacctagtgagaataaggacgggtggggtgaggaagggctgctcagacagagcccaggaggagcaggaggcggccatcagcagggccggtgcatggtggtgcagcaactctgccccggctctctcagaacagtcctcactgaccatatgtgctgggagaggctgggtgcagggacagagggacggctgagaatgtgccatgctggcttccgctgtgtgataaggggccagtccagtgaccacagggcttgacttgggctgcccctttccagggtatttatgtcacacgggtgtctgaaggaggccctgctgaaatcgctgggctgcagattggagacaagatcatgcaggtaacaggtgtcccaaaggaggagaaataaggtttgggcaagcaggtctgaagcacttgggggtggggagctgccccagcctcccagctgggagagactcactgcagccaattgggaacccatactggcattgccccagaggacgctggctttctctcctgtgtgtctcagccacagtgcttggtgtctcccagccctgggatgttaggctgggggcctacttgaatgacctgggcccccaaagccctctgcttccagatcccagagggcggggagctgaggtgagcctgtgttctctcctggggccaggtgaacggctgggacatgaccatggtcacacacgaccaggcccgcaagcggctcaccaagcgctcggaggaggtggtgcgtctgctggtgacgcggcagtcgctgcagaaggccgtgcagcagtccatgctgtcctagcagccaccaccatctgcgactcctgcctgccgcctctctgtacagtaacgccacttccacactctgtccccatctggcttctgctgaccgctgggccccagctcagaagggctatagctggtcccagaggcctggcctggccttccttcccttctcccatccctggcctggggcctctgggaccagctttctctcctggacaccgaggattggaaataagggcctggagctgagtagtagccagtctgctgtgaccacaggctcaggtccgaccctgctgcttggccacagcagtggctgggcaagtgggaaccactatctcttgggagcccccaaaagctgggaaatgctggaggaaccaggcctttcccgcttttgcctggctgcagggttcggctccgcccctgccccccagccctcgtgtgtccacaccgcagtgcctctgcccctcgggggactggacacacatcctgccagaggcgctacgaagctttgcccagatgaagccaggtgggctccgcgttcactcccactctcccgaggggtgctggcctccccagggtttgccttcttacggatttagacgaggttcgaggctcacctatcagggcagctctcaggattgtcattttcctctttgcctgtgggtttaacttttgtatttttttaatcacaagtttgatacaaaatgtttttatcgtactctttggagatgcccattctacttttgaatttagcttttactaattcgcatctggaagctcagcaagtgcacaagccttactttggttaccgtggaaaccactgccgcccctccccgatgtggtgcgctcaataaaaatgctggaattca

SEQ ID NO: 362691 - DNA, 1512 bp, Homo sapiens
gtgagacgggcttcccacctacagaagccacagcacctggactcttgggccagcaggggcttccaccacatgttgaccaagactagtgcctaagactaacaggggaagtggggacaggttgaggacacagggctgtgtgggtggatcaatgtggccaagttctgagtgccagctcctcagcctcccaggctggtgagcagctggattcctgcaggggcctgggacccagccccttgtcatggctctgaggctgctgctgggaacacccaccagcctaattctccaaccacccacttctctcaactggcttttttctttgccagcaaagagttgaaattcacaagctgcgtcaaggtgagaacttaatcctgggtttcagcattggaggtggaatcgaccaggacccttcccagaatcccttctctgaagacaagacggacaagggtatttatgtcacacgggtgtctgaaggaggccctgctgaaatcgctgggctgcagattggagacaagatcatgcaggtgaacggctgggacatgaccatggtcacacacgaccaggcccgcaagcggctcaccaagcgctcggaggaggtggtgcgtctgctggtgacgcggcagtcgctgcagaaggccgtgcagcagtccatgctgtcctagcagccaccaccatctgcgactcctgcctgccgcctctctgtacagtaacgccacttccacactctgtccccatctggcttctgctgaccgctgggccccagctcagaagggctatagctggtcccagaggcctggcctggccttccttcccttctcccatccctggcctggggcctctgggaccagctttctctcctggacaccgaggattggaaataagggcctggagctgagtagtagccagtctgctgtgaccacaggctcaggtccgaccctgctgcttggccacagcagtggctgggcaagtgggaaccactatctcttgggagcccccaaaagctgggaaatgctggaggaaccaggcctttcccgcttttgcctggctgcagggttcggctccgcccctgccccccagccctcgtgtgtccacaccgcagtgcctctgcccctcgggggactggacacacatcctgccagaggcgctacgaagctttgcccagatgaagccaggtgggctccgcgttcactcccactctcccgaggggtgctggcctccccagggtttgccttcttacggatttagacgaggttcgaggctcacctatcagggcagctctcaggattgtcattttcctctttgcctgtgggtttaacttttgtatttttttaatcacaagtttgatacaaaatgtttttatcgtactctttggagatgcccattctacttttgaatttagcttttactaattcgcatctggaagctcagcaagtgcacaagccttactttggttaccgtggaaaccactgccgcccctccccgatgtggtgcgctcaataaaaatgctggaattca

SEQ ID NO: 362692 - DNA, 1484 bp, Homo sapiens
aagcggaggggcgctccggccagtgattggctggaggtttgttaactattcatgagggggcgggccgagcggggcggcctttgttaagcagcgagggcgcgaccgcgggtactctgctgccggcttctcggagcggcgctgggcgaccagagcagggtcgagatgtcctacatcccgggccagccggtcaccgccgtggtgcaaagagttgaaattcacaagctgcgtcaaggtgagaacttaatcctgggtttcagcattggaggtggaatcgaccaggacccttcccagaatcccttctctgaagacaagacggacaagggtatttatgtcacacgggtgtctgaaggaggccctgctgaaatcgctgggctgcagattggagacaagatcatgcagcgtgaaacgggctggggaaccatggaacccatgggttcaacaccacggaaccaggccccggcaaacgcggcttacacacagcgcgcctcgaagagcagtgtgtggcgctgctcgtgtcgtgtggtagcacgcgcgagatctcgtgtcgacgaaaagcgccgcgcagccacgacagcctccgctggctgctcactagagcagcacaacccaccattgctgacgaacttccgtgaccgtgccgaccatcttactgctacaagataacggcacactttatccaacactcttccacactctgtccccatctggcttctgctgaccgctgggccccagctcagaagggctatagctggtcccagaggcctggcctggccttccttcccttctcccatccctggcctggggcctctgggaccagctttctctcctggacaccgaggattggaaataagggcctggagctgagtagtagccagtctgctgtgaccacaggctcaggtccgaccctgctgcttggccacagcagtggctgggcaagtgggaaccactatctcttgggagcccccaaaagctgggaaatgctggaggaaccaggcctttcccgcttttgcctggctgcagggttcggctccgcccctgccccccagccctcgtgtgtccacaccgcagtgcctctgcccctcgggggactggacacacatcctgccagaggcgctacgaagctttgcccagatgaagccaggtgggctccgcgttcactcccactctcccgaggggtgctggcctccccagggtttgccttcttacggatttagacgaggttcgaggctcacctatcagggcagctctcaggattgtcattttcctctttgcctgtgggtttaacttttgtatttttttaatcacaagtttgatacaaaatgtttttatcgtactctttggagatgcccattctacttttgaatttagcttttactaattcgcatctggaagctcagcaagtgcacaagccttactttggttaccgtggaaaccactgccgcccctccccgatgtggtgcgctcaataaaaatgctggaattca

SEQ ID NO: 362693 - DNA, 1042 bp, Homo sapiens
aagcggaggggcgctccggccagtgattggctggaggtttgttaactattcatgagggggcgggccgagcggggcggcctttgttaagcagcgagggcgcgaccgcgggtactctgctgccggcttctcggagcggcgctgggcgaccagagcagggtcgagatgtcctacatcccgggccagccggtcaccgccgtggtgcaaagagttgaaattcacaagctgcgtcaaggtgagaacttaatcctgggtttcagcattggaggtggaatcgaccaggacccttcccagaatcccttctctgaagacaagacggacaagggtatttatgtcacacgggtgtctgaaggaggccctgctgaaatcgctgggctgcagattggagacaagatcatgcaggtgaacggctgggacatgaccatggtcacacacgaccaggcccgcaagcggctcaccaagcgctcggaggaggtggtgcgtctgctggtgacgcggcagtcgctgcagaaggccgtgcagcagtccatgctgtcctagcagccaccaccatctgcgactcctgcctgccgcctctctgtacagtaacgccacttccacactctgtccccatctggcttctgctgaccgctgggccccagctcagaagggctatagctggtcccagaggcctggcctggccttccttcccttctcccatccctggcctggggcctctgggaccagctttctctcctggacaccgaggattggaaataagggcctggagctgagtagtagccagtctgctgtgaccacaggctcaggtccgaccctgctgcttggccacagcagtggctgggcaagtgggaaccactatctcttgggagcccaagtgggaatgcggggaacagcttccgttgctggtgggtcgtcgcctgccccgcttttggccccgtgccttgcctgggtggcccctgcgagggattgccaaacgggcctcctcccccggggggccggggttgtaagggggcccaccgggggtccggggtgtcacggggtgttc

SEQ ID NO: 362694 - DNA, 5915 bp, Homo sapiens
cggggagctgggccgctttttgtcagctccgagctcggcccctcctccctccctccgcccgccccaccagccggagcccggcccagtgctccagagaaaggccggcctgcagcacccgccaccgtcgccggccgcccgcaacgtccgtccggagctgtgactgatgagaattaaaggccatggatgaagatgggcttgaattacaacaagagccaaactcattttttgatgcaacaggagctgatggtacacacatggatggtgatcaaattgttgtggaagtacaagaaactgtttttgtttcagatgttgtggattcagacataactgtgcataactttgttcctgatgacccagattcagttgtaatccaagatgttattgaggacgttgttatagaagatgttcagtgcccagatatcatggaagaagcagatgtgtctgaaacggtcatcattcctgagcaagtgctggactcagatgtaactgaagaagtttctttagcacattgcacagtcccagatgatgttttagcttctgacattacttcagcctcaatgtctatgccagaacacgtcttgacgggtgattctatacatgtgtctgacgttggacatgttggacatgttggacatgttgaacatgtggttcatgatagtgtagtggaagcagaaattgtcactgatcctctgactaccgacgtagtttcagaagaagtattggtagcagactgtgcctctgaagcagtcatagatgccaatgggatccctgtggaccagcaggatgatgacaaaggcaactgtgaggactaccttatgatttccttggatgatgctggcaaaatagaacacgatggttcttctggaatgaccatggacacagagtcggaaattgatccttgtaaagtggatggcacttgccctgaggtcatcaaggtgtacatttttaaagctgaccctggagaagatgacttaggtggaactgtagacattgtggagagtgagcctgagaatgatcatggagttgaactgcttgatcagaacagcagtattcgtgttcccagggaaaagatggtttatatgactgtcaatgactctcagccagaagatgaagatttaaatgttgctgaaatcgctgacgaagtttatatggaagtgatcgtaggagaggaggatgctgcagcagcagcggcagccgccgccgtgcacgagcagcaaatggatgacaatgaaatcaaaaccttcatgccgattgcatgggcagcagcttatggtaataattctgatggaattgaaaaccggaatggcactgcaagtgccctcttgcacatagatgagtctgctggcctcggcagactggctaaacaaaaaccaaagaaaaggagaagacctgattccaggcagtaccaaacagcaataattattggccctgatggacatcctttgactgtctatccttgcatgatttgtgggaagaagtttaagtcgagaggttttttgaaaaggcacatgaaaaaccatcccgaacaccttgccaagaagaaataccgctgtactgactgtgattacactaccaacaagaagataagtttacacaaccacctggagagccacaagctgaccagcaaggcagagaaggccattgaatgcgatgagtgtgggaagcatttctctcatgcaggggctttgtttactcacaaaatggtgcataaggaaaaaggagccaacaaaatgcacaagtgtaaattctgtgaatacgagacagctgaacaagggttattgaatcgccacctcttggcagtccacagcaagaactttcctcatatttgtgtggagtgtggtaagggttttcgtcacccgtcagagctcaaaaagcacatgagaatccatactggggagaagccgtaccaatgccagtactgcgaatataggtctgcagactcttctaacttgaaaacgcatgtcaaaactaagcatagtaaagagatgccattcaagtgtgacatttgtcttctgactttctcggataccaaagaggtgcagcaacatgctcttatccaccaagaaagcaaaacacaccagtgtttgcattgcgaccacaagagttcgaactcaagtgatttgaaacgacacataatttcagttcacacgaaagactacccccataagtgtgacatgtgtgataaaggctttcacaggccttcagaactcaagaaacacgtggctgcccacaagggcaaaaaaatgcaccagtgtagacattgtgactttaagattgcagatccatttgttctaagtcgccatattctctcagttcacacaaaggatcttccatttaggtgcaagagatgtagaaagggatttaggcaacagagtgagcttaaaaagcatatgaagacacacagtggcaggaaagtgtatcagtgtgagtactgtgagtatagcactacagatgcctcaggctttaaacggcacgttatttccattcacacgaaagactatcctcaccggtgtgagtactgcaagaaaggcttccgaagaccttcagaaaagaaccagcacataatgcgacatcataaagaagttggcctgccctaacaatacttctacagaacgtttgtagagatattggccttgaagcagaaaattcattttaaagccaatcagtctcattcacatacaatactgtatattgatttatgctgtgtacaaatagaattattacttctagttgacttttttttaaatatacattttgctcagtagtgtgttctgaattctattcagtttgtttaataaatagggaaaactggcaacatgctagttacttttaataaagtaatccctgattctataccgaagttttatatcttagaattttatatttatttaaatatttaccttgcttaccttgatggtactcttctaagaccattaacttaaggtaactttatattggtaactctgaaagtattcatgttgactcatttttttccccatacatttctcacaataaaattgtcagagacatctactaatataaatgggagattttacagtcaggtctaattatcataacatggaagtcatttacttgtcttgcttaatattttcagaccacttgacagtgaaagtttccatttgagctgttgcgtccctggctttgctgagtaaagagcagtggctgggttcgtgtttacttttcaaatatacttccttttcggctttctttggattatttacatcttttgtccagcgtagcaaacttttagaaaaccttattgaaaaactgtgcttgctcatgttgtattttgattattctgtctgtgcggcttcatcttggaatggttgtgtgctacaaatgacacttactgaggactgcattttggaatctcctagaggtaactcatggcttataggatcttttgcaactttatgtatgtaaatgtaccctgaattatatatatacacatatatatcatgtacctgtgtgtattgcttattttacatatttatacacacaaccccaagtagtagttgtttaaaatctataatgaaaagtattaaatttacaataacatgaaagatccagggatgcatgagagagcattttgtaagtcatgctcttcagagagactactcaggtgaagaattagaaggaaaataaggacactagtatttttaaagagtaaagatattttcttttaaatatctttggtaattgaaacatagaggttaagatgtttctaggtagaatgttttcatacaatttcacctccatgtctttatgtttttctgaaaagcaaatgagtatccagacatgactcccacagttctctttgagaagcctgagagggaactctgtcttacctagtgagggggatggaaaagaagtgatggctctgtggaccagagaacgggtgctaattatgacttcacactcggcaagttcaggctgatctgttatttctcagttacagttagcaaactttaaaaacttaacactcaagttggctttgattaaaaggtaaagatgtgttttaagtggataaggaaagtctgaggccttatttggaacatcactaagtcttccacaggttttttgtttgtttgtttttttttgttgtttttttttcttaagacggagtcttgctctgttgcccaggctggactgcagtggtgtgatcactgcaacctctgcagctcactgcaacctctgcttcctgggttcaagcaattatctgcctcagcctctcgagtagctgggattacaggcgcccaccaccacgcccggctaattttttgtatttttaatagagatggggtttcaccatcttggccaggctggtcttgaaccctgacctcgtgatccacctgcctcggccttccatagtgctgggtttacaggcgtgagccaccgtgcccagacaccacataggtctgaatcagtgtcatacattcataaaacaaactcggttaattagaacttggttatgttaagacgaatctgggagaacagaaaacagtttttggggtcccttcagttggctattggtccgtatgcatctagcacattgtaggagatttagaaattgtcttcccacccgatagctgccttgtcacctcattatggtgctccatcccctgtgtgcttaggtttttacctttcatctttctctttgccattgatgtttgtattcaagagttatatttttagggttagaaatcaaaatatttggtgtttggcaaacctctgaagtgctagactgatttagtctagttttaaaccaagtgctttaggcaggtgtgaactccagcccaaatgccagtcaaagtcaaggcatgggttttcctagcctatcttataggaaattcctgtaccttcttggcccccataatgtgtttttttttttttttttttaaaaactaacttacaattttgtgatccgtgattcattgccctgcgattcttgaaagctctgtctgtttttttgtgagaacctttaaaatctcccttaatttttattttcccagaaataatgtaaaaacacttaaatgaaagtggaaatgtattaattttaaatcctataaaattaatacagaaaatataaatgattgggtcatttaactatatttttttaaataaactgaaagataaagaacacaacacttcacacattttatatttctcttacatactctggaatcatacacagttctttttaaagcacaacattaaaacctttaaaaggtatttaagggtttggtcaagtgaatatgataaaacatacttgtctgtataaagagaaaatgaaattgtagtcactgttatgtactgacattagttacaacctagttttaattcttaaaacaattttgattagcaaagctaaaaaaaaatggatgtttcagttaaatgttttaaagaggtacagatttttacaaggacataatataagttattgttctgtagaaatatcctattaaatattgtatgtccctccctctgtacactttgtaaagaaagtaaaatacataaaaagaaaatcatatagggatgtgtgacattattgtaattgtgtacttgagaataacgtgcaaaaataaaaatcagaatattttcctgttattgaatgtttagtctatttgataccagtactaagttaatgctttttctcaaggaaaaaaaatgtacagtttttgtaaacctaataaacatcaaaagcagtggattattttcatccccccatttcttaatttctttttcacagcagtggaatgcaaagtgcttgattgctttgaattttgtgactcggatgcaaatactggtaatatttcagttctgtgaatttgcaagtaatatttcagagaagttaagaggtgattggtgagtcctttgatgagcatgtccttgga

SEQ ID NO: 362695 - DNA, 1618 bp, Homo sapiens
gcctgtaatcccagcactttgggaggccaaggtgggaggatcacttgaggtcttgaaccctgacctcgtgatccacctgcctcggccttccatagtgctgggtttacaggcgtgagccaccgtgcccagacaccacataggtctgaatcagtgtcatacattcataaaacaaactcggttaattagaacttggttatgttaagacgaatctgggagaacagaaaacagtttttggggtcccttcagttggctattggtccgtatgcatctagcacattgtaggagatttagaaattgtcttcccacccgatagctgccttgtcacctcattatggtgctccatcccctgtgtgcttaggtttttacctttcatctttctctttgccattgatgtttgtattcaagagttatatttttagggttagaaatcaaaatatttggtgtttggcaaacctctgaagtgctagactgatttagtctagttttaaaccaagtgctttaggcaggtgtgaactccagcccaaatgccagtcaaagtcaaggcatgggttttcctagcctatcttataggaaattcctgtaccttcttggcccccataatgtgtttttttttttttttttttaaaaactaacttacaattttgtgatccgtgattcattgccctgcgattcttgaaagctctgtctgtttttttgtgagaacctttaaaatctcccttaatttttattttcccagaaataatgtaaaaacacttaaatgaaagtggaaatgtattaattttaaatcctataaaattaatacagaaaatataaatgattgggtcatttaactatatttttttaaataaactgaaagataaagaacacaacacttcacacattttatatttctcttacatactctggaatcatacacagttctttttaaagcacaacattaaaacctttaaaaggtatttaagggtttggtcaagtgaatatgataaaacatacttgtctgtataaagagaaaatgaaattgtagtcactgttatgtactgacattagttacaacctagttttaattcttaaaacaattttgattagcaaagctaaaaaaaaatggatgtttcagttaaatgttttaaagaggtacagatttttacaaggacataatataagttattgttctgtagaaatatcctattaaatattgtatgtccctccctctgtacactttgtaaagaaagtaaaatacataaaaagaaaatcatatagggatgtgtgacattattgtaattgtgtacttgagaataacgtgcaaaaataaaaatcagaatattttcctgttattgaatgtttagtctatttgataccagtactaagttaatgctttttctcaaggaaaaaaaatgtacagtttttgtaaacctaataaacatcaaaagcagtggattattttcatccccccatttcttaatttctttttcacagcagtggaatgcaaagtgcttgattgctttgaattttgtgactcggatgcaaatactggtaatatttcagttctgtgaatttgcaagtaatatttcagagaagttaagaggtgattggtgagtcctttgatgagcatgtccttgga

SEQ ID NO: 362696 - DNA, 554 bp, Homo sapiens
tccagcgcagctgcacttgtatttatcctatcagtctccagagcctcctcaacccagttgtctttcctcctcaactgtggtctttagtccctcttttaatttatcctttgatccttgtatgtcctagattcagaggatgatttctaaatttctatagccatagatggagcatattggtggtatattgcaccagaacaaaaagggaagcgtgtgaagggagaaaggaaaaaaaatagaagtaaaagaaacacatgggagagatggaaagaagaacaaatatgagttgaggagagggaggtggagcaaaaaggtaaaacacatataatgaaggaaaatagtatgtttgtcacctgaagttgcattacttaattttttttttttttaagagacttagagacggagtctggctctgtcacccaggctggagtgcagtggcacgatctcggctcactgcaagctctgcctcccgggttcacgccattctcctgcctcagcctcccgagtagctgggactacaggtgcctgccaccacacccggataacacgttcgcgat

SEQ ID NO: 362697 - DNA, 406 bp, Homo sapiens
atgtaaggtttataattctttcttccttggaacatgaaatataagtaatatacttgaaagagactaaactctttggagaaaaatgtgcagtgtttgttcacttaatcttgccacaggcaaacctaggtaatggactaagtggtagattgaagggctattgcgttttagtcttgattgataacacttaatggtatttgtttatctttgagcaagtcacttaatctgccagggcctccgttttcatatgtcataataataatgaaacctctcattacagtttttcagaacacttcccatacattcccatttgatcatcaccacagtcctgtgaggtatgcatggcagatactactgtcctcattttactgatgaggaaactgaaactcagaggttgaatgacttgccc

SEQ ID NO: 362698 - DNA, 367 bp, Homo sapiens
ggtagaggtggaggtggagaaaggacgtttcaagggtgaagcttcttcagtaaacactgggaaagacatagaagaactattaagaagatagaattgttttgctgcgcagtacagcaacagtggatgttcaagattaagattagagtcaagttgtgtgattaagacaggagctgtgactgatgagaattaaaggccatggatgaagatgggcttgaattacaacaagagccaaactcattttttgatgcaacaggtataactacttgaattgttccacttcccatctaccagatttggagttggttgtcatcaatgaattgctagaactctcacattgatcattcacaggttatcttgttatcctgtc

SEQ ID NO: 362699 - DNA, 6136 bp, Homo sapiens
cggggagctgggccgctttttgtcagctccgagctcggcccctcctccctccctccgcccgccccaccagccggagcccggcccagtgctccagagaaaggccggcctgcagcacccgccaccgtcgccggccgcccgcaacgtccgtccggttcttgctatattgccccaggctggtctcgaactcctgggctcaagccgttctcccgcctcccactgcccgcctgtcactgccgtctgttccctgagctgtgctttacgctgggaaagacatagaagaactattaagaagatagaattgttttgctgcgcagtacagcaacagtggatgttcaagattaagattagagtcaagttgtgtgattaagacaggagctgtgactgatgagaattaaaggccatggatgaagatgggcttgaattacaacaagagccaaactcattttttgatgcaacaggagctgatggtacacacatggatggtgatcaaattgttgtggaagtacaagaaactgtttttgtttcagatgttgtggattcagacataactgtgcataactttgttcctgatgacccagattcagttgtaatccaagatgttattgaggacgttgttatagaagatgttcagtgcccagatatcatggaagaagcagatgtgtctgaaacggtcatcattcctgagcaagtgctggactcagatgtaactgaagaagtttctttagcacattgcacagtcccagatgatgttttagcttctgacattacttcagcctcaatgtctatgccagaacacgtcttgacgggtgattctatacatgtgtctgacgttggacatgttggacatgttggacatgttgaacatgtggttcatgatagtgtagtggaagcagaaattgtcactgatcctctgactaccgacgtagtttcagaagaagtattggtagcagactgtgcctctgaagcagtcatagatgccaatgggatccctgtggaccagcaggatgatgacaaaggcaactgtgaggactaccttatgatttccttggatgatgctggcaaaatagaacacgatggttcttctggaatgaccatggacacagagtcggaaattgatccttgtaaagtggatggcacttgccctgaggtcatcaaggtgtacatttttaaagctgaccctggagaagatgacttaggtggaactgtagacattgtggagagtgagcctgagaatgatcatggagttgaactgcttgatcagaacagcagtattcgtgttcccagggaaaagatggtttatatgactgtcaatgactctcagccagaagatgaagatttaaatgttgctgaaatcgctgacgaagtttatatggaagtgatcgtaggagaggaggatgctgcagcagcagcggcagccgccgccgtgcacgagcagcaaatggatgacaatgaaatcaaaaccttcatgccgattgcatgggcagcagcttatggtaataattctgatggaattgaaaaccggaatggcactgcaagtgccctcttgcacatagatgagtctgctggcctcggcagactggctaaacaaaaaccaaagaaaaggagaagacctgattccaggcagtaccaaacagcaataattattggccctgatggacatcctttgactgtctatccttgcatgatttgtgggaagaagtttaagtcgagaggttttttgaaaaggcacatgaaaaaccatcccgaacaccttgccaagaagaaataccgctgtactgactgtgattacactaccaacaagaagataagtttacacaaccacctggagagccacaagctgaccagcaaggcagagaaggccattgaatgcgatgagtgtgggaagcatttctctcatgcaggggctttgtttactcacaaaatggtgcataaggaaaaaggagccaacaaaatgcacaagtgtaaattctgtgaatacgagacagctgaacaagggttattgaatcgccacctcttggcagtccacagcaagaactttcctcatatttgtgtggagtgtggtaagggttttcgtcacccgtcagagctcaaaaagcacatgagaatccatactggggagaagccgtaccaatgccagtactgcgaatataggtctgcagactcttctaacttgaaaacgcatgtcaaaactaagcatagtaaagagatgccattcaagtgtgacatttgtcttctgactttctcggataccaaagaggtgcagcaacatgctcttatccaccaagaaagcaaaacacaccagtgtttgcattgcgaccacaagagttcgaactcaagtgatttgaaacgacacataatttcagttcacacgaaagactacccccataagtgtgacatgtgtgataaaggctttcacaggccttcagaactcaagaaacacgtggctgcccacaagggcaaaaaaatgcaccagtgtagacattgtgactttaagattgcagatccatttgttctaagtcgccatattctctcagttcacacaaaggatcttccatttaggtgcaagagatgtagaaagggatttaggcaacagagtgagcttaaaaagcatatgaagacacacagtggcaggaaagtgtatcagtgtgagtactgtgagtatagcactacagatgcctcaggctttaaacggcacgttatttccattcacacgaaagactatcctcaccggtgtgagtactgcaagaaaggcttccgaagaccttcagaaaagaaccagcacataatgcgacatcataaagaagttggcctgccctaacaatacttctacagaacgtttgtagagatattggccttgaagcagaaaattcattttaaagccaatcagtctcattcacatacaatactgtatattgatttatgctgtgtacaaatagaattattacttctagttgacttttttttaaatatacattttgctcagtagtgtgttctgaattctattcagtttgtttaataaatagggaaaactggcaacatgctagttacttttaataaagtaatccctgattctataccgaagttttatatcttagaattttatatttatttaaatatttaccttgcttaccttgatggtactcttctaagaccattaacttaaggtaactttatattggtaactctgaaagtattcatgttgactcatttttttccccatacatttctcacaataaaattgtcagagacatctactaatataaatgggagattttacagtcaggtctaattatcataacatggaagtcatttacttgtcttgcttaatattttcagaccacttgacagtgaaagtttccatttgagctgttgcgtccctggctttgctgagtaaagagcagtggctgggttcgtgtttacttttcaaatatacttccttttcggctttctttggattatttacatcttttgtccagcgtagcaaacttttagaaaaccttattgaaaaactgtgcttgctcatgttgtattttgattattctgtctgtgcggcttcatcttggaatggttgtgtgctacaaatgacacttactgaggactgcattttggaatctcctagaggtaactcatggcttataggatcttttgcaactttatgtatgtaaatgtaccctgaattatatatatacacatatatatcatgtacctgtgtgtattgcttattttacatatttatacacacaaccccaagtagtagttgtttaaaatctataatgaaaagtattaaatttacaataacatgaaagatccagggatgcatgagagagcattttgtaagtcatgctcttcagagagactactcaggtgaagaattagaaggaaaataaggacactagtatttttaaagagtaaagatattttcttttaaatatctttggtaattgaaacatagaggttaagatgtttctaggtagaatgttttcatacaatttcacctccatgtctttatgtttttctgaaaagcaaatgagtatccagacatgactcccacagttctctttgagaagcctgagagggaactctgtcttacctagtgagggggatggaaaagaagtgatggctctgtggaccagagaacgggtgctaattatgacttcacactcggcaagttcaggctgatctgttatttctcagttacagttagcaaactttaaaaacttaacactcaagttggctttgattaaaaggtaaagatgtgttttaagtggataaggaaagtctgaggccttatttggaacatcactaagtcttccacaggttttttgtttgtttgtttttttttgttgtttttttttcttaagacggagtcttgctctgttgcccaggctggactgcagtggtgtgatcactgcaacctctgcagctcactgcaacctctgcttcctgggttcaagcaattatctgcctcagcctctcgagtagctgggattacaggcgcccaccaccacgcccggctaattttttgtatttttaatagagatggggtttcaccatcttggccaggctggtcttgaaccctgacctcgtgatccacctgcctcggccttccatagtgctgggtttacaggcgtgagccaccgtgcccagacaccacataggtctgaatcagtgtcatacattcataaaacaaactcggttaattagaacttggttatgttaagacgaatctgggagaacagaaaacagtttttggggtcccttcagttggctattggtccgtatgcatctagcacattgtaggagatttagaaattgtcttcccacccgatagctgccttgtcacctcattatggtgctccatcccctgtgtgcttaggtttttacctttcatctttctctttgccattgatgtttgtattcaagagttatatttttagggttagaaatcaaaatatttggtgtttggcaaacctctgaagtgctagactgatttagtctagttttaaaccaagtgctttaggcaggtgtgaactccagcccaaatgccagtcaaagtcaaggcatgggttttcctagcctatcttataggaaattcctgtaccttcttggcccccataatgtgtttttttttttttttttttaaaaactaacttacaattttgtgatccgtgattcattgccctgcgattcttgaaagctctgtctgtttttttgtgagaacctttaaaatctcccttaatttttattttcccagaaataatgtaaaaacacttaaatgaaagtggaaatgtattaattttaaatcctataaaattaatacagaaaatataaatgattgggtcatttaactatatttttttaaataaactgaaagataaagaacacaacacttcacacattttatatttctcttacatactctggaatcatacacagttctttttaaagcacaacattaaaacctttaaaaggtatttaagggtttggtcaagtgaatatgataaaacatacttgtctgtataaagagaaaatgaaattgtagtcactgttatgtactgacattagttacaacctagttttaattcttaaaacaattttgattagcaaagctaaaaaaaaatggatgtttcagttaaatgttttaaagaggtacagatttttacaaggacataatataagttattgttctgtagaaatatcctattaaatattgtatgtccctccctctgtacactttgtaaagaaagtaaaatacataaaaagaaaatcatatagggatgtgtgacattattgtaattgtgtacttgagaataacgtgcaaaaataaaaatcagaatattttcctgttattgaatgtttagtctatttgataccagtactaagttaatgctttttctcaaggaaaaaaaatgtacagtttttgtaaacctaataaacatcaaaagcagtggattattttcatccccccatttcttaatttctttttcacagcagtggaatgcaaagtgcttgattgctttgaattttgtgactcggatgcaaatactggtaatatttcagttctgtgaatttgcaagtaatatttcagagaagttaagaggtgattggtgagtcctttgatgagcatgtccttgga

SEQ ID NO: 362700 - DNA, 5241 bp, Homo sapiens
cggggagctgggccgctttttgtcagctccgagctcggcccctcctccctccctccgcccgccccaccagccggagcccggcccagtgctccagagaaaggccggcctgcagcacccgccaccgtcgccggccgcccgcaacgtccgtccgtggatgatgctggcaaaatagaacacgatggttcttctggaatgaccatggacacagagtcggaaattgatccttgtaaagtggatggcacttgccctgaggtcatcaaggtgtacatttttaaagctgaccctggagaagatgacttaggtggaactgtagacattgtggagagtgagcctgagaatgatcatggagttgaactgcttgatcagaacagcagtattcgtgttcccagggaaaagatggtttatatgactgtcaatgactctcagccagaagatgaagatttaaatgttgctgaaatcgctgacgaagtttatatggaagtgatcgtaggagaggaggatgctgcagcagcagcggcagccgccgccgtgcacgagcagcaaatggatgacaatgaaatcaaaaccttcatgccgattgcatgggcagcagcttatggtaataattctgatggaattgaaaaccggaatggcactgcaagtgccctcttgcacatagatgagtctgctggcctcggcagactggctaaacaaaaaccaaagaaaaggagaagacctgattccaggcagtaccaaacagcaataattattggccctgatggacatcctttgactgtctatccttgcatgatttgtgggaagaagtttaagtcgagaggttttttgaaaaggcacatgaaaaaccatcccgaacaccttgccaagaagaaataccgctgtactgactgtgattacactaccaacaagaagataagtttacacaaccacctggagagccacaagctgaccagcaaggcagagaaggccattgaatgcgatgagtgtgggaagcatttctctcatgcaggggctttgtttactcacaaaatggtgcataaggaaaaaggagccaacaaaatgcacaagtgtaaattctgtgaatacgagacagctgaacaagggttattgaatcgccacctcttggcagtccacagcaagaactttcctcatatttgtgtggagtgtggtaagggttttcgtcacccgtcagagctcaaaaagcacatgagaatccatactggggagaagccgtaccaatgccagtactgcgaatataggtctgcagactcttctaacttgaaaacgcatgtcaaaactaagcatagtaaagagatgccattcaagtgtgacatttgtcttctgactttctcggataccaaagaggtgcagcaacatgctcttatccaccaagaaagcaaaacacaccagtgtttgcattgcgaccacaagagttcgaactcaagtgatttgaaacgacacataatttcagttcacacgaaagactacccccataagtgtgacatgtgtgataaaggctttcacaggccttcagaactcaagaaacacgtggctgcccacaagggcaaaaaaatgcaccagtgtagacattgtgactttaagattgcagatccatttgttctaagtcgccatattctctcagttcacacaaaggatcttccatttaggtgcaagagatgtagaaagggatttaggcaacagagtgagcttaaaaagcatatgaagacacacagtggcaggaaagtgtatcagtgtgagtactgtgagtatagcactacagatgcctcaggctttaaacggcacgttatttccattcacacgaaagactatcctcaccggtgtgagtactgcaagaaaggcttccgaagaccttcagaaaagaaccagcacataatgcgacatcataaagaagttggcctgccctaacaatacttctacagaacgtttgtagagatattggccttgaagcagaaaattcattttaaagccaatcagtctcattcacatacaatactgtatattgatttatgctgtgtacaaatagaattattacttctagttgacttttttttaaatatacattttgctcagtagtgtgttctgaattctattcagtttgtttaataaatagggaaaactggcaacatgctagttacttttaataaagtaatccctgattctataccgaagttttatatcttagaattttatatttatttaaatatttaccttgcttaccttgatggtactcttctaagaccattaacttaaggtaactttatattggtaactctgaaagtattcatgttgactcatttttttccccatacatttctcacaataaaattgtcagagacatctactaatataaatgggagattttacagtcaggtctaattatcataacatggaagtcatttacttgtcttgcttaatattttcagaccacttgacagtgaaagtttccatttgagctgttgcgtccctggctttgctgagtaaagagcagtggctgggttcgtgtttacttttcaaatatacttccttttcggctttctttggattatttacatcttttgtccagcgtagcaaacttttagaaaaccttattgaaaaactgtgcttgctcatgttgtattttgattattctgtctgtgcggcttcatcttggaatggttgtgtgctacaaatgacacttactgaggactgcattttggaatctcctagaggtaactcatggcttataggatcttttgcaactttatgtatgtaaatgtaccctgaattatatatatacacatatatatcatgtacctgtgtgtattgcttattttacatatttatacacacaaccccaagtagtagttgtttaaaatctataatgaaaagtattaaatttacaataacatgaaagatccagggatgcatgagagagcattttgtaagtcatgctcttcagagagactactcaggtgaagaattagaaggaaaataaggacactagtatttttaaagagtaaagatattttcttttaaatatctttggtaattgaaacatagaggttaagatgtttctaggtagaatgttttcatacaatttcacctccatgtctttatgtttttctgaaaagcaaatgagtatccagacatgactcccacagttctctttgagaagcctgagagggaactctgtcttacctagtgagggggatggaaaagaagtgatggctctgtggaccagagaacgggtgctaattatgacttcacactcggcaagttcaggctgatctgttatttctcagttacagttagcaaactttaaaaacttaacactcaagttggctttgattaaaaggtaaagatgtgttttaagtggataaggaaagtctgaggccttatttggaacatcactaagtcttccacaggttttttgtttgtttgtttttttttgttgtttttttttcttaagacggagtcttgctctgttgcccaggctggactgcagtggtgtgatcactgcaacctctgcagctcactgcaacctctgcttcctgggttcaagcaattatctgcctcagcctctcgagtagctgggattacaggcgcccaccaccacgcccggctaattttttgtatttttaatagagatggggtttcaccatcttggccaggctggtcttgaaccctgacctcgtgatccacctgcctcggccttccatagtgctgggtttacaggcgtgagccaccgtgcccagacaccacataggtctgaatcagtgtcatacattcataaaacaaactcggttaattagaacttggttatgttaagacgaatctgggagaacagaaaacagtttttggggtcccttcagttggctattggtccgtatgcatctagcacattgtaggagatttagaaattgtcttcccacccgatagctgccttgtcacctcattatggtgctccatcccctgtgtgcttaggtttttacctttcatctttctctttgccattgatgtttgtattcaagagttatatttttagggttagaaatcaaaatatttggtgtttggcaaacctctgaagtgctagactgatttagtctagttttaaaccaagtgctttaggcaggtgtgaactccagcccaaatgccagtcaaagtcaaggcatgggttttcctagcctatcttataggaaattcctgtaccttcttggcccccataatgtgtttttttttttttttttttaaaaactaacttacaattttgtgatccgtgattcattgccctgcgattcttgaaagctctgtctgtttttttgtgagaacctttaaaatctcccttaatttttattttcccagaaataatgtaaaaacacttaaatgaaagtggaaatgtattaattttaaatcctataaaattaatacagaaaatataaatgattgggtcatttaactatatttttttaaataaactgaaagataaagaacacaacacttcacacattttatatttctcttacatactctggaatcatacacagttctttttaaagcacaacattaaaacctttaaaaggtatttaagggtttggtcaagtgaatatgataaaacatacttgtctgtataaagagaaaatgaaattgtagtcactgttatgtactgacattagttacaacctagttttaattcttaaaacaattttgattagcaaagctaaaaaaaaatggatgtttcagttaaatgttttaaagaggtacagatttttacaaggacataatataagttattgttctgtagaaatatcctattaaatattgtatgtccctccctctgtacactttgtaaagaaagtaaaatacataaaaagaaaatcatatagggatgtgtgacattattgtaattgtgtacttgagaataacgtgcaaaaataaaaatcagaatattttcctgttattgaatgtttagtctatttgataccagtactaagttaatgctttttctcaaggaaaaaaaatgtacagtttttgtaaacctaataaacatcaaaagcagtggattattttcatccccccatttcttaatttctttttcacagcagtggaatgcaaagtgcttgattgctttgaattttgtgactcggatgcaaatactggtaatatttcagttctgtgaatttgcaagtaatatttcagagaagttaagaggtgattggtgagtcctttgatgagcatgtccttgga

SEQ ID NO: 362701 - DNA, 409 bp, Homo sapiens
gctgactagaagcaagttgagaaggcgggctgtggttgttgaggtgttaagggtaaacataaacttagaagaaccaggtgcttttatattttgacagctgggaaagacatagaagaactattaagaagatagaattgttttgctgcgcagtacagcaacagtggatgttcaagattaagattagagtcaagttgtgtgattaagacaggtaagtgtgtagtttagtttcaattagaaatggttaaatataaaattatttttgcctgaaagggtagaccttgaaactttggaaaactgactggtggaacaccttcgaacccaaccaccctggatgaataaggtgttagtttttaatttctgtgtatttttcagatagatgcagatttctttttttaaaaaaacatgctca

SEQ ID NO: 362702 - DNA, 467 bp, Homo sapiens
cggggagctgggccgctttttgtcagctccgagctcggcccctcctccctccctccgcccgccccaccagccggagcccggcccagtgctccagagaaaggccggcctgcagcacccgccaccgtcgccggccgcccgcaacgtccgtccgccccgtgactggctgcagtttccgctgcgtttcagctgagctgccgcaggcggccaccgccgccgcccggacgccgggaccgtttcaccctcagcgcccctggccctgcgccttcccccgcgcctgtagccacccgagggcagtcggggcaggtggcattccggacacctgggcttaccagggcatacgggaccccaggaaatgttatttttgcttaagtcaaatcatatgtggctgctaaggtgctttcgatgcagttgtttttccaacaatctttgccgccccgagtatctgaataaaggaagaaaaataaaga

SEQ ID NO: 362703 - DNA, 6264 bp, Homo sapiens
cggggagctgggccgctttttgtcagctccgagctcggcccctcctccctccctccgcccgccccaccagccggagcccggcccagtgctccagagaaaggccggcctgcagcacccgccaccgtcgccggccgcccgcaacgtccgtccggttcttgctatattgccccaggctggtctcgaactcctgggctcaagccgttctcccgcctcccactgcccgcctgtcactgccgtctgttccctgagctgtgctttacgctgggaaagacatagaagaactattaagaagatagaattgttttgctgcgcagtacagcaacagtggatgttcaagattaagattagagtcaagttgtgtgattaagacagacagtcttcctctgtcatccaggctggaatgcagtgcagtggtgcaaatttggctcactgcagcctctgccttctgtgttcaagtgattcttcttctgcctcagcctctcgagtagctgggattacaggagctgtgactgatgagaattaaaggccatggatgaagatgggcttgaattacaacaagagccaaactcattttttgatgcaacaggagctgatggtacacacatggatggtgatcaaattgttgtggaagtacaagaaactgtttttgtttcagatgttgtggattcagacataactgtgcataactttgttcctgatgacccagattcagttgtaatccaagatgttattgaggacgttgttatagaagatgttcagtgcccagatatcatggaagaagcagatgtgtctgaaacggtcatcattcctgagcaagtgctggactcagatgtaactgaagaagtttctttagcacattgcacagtcccagatgatgttttagcttctgacattacttcagcctcaatgtctatgccagaacacgtcttgacgggtgattctatacatgtgtctgacgttggacatgttggacatgttggacatgttgaacatgtggttcatgatagtgtagtggaagcagaaattgtcactgatcctctgactaccgacgtagtttcagaagaagtattggtagcagactgtgcctctgaagcagtcatagatgccaatgggatccctgtggaccagcaggatgatgacaaaggcaactgtgaggactaccttatgatttccttggatgatgctggcaaaatagaacacgatggttcttctggaatgaccatggacacagagtcggaaattgatccttgtaaagtggatggcacttgccctgaggtcatcaaggtgtacatttttaaagctgaccctggagaagatgacttaggtggaactgtagacattgtggagagtgagcctgagaatgatcatggagttgaactgcttgatcagaacagcagtattcgtgttcccagggaaaagatggtttatatgactgtcaatgactctcagccagaagatgaagatttaaatgttgctgaaatcgctgacgaagtttatatggaagtgatcgtaggagaggaggatgctgcagcagcagcggcagccgccgccgtgcacgagcagcaaatggatgacaatgaaatcaaaaccttcatgccgattgcatgggcagcagcttatggtaataattctgatggaattgaaaaccggaatggcactgcaagtgccctcttgcacatagatgagtctgctggcctcggcagactggctaaacaaaaaccaaagaaaaggagaagacctgattccaggcagtaccaaacagcaataattattggccctgatggacatcctttgactgtctatccttgcatgatttgtgggaagaagtttaagtcgagaggttttttgaaaaggcacatgaaaaaccatcccgaacaccttgccaagaagaaataccgctgtactgactgtgattacactaccaacaagaagataagtttacacaaccacctggagagccacaagctgaccagcaaggcagagaaggccattgaatgcgatgagtgtgggaagcatttctctcatgcaggggctttgtttactcacaaaatggtgcataaggaaaaaggagccaacaaaatgcacaagtgtaaattctgtgaatacgagacagctgaacaagggttattgaatcgccacctcttggcagtccacagcaagaactttcctcatatttgtgtggagtgtggtaagggttttcgtcacccgtcagagctcaaaaagcacatgagaatccatactggggagaagccgtaccaatgccagtactgcgaatataggtctgcagactcttctaacttgaaaacgcatgtcaaaactaagcatagtaaagagatgccattcaagtgtgacatttgtcttctgactttctcggataccaaagaggtgcagcaacatgctcttatccaccaagaaagcaaaacacaccagtgtttgcattgcgaccacaagagttcgaactcaagtgatttgaaacgacacataatttcagttcacacgaaagactacccccataagtgtgacatgtgtgataaaggctttcacaggccttcagaactcaagaaacacgtggctgcccacaagggcaaaaaaatgcaccagtgtagacattgtgactttaagattgcagatccatttgttctaagtcgccatattctctcagttcacacaaaggatcttccatttaggtgcaagagatgtagaaagggatttaggcaacagagtgagcttaaaaagcatatgaagacacacagtggcaggaaagtgtatcagtgtgagtactgtgagtatagcactacagatgcctcaggctttaaacggcacgttatttccattcacacgaaagactatcctcaccggtgtgagtactgcaagaaaggcttccgaagaccttcagaaaagaaccagcacataatgcgacatcataaagaagttggcctgccctaacaatacttctacagaacgtttgtagagatattggccttgaagcagaaaattcattttaaagccaatcagtctcattcacatacaatactgtatattgatttatgctgtgtacaaatagaattattacttctagttgacttttttttaaatatacattttgctcagtagtgtgttctgaattctattcagtttgtttaataaatagggaaaactggcaacatgctagttacttttaataaagtaatccctgattctataccgaagttttatatcttagaattttatatttatttaaatatttaccttgcttaccttgatggtactcttctaagaccattaacttaaggtaactttatattggtaactctgaaagtattcatgttgactcatttttttccccatacatttctcacaataaaattgtcagagacatctactaatataaatgggagattttacagtcaggtctaattatcataacatggaagtcatttacttgtcttgcttaatattttcagaccacttgacagtgaaagtttccatttgagctgttgcgtccctggctttgctgagtaaagagcagtggctgggttcgtgtttacttttcaaatatacttccttttcggctttctttggattatttacatcttttgtccagcgtagcaaacttttagaaaaccttattgaaaaactgtgcttgctcatgttgtattttgattattctgtctgtgcggcttcatcttggaatggttgtgtgctacaaatgacacttactgaggactgcattttggaatctcctagaggtaactcatggcttataggatcttttgcaactttatgtatgtaaatgtaccctgaattatatatatacacatatatatcatgtacctgtgtgtattgcttattttacatatttatacacacaaccccaagtagtagttgtttaaaatctataatgaaaagtattaaatttacaataacatgaaagatccagggatgcatgagagagcattttgtaagtcatgctcttcagagagactactcaggtgaagaattagaaggaaaataaggacactagtatttttaaagagtaaagatattttcttttaaatatctttggtaattgaaacatagaggttaagatgtttctaggtagaatgttttcatacaatttcacctccatgtctttatgtttttctgaaaagcaaatgagtatccagacatgactcccacagttctctttgagaagcctgagagggaactctgtcttacctagtgagggggatggaaaagaagtgatggctctgtggaccagagaacgggtgctaattatgacttcacactcggcaagttcaggctgatctgttatttctcagttacagttagcaaactttaaaaacttaacactcaagttggctttgattaaaaggtaaagatgtgttttaagtggataaggaaagtctgaggccttatttggaacatcactaagtcttccacaggttttttgtttgtttgtttttttttgttgtttttttttcttaagacggagtcttgctctgttgcccaggctggactgcagtggtgtgatcactgcaacctctgcagctcactgcaacctctgcttcctgggttcaagcaattatctgcctcagcctctcgagtagctgggattacaggcgcccaccaccacgcccggctaattttttgtatttttaatagagatggggtttcaccatcttggccaggctggtcttgaaccctgacctcgtgatccacctgcctcggccttccatagtgctgggtttacaggcgtgagccaccgtgcccagacaccacataggtctgaatcagtgtcatacattcataaaacaaactcggttaattagaacttggttatgttaagacgaatctgggagaacagaaaacagtttttggggtcccttcagttggctattggtccgtatgcatctagcacattgtaggagatttagaaattgtcttcccacccgatagctgccttgtcacctcattatggtgctccatcccctgtgtgcttaggtttttacctttcatctttctctttgccattgatgtttgtattcaagagttatatttttagggttagaaatcaaaatatttggtgtttggcaaacctctgaagtgctagactgatttagtctagttttaaaccaagtgctttaggcaggtgtgaactccagcccaaatgccagtcaaagtcaaggcatgggttttcctagcctatcttataggaaattcctgtaccttcttggcccccataatgtgtttttttttttttttttttaaaaactaacttacaattttgtgatccgtgattcattgccctgcgattcttgaaagctctgtctgtttttttgtgagaacctttaaaatctcccttaatttttattttcccagaaataatgtaaaaacacttaaatgaaagtggaaatgtattaattttaaatcctataaaattaatacagaaaatataaatgattgggtcatttaactatatttttttaaataaactgaaagataaagaacacaacacttcacacattttatatttctcttacatactctggaatcatacacagttctttttaaagcacaacattaaaacctttaaaaggtatttaagggtttggtcaagtgaatatgataaaacatacttgtctgtataaagagaaaatgaaattgtagtcactgttatgtactgacattagttacaacctagttttaattcttaaaacaattttgattagcaaagctaaaaaaaaatggatgtttcagttaaatgttttaaagaggtacagatttttacaaggacataatataagttattgttctgtagaaatatcctattaaatattgtatgtccctccctctgtacactttgtaaagaaagtaaaatacataaaaagaaaatcatatagggatgtgtgacattattgtaattgtgtacttgagaataacgtgcaaaaataaaaatcagaatattttcctgttattgaatgtttagtctatttgataccagtactaagttaatgctttttctcaaggaaaaaaaatgtacagtttttgtaaacctaataaacatcaaaagcagtggattattttcatccccccatttcttaatttctttttcacagcagtggaatgcaaagtgcttgattgctttgaattttgtgactcggatgcaaatactggtaatatttcagttctgtgaatttgcaagtaatatttcagagaagttaagaggtgattggtgagtcctttgatgagcatgtccttgga

SEQ ID NO: 362704 - DNA, 6153 bp, Homo sapiens
cggggagctgggccgctttttgtcagctccgagctcggcccctcctccctccctccgcccgccccaccagccggagcccggcccagtgctccagagaaaggccggcctgcagcacccgccaccgtcgccggccgcccgcaacgtccgtccggagctgtgactgatgagaattaaaggccatggatgaagatgggcttgaattacaacaagagccaaactcattttttgatgcaacagtttttcagaacacttcccatacattcccatttgatcatcaccacagtcctgtgagattcagaggatgatttctaaatttctatagccatagatggagcatattggtggtatattgcaccagaacaaaaagggaagcgtgtgaagggagaaaggaaaaaaaatagaagtaaaagaaacacatgggagagatggaaagaagaacaaatatgagttgaggagagggaggtggagcaaaaaggagctgatggtacacacatggatggtgatcaaattgttgtggaagtacaagaaactgtttttgtttcagatgttgtggattcagacataactgtgcataactttgttcctgatgacccagattcagttgtaatccaagatgttattgaggacgttgttatagaagatgttcagtgcccagatatcatggaagaagcagatgtgtctgaaacggtcatcattcctgagcaagtgctggactcagatgtaactgaagaagtttctttagcacattgcacagtcccagatgatgttttagcttctgacattacttcagcctcaatgtctatgccagaacacgtcttgacgggtgattctatacatgtgtctgacgttggacatgttggacatgttggacatgttgaacatgtggttcatgatagtgtagtggaagcagaaattgtcactgatcctctgactaccgacgtagtttcagaagaagtattggtagcagactgtgcctctgaagcagtcatagatgccaatgggatccctgtggaccagcaggatgatgacaaaggcaactgtgaggactaccttatgatttccttggatgatgctggcaaaatagaacacgatggttcttctggaatgaccatggacacagagtcggaaattgatccttgtaaagtggatggcacttgccctgaggtcatcaaggtgtacatttttaaagctgaccctggagaagatgacttaggtggaactgtagacattgtggagagtgagcctgagaatgatcatggagttgaactgcttgatcagaacagcagtattcgtgttcccagggaaaagatggtttatatgactgtcaatgactctcagccagaagatgaagatttaaatgttgctgaaatcgctgacgaagtttatatggaagtgatcgtaggagaggaggatgctgcagcagcagcggcagccgccgccgtgcacgagcagcaaatggatgacaatgaaatcaaaaccttcatgccgattgcatgggcagcagcttatggtaataattctgatggaattgaaaaccggaatggcactgcaagtgccctcttgcacatagatgagtctgctggcctcggcagactggctaaacaaaaaccaaagaaaaggagaagacctgattccaggcagtaccaaacagcaataattattggccctgatggacatcctttgactgtctatccttgcatgatttgtgggaagaagtttaagtcgagaggttttttgaaaaggcacatgaaaaaccatcccgaacaccttgccaagaagaaataccgctgtactgactgtgattacactaccaacaagaagataagtttacacaaccacctggagagccacaagctgaccagcaaggcagagaaggccattgaatgcgatgagtgtgggaagcatttctctcatgcaggggctttgtttactcacaaaatggtgcataaggaaaaaggagccaacaaaatgcacaagtgtaaattctgtgaatacgagacagctgaacaagggttattgaatcgccacctcttggcagtccacagcaagaactttcctcatatttgtgtggagtgtggtaagggttttcgtcacccgtcagagctcaaaaagcacatgagaatccatactggggagaagccgtaccaatgccagtactgcgaatataggtctgcagactcttctaacttgaaaacgcatgtcaaaactaagcatagtaaagagatgccattcaagtgtgacatttgtcttctgactttctcggataccaaagaggtgcagcaacatgctcttatccaccaagaaagcaaaacacaccagtgtttgcattgcgaccacaagagttcgaactcaagtgatttgaaacgacacataatttcagttcacacgaaagactacccccataagtgtgacatgtgtgataaaggctttcacaggccttcagaactcaagaaacacgtggctgcccacaagggcaaaaaaatgcaccagtgtagacattgtgactttaagattgcagatccatttgttctaagtcgccatattctctcagttcacacaaaggatcttccatttaggtgcaagagatgtagaaagggatttaggcaacagagtgagcttaaaaagcatatgaagacacacagtggcaggaaagtgtatcagtgtgagtactgtgagtatagcactacagatgcctcaggctttaaacggcacgttatttccattcacacgaaagactatcctcaccggtgtgagtactgcaagaaaggcttccgaagaccttcagaaaagaaccagcacataatgcgacatcataaagaagttggcctgccctaacaatacttctacagaacgtttgtagagatattggccttgaagcagaaaattcattttaaagccaatcagtctcattcacatacaatactgtatattgatttatgctgtgtacaaatagaattattacttctagttgacttttttttaaatatacattttgctcagtagtgtgttctgaattctattcagtttgtttaataaatagggaaaactggcaacatgctagttacttttaataaagtaatccctgattctataccgaagttttatatcttagaattttatatttatttaaatatttaccttgcttaccttgatggtactcttctaagaccattaacttaaggtaactttatattggtaactctgaaagtattcatgttgactcatttttttccccatacatttctcacaataaaattgtcagagacatctactaatataaatgggagattttacagtcaggtctaattatcataacatggaagtcatttacttgtcttgcttaatattttcagaccacttgacagtgaaagtttccatttgagctgttgcgtccctggctttgctgagtaaagagcagtggctgggttcgtgtttacttttcaaatatacttccttttcggctttctttggattatttacatcttttgtccagcgtagcaaacttttagaaaaccttattgaaaaactgtgcttgctcatgttgtattttgattattctgtctgtgcggcttcatcttggaatggttgtgtgctacaaatgacacttactgaggactgcattttggaatctcctagaggtaactcatggcttataggatcttttgcaactttatgtatgtaaatgtaccctgaattatatatatacacatatatatcatgtacctgtgtgtattgcttattttacatatttatacacacaaccccaagtagtagttgtttaaaatctataatgaaaagtattaaatttacaataacatgaaagatccagggatgcatgagagagcattttgtaagtcatgctcttcagagagactactcaggtgaagaattagaaggaaaataaggacactagtatttttaaagagtaaagatattttcttttaaatatctttggtaattgaaacatagaggttaagatgtttctaggtagaatgttttcatacaatttcacctccatgtctttatgtttttctgaaaagcaaatgagtatccagacatgactcccacagttctctttgagaagcctgagagggaactctgtcttacctagtgagggggatggaaaagaagtgatggctctgtggaccagagaacgggtgctaattatgacttcacactcggcaagttcaggctgatctgttatttctcagttacagttagcaaactttaaaaacttaacactcaagttggctttgattaaaaggtaaagatgtgttttaagtggataaggaaagtctgaggccttatttggaacatcactaagtcttccacaggttttttgtttgtttgtttttttttgttgtttttttttcttaagacggagtcttgctctgttgcccaggctggactgcagtggtgtgatcactgcaacctctgcagctcactgcaacctctgcttcctgggttcaagcaattatctgcctcagcctctcgagtagctgggattacaggcgcccaccaccacgcccggctaattttttgtatttttaatagagatggggtttcaccatcttggccaggctggtcttgaaccctgacctcgtgatccacctgcctcggccttccatagtgctgggtttacaggcgtgagccaccgtgcccagacaccacataggtctgaatcagtgtcatacattcataaaacaaactcggttaattagaacttggttatgttaagacgaatctgggagaacagaaaacagtttttggggtcccttcagttggctattggtccgtatgcatctagcacattgtaggagatttagaaattgtcttcccacccgatagctgccttgtcacctcattatggtgctccatcccctgtgtgcttaggtttttacctttcatctttctctttgccattgatgtttgtattcaagagttatatttttagggttagaaatcaaaatatttggtgtttggcaaacctctgaagtgctagactgatttagtctagttttaaaccaagtgctttaggcaggtgtgaactccagcccaaatgccagtcaaagtcaaggcatgggttttcctagcctatcttataggaaattcctgtaccttcttggcccccataatgtgtttttttttttttttttttaaaaactaacttacaattttgtgatccgtgattcattgccctgcgattcttgaaagctctgtctgtttttttgtgagaacctttaaaatctcccttaatttttattttcccagaaataatgtaaaaacacttaaatgaaagtggaaatgtattaattttaaatcctataaaattaatacagaaaatataaatgattgggtcatttaactatatttttttaaataaactgaaagataaagaacacaacacttcacacattttatatttctcttacatactctggaatcatacacagttctttttaaagcacaacattaaaacctttaaaaggtatttaagggtttggtcaagtgaatatgataaaacatacttgtctgtataaagagaaaatgaaattgtagtcactgttatgtactgacattagttacaacctagttttaattcttaaaacaattttgattagcaaagctaaaaaaaaatggatgtttcagttaaatgttttaaagaggtacagatttttacaaggacataatataagttattgttctgtagaaatatcctattaaatattgtatgtccctccctctgtacactttgtaaagaaagtaaaatacataaaaagaaaatcatatagggatgtgtgacattattgtaattgtgtacttgagaataacgtgcaaaaataaaaatcagaatattttcctgttattgaatgtttagtctatttgataccagtactaagttaatgctttttctcaaggaaaaaaaatgtacagtttttgtaaacctaataaacatcaaaagcagtggattattttcatccccccatttcttaatttctttttcacagcagtggaatgcaaagtgcttgattgctttgaattttgtgactcggatgcaaatactggtaatatttcagttctgtgaatttgcaagtaatatttcagagaagttaagaggtgattggtgagtcctttgatgagcatgtccttgga

SEQ ID NO: 362705 - DNA, 6026 bp, Homo sapiens
cggggagctgggccgctttttgtcagctccgagctcggcccctcctccctccctccgcccgccccaccagccggagcccggcccagtgctccagagaaaggccggcctgcagcacccgccaccgtcgccggccgcccgcaacgtccgtccgctgggaaagacatagaagaactattaagaagatagaattgttttgctgcgcagtacagcaacagtggatgttcaagattaagattagagtcaagttgtgtgattaagacaggagctgtgactgatgagaattaaaggccatggatgaagatgggcttgaattacaacaagagccaaactcattttttgatgcaacaggagctgatggtacacacatggatggtgatcaaattgttgtggaagtacaagaaactgtttttgtttcagatgttgtggattcagacataactgtgcataactttgttcctgatgacccagattcagttgtaatccaagatgttattgaggacgttgttatagaagatgttcagtgcccagatatcatggaagaagcagatgtgtctgaaacggtcatcattcctgagcaagtgctggactcagatgtaactgaagaagtttctttagcacattgcacagtcccagatgatgttttagcttctgacattacttcagcctcaatgtctatgccagaacacgtcttgacgggtgattctatacatgtgtctgacgttggacatgttggacatgttggacatgttgaacatgtggttcatgatagtgtagtggaagcagaaattgtcactgatcctctgactaccgacgtagtttcagaagaagtattggtagcagactgtgcctctgaagcagtcatagatgccaatgggatccctgtggaccagcaggatgatgacaaaggcaactgtgaggactaccttatgatttccttggatgatgctggcaaaatagaacacgatggttcttctggaatgaccatggacacagagtcggaaattgatccttgtaaagtggatggcacttgccctgaggtcatcaaggtgtacatttttaaagctgaccctggagaagatgacttaggtggaactgtagacattgtggagagtgagcctgagaatgatcatggagttgaactgcttgatcagaacagcagtattcgtgttcccagggaaaagatggtttatatgactgtcaatgactctcagccagaagatgaagatttaaatgttgctgaaatcgctgacgaagtttatatggaagtgatcgtaggagaggaggatgctgcagcagcagcggcagccgccgccgtgcacgagcagcaaatggatgacaatgaaatcaaaaccttcatgccgattgcatgggcagcagcttatggtaataattctgatggaattgaaaaccggaatggcactgcaagtgccctcttgcacatagatgagtctgctggcctcggcagactggctaaacaaaaaccaaagaaaaggagaagacctgattccaggcagtaccaaacagcaataattattggccctgatggacatcctttgactgtctatccttgcatgatttgtgggaagaagtttaagtcgagaggttttttgaaaaggcacatgaaaaaccatcccgaacaccttgccaagaagaaataccgctgtactgactgtgattacactaccaacaagaagataagtttacacaaccacctggagagccacaagctgaccagcaaggcagagaaggccattgaatgcgatgagtgtgggaagcatttctctcatgcaggggctttgtttactcacaaaatggtgcataaggaaaaaggagccaacaaaatgcacaagtgtaaattctgtgaatacgagacagctgaacaagggttattgaatcgccacctcttggcagtccacagcaagaactttcctcatatttgtgtggagtgtggtaagggttttcgtcacccgtcagagctcaaaaagcacatgagaatccatactggggagaagccgtaccaatgccagtactgcgaatataggtctgcagactcttctaacttgaaaacgcatgtcaaaactaagcatagtaaagagatgccattcaagtgtgacatttgtcttctgactttctcggataccaaagaggtgcagcaacatgctcttatccaccaagaaagcaaaacacaccagtgtttgcattgcgaccacaagagttcgaactcaagtgatttgaaacgacacataatttcagttcacacgaaagactacccccataagtgtgacatgtgtgataaaggctttcacaggccttcagaactcaagaaacacgtggctgcccacaagggcaaaaaaatgcaccagtgtagacattgtgactttaagattgcagatccatttgttctaagtcgccatattctctcagttcacacaaaggatcttccatttaggtgcaagagatgtagaaagggatttaggcaacagagtgagcttaaaaagcatatgaagacacacagtggcaggaaagtgtatcagtgtgagtactgtgagtatagcactacagatgcctcaggctttaaacggcacgttatttccattcacacgaaagactatcctcaccggtgtgagtactgcaagaaaggcttccgaagaccttcagaaaagaaccagcacataatgcgacatcataaagaagttggcctgccctaacaatacttctacagaacgtttgtagagatattggccttgaagcagaaaattcattttaaagccaatcagtctcattcacatacaatactgtatattgatttatgctgtgtacaaatagaattattacttctagttgacttttttttaaatatacattttgctcagtagtgtgttctgaattctattcagtttgtttaataaatagggaaaactggcaacatgctagttacttttaataaagtaatccctgattctataccgaagttttatatcttagaattttatatttatttaaatatttaccttgcttaccttgatggtactcttctaagaccattaacttaaggtaactttatattggtaactctgaaagtattcatgttgactcatttttttccccatacatttctcacaataaaattgtcagagacatctactaatataaatgggagattttacagtcaggtctaattatcataacatggaagtcatttacttgtcttgcttaatattttcagaccacttgacagtgaaagtttccatttgagctgttgcgtccctggctttgctgagtaaagagcagtggctgggttcgtgtttacttttcaaatatacttccttttcggctttctttggattatttacatcttttgtccagcgtagcaaacttttagaaaaccttattgaaaaactgtgcttgctcatgttgtattttgattattctgtctgtgcggcttcatcttggaatggttgtgtgctacaaatgacacttactgaggactgcattttggaatctcctagaggtaactcatggcttataggatcttttgcaactttatgtatgtaaatgtaccctgaattatatatatacacatatatatcatgtacctgtgtgtattgcttattttacatatttatacacacaaccccaagtagtagttgtttaaaatctataatgaaaagtattaaatttacaataacatgaaagatccagggatgcatgagagagcattttgtaagtcatgctcttcagagagactactcaggtgaagaattagaaggaaaataaggacactagtatttttaaagagtaaagatattttcttttaaatatctttggtaattgaaacatagaggttaagatgtttctaggtagaatgttttcatacaatttcacctccatgtctttatgtttttctgaaaagcaaatgagtatccagacatgactcccacagttctctttgagaagcctgagagggaactctgtcttacctagtgagggggatggaaaagaagtgatggctctgtggaccagagaacgggtgctaattatgacttcacactcggcaagttcaggctgatctgttatttctcagttacagttagcaaactttaaaaacttaacactcaagttggctttgattaaaaggtaaagatgtgttttaagtggataaggaaagtctgaggccttatttggaacatcactaagtcttccacaggttttttgtttgtttgtttttttttgttgtttttttttcttaagacggagtcttgctctgttgcccaggctggactgcagtggtgtgatcactgcaacctctgcagctcactgcaacctctgcttcctgggttcaagcaattatctgcctcagcctctcgagtagctgggattacaggcgcccaccaccacgcccggctaattttttgtatttttaatagagatggggtttcaccatcttggccaggctggtcttgaaccctgacctcgtgatccacctgcctcggccttccatagtgctgggtttacaggcgtgagccaccgtgcccagacaccacataggtctgaatcagtgtcatacattcataaaacaaactcggttaattagaacttggttatgttaagacgaatctgggagaacagaaaacagtttttggggtcccttcagttggctattggtccgtatgcatctagcacattgtaggagatttagaaattgtcttcccacccgatagctgccttgtcacctcattatggtgctccatcccctgtgtgcttaggtttttacctttcatctttctctttgccattgatgtttgtattcaagagttatatttttagggttagaaatcaaaatatttggtgtttggcaaacctctgaagtgctagactgatttagtctagttttaaaccaagtgctttaggcaggtgtgaactccagcccaaatgccagtcaaagtcaaggcatgggttttcctagcctatcttataggaaattcctgtaccttcttggcccccataatgtgtttttttttttttttttttaaaaactaacttacaattttgtgatccgtgattcattgccctgcgattcttgaaagctctgtctgtttttttgtgagaacctttaaaatctcccttaatttttattttcccagaaataatgtaaaaacacttaaatgaaagtggaaatgtattaattttaaatcctataaaattaatacagaaaatataaatgattgggtcatttaactatatttttttaaataaactgaaagataaagaacacaacacttcacacattttatatttctcttacatactctggaatcatacacagttctttttaaagcacaacattaaaacctttaaaaggtatttaagggtttggtcaagtgaatatgataaaacatacttgtctgtataaagagaaaatgaaattgtagtcactgttatgtactgacattagttacaacctagttttaattcttaaaacaattttgattagcaaagctaaaaaaaaatggatgtttcagttaaatgttttaaagaggtacagatttttacaaggacataatataagttattgttctgtagaaatatcctattaaatattgtatgtccctccctctgtacactttgtaaagaaagtaaaatacataaaaagaaaatcatatagggatgtgtgacattattgtaattgtgtacttgagaataacgtgcaaaaataaaaatcagaatattttcctgttattgaatgtttagtctatttgataccagtactaagttaatgctttttctcaaggaaaaaaaatgtacagtttttgtaaacctaataaacatcaaaagcagtggattattttcatccccccatttcttaatttctttttcacagcagtggaatgcaaagtgcttgattgctttgaattttgtgactcggatgcaaatactggtaatatttcagttctgtgaatttgcaagtaatatttcagagaagttaagaggtgattggtgagtcctttgatgagcatgtccttgga

SEQ ID NO: 362706 - DNA, 5988 bp, Homo sapiens
tccagcgcagctgcacttgtatttatcctatcagtctccagagcctcctcaacccagttgtctttcctcctcaactgtggtctttagtccctcttttaatttatcctttgatccttgtatgtcctagattcagaggatgatttctaaatttctatagccatagatggagcatattggtggtatattgcaccagaacaaaaagggaagcgtgtgaagggagaaaggaaaaaaaatagaagtaaaagaaacacatgggagagatggaaagaagaacaaatatgagttgaggagagggaggtggagcaaaaaggagctgatggtacacacatggatggtgatcaaattgttgtggaagtacaagaaactgtttttgtttcagatgttgtggattcagacataactgtgcataactttgttcctgatgacccagattcagttgtaatccaagatgttattgaggacgttgttatagaagatgttcagtgcccagatatcatggaagaagcagatgtgtctgaaacggtcatcattcctgagcaagtgctggactcagatgtaactgaagaagtttctttagcacattgcacagtcccagatgatgttttagcttctgacattacttcagcctcaatgtctatgccagaacacgtcttgacgggtgattctatacatgtgtctgacgttggacatgttggacatgttggacatgttgaacatgtggttcatgatagtgtagtggaagcagaaattgtcactgatcctctgactaccgacgtagtttcagaagaagtattggtagcagactgtgcctctgaagcagtcatagatgccaatgggatccctgtggaccagcaggatgatgacaaaggcaactgtgaggactaccttatgatttccttggatgatgctggcaaaatagaacacgatggttcttctggaatgaccatggacacagagtcggaaattgatccttgtaaagtggatggcacttgccctgaggtcatcaaggtgtacatttttaaagctgaccctggagaagatgacttaggtggaactgtagacattgtggagagtgagcctgagaatgatcatggagttgaactgcttgatcagaacagcagtattcgtgttcccagggaaaagatggtttatatgactgtcaatgactctcagccagaagatgaagatttaaatgttgctgaaatcgctgacgaagtttatatggaagtgatcgtaggagaggaggatgctgcagcagcagcggcagccgccgccgtgcacgagcagcaaatggatgacaatgaaatcaaaaccttcatgccgattgcatgggcagcagcttatggtaataattctgatggaattgaaaaccggaatggcactgcaagtgccctcttgcacatagatgagtctgctggcctcggcagactggctaaacaaaaaccaaagaaaaggagaagacctgattccaggcagtaccaaacagcaataattattggccctgatggacatcctttgactgtctatccttgcatgatttgtgggaagaagtttaagtcgagaggttttttgaaaaggcacatgaaaaaccatcccgaacaccttgccaagaagaaataccgctgtactgactgtgattacactaccaacaagaagataagtttacacaaccacctggagagccacaagctgaccagcaaggcagagaaggccattgaatgcgatgagtgtgggaagcatttctctcatgcaggggctttgtttactcacaaaatggtgcataaggaaaaaggagccaacaaaatgcacaagtgtaaattctgtgaatacgagacagctgaacaagggttattgaatcgccacctcttggcagtccacagcaagaactttcctcatatttgtgtggagtgtggtaagggttttcgtcacccgtcagagctcaaaaagcacatgagaatccatactggggagaagccgtaccaatgccagtactgcgaatataggtctgcagactcttctaacttgaaaacgcatgtcaaaactaagcatagtaaagagatgccattcaagtgtgacatttgtcttctgactttctcggataccaaagaggtgcagcaacatgctcttatccaccaagaaagcaaaacacaccagtgtttgcattgcgaccacaagagttcgaactcaagtgatttgaaacgacacataatttcagttcacacgaaagactacccccataagtgtgacatgtgtgataaaggctttcacaggccttcagaactcaagaaacacgtggctgcccacaagggcaaaaaaatgcaccagtgtagacattgtgactttaagattgcagatccatttgttctaagtcgccatattctctcagttcacacaaaggatcttccatttaggtgcaagagatgtagaaagggatttaggcaacagagtgagcttaaaaagcatatgaagacacacagtggcaggaaagtgtatcagtgtgagtactgtgagtatagcactacagatgcctcaggctttaaacggcacgttatttccattcacacgaaagactatcctcaccggtgtgagtactgcaagaaaggcttccgaagaccttcagaaaagaaccagcacataatgcgacatcataaagaagttggcctgccctaacaatacttctacagaacgtttgtagagatattggccttgaagcagaaaattcattttaaagccaatcagtctcattcacatacaatactgtatattgatttatgctgtgtacaaatagaattattacttctagttgacttttttttaaatatacattttgctcagtagtgtgttctgaattctattcagtttgtttaataaatagggaaaactggcaacatgctagttacttttaataaagtaatccctgattctataccgaagttttatatcttagaattttatatttatttaaatatttaccttgcttaccttgatggtactcttctaagaccattaacttaaggtaactttatattggtaactctgaaagtattcatgttgactcatttttttccccatacatttctcacaataaaattgtcagagacatctactaatataaatgggagattttacagtcaggtctaattatcataacatggaagtcatttacttgtcttgcttaatattttcagaccacttgacagtgaaagtttccatttgagctgttgcgtccctggctttgctgagtaaagagcagtggctgggttcgtgtttacttttcaaatatacttccttttcggctttctttggattatttacatcttttgtccagcgtagcaaacttttagaaaaccttattgaaaaactgtgcttgctcatgttgtattttgattattctgtctgtgcggcttcatcttggaatggttgtgtgctacaaatgacacttactgaggactgcattttggaatctcctagaggtaactcatggcttataggatcttttgcaactttatgtatgtaaatgtaccctgaattatatatatacacatatatatcatgtacctgtgtgtattgcttattttacatatttatacacacaaccccaagtagtagttgtttaaaatctataatgaaaagtattaaatttacaataacatgaaagatccagggatgcatgagagagcattttgtaagtcatgctcttcagagagactactcaggtgaagaattagaaggaaaataaggacactagtatttttaaagagtaaagatattttcttttaaatatctttggtaattgaaacatagaggttaagatgtttctaggtagaatgttttcatacaatttcacctccatgtctttatgtttttctgaaaagcaaatgagtatccagacatgactcccacagttctctttgagaagcctgagagggaactctgtcttacctagtgagggggatggaaaagaagtgatggctctgtggaccagagaacgggtgctaattatgacttcacactcggcaagttcaggctgatctgttatttctcagttacagttagcaaactttaaaaacttaacactcaagttggctttgattaaaaggtaaagatgtgttttaagtggataaggaaagtctgaggccttatttggaacatcactaagtcttccacaggttttttgtttgtttgtttttttttgttgtttttttttcttaagacggagtcttgctctgttgcccaggctggactgcagtggtgtgatcactgcaacctctgcagctcactgcaacctctgcttcctgggttcaagcaattatctgcctcagcctctcgagtagctgggattacaggcgcccaccaccacgcccggctaattttttgtatttttaatagagatggggtttcaccatcttggccaggctggtcttgaaccctgacctcgtgatccacctgcctcggccttccatagtgctgggtttacaggcgtgagccaccgtgcccagacaccacataggtctgaatcagtgtcatacattcataaaacaaactcggttaattagaacttggttatgttaagacgaatctgggagaacagaaaacagtttttggggtcccttcagttggctattggtccgtatgcatctagcacattgtaggagatttagaaattgtcttcccacccgatagctgccttgtcacctcattatggtgctccatcccctgtgtgcttaggtttttacctttcatctttctctttgccattgatgtttgtattcaagagttatatttttagggttagaaatcaaaatatttggtgtttggcaaacctctgaagtgctagactgatttagtctagttttaaaccaagtgctttaggcaggtgtgaactccagcccaaatgccagtcaaagtcaaggcatgggttttcctagcctatcttataggaaattcctgtaccttcttggcccccataatgtgtttttttttttttttttttaaaaactaacttacaattttgtgatccgtgattcattgccctgcgattcttgaaagctctgtctgtttttttgtgagaacctttaaaatctcccttaatttttattttcccagaaataatgtaaaaacacttaaatgaaagtggaaatgtattaattttaaatcctataaaattaatacagaaaatataaatgattgggtcatttaactatatttttttaaataaactgaaagataaagaacacaacacttcacacattttatatttctcttacatactctggaatcatacacagttctttttaaagcacaacattaaaacctttaaaaggtatttaagggtttggtcaagtgaatatgataaaacatacttgtctgtataaagagaaaatgaaattgtagtcactgttatgtactgacattagttacaacctagttttaattcttaaaacaattttgattagcaaagctaaaaaaaaatggatgtttcagttaaatgttttaaagaggtacagatttttacaaggacataatataagttattgttctgtagaaatatcctattaaatattgtatgtccctccctctgtacactttgtaaagaaagtaaaatacataaaaagaaaatcatatagggatgtgtgacattattgtaattgtgtacttgagaataacgtgcaaaaataaaaatcagaatattttcctgttattgaatgtttagtctatttgataccagtactaagttaatgctttttctcaaggaaaaaaaatgtacagtttttgtaaacctaataaacatcaaaagcagtggattattttcatccccccatttcttaatttctttttcacagcagtggaatgcaaagtgcttgattgctttgaattttgtgactcggatgcaaatactggtaatatttcagttctgtgaatttgcaagtaatatttcagagaagttaagaggtgattggtgagtcctttgatgagcatgtccttgga

SEQ ID NO: 362707 - DNA, 327 bp, Homo sapiens
cagctgaattctcagcagccacattggagccagggatggcacagtgcaggaccttgagaatgtccttatcctgtagcacaaaggattagctgccacttcccaacagattggctacttggtcatggtggtttgcagccagatgatgatgtagccattaagagtgagtgccattgtacgattcctgatactagtgttgagacatgaaattttcctgctctgtaagcaaacaatattgaacataaaaagtgacacataatactctagaagcttaaatgttgtcccaatcacttttctctacatttcagcatgattgcctgtatatatttt

SEQ ID NO: 362708 - DNA, 398 bp, Homo sapiens
gaagaataatatgtgaaaatagcagagtaataaataagaatacatttgtgaacctatgttatgtttcagacactatactaggcactttgtaagttgtttaattttcacaacaactgtacgagacaagttaaagataaggaaacaggctcatggagaacaaattcctttcccagagttagaaagcctctgattcaataccaggaccatcttgttccaaagcctttttctactacactatacctccctaagatttattcagaatttgtttttattttaaaatgaggtgggtgcagtggcacactcctgtaatcccagcaactcagtaggctgaggcaggaggatttcttgggcccaggagttcatgaccagcctgggcaacaaagaaagaccctgtttcc

SEQ ID NO: 362709 - DNA, 731 bp, Homo sapiens
aagaaaaaaggagaaaaaaaaacaggggtgtgggcgccaggactgaagaatgaggtgtgtgtgtgttggggagtgtagttgtggggagggttctctttcttaagtgcccttcaaaacccgccccacttttggagttttttggtgatatggcagggctgggcctgatgggagaggcacccagcctgagcgctgtttttgttggctttgagtcgttaggagtttgttccattcaactaatataaaagccaaatttgtgagcctcctctctgacgctgggcctgtggaagccgttggatatttttgaacaggacttggattcgttttgtttccttcccccttttctttccctactcatttgtcctgtcttcttcactcactcttggaaaagtcccaacagagatgaagacgtggaaaaaaaaatcggggtcggggtgtgctggtggggagagggcagagatccggtgaggaatggcttccaccccctggcccattcccctgcaggctggaagatgagaagtgatgtctaaaagtatctttgctggtgtgagaactccagtttccaacacatattatttccctcaactatttggaatattttagaattttaattccaaaggattagtttgaatacaagtatgccacataactcagttttcgccatcttccatttcttaacagtgtaaattaaaagctaataatcataataataaagtgcatttaattatctttga

SEQ ID NO: 362710 - DNA, 1659 bp, Homo sapiens
aagaaaaaaggagaaaaaaaaacaggggtgtgggcgccaggactgaagaatgaggtgtgtgtgtgttggggagtgtagttgtggggagggttctctttcttaagtgcccttcaaaacccgccccacttttggagttttttggtgatatggcagggctgggcctgatgggagaggcacccagcctgagcgctgtttttgttggctttgagtcgttaggagtttgttccattcaactaatataaaagccaaatttgtgagcctcctctctgacgctgggcctgtggaagccgttggatatttttgaacaggacttggattcgttttgtttccttcccccttttctttccctactcatttgtcctgtcttcttcactcactcttggaaaagtcccaacagagatgaagacgtggaaaaaaaaatcggggtcggggtgtgctggtggggagagggcagagatccggtgaggaatggcttccaccccctggcccattcccctgcaggctggaagatctttctcctgtctggcttctcttcttttcaattcgctgcaccaagtgcttccagtggcccaaaaatgctttttgaagtgtgttttgaaacagcccccaccaacatacaccccaccaggagtactgatcctgcctcccttcatgtctaggggaagcattcgcctttgagcacttgtttgcaaatctggggagtttgagacctcctagcatctcttcccttctttccctgcagtctattcactcccgcagccaaaaaatctctggcgttcaggttagcagtttctgggttggtttgtgtgggtttttgttgttgtttggggcttatttttttcaaaaagtgataaagacgggtgggttggagggaggggactgatgggctggtgggctttttagttttcctttgagaaaaagactggtttatttaaaacttgtccagaaaaaaatgaaaaaaaaaaaaaaggtggtatctttgctttagaagaagtctctggataggccctttgtggctgtgggggtgggttgagtgtttacattacattctatatcacaagattgataggatgtttaaagcagatgtttcttatcttcccctgagcccctacaaataaagtcaagacttttctttttttgagacggagtcttgctctgtcgcccaggctggagtgcagtggtgcgatcttggctcactgcaacctccactgcagcgtttctcctgcctcagcctcccaagtagctgggactacaggcgcacgccaccactccttgctaatttttgtatttttagtagacacagggtttcaccatattggccaggctggtctcgaactcctgacctcgttatctgcctgcctcggcctcctaaagtgctgggattacaggagtgagccacagtgcctggcctgtcaagacttctcttaagttaacttcctgagaagtgatgtctaaaagtatctttgctggtgtgagaactccagtttccaacacatattatttccctcaactatttggaatattttagaattttaattccaaaggattagtttgaatacaagtatgccacataactcagttttcgccatcttccatttcttaacagtgtaaattaaaagctaataatcataataataaagtgcatttaattatctttga

SEQ ID NO: 362711 - DNA, 1270 bp, Homo sapiens
aagaaaaaaggagaaaaaaaaacaggggtgtgggcgccaggactgaagaatgaggtgtgtgtgtgttggggagtgtagttgtggggagggttctctttcttaagtgcccttcaaaacccgccccacttttggagttttttggtgatatggcagggctgggcctgatgggagaggcacccagcctgagcgctgtttttgttggctttgagtcgttaggagtttgttccattcaactaatataaaagccaaatttgtgagcctcctctctgacgctgggcctgtggaagccgttggatatttttgaacaggacttggattcgttttgtttccttcccccttttctttccctgcagtctattcactcccgcagccaaaaaatctctggcgttcaggttagcagtttctgggttggtttgtgtgggtttttgttgttgtttggggcttatttttttcaaaaagtgataaagacgggtgggttggagggaggggactgatgggctggtgggctttttagttttcctttgagaaaaagactggtttatttaaaacttgtccagaaaaaaatgaaaaaaaaaaaaaaggtggtatctttgctttagaagaagtctctggataggccctttgtggctgtgggggtgggttgagtgtttacattacattctatatcacaagattgataggatgtttaaagcagatgtttcttatcttcccctgagcccctacaaataaagtcaagacttttctttttttgagacggagtcttgctctgtcgcccaggctggagtgcagtggtgcgatcttggctcactgcaacctccactgcagcgtttctcctgcctcagcctcccaagtagctgggactacaggcgcacgccaccactccttgctaatttttgtatttttagtagacacagggtttcaccatattggccaggctggtctcgaactcctgacctcgttatctgcctgcctcggcctcctaaagtgctgggattacaggagtgagccacagtgcctggcctgtcaagacttctcttaagttaacttcctgagaagtgatgtctaaaagtatctttgctggtgtgagaactccagtttccaacacatattatttccctcaactatttggaatattttagaattttaattccaaaggattagtttgaatacaagtatgccacataactcagttttcgccatcttccatttcttaacagtgtaaattaaaagctaataatcataataataaagtgcatttaattatctttga

SEQ ID NO: 362712 - DNA, 884 bp, Homo sapiens
atggccctgatttccgaatccggctccgtaacccggtagccctccgggttaccccgatggtatcgatccttttttttttgttttaaattatgcagtctgtggcattctgttataacagcatgaaatagacaaaggctccattttcaagagcaagcccttttgtagtttctgagctaattatgactgcaaaggaagttctataggtagcctcagatctaccacctagtaaatctgctactacccagacctagaatctaggattctagatcaagtgctgggcaacatgatacctctgcaacttggcacctccctatatccctccagttggtttggcccatcaggactaatattacccctcatatcctagtctctcttgtaggcagaagccttgcctaaaccctaagctgcttagctcacattctgtcttgttttttttttttttttttttttttttaggagggggttcaaatataaaatatacggaaaagaaatataatgaacctccatgtacccaacacccggattaaacagttatctcaattttgccagacttgtttcatctacttcaatctccctaaacatttacatttgtacaggaaaaactggataaatacctaattctccaccctatctcccattttaagtcatttttcagaataatgagttagtgactagtaacctccactgtagtgaccaatagttttttttcctgaatatcgtaatgagctcatagattattgtttgcatttgagcccattgtagtcactattaattgttttagatgctcatattgtctcaggttaataagtatctcttcaagttgactcccatggccttttgacgtgatcctgttggacttggatggcttccttgctttctggcaa

SEQ ID NO: 362713 - DNA, 451 bp, Homo sapiens
atggccctgatttccgaatccggctccgtaacccggtagccctccgggttaccccgatggtatcgatccttttttttttgttttaaattatgcagtctgtggcattctgttataacagcatgaaatagacaaaggctccattttcaagagcaagcccttttgtagtttctgagctaattatgactgcaaaggaagttctataggtagcctcagatctaccacctagtaaatctgctactacccagacctagaatctaggattctagatcaagtgctgggcaacatgatacctctgcaacttggcacctggctaattttttggaatttttagtagagacggtgtttcaccttgttggccaggctggtcttgaactcctgacctcaggtgatctgcttgccttgacctcccaaagttcagggattacaggcgtgaggcaccatgcccagccag

SEQ ID NO: 362714 - DNA, 560 bp, Homo sapiens
cccagtacatgtgcctgtagatgactgtttattttgtgaatctagggttctgcttcttcaccaggaagaagtgacatctgagtggctgtgctgggttactcatgcagtttgtcttgcctccgaatggtggtagatgttgttactgagtggtcgtgggcatcggggtgagggacctgtgttctgcctcaggaataccagcccaagaggagcttcagtccttcactgcatgaggtgttgtgttttccctgaaagaagaaataagtctgcaaaattccacagtccgtagttctatcctgtggcctctgcgaaaaggaaccttggttctaaatgcctttgtttaacattatttcctagttgccatgtggaacttcctgtgcatttgggtgagaacagctgcaaatcctgaagagccttgtggaggaatcttttcctcttatgtgaagaaaaataaacaatatttttttttggtttggtttggttttgctttgtttttcagacaggatttctgtctcccaggctggaatatagtggtaccatcaccgctcactgcaacctcaacc

SEQ ID NO: 362715 - DNA, 365 bp, Homo sapiens
ggcggccgctgccattgcccggagatggccggcagagccgccgagacgccgaagagcccgccgcccgcgcgaggtgaggcggcccggcccaggacgacggcccgacgggcgggaggggcagccgaactgtggtcgtggtcgctttctggcgctccggggcctgcccctggtcagcctgcagcgtcggcccgtgccccgtgcgccagggcctacagggttggagagcaggccgggcgatggctgctcgggttcccggcgtccgagtctggactggcctcggaacgtgctgtcgtgctggatagcccgtctccaggcccgcttgggcctggtggacgtggtcggttgccctgcctgcttgctgttca

SEQ ID NO: 362716 - DNA, 279 bp, Homo sapiens
ggcggccgctgccattgcccggagatggccggcagagccgccgagacgccgaagagcccgccgcccgcgcgagttgccatgtggaacttcctgtgcatttgggtgagaacagctgcaaatcctgaagagccttgtggaggaatcttttcctcttatgtgaagaaaaataaacaatatttttttttggtttggtttggttttgctttgtttttcagacaggatttctgtctcccaggctggaatatagtggtaccatcaccgctcactgcaacctcaacc

SEQ ID NO: 362717 - DNA, 1783 bp, Homo sapiens
ggcggccgctgccattgcccggagatggccggcagagccgccgagacgccgaagagcccgccgcccgcgcgaggtgtagacggggcactgccttcagagcaggtcctgccagcctcgctggagaggatgccctcgtgtccgtgatgggctgtgggacaagcaaggtccttcccgagccacccaaggatgtccagctggatctggtcaagaaggtggagcccttcagtggcactaagagtgacgtgtacaagcacttcatcacagaggtggacagtgttggccctgtcaaagccgggttcccagcagcaagtcagtatgcacacccctgccccggtcccccgactgctggccacacggagcctccctcagaaccaccacgcagggccagggtagctaagtacagggccaagtttgacccacgtgttacagctaagtatgacatcaaggccctaattggccgaggcagcttcagccgagtggtacgtgtagagcaccgggcaacccggcagccgtatgccatcaagatgattgagaccaagtaccgggaggggcgggaggtgtgtgagtcggagctgcgtgtgctgcgtcgggtgcgtcatgccaacatcatccagctggtggaggtgttcgagacacaggagcgggtgtacatggtgatggagctggccactggtggagagctctttgaccgcatcattgccaagggctccttcaccgagcgtgacgccacgcgggtgctgcagatggtgctggatggcgtccggtatctgcatgcactgggcatcacacaccgagacctcaaacctgagaatctgctctactaccatccgggcactgactccaagatcatcatcaccgacttcggcctggccagtgctcgcaagaagggtgatgactgcttgatgaagaccacctgtggcacgcctgagtacattgccccagaagtcctggtccgcaagccatacaccaactcagtggacatgtgggcgctgggcgtcattgcctacatcctactcagtggcaccatgccgtttgaggatgacaaccgtacccggctgtaccggcagatcctcaggggcaagtacagttactctggggagccctggcctagtgtgtccaacctggccaaggacttcattgaccgcctgctgacagtggaccctggagcccgtatgactgcactgcaggccctgaggcacccgtgggtggtgagcatggctgcctcttcatccatgaagaacctgcaccgctccatatcccagaacctccttaaacgtgcctcctcgcgctgccagagcaccaaatctgcccagtccacgcgttccagccgctccacacgctccaataagtcacgccgtgtgcgggaacgggagctgcgggagctcaacctgcgctaccagcagcaatacaatggctgagccgcctggctgtgcacacatgcagcacgacccagcctggccacacactgtggtgccatctgggtccgatgccctctctggagataggcctatgtggcccacagtaggtgaagaatgtctggctccagccctttctctgtgccttcagcagcccctgtcctcaccatgggcctggtcctgagggcaggacagggggtttggagatgtgggcctttgatagacccacttgggccttcatgccatggcctgtggatggagaatgtgcagttatttattatgcgtattcagtttgtaaacgtatcctctgtattcagtaaacaggctgcctctccagggagggctgccattcattccaacaaaaaaag

SEQ ID NO: 362718 - DNA, 3461 bp, Homo sapiens
ggcggccgctgccattgcccggagatggccggcagagccgccgagacgccgaagagcccgccgcccgcgcgaggtgtagacggggcactgccttcagagcaggtcctgccagcctcgctggagaggatgccctcgtgtccgtgatgggctgtgggacaagcaaggtccttcccgagccacccaaggatgtccagctggatctggtcaagaaggtggagcccttcagtggcactaagagtgacgtgtacaagcacttcatcacagaggtggacagtgttggccctgtcaaagccgggttcccagcagcaagtcagtatgcacacccctgccccggtcccccgactgctggccacacggagcctccctcagaaccaccacgcagggccagggtagctaagtacagggccaagtttgacccacgtgttacagctaagtatgacatcaaggccctaattggccgaggcagcttcagccgagtggtacgtgtagagcaccgggcaacccggcagccgtatgccatcaagatgattgagaccaagtaccgggaggggcgggaggtgtgtgagtcggagctgcgtgtgctgcgtcgggtgcgtcatgccaacatcatccagctggtggaggtgttcgagacacaggagcgggtgtacatggtgatggagctggccactggtggagagctctttgaccgcatcattgccaagggctccttcaccgagcgtgacgccacgcgggtgctgcagatggtgctggatggcgtccggtatctgcatgcactgggcatcacacaccgagacctcaaacctgagaatctgctctactaccatccgggcactgactccaagatcatcatcaccgacttcggcctggccagtgctcgcaagaagggtgatgactgcttgatgaagaccacctgtggcacgcctgagtacattgccccagaagtcctggtccgcaagccatacaccaactcagtggacatgtgggcgctgggcgtcattgcctacatcctactcagtggcaccatgccgtttgaggatgacaaccgtacccggctgtaccggcagatcctcaggggcaagtacagttactctggggagccctggcctagtgtgtccaacctggccaaggacttcattgaccgcctgctgacagtggaccctggagcccgtatgactgcactgcaggccctgaggcacccgtgggtggtgagcatggctgcctcttcatccatgaagaacctgcaccgctccatatcccagaacctccttaaacgtgcctcctcgcgctgccagagcaccaaatctgcccagtccacgcgttccagccgctccacacgctccaataagtcacgccgtgtgcgggaacgggagctgcgggagctcaacctgcgctaccagcagcaatacaatggctgagccgcctggctgtgcacacatgcagcacgacccagcctggccacacactgtggtgccatctgggtccgatgccctctctggagataggcctatgtggcccacagtaggtgaagaatgtctggctccagccctttctctgtgccttcagcagcccctgtcctcaccatgggcctgggccaggtgtgacagagtagaggtagcacagggggctgtgactccccctgaactgggagcctggcctggcactgatacccctcttggtgggcagctgctctggtggagttgggaagggataggacctggccttcactgtctcccttgccctttgacttttccccaatcaaagggaactgcagtgctgggtggagtgtcctgtggcctcaggaccctttgggacagttacttctgggaccccctttcctccacagagcccttctccctggtttcacacattcccatgcatcctgatccttaagattatgctccagtgggagaccctggtaggcacaaagcttgtgccttgactggacccgtagcccctggctaggtcgaaacagccctccacctcccagccaagatctgtcttccttcatggtgcctccagggagccttcctggtcccaggacctctggtggagggccatggcgtggaccttcacccttctggactgtgtggccatgctggtcatcggcttgcccaggctccagcctctccagattctgaggggtctcagcccaccgcccttggtgccttctttgtagagcccaccgctacctccctctccccgttggatgtccattccattccccaggtgcctccttcccaactgggggtggttaaagggagccccactgctgctacctggggaatggggcacctgggggccaaggcagagggaagggggtcctcccgattagggtcgagtgtcagcctgggttctatcctttggtgcagccccattgccttttcccttcaggctctgttgctccctcctctgcagctgcacgaaggcgccatctggtgtctgcatgggtgttggcagcctgggagtgatcactgcacgcccatcgtgcacacctgcccatcgtgcacacccacccatggtgcacacctgtagtcctccatgaggacatgggaaggtaggagttgccgccctgggggagggtcccgggctgctcacctctccccttctgctgagcttctgcgcacccctccctggaacttagccatactgtgtgacctgcctctgaaaccagggtgccaggggcactgccttctcacagctggccttgccccgtccaccctgtgctgcttcccttcacagcattaaccttccagtctgggtcccactgagcctcaagctggaaggagcccctgcgggaggtgggtggggttgggtggctgctttcccagaggcctgagccagaaccatccccatttcttttgtggtatctccccctaccacaaaccaggctggaacccaagccccttcctccacagctgccttcagtgggtagaatggggccagggcccagctttggccttagcttgacggcagggcccctgccattgcaggagggtttggttcccactcagcttctgccggtcggcagcctgggccaggcccttttcctgcatgtgccacctccagtgggaaacaaaactaaagagaccactctgtgccaagtcgactatgccttagacacatcctcctaccgtccccaatgccccctgggcaggaggcagtggagaaccaagccccatggcctcagaatttccccccagttccccaagtgtctctggggacctgaagccctggggcttacgttctctcttgcccagggtgggcctggtcctgagggcaggacagggggtttggagatgtgggcctttgatagacccacttgggccttcatgccatggcctgtggatggagaatgtgcagttatttattatgcgtattcagtttgtaaacgtatcctctgtattcagtaaacaggctgcctctccagggagggctgccattcattccaacaaaaaaag

SEQ ID NO: 362719 - DNA, 3539 bp, Homo sapiens
ccgcgtttgcgtagggtgcgtcatgccaacatacatccagctggtggaggtgttcgagacacaggagcgggtgtacatggtgatggagctggccactggtggagagcgctttgaccgcatcattgccaagggctccttcaccgagcgcgaggtgtagacggggcactgccttcagagcaggtcctgccagcctcgctggagaggatgccctcgtgtccgtgatgggctgtgggacaagcaaggtccttcccgagccacccaaggatgtccagctggatctggtcaagaaggtggagcccttcagtggcactaagagtgacgtgtacaagcacttcatcacagaggtggacagtgttggccctgtcaaagccgggttcccagcagcaagtcagtatgcacacccctgccccggtcccccgactgctggccacacggagcctccctcagaaccaccacgcagggccagggtagctaagtacagggccaagtttgacccacgtgttacagctaagtatgacatcaaggccctaattggccgaggcagcttcagccgagtggtacgtgtagagcaccgggcaacccggcagccgtatgccatcaagatgattgagaccaagtaccgggaggggcgggaggtgtgtgagtcggagctgcgtgtgctgcgtcgggtgcgtcatgccaacatcatccagctggtggaggtgttcgagacacaggagcgggtgtacatggtgatggagctggccactggtggagagctctttgaccgcatcattgccaagggctccttcaccgagcgtgacgccacgcgggtgctgcagatggtgctggatggcgtccggtatctgcatgcactgggcatcacacaccgagacctcaaacctgagaatctgctctactaccatccgggcactgactccaagatcatcatcaccgacttcggcctggccagtgctcgcaagaagggtgatgactgcttgatgaagaccacctgtggcacgcctgagtacattgccccagaagtcctggtccgcaagccatacaccaactcagtggacatgtgggcgctgggcgtcattgcctacatcctactcagtggcaccatgccgtttgaggatgacaaccgtacccggctgtaccggcagatcctcaggggcaagtacagttactctggggagccctggcctagtgtgtccaacctggccaaggacttcattgaccgcctgctgacagtggaccctggagcccgtatgactgcactgcaggccctgaggcacccgtgggtggtgagcatggctgcctcttcatccatgaagaacctgcaccgctccatatcccagaacctccttaaacgtgcctcctcgcgctgccagagcaccaaatctgcccagtccacgcgttccagccgctccacacgctccaataagtcacgccgtgtgcgggaacgggagctgcgggagctcaacctgcgctaccagcagcaatacaatggctgagccgcctggctgtgcacacatgcagcacgacccagcctggccacacactgtggtgccatctgggtccgatgccctctctggagataggcctatgtggcccacagtaggtgaagaatgtctggctccagccctttctctgtgccttcagcagcccctgtcctcaccatgggcctgggccaggtgtgacagagtagaggtagcacagggggctgtgactccccctgaactgggagcctggcctggcactgatacccctcttggtgggcagctgctctggtggagttgggaagggataggacctggccttcactgtctcccttgccctttgacttttccccaatcaaagggaactgcagtgctgggtggagtgtcctgtggcctcaggaccctttgggacagttacttctgggaccccctttcctccacagagcccttctccctggtttcacacattcccatgcatcctgatccttaagattatgctccagtgggagaccctggtaggcacaaagcttgtgccttgactggacccgtagcccctggctaggtcgaaacagccctccacctcccagccaagatctgtcttccttcatggtgcctccagggagccttcctggtcccaggacctctggtggagggccatggcgtggaccttcacccttctggactgtgtggccatgctggtcatcggcttgcccaggctccagcctctccagattctgaggggtctcagcccaccgcccttggtgccttctttgtagagcccaccgctacctccctctccccgttggatgtccattccattccccaggtgcctccttcccaactgggggtggttaaagggagccccactgctgctacctggggaatggggcacctgggggccaaggcagagggaagggggtcctcccgattagggtcgagtgtcagcctgggttctatcctttggtgcagccccattgccttttcccttcaggctctgttgctccctcctctgcagctgcacgaaggcgccatctggtgtctgcatgggtgttggcagcctgggagtgatcactgcacgcccatcgtgcacacctgcccatcgtgcacacccacccatggtgcacacctgtagtcctccatgaggacatgggaaggtaggagttgccgccctgggggagggtcccgggctgctcacctctccccttctgctgagcttctgcgcacccctccctggaacttagccatactgtgtgacctgcctctgaaaccagggtgccaggggcactgccttctcacagctggccttgccccgtccaccctgtgctgcttcccttcacagcattaaccttccagtctgggtcccactgagcctcaagctggaaggagcccctgcgggaggtgggtggggttgggtggctgctttcccagaggcctgagccagaaccatccccatttcttttgtggtatctccccctaccacaaaccaggctggaacccaagccccttcctccacagctgccttcagtgggtagaatggggccagggcccagctttggccttagcttgacggcagggcccctgccattgcaggagggtttggttcccactcagcttctgccggtcggcagcctgggccaggcccttttcctgcatgtgccacctccagtgggaaacaaaactaaagagaccactctgtgccaagtcgactatgccttagacacatcctcctaccgtccccaatgccccctgggcaggaggcagtggagaaccaagccccatggcctcagaatttccccccagttccccaagtgtctctggggacctgaagccctggggcttacgttctctcttgcccagggtgggcctggtcctgagggcaggacagggggtttggagatgtgggcctttgatagacccacttgggccttcatgccatggcctgtggatggagaatgtgcagttatttattatgcgtattcagtttgtaaacgtatcctctgtattcagtaaacaggctgcctctccagggagggctgccattcattccaacaaaaaaag

SEQ ID NO: 362720 - DNA, 490 bp, Homo sapiens
aagtatatgagaacaaagggacatcgtcaagatggcaactagacttgcctggtgcttggtttgtgccccacgactgccatcaaaaaggaccaaaacaacaaataaacaactatatctcaattggagagtctgagactgtataccggggagcaccaggggagcagtcagatccctgtggagcatggaagtgtagcgtaacaccacagagaggggagcaaggcatcctacctctccaatactgtctaccctgccatgcttgtcctggagccaaggggacttcttatggggagatggtaagcaggagatccttggcagttccccatcaccaccacaaacactggcagcaattcctacaagagggtcctccagtcttcaaaggccacaaatcttgtgtagacagttgtcacacatgtacacagctgcattgccccagagaaggaacctctgggatagcccccacccctgtggcctaagctgccatggcacagtg

SEQ ID NO: 362721 - DNA, 456 bp, Homo sapiens
gtgtttataagatataaaagaagatatttagtgtgtgtttatttgaaacattttacatttttactctacttctttaacctctgttatggttatagctagctcgtgtactgcgtataaatgtatgcatctgtattcgccatctacaccaaaataaacctttgaaattattgccaggcagaattaatgagctcagttctaacagcgcaaagaatatcttcatactacaggtaaaacaaacagcttctcccttcccttcttctgcacagaatggctctacgaagtctgcctgcaaaattacgtcttttagaaaaccaagtagctggctgttttgtgagcagggaggatttcaggacgaaccacaaacaagctgtttgtttagattttaaggttgacagttcatttacacgtatgccccataagtattctataacatagtcctgaaaaagcactgaagaa

SEQ ID NO: 362722 - DNA, 607 bp, Homo sapiens
gtatcaacgcagagtgcccattacggccggggagcagggtccgagggctgtgtcagaaggctgggcagccatggcgtcctatttcgatgaacacgactgcgagccgtcggaccctgagcaggagacgcgaaccaacatgctgctggagctcgcaaggtcacttttcaataggatggactttgaagacttggggttggtagtagattgggaccaccacctgcctccaccagctgccaagactgtggttgagaacctccccaggacagtcatcagaggctctcaggctgagctcaagtgccccgtgtgtcttttggaatttgaggaggaggagactgccattgagatgccttgccatcaccttttccattccagctgcattctgccctggctaagcaagacaaattcctgtcccttgtgccgctatgagctgcccactgatgacgacacttatgaggagcacagacgagataaggctcgaaaacagcagcagcaacaccgactggagaacctccatggagccatgtacacgtgaggaggttggggctgagtgctggccctctgcgtcttccttattaaccttgaatcctcattaaaggtttctttaccc

SEQ ID NO: 362723 - DNA, 636 bp, Homo sapiens
gcgaattgggaaaccgggcaccccctcggtgccgcaaaaatcggaggaaaaaagcccaacctcaggtacatcatcggaaaggacacttggttggagcaatggcccgaggaggacgaatgccattgcactctagcctgggcaacaagagcaaaactccgtctcaaaaaaaaaaaaaaaaaaagctgataaactagcctgcaccctcctcccactgcaatgtctagttaactttgtaatcccacaggttttctttttgctccattgagaaagccacttttaatattttaaagttgctctctgtaccacccccaccttccccccatgcctcctaaggaatcaaagttcaaaccagactctgagtgggggatgggtgagattatcagaccaagttagttctttagattgcttagaggcccagaagggtttcaagccctttgaaggggtatttgggtggcacctggcatcctttgtttctggcaacagagtgcactcagcactcctggggggcaagggcttcctcccatccttggcttatggaaagccatcccagatcaggccccccaactctccagaacaggctacaaacatgcaaattagaattcttttaatataaaaaaaagtactaaaataaaaacg

SEQ ID NO: 362724 - DNA, 381 bp, Homo sapiens
  misc_feature (12)..(12): n is a, c, g, or t
cccatgcctccnaaggaatcaaagtttaaactagcctgcaccctcctcccactgcaatgtctagttaactttgtaatcccacaggttttctttttgctccattgagaaagccacttttaatattttaaagttgctctctgtaccacccccaccttccccccataagggtttcaagccctttgaaggggtatttgggtggcacctggcatcctttgtttctggcaacagagtgcactcagcactcctggggggcaagggcttcctcccatccttggcttatggaaagccatcccagatcaggccccccaactctccagaacaggctacaaacatgcaaattagaattcttttaatataaaaaaaagtactaaaataaaaacg

SEQ ID NO: 362725 - DNA, 277 bp, Homo sapiens
ccgtcgaattcgtggtcgctcgctggagctcgcaaggtcacttttcaataggatggactttgaagacttggggttggtagtagattgggaccaccacctgcctccaccagctgccaagactgtggttgagaacctccccaggacagtcatcagaggctctcaggctgaggaggagactgccattgagatgccttgccatcaccttttccattccagtttctcaagttagttataggatgtacataagcagtaagcgtaattaggtaaacagcaccac

SEQ ID NO: 362726 - DNA, 111 bp, Homo sapiens
tcaagcttctaacgatgtacggggatgtacacgtgaggaggttggggctgagtgctggccctctgcgtcttccttattaaccttgaatcctcattaaaggtttctttaccc

SEQ ID NO: 362727 - DNA, 928 bp, Homo sapiens
  misc_feature (788)..(788): n is a, c, g, or t
gtatcaacgcagagtgcccattacggccggggagcagggtccgagggctgtgtcagaaggctgggcagccatggcgtcctatttcgatgaacacgactgcgagccgtcggaccctgagcaggagacgcgaaccaacatgctgctggagctcgcaaggtcacttttcaataggatggactttgaagacttggggttggtagtagattgggaccaccacctgcctccaccagctgccaagactgtggttgagaacctccccaggacagtcatcagaggctctcaggctgagctcaagtgccccgtgtgtcttttggaatttgaggaggaggagactgccattgagatgccttgccatcaccttttccattccagctgcattctgccctggctaagcaagacaaattcctgtcccttgtgccgctatgagctgcccactgatgacgacacttatgaggagcacagacgagataaggctcgaaaacagcagcagcaacaccgactggagaacctccatggagccatgtacacgtgaggaggttggggctgagtgctggccctctgcgtcttccttattaaccttgaatcctcattaaaggtttctttacccaaaaaaaaaaaaaaaaaaaaaacccggggccttttttgggggggggaaaaaagggttgaacttcgacctggcaatggctgttcctgacccccgcttcttgtcagggggaaatctgcgcggctcccatatagggagccgagttaattcaaaagcacggttccgacatcttccccgacagacngtcgccacgcagaggtccggggggggcacaccataacacaagcgcgtagaactacaaaaacggacatctagcgtacggacacagcgcatatacagcaggcacaccacatcttcagcacaccaagcccaactgttatggat

SEQ ID NO: 362728 - DNA, 815 bp, Homo sapiens
gtatcaacgcagagtgcccattacggccggggagcagggtccgagggctgtgtcagaaggctgggcagccatggcgtcctatttcgatgaacacgactgcgagccgtcggaccctgagcaggagacgcgaaccaacatgctgctggagctcgcaaggtcacttttcaataggatggactttgaagacttggggttggtagtagattgggaccaccacctgcctccaccagctgccaagactgtggttgagaacctccccaggacagtcatcagaggctctcaggctgagctcaagtgccccgtgtgtcttttggaatttgaggaggaggagactgccattgagatgccttgccatcaccttttccattccagctgcattctgccctggctaagcaagacaaattcctgtcccttgtgccgctatgagctgcccactgatgacgacacttatgaggagcacagacgagataaggctcgaaaacagcagcagcaacaccgactggagaacctccatggagccatgtacacgtgaggaggttggggctgagtgctggccctctgcgtcttccttattaaccttgaatcctcattaaaggtttctttacccgatacaaaaatgaaattgaaagccttaattcttgtcggacgcctcggcccatttgactctagactcgaggaaacttatgcattcgggccaaatccgagcttacttggccaattcacctatagtgagtgttattccatttactggcccccgtttacaaagtgtcactggccccggggttccaaacttggcttgaaccatcccctgttgg

SEQ ID NO: 362729 - DNA, 764 bp, Homo sapiens
gtatcaacgcagagtgcccattacggccggggagcagggtccgagggctgtgtcagaaggctgggcagccatggcgtcctatttcgatgaacacgactgcgagccgtcggaccctgagcaggagacgcgaaccaacatgctgctggagctcgcaaggtcacttttcaataggatggactttgaagacttggggttggtagtagattgggaccaccacctgcctccaccagctgccaagactgtggttgagaacctccccaggacagtcatcagaggctctcaggctgagctcaagtgccccgtgtgtcttttggaatttgaggaggaggagactgccattgagatgccttgccatcaccttttccattccagctgcattctgccctggctaagcaagacaaattcctgtcccttgtgccgctatgagctgcccactgatgacgacacttatgaggagcacagacgagataaggctcgaaaacagcagcagcaacaccgactggagaacctccatggagccatgtacacgtgaggaggttggggctgagtgctggccctctgcgtcttccttattaaccttgaatcctcattaaaggtttctttaccctagaaaaaaacaaaatatatttgccgcatcgagccctgtgcattgcctaagtattcgttacatcatggcggtttaaacgtgttacgggaaactgtggttcaatattggtttgaaatccctttcgcgggttatgaagcgcgaacttccagatggctat

SEQ ID NO: 362730 - DNA, 1574 bp, Homo sapiens
gtatcaacgcagagtgcccattacggccggggagcagggtccgagggctgtgtcagaaggctgggcagccatggcgtcctatttcgatgaacacgactgcgagccgtcggaccctgagcaggagacgcgaaccaacatgctgctggagctcgcaaggtcacttttcaataggatggactttgaagacttggggttggtagtagattgggaccaccacctgcctccaccagctgccaagactgtggttgagaacctccccaggacagtcatcagaggctctcaggctgagctcaagtgccccgtgtgtcttttggaatttgaggaggaggagactgccattgagatgccttgccatcaccttttccattccagctgcattctgccctggctaagcaagacaaattcctgtcccttgtgccgctatgagctgcccactgatgacgacacttatgaggagcacagacgagataagtgtacacgtgaggaggttggggctgagtgctggccctctgcgtcttccttattaaccttgaatcctcattaaaggtttctttacccaccctgaggctgtattgatcacagacctggccaggggctctgcatcctccatcaggtctctacttctgttggggaaggtgatcctaaatcgcagaaggcaccaggctgcggttttcctccctgctggcccatctggactcatggcagtggtaaagaactggattactgcaatagccagggcttgggcctatgtgttcatggttggaaggcaaaatgtgtcagggtctggtacccagttaattacttaaagctgataaactaggctgggtgcagtggctcatgtctgtaatgccagcagtttgggaggccaagacaggtggatcacgaggtcaggagttcgagaccttcctgaccaacatggtgaaaccccgtttctactaaaaatacaaacattagctgggcatggtggcacgcacctgtaatcccagctacttgggaggctgaggcaggagaattgcttgaacctgggaggcagaagttgcagtgagctgagatcatgccattgcactctagcctgggcaacaagagcaaaactccgtctcaaaaaaaaaaaaaaaaaaagctgataaactagcctgcaccctcctcccactgcaatgtctagttaactttgtaatcccacaggttttctttttgctccattgagaaagccacttttaatattttaaagttgctctctgtaccacccccaccttccccccatgcctcctaaggaatcaaagttcaaaccagactctgagtgggggatgggtgagattatcagaccaagttagttctttagattgcttagaggcccagaagggtttcaagccctttgaaggggtatttgggtggcacctggcatcctttgtttctggcaacagagtgcactcagcactcctggggggcaagggcttcctcccatccttggcttatggaaagccatcccagatcaggccccccaactctccagaacaggctacaaacatgcaaattagaattcttttaatataaaaaaaagtactaaaataaaaacg

SEQ ID NO: 362731 - DNA, 1717 bp, Homo sapiens
gtatcaacgcagagtgcccattacggccggggagcagggtccgagggctgtgtcagaaggctgggcagccatggcgtcctatttcgatgaacacgactgcgagccgtcggaccctgagcaggagacgcgaaccaacatgctgctggagctcgcaaggtcacttttcaataggatggactttgaagacttggggttggtagtagattgggaccaccacctgcctccaccagctgccaagactgtggttgagaacctccccaggacagtcatcagaggctctcaggctgttttccaggtcaggtgggggcaagtgtccttcaggagtgggagcttgggaggcagagctgtagcagctctcctgatcagcactccttcctaaagagctcaagtgccccgtgtgtcttttggaatttgaggaggaggagactgccattgagatgccttgccatcaccttttccattccagctgcattctgccctggctaagcaagacaaattcctgtcccttgtgccgctatgagctgcccactgatgacgacacttatgaggagcacagacgagataaggctcgaaaacagcagcagcaacaccgactggagaacctccatggagccatgtacacgtgaggaggttggggctgagtgctggccctctgcgtcttccttattaaccttgaatcctcattaaaggtttctttacccaccctgaggctgtattgatcacagacctggccaggggctctgcatcctccatcaggtctctacttctgttggggaaggtgatcctaaatcgcagaaggcaccaggctgcggttttcctccctgctggcccatctggactcatggcagtggtaaagaactggattactgcaatagccagggcttgggcctatgtgttcatggttggaaggcaaaatgtgtcagggtctggtacccagttaattacttaaagctgataaactaggctgggtgcagtggctcatgtctgtaatgccagcagtttgggaggccaagacaggtggatcacgaggtcaggagttcgagaccttcctgaccaacatggtgaaaccccgtttctactaaaaatacaaacattagctgggcatggtggcacgcacctgtaatcccagctacttgggaggctgaggcaggagaattgcttgaacctgggaggcagaagttgcagtgagctgagatcatgccattgcactctagcctgggcaacaagagcaaaactccgtctcaaaaaaaaaaaaaaaaaaagctgataaactagcctgcaccctcctcccactgcaatgtctagttaactttgtaatcccacaggttttctttttgctccattgagaaagccacttttaatattttaaagttgctctctgtaccacccccaccttccccccatgcctcctaaggaatcaaagttcaaaccagactctgagtgggggatgggtgagattatcagaccaagttagttctttagattgcttagaggcccagaagggtttcaagccctttgaaggggtatttgggtggcacctggcatcctttgtttctggcaacagagtgcactcagcactcctggggggcaagggcttcctcccatccttggcttatggaaagccatcccagatcaggccccccaactctccagaacaggctacaaacatgcaaattagaattcttttaatataaaaaaaagtactaaaataaaaacg

SEQ ID NO: 362732 - DNA, 1587 bp, Homo sapiens
gtatcaacgcagagtgcccattacggccggggagcagggtccgagggctgtgtcagaaggctgggcagccatggcgtcctatttcgatgaacacgactgcgagccgtcggaccctgagcaggagacgcgaaccaacatgctgctggagctcgcaaggtcacttttcaataggatggactttgaagacttggggttggtagtagattgggaccaccacctgcctccaccagctgccaagactgtggttgagaacctccccaggacagtcatcagaggctctcaggctgaggaggagactgccattgagatgccttgccatcaccttttccattccagctgcattctgccctggctaagcaagacaaattcctgtcccttgtgccgctatgagctgcccactgatgacgacacttatgaggagcacagacgagataaggctcgaaaacagcagcagcaacaccgactggagaacctccatggagccatgtacacgtgaggaggttggggctgagtgctggccctctgcgtcttccttattaaccttgaatcctcattaaaggtttctttacccaccctgaggctgtattgatcacagacctggccaggggctctgcatcctccatcaggtctctacttctgttggggaaggtgatcctaaatcgcagaaggcaccaggctgcggttttcctccctgctggcccatctggactcatggcagtggtaaagaactggattactgcaatagccagggcttgggcctatgtgttcatggttggaaggcaaaatgtgtcagggtctggtacccagttaattacttaaagctgataaactaggctgggtgcagtggctcatgtctgtaatgccagcagtttgggaggccaagacaggtggatcacgaggtcaggagttcgagaccttcctgaccaacatggtgaaaccccgtttctactaaaaatacaaacattagctgggcatggtggcacgcacctgtaatcccagctacttgggaggctgaggcaggagaattgcttgaacctgggaggcagaagttgcagtgagctgagatcatgccattgcactctagcctgggcaacaagagcaaaactccgtctcaaaaaaaaaaaaaaaaaaagctgataaactagcctgcaccctcctcccactgcaatgtctagttaactttgtaatcccacaggttttctttttgctccattgagaaagccacttttaatattttaaagttgctctctgtaccacccccaccttccccccatgcctcctaaggaatcaaagttcaaaccagactctgagtgggggatgggtgagattatcagaccaagttagttctttagattgcttagaggcccagaagggtttcaagccctttgaaggggtatttgggtggcacctggcatcctttgtttctggcaacagagtgcactcagcactcctggggggcaagggcttcctcccatccttggcttatggaaagccatcccagatcaggccccccaactctccagaacaggctacaaacatgcaaattagaattcttttaatataaaaaaaagtactaaaataaaaacg

SEQ ID NO: 362733 - DNA, 1513 bp, Homo sapiens
gtatcaacgcagagtgcccattacggccggggagcagggtccgagggctgtgtcagaaggctgggcagccatggcgtcctatttcgatgaacacgactgcgagccgtcggaccctgagcaggagacgcgaaccaacatgctgctggagctcgcaaggtcacttttcaataggatggactttgaagacttggggttggtagtagattgggaccaccacctgcctccaccagctgccaagactgtggttgagaacctccccaggacagtcatcagaggctctcaggctgacaaattcctgtcccttgtgccgctatgagctgcccactgatgacgacacttatgaggagcacagacgagataaggctcgaaaacagcagcagcaacaccgactggagaacctccatggagccatgtacacgtgaggaggttggggctgagtgctggccctctgcgtcttccttattaaccttgaatcctcattaaaggtttctttacccaccctgaggctgtattgatcacagacctggccaggggctctgcatcctccatcaggtctctacttctgttggggaaggtgatcctaaatcgcagaaggcaccaggctgcggttttcctccctgctggcccatctggactcatggcagtggtaaagaactggattactgcaatagccagggcttgggcctatgtgttcatggttggaaggcaaaatgtgtcagggtctggtacccagttaattacttaaagctgataaactaggctgggtgcagtggctcatgtctgtaatgccagcagtttgggaggccaagacaggtggatcacgaggtcaggagttcgagaccttcctgaccaacatggtgaaaccccgtttctactaaaaatacaaacattagctgggcatggtggcacgcacctgtaatcccagctacttgggaggctgaggcaggagaattgcttgaacctgggaggcagaagttgcagtgagctgagatcatgccattgcactctagcctgggcaacaagagcaaaactccgtctcaaaaaaaaaaaaaaaaaaagctgataaactagcctgcaccctcctcccactgcaatgtctagttaactttgtaatcccacaggttttctttttgctccattgagaaagccacttttaatattttaaagttgctctctgtaccacccccaccttccccccatgcctcctaaggaatcaaagttcaaaccagactctgagtgggggatgggtgagattatcagaccaagttagttctttagattgcttagaggcccagaagggtttcaagccctttgaaggggtatttgggtggcacctggcatcctttgtttctggcaacagagtgcactcagcactcctggggggcaagggcttcctcccatccttggcttatggaaagccatcccagatcaggccccccaactctccagaacaggctacaaacatgcaaattagaattcttttaatataaaaaaaagtactaaaataaaaacg

SEQ ID NO: 362734 - DNA, 532 bp, Homo sapiens
gtatcaacgcagagtgcccattacggccggggagcagggtccgagggctgtgtcagaaggctgggcagccatggcgtcctatttcgatgaacacgactgcgagccgtcggaccctgagcaggagacgcgaaccaacatgctgctggagctcgcaaggtcacttttcaataggatggactttgaagacttggggttggtagtagattgggaccaccacctgcctccaccagctgccaagactgtggttgagaacctccccaggacagtcatcagaggctctcaggctgagctcaagtgccccgtgtgtcttttggaatttgaggaggaggagactgccattgagatgccttgccatcaccttttccattccagctgcattctgccctggctaagcaaggctcgaaaacagcagcagcaacaccgactggagaacctccatggagccatgtacacgtgaggaggttggggctgagtgctggccctctgcgtcttccttattaaccttgaatcctcattaaaggtttctttaccc

SEQ ID NO: 362735 - DNA, 818 bp, Homo sapiens
  misc_feature (678)..(678): n is a, c, g, or t
gtatcaacgcagagtgcccattacggccggggagcagggtccgagggctgtgtcagaaggctgggcagccatggcgtcctatttcgatgaacacgactgcgagccgtcggaccctgagcaggagacgcgaaccaacatgctgctggagctcgcaaggtcacttttcaataggatggactttgaagacttggggttggtagtagattgggaccaccacctgcctccaccagctgccaagactgtggttgagaacctccccaggacagtcatcagaggctctcaggctgacaaattcctgtcccttgtgccgctatgagctgcccactgatgacgacacttatgaggagcacagacgagataaggctcgaaaacagcagcagcaacaccgactggagaacctccatggagccatgtacacgtgaggaggttggggctgagtgctggccctctgcgtcttccttattaaccttgaatcctcattaaaggtttctttacccaaaaaaaaaaaaaaaaaaaaaacccggggccttttttgggggggggaaaaaagggttgaacttcgacctggcaatggctgttcctgacccccgcttcttgtcagggggaaatctgcgcggctcccatatagggagccgagttaattcaaaagcacggttccgacatcttccccgacagacngtcgccacgcagaggtccggggggggcacaccataacacaagcgcgtagaactacaaaaacggacatctagcgtacggacacagcgcatatacagcaggcacaccacatcttcagcacaccaagcccaactgttatggat

SEQ ID NO: 362736 - DNA, 648 bp, Homo sapiens
gtatcaacgcagagtgcccattacggccggggagcagggtccgagggctgtgtcagaaggctgggcagccatggcgtcctatttcgatgaacacgactgcgagccgtcggaccctgagcaggagacgcgaaccaacatgctgctggagctcgcaaggtcacttttcaataggatggactttgaagacttggggttggtagtagattgggaccaccacctgcctccaccagctgccaagactgtggttgagaacctccccaggacagtcatcagaggctctcaggctgctctcaccgtgccctgggcccagtactcaagcttctttctgttcatggactgctgggggatggaagaagagtggcagttgggagcaggggagggtggttatcagcttatgaagatcagaccaaggctagaacactactctacttttctcagacaaattcctgtcccttgtgccgctatgagctgcccactgatgacgacacttatgaggagcacagacgagataaggctcgaaaacagcagcagcaacaccgactggagaacctccatggagccatgtacacgtgaggaggttggggctgagtgctggccctctgcgtcttccttattaaccttgaatcctcattaaaggtttctttaccc

SEQ ID NO: 362737 - DNA, 712 bp, Homo sapiens
  misc_feature (572)..(572): n is a, c, g, or t
gtatcaacgcagagtgcccattacggccggggagcagggtccgagggctgtgtcagaaggctgggcagccatggcgtcctatttcgatgaacacgactgcgagccgtcggaccctgagcaggagacgcgaaccaacatgctgctggagctcgcaagctgcattctgccctggctaagcaagacaaattcctgtcccttgtgccgctatgagctgcccactgatgacgacacttatgaggagcacagacgagataaggctcgaaaacagcagcagcaacaccgactggagaacctccatggagccatgtacacgtgaggaggttggggctgagtgctggccctctgcgtcttccttattaaccttgaatcctcattaaaggtttctttacccaaaaaaaaaaaaaaaaaaaaaacccggggccttttttgggggggggaaaaaagggttgaacttcgacctggcaatggctgttcctgacccccgcttcttgtcagggggaaatctgcgcggctcccatatagggagccgagttaattcaaaagcacggttccgacatcttccccgacagacngtcgccacgcagaggtccggggggggcacaccataacacaagcgcgtagaactacaaaaacggacatctagcgtacggacacagcgcatatacagcaggcacaccacatcttcagcacaccaagcccaactgttatggat

SEQ ID NO: 362738 - DNA, 621 bp, Homo sapiens
aagtcacagtgtacaacacgttttaagacggcatactatacgtcctaggtgcgaggctgggtggcgatctcaagctgggcagccatggcgtcctatttcgatgaacacgactgcgagccgtcggaccctgagcaggagacgcgaaccaacatgctgctggagctcgcaaggtcacttttcaataggatggactttgaagacttggggttggtagtagattgggaccaccacctgcctccaccagctgccaagactgtggttgagaacctccccaggacagtcatcagaggctctcaggctgagctcaagtgccccgtgtgtcttttggaatttgaggaggaggagactgccattgagatgccttgccatcaccttttccattccagctgcattctgccctggctaagcaagacaaattcctgtcccttgtgccgctatgagctgcccactgatgacgacacttatgaggagcacagacgagataaggctcgaaaacagcagcagcaacaccgactggagaacctccatggagccatgtacacgtgaggaggttggggctgagtgctggccctctgcgtcttccttattaaccttgaatcctcattaaaggtttctttaccc

SEQ ID NO: 362739 - DNA, 480 bp, Homo sapiens
cggtggcggcgcatacttcgtatatcatcattatacgaagttatctagatctcggcgcgccaccctagagtttctgtggaccccatgtgcccctctcctctcaaacctctgaaccaagcagtgtggcctggttctctacaggctaacaagtctccaacttctattgagctgcttggcctgtttctttgtcccctgataacaacccagctcttcagtgactacttggcttggtctctcatactcctctcttctccagatctcctgtggttatattgccttttgtcctacaactccactagctccacttcccctgtaattgctcagcttggtccccagagctgtaggtcttctctgtgttctaccactcccacctgtcccagagactgctctgtcatgtacacgtgaggaggttggggctgagtgctggccctctgcgtcttccttattaaccttgaatcctcattaaaggtttctttaccc

SEQ ID NO: 362740 - DNA, 1623 bp, Homo sapiens
gtatcaacgcagagtgcccattacggccggggagcagggtccgagggctgtgtcagaaggctgggcagccatggcgtcctatttcgatgaacacgactgcgagccgtcggaccctgagcaggagacgcgaaccaacatgctgctggagctcgcaaggtcacttttcaataggatggactttgaagacttggggttggtagtagattgggaccaccacctgcctccaccagctgccaagactgtggttgagaacctccccaggacagtcatcagaggctctcaggctgagctcaagtgccccgtgtgtcttttggaatttgaggaggaggagactgccattgagatgccttgccatcaccttttccattccagctgcattctgccctggctaagcaagacaaattcctgtcccttgtgccgctatgagctgcccactgatgacgacacttatgaggagcacagacgagataaggctcgaaaacagcagcagcaacaccgactggagaacctccatggagccatgtacacgtgaggaggttggggctgagtgctggccctctgcgtcttccttattaaccttgaatcctcattaaaggtttctttacccaccctgaggctgtattgatcacagacctggccaggggctctgcatcctccatcaggtctctacttctgttggggaaggtgatcctaaatcgcagaaggcaccaggctgcggttttcctccctgctggcccatctggactcatggcagtggtaaagaactggattactgcaatagccagggcttgggcctatgtgttcatggttggaaggcaaaatgtgtcagggtctggtacccagttaattacttaaagctgataaactaggctgggtgcagtggctcatgtctgtaatgccagcagtttgggaggccaagacaggtggatcacgaggtcaggagttcgagaccttcctgaccaacatggtgaaaccccgtttctactaaaaatacaaacattagctgggcatggtggcacgcacctgtaatcccagctacttgggaggctgaggcaggagaattgcttgaacctgggaggcagaagttgcagtgagctgagatcatgccattgcactctagcctgggcaacaagagcaaaactccgtctcaaaaaaaaaaaaaaaaaaagctgataaactagcctgcaccctcctcccactgcaatgtctagttaactttgtaatcccacaggttttctttttgctccattgagaaagccacttttaatattttaaagttgctctctgtaccacccccaccttccccccatgcctcctaaggaatcaaagttcaaaccagactctgagtgggggatgggtgagattatcagaccaagttagttctttagattgcttagaggcccagaagggtttcaagccctttgaaggggtatttgggtggcacctggcatcctttgtttctggcaacagagtgcactcagcactcctggggggcaagggcttcctcccatccttggcttatggaaagccatcccagatcaggccccccaactctccagaacaggctacaaacatgcaaattagaattcttttaatataaaaaaaagtactaaaataaaaacg

SEQ ID NO: 362741 - DNA, 778 bp, Homo sapiens
  misc_feature (610)..(610): n is a, c, g, or t
  misc_feature (612)..(612): n is a, c, g, or t
gtatcaacgcagagtgcccattacggccggggagcagggtccgagggctgtgtcagaaggctgggcagccatggcgtcctatttcgatgaacacgactgcgagccgtcggaccctgagcaggagacgcgaaccaacatgctgctggagctcgcaaggtcacttttcaataggatggactttgaagacttggggttggtagtagattgggaccaccacctgcctccaccagctgccaagactgtggttgagaacctccccaggacagtcatcagaggctctcaggctgagctcaagtgccccgtgtgtcttttggaatttgaggaggaggagactgccattgagatgccttgccatcaccttttccattccagctgcattctgccctggctaagcaagacaaattcctgtcccttgtgccgctatgagctgcccactgatgacgacacttatgaggagcacagacgagataaggctcgaaaacagcagcagcaacaccgactggagaacctccatggagccatgtacacgtgaggaggttggggctgagtgctggccctctgcgtcttccttattaaccttgaatcctcattaaaggtttctttacccgcngntaataggcaaataataaagtcggagtgaagatgaaaatgaaaaaaacattctgaaaaagataccctggtgggccgccttggcccaatctattctagactggagcaagtttatgcttgcggccgaatttcgagctcactggcccattacgccttatgggaggggtat

SEQ ID NO: 362742 - DNA, 734 bp, Homo sapiens
  misc_feature (638)..(638): n is a, c, g, or t
gtatcaacgcagagtgcccattacggccggggagcagggtccgagggctgtgtcagaaggctgggcagccatggcgtcctatttcgatgaacacgactgcgagccgtcggaccctgagcaggagacgcgaaccaacatgctgctggagctcgcaaggtcacttttcaataggatggactttgaagacttggggttggtagtagattgggaccaccacctgcctccaccagctgccaagactgtggttgagaacctccccaggacagtcatcagaggctctcaggctgagctcaagtgccccgtgtgtcttttggaatttgaggaggaggagactgccattgagatgccttgccatcaccttttccattccagctgcattctgccctggctaagcaagacaaattcctgtcccttgtgccgctatgagctgcccactgatgacgacacttatgaggagcacagacgagataaggctcgaaaacagcagcagcaacaccgactggagaacctccatggagccatgtacacgtgaggaggttggggctgagtgctggccctctgcgtcttccttattaaccttgaatcctcattaaaggtttctttacccaaaaaaaagaataagctatgcattgcggcgnatgcgagctccttgggcaattcgcccatatgagtcgtttacagtcctgggccggcgtttcaaagtccgactgtgaaaccctggggttcccacgtag

SEQ ID NO: 362743 - DNA, 1795 bp, Homo sapiens
gtatcaacgcagagtgcccattacggccggggagcagggtccgagggctgtgtcagaaggctgggcagccatggcgtcctatttcgatgaacacgactgcgagccgtcggaccctgagcaggagacgcgaaccaacatgctgctggagctcgcaaggtcacttttcaataggatggactttgaagacttggggttggtagtagattgggaccaccacctgcctccaccagctgccaagactgtggttgagaacctccccaggacagtcatcagaggctctcaggctgagctcaagtgccccgtgtgtcttttggaatttgaggaggaggagactgccattgagatgccttgccatcaccttttccattccagctgcattctgccctggctaagcaaggtactgcttctcttcttctagctctcaccgtgccctgggcccagtactcaagcttctttctgttcatggactgctgggggatggaagaagagtggcagttgggagcaggggagggtggttatcagcttatgaagatcagaccaaggctagaacactactctacttttctcagacaaattcctgtcccttgtgccgctatgagctgcccactgatgacgacacttatgaggagcacagacgagataaggctcgaaaacagcagcagcaacaccgactggagaacctccatggagccatgtacacgtgaggaggttggggctgagtgctggccctctgcgtcttccttattaaccttgaatcctcattaaaggtttctttacccaccctgaggctgtattgatcacagacctggccaggggctctgcatcctccatcaggtctctacttctgttggggaaggtgatcctaaatcgcagaaggcaccaggctgcggttttcctccctgctggcccatctggactcatggcagtggtaaagaactggattactgcaatagccagggcttgggcctatgtgttcatggttggaaggcaaaatgtgtcagggtctggtacccagttaattacttaaagctgataaactaggctgggtgcagtggctcatgtctgtaatgccagcagtttgggaggccaagacaggtggatcacgaggtcaggagttcgagaccttcctgaccaacatggtgaaaccccgtttctactaaaaatacaaacattagctgggcatggtggcacgcacctgtaatcccagctacttgggaggctgaggcaggagaattgcttgaacctgggaggcagaagttgcagtgagctgagatcatgccattgcactctagcctgggcaacaagagcaaaactccgtctcaaaaaaaaaaaaaaaaaaagctgataaactagcctgcaccctcctcccactgcaatgtctagttaactttgtaatcccacaggttttctttttgctccattgagaaagccacttttaatattttaaagttgctctctgtaccacccccaccttccccccatgcctcctaaggaatcaaagttcaaaccagactctgagtgggggatgggtgagattatcagaccaagttagttctttagattgcttagaggcccagaagggtttcaagccctttgaaggggtatttgggtggcacctggcatcctttgtttctggcaacagagtgcactcagcactcctggggggcaagggcttcctcccatccttggcttatggaaagccatcccagatcaggccccccaactctccagaacaggctacaaacatgcaaattagaattcttttaatataaaaaaaagtactaaaataaaaacg

SEQ ID NO: 362744 - DNA, 1685 bp, Homo sapiens
gtatcaacgcagagtgcccattacggccggggagcagggtccgagggctgtgtcagaaggctgggcagccatggcgtcctatttcgatgaacacgactgcgagccgtcggaccctgagcaggagacgcgaaccaacatgctgctggagctcgcaaggtcacttttcaataggatggactttgaagacttggggttggtagtagattgggaccaccacctgcctccaccagctgccaagactgtggttgagaacctccccaggacagtcatcagaggctctcaggctgagctcaagtgccccgtgtgtcttttggaatttgaggaggaggagactgccattgagatgccttgccatcaccttttccattccagagcttgccccaatttttttttttccccttttttgggggggccccccccccccccccttttttgggggggggggccctcccgagcaagacaaattcctgtcccttgtgccgctatgagctgcccactgatgacgacacttatgaggagcacagacgagataaggctcgaaaacagcagcagcaacaccgactggagaacctccatggagccatgtacacgtgaggaggttggggctgagtgctggccctctgcgtcttccttattaaccttgaatcctcattaaaggtttctttacccaccctgaggctgtattgatcacagacctggccaggggctctgcatcctccatcaggtctctacttctgttggggaaggtgatcctaaatcgcagaaggcaccaggctgcggttttcctccctgctggcccatctggactcatggcagtggtaaagaactggattactgcaatagccagggcttgggcctatgtgttcatggttggaaggcaaaatgtgtcagggtctggtacccagttaattacttaaagctgataaactaggctgggtgcagtggctcatgtctgtaatgccagcagtttgggaggccaagacaggtggatcacgaggtcaggagttcgagaccttcctgaccaacatggtgaaaccccgtttctactaaaaatacaaacattagctgggcatggtggcacgcacctgtaatcccagctacttgggaggctgaggcaggagaattgcttgaacctgggaggcagaagttgcagtgagctgagatcatgccattgcactctagcctgggcaacaagagcaaaactccgtctcaaaaaaaaaaaaaaaaaaagctgataaactagcctgcaccctcctcccactgcaatgtctagttaactttgtaatcccacaggttttctttttgctccattgagaaagccacttttaatattttaaagttgctctctgtaccacccccaccttccccccatgcctcctaaggaatcaaagttcaaaccagactctgagtgggggatgggtgagattatcagaccaagttagttctttagattgcttagaggcccagaagggtttcaagccctttgaaggggtatttgggtggcacctggcatcctttgtttctggcaacagagtgcactcagcactcctggggggcaagggcttcctcccatccttggcttatggaaagccatcccagatcaggccccccaactctccagaacaggctacaaacatgcaaattagaattcttttaatataaaaaaaagtactaaaataaaaacg

SEQ ID NO: 362745 - DNA, 1371 bp, Homo sapiens
gcacgagtcactcagagcgctctcagtgcgtgcagtctccagtgcccttttttaatttgttttccgaaaagaggaggagactgccattgagatgccttgccatcaccttttccattccagctgcattctgccctggctaagcaagacaaattcctgtcccttgtgccgctatgagctgcccactgatgacgacacttatgaggagcacagacgagataaggctcgaaaacagcagcagcaacaccgactggagaacctccatggagccatgtacacgtgaggaggttggggctgagtgctggccctctgcgtcttccttattaaccttgaatcctcattaaaggtttctttacccaccctgaggctgtattgatcacagacctggccaggggctctgcatcctccatcaggtctctacttctgttggggaaggtgatcctaaatcgcagaaggcaccaggctgcggttttcctccctgctggcccatctggactcatggcagtggtaaagaactggattactgcaatagccagggcttgggcctatgtgttcatggttggaaggcaaaatgtgtcagggtctggtacccagttaattacttaaagctgataaactaggctgggtgcagtggctcatgtctgtaatgccagcagtttgggaggccaagacaggtggatcacgaggtcaggagttcgagaccttcctgaccaacatggtgaaaccccgtttctactaaaaatacaaacattagctgggcatggtggcacgcacctgtaatcccagctacttgggaggctgaggcaggagaattgcttgaacctgggaggcagaagttgcagtgagctgagatcatgccattgcactctagcctgggcaacaagagcaaaactccgtctcaaaaaaaaaaaaaaaaaaagctgataaactagcctgcaccctcctcccactgcaatgtctagttaactttgtaatcccacaggttttctttttgctccattgagaaagccacttttaatattttaaagttgctctctgtaccacccccaccttccccccatgcctcctaaggaatcaaagttcaaaccagactctgagtgggggatgggtgagattatcagaccaagttagttctttagattgcttagaggcccagaagggtttcaagccctttgaaggggtatttgggtggcacctggcatcctttgtttctggcaacagagtgcactcagcactcctggggggcaagggcttcctcccatccttggcttatggaaagccatcccagatcaggccccccaactctccagaacaggctacaaacatgcaaattagaattcttttaatataaaaaaaagtactaaaataaaaacg

SEQ ID NO: 362746 - DNA, 779 bp, Homo sapiens
gtatcaacgcagagtgcccattacggccggggagcagggtccgagggctgtgtcagaaggctgggcagccatggcgtcctatttcgatgaacacgactgcgagccgtcggaccctgagcaggagacgcgaaccaacatgctgctggagctcgcaaggtcacttttcaataggatggactttgaagacttggggttggtagtagattgggaccaccacctgcctccaccagctgccaagactgtggttgagaacctccccaggacagtcatcagaggctctcaggctgagctcaagtgccccgtgtgtcttttggaatttgaggaggaggagactgccattgagatgccttgccatcaccttttccattccagctgcattctgccctggctaagcaaggtactgcttctcttcttctagctctcaccgtgccctgggcccagtactcaagcttctttctgttcatggactgctgggggatggaagaagagtggcagttgggagcaggggagggtggttatcagcttatgaagatcagaccaaggctagaacactactctacttttctcagacaaattcctgtcccttgtgccgctatgagctgcccactgatgacgacacttatgaggagcacagacgagataaggctcgaaaacagcagcagcaacaccgactggagaacctccatggagccatgtacacgtgaggaggttggggctgagtgctggccctctgcgtcttccttattaaccttgaatcctcattaaaggtttctttaccc

SEQ ID NO: 362747 - DNA, 571 bp, Homo sapiens
gtatcaacgcagagtgcccattacggccggggagcagggtccgagggctgtgtcagaaggctgggcagccatggcgtcctatttcgatgaacacgactgcgagccgtcggaccctgagcaggagacgcgaaccaacatgctgctggagctcgcaaggtcacttttcaataggatggactttgaagacttggggttggtagtagattgggaccaccacctgcctccaccagctgccaagactgtggttgagaacctccccaggacagtcatcagaggctctcaggctgaggaggagactgccattgagatgccttgccatcaccttttccattccagctgcattctgccctggctaagcaagacaaattcctgtcccttgtgccgctatgagctgcccactgatgacgacacttatgaggagcacagacgagataaggctcgaaaacagcagcagcaacaccgactggagaacctccatggagccatgtacacgtgaggaggttggggctgagtgctggccctctgcgtcttccttattaaccttgaatcctcattaaaggtttctttaccc

SEQ ID NO: 362748 - DNA, 497 bp, Homo sapiens
gtatcaacgcagagtgcccattacggccggggagcagggtccgagggctgtgtcagaaggctgggcagccatggcgtcctatttcgatgaacacgactgcgagccgtcggaccctgagcaggagacgcgaaccaacatgctgctggagctcgcaaggtcacttttcaataggatggactttgaagacttggggttggtagtagattgggaccaccacctgcctccaccagctgccaagactgtggttgagaacctccccaggacagtcatcagaggctctcaggctgacaaattcctgtcccttgtgccgctatgagctgcccactgatgacgacacttatgaggagcacagacgagataaggctcgaaaacagcagcagcaacaccgactggagaacctccatggagccatgtacacgtgaggaggttggggctgagtgctggccctctgcgtcttccttattaaccttgaatcctcattaaaggtttctttaccc

SEQ ID NO: 362749 - DNA, 6730 bp, Homo sapiens
ctgtcggcgggaagcggcgatcctgccaccgggaggtgtggaagagccggattctggctacattggagattggttgctttctaaaactgaaggagaagcccatgaagagatggtggattctcactgagttttgactagcggaagaaaagagagagttcaagtggatggccttgaggacttgaaaagctgagatatgatgattttgaagtcatttcacatcgaagccatgatttaaatatcggcgttaagatttcaacaagaaaaacttaagcttccttggattcccacgtcaaaggaaagtttcaagctttcagaaggagttctcactcgaagataaagaacagctcgctaaccacgaaagaggaatcgatgctcagcttttagttgcacttcctaaagttgcagaattaagacaaatctttgaaccaaagaagaaagaattcttagaaatgaaaagaaaagaaagaattgccaggcgcctggaagggattgaaaatgacactcagcccatcctcttgcagagctgcacaggattggtgactcaccgcctgctggaggaagacacccctcgatacatgagagccagcgaccctgccagcccccacatcggccgatcaaatgaagaggaggaaacttctgattcttctctagaaaagcaaactcgatccaaatactgcacagaaacctccggtgtccacggtgactcaccctatggttcgggtaccatggacacccacagtctggagtccaaagccgaaagaattgcaaggtacaaagcagaaagaaggcgacagctggcagagaagtatgggctgactctggatcccgaggccgactccgagtatttatcccgctataccaagtccaggaaggagcctgatgctgtcgagaagcggggaggaaaaagtgacaaacaggaagagtcaagcagagatgcgagttctctgtaccccgggaccgagacgatggggctcaggacctgtgccggtgaatccaaggactatgccctccatgcgggtgacggctcttccgacccggaggtgctgctgaacatagaaaaccaaagacgaggtcaagagctgagtgccacccggcaggcccatgacctgtccccagcagccgagagttcctcgaccttctctttctctgggcgagactcctccttcactgaagtgccacggtcccccaagcacgcccacagctcctccctgcagcaggcagcctcccggagcccctcctttggtgacccacagctatcccctgaggcccgacccaggtgcacttcacattcagaaacgccaactgtcgatgatgaagaaaaggtggatgaacgagccaagctgagcgtcgccgccaagaggttgcttttcagggagatggaaaaatcttttgatgaacaaaatgttccaaagcgacgctcaagaaacacagctgtggagcagaggctacgccgtctgcaggacaggtccctcacccagcccatcaccactgaagaggtggtcatcgcagccacattgcaggcctctgctcaccaaaaggccttagccaaggaccagacaaatgagggcaaagagcttgctgagcaaggagaacctgattcctccactctaagcttggccgaaaagttggccttgtttaacaaattgtcccagccagtctcaaaagcgatttctacccggaacagaatagacacgagacagaggagaatgaacgctcgctatcaaactcagccagtcacactgggagaggtggagcaggtgcagagtggaaagctcattcctttctcacctgccgtgaacacatcagtgtctaccgtagcatccacggttgctccaatgtatgccggagatcttcgcacaaagccacctcttgaccacaatgcaagtgccactgactataagttttcttcttcaatagaaaattcggactctccagttagaagcattctgaaatcgcaagcttggcagcctttggtagagggtagcgagaacaagggaatgttgagagaatatggagagacagaaagcaagagagctttgacaggtcgagacagtgggatggagaagtatgggtcctttgaggaagcagaagcatcctaccccatcctgaaccgagccagggaaggagacagccataaggaatctaaatatgctgttcccagaagaggaagcctggaacgggcgaaccctcccatcacccacctcggggatgaaccgaaggaattttccatggctaaaatgaatgcacaaggaaacttggacttgagggacaggctgccctttgaagagaaggtggaggtggagaatgttatgaaaaggaagttttcactaagagcggcagagttcggggagcccacttccgagcagacggggacagctgctgggaaaactattgctcaaaccacagcccccgtgtcctggaagccccaggattcttcggaacagccacaggagaagctctgcaagaatccatgtgcgatgtttgctgctggagagatcaaaacgccgacaggggagggccttcttgactcacccagcaaaaccatgtctattaaagaaagattggcactgttgaagaaaagcggggaggaagattggagaaacagactcagcaggaggcaggagggcggcaaggcgccggccagcagcctgcacacccaggaagcagggcggtccctcatcaagaagcgggtcacagaaagtcgagagagccaaatgacgattgaggagaggaagcagctcatcactgtgagagaggaggcctggaagacgagaggcagaggagcggccaacgactcgacccagttcactgtggctggcaggatggtgaagaaaggtttggcgtcacctactgccataaccccagtagcctcagccatttgcggtaaaacaagaggcaccacacccgtttccaaacccctggaagatatcgaagccagaccagatatgcagttagaatcggacctgaagttggacaggctggaaacctttctaagaaggctgaataacaaagttggcgggatgcacgaaacggtgctcactgtcaccggcaaatctgtgaaggaggtgatgaagccagatgatgatgaaacctttgccaaattttaccgcagcgtggattataatatgccaagaagtcctgtggagatggatgaggacttcgatgtcattttcgatccttatgcacccaaattgacgtcttccgtggccgagcacaagcgggcagttaggcccaagcgccgggttcaggcctccaaaaaccccctgaaaatgctggcggcaagagaagatctccttcaggaatacactgagcagagattaaacgttgccttcatggagtcaaagcggatgaaagtagaaaagatgtcttccaactccaacttctcagaagtcaccctggcgggtttagccagtaaagaaaacttcagcaacgtcagcctgcggagcgtcaacctgacggaacagaactctaacaacagcgccgtgccctacaagaggctgatgctgttgcagattaaaggaagaagacatgtgcagaccaggctggtggaacctcgagcttcggcgctcaacagtggggactgcttcctcctgctctctccccactgctgcttcctgtgggtaggagagtttgcaaacgtcatagaaaaggcgaaggcctcagaacttgcaactttaattcagacaaagagggaacttggttgtagagctacttatatccaaaccattgaagaaggaattaatacacacactcatgcagccaaagacttctggaagcttctgggtggccaaaccagttaccaatctgctggagacccaaaagaagatgaactctatgaagcagccataatagaaactaactgcatttaccgtctcatggatgacaaacttgttcctgatgacgactactgggggaaaattccgaagtgctcccttctgcaacccaaagaggtactggtgtttgattttggtagtgaagtttacgtatggcatgggaaagaagtcacattagcacaacgaaaaatagcatttcagctggcaaagcacttatggaatggaacctttgactatgagaactgtgacatcaatcccctggatcctggagaatgcaatccgcttatccccagaaaaggacaggggcggcccgactgggcgatatttgggagacttactgaacacaatgagacgattttgttcaaagagaagtttctggattggacggaactgaagagatcgaatgagaagaaccccggggaacttgcccagcacaaggaagaccccaggactgatgtcaaggcatacgatgtgacacggatggtgtccatgccccagacgacagcaggcaccatcctggacggagtgaacgtcggccgtggctatggcctggtggaaggacacgacaggaggcagtttgagatcaccagcgtttccgtggatgtctggcacatcctggaattcgactatagcaggctccccaaacaaagcatcgggcagttccatgagggggatgcctatgtggtcaagtggaagttcatggtgagcacggcagtgggaagtcgccagaagggagagcactcggtgagggcagccggcaaagagaagtgcgtctacttcttctggcaaggccggcactccaccgtgagtgagaagggcacgtcggcgctgatgacggtggagctggacgaggaaaggggggcccaggtccaggttctccagggaaaggagcccccctgtttcctgcagtgtttccagggggggatggtggtgcactcggggaggcgggaagaggaagaagaaaatgtgcaaagtgagtggcggctgtactgcgtgcgtggagaggtgcccgtggaagggaatttgctggaagtggcctgtcactgtagcagcctgaggtccagaacttccatggtggtgcttaacgtcaacaaggccctcatctacctgtggcacggatgcaaagcccaggcccacacgaaggaggtcggaaggaccgctgcgaacaagatcaaggaacaatgtcccctggaagcaggactgcatagtagcagcaaagtcacaatacacgagtgtgatgaaggctccgagccactcggattctgggatgccttaggaaggagagacaggaaagcctacgattgcatgcttcaagatcctggaagttttaacttcgcgccccgcctgttcatcctcagcagctcctctggggattttgcagccacagagtttgtgtaccctgcccgagccccctctgtggtcagttccatgcccttcctgcaggaagatctgtacagcgcgccccagccagcacttttccttgttgacaatcaccacgaggtgtacctctggcaaggctggtggcccatcgagaacaagatcactggttccgcccgcatccgctgggcctccgaccggaagagtgcgatggagactgtgctccagtactgcaaaggaaaaaatctcaagaaaccagcccccaagtcttaccttatccacgctggtctggagcccctgacattcaccaatatgtttcccagctgggagcacagagaggacatcgctgagatcacagagatggacacggaagtttccaatcagatcaccctcgtggaagacgtcttagccaagctctgtaaaaccatttacccgctggccgacctcctggccaggccactcccggagggggtcgatcctctgaagcttgagatctatctcaccgacgaagacttcgagtttgcactagacatgacgagggatgaatacaacgccctgcccgcctggaagcaggtgaacctgaagaaagcaaaaggcctgttctgagtggggagacgccagaggagcctcacggtcacgtccaacaacaccactgcaccagggaaatggatatatatttttggactggtgtttttcacaaagtatttttcaatcagagttttcagaacctgacattgttaaagatactgcttgtcccggagttgtgtattttgtaaatgttcaagggaactgtttggaaacttctttccaccattcaggaggttatcagaattaataaaagtatctgttatgtgcacttaagccgcagctgctatagatagcactgccttcttgttccagctaggcaatgcctttttttttttttttgaagcagttctctttataaagtgttattttgatagtttgtggattctaaaatatatatatatttatataaacaccatataagtcaaatatgtatttaacaaagcaatatgtattcattcactttcaagatttgttttggtgtcaaaataacatgaaaaggtagatggagttgcttctgttgaattagctctgccaccaatatgtatcttcatacacgtttggaaatgtttcctgcagcattaggtatgacttgttctgagtactgcttccggtgctaaaatgaacaaagaatttgtacttaatggcatggactctggagaatctatgcgaatcaacctttctaccttaatatctccccaaaaatgtatagtgccttgtttttatgtacagtttatatacagaaaagtttgctctgcatttttgatgatggtttggaacattatctacaattttactctcaaatagtcaaaataaaaacatctcaatttctaataccggttgtaaacaaacagtacacatgtcattttgtgatataggactcccaaataaaagtatcagaataaacacaacaattaactggtaaaaaaaaagaa

SEQ ID NO: 362750 - DNA, 8314 bp, Homo sapiens
ttcactgctctgactgcgtcctccccaggctgaagtgtcctcaggtttcatgtggatttgcccagtaatggatggctccaccgaggccaggttggggaagttcagcctcgaggacactaggggacgaaaaacttcaaaaagaagactctttttattaatattttggcgttctttttggagaggaacttttgggatgtagcctttacctgtttcctgaatttgacatccaaaaagccttttggaaaacaccattctaaatttatcctgttctgaatcatcatcgcttctgatagatgcagttgcttgctgacatcgtgatctttgattttgtacaacgctatttgggctaacttttgggattttactttgtgcttagaatttgaaagtagtattcattggaaagagactccaagaaaatactcgaagacatcaaaagctggattcgagggtataacgtgttttgttttgttttttaaattagaaaaataaggaattgcagtgtgattttctttccccctttaacttagaggaacgaggattatacagaaatttgaaatttcaacaagaaaaacttaagcttccttggattcccacgtcaaaggaaagtttcaagctttcagaaggagttctcactcgaagataaagaacagctcgctaaccacgaaagaggaatcgatgctcagcttttagttgcacttcctaaagttgcagaattaagacaaatctttgaaccaaagaagaaagaattcttagaaatgaaaagaaaagaaagaattgccaggcgcctggaagggattgaaaatgacactcagcccatcctcttgcagagctgcacaggattggtgactcaccgcctgctggaggaagacacccctcgatacatgagagccagcgaccctgccagcccccacatcggccgatcaaatgaagaggaggaaacttctgattcttctctagaaaagcaaactcgatccaaatactgcacagaaacctccggtgtccacggtgactcaccctatggttcgggtaccatggacacccacagtctggagtccaaagccgaaagaattgcaaggtacaaagcagaaagaaggcgacagctggcagagaagtatgggctgactctggatcccgaggccgactccgagtatttatcccgctataccaagtccaggaaggagcctgatgctgtcgagaagcggggaggaaaaagtgacaaacaggaagagtcaagcagagatgcgagttctctgtaccccgggaccgagacgatggggctcaggacctgtgccggtgaatccaaggactatgccctccatgcgggtgacggctcttccgacccggaggtgctgctgaacatagaaaaccaaagacgaggtcaagagctgagtgccacccggcaggcccatgacctgtccccagcagccgagagttcctcgaccttctctttctctgggcgagactcctccttcactgaagtgccacggtcccccaagcacgcccacagctcctccctgcagcaggcagcctcccggagcccctcctttggtgacccacagctatcccctgaggcccgacccagtacagggaaacccaaacatgagtggtttctccagaaagattccgaaggggacacaccttcacttatcaactggccttccagagttaaagttagagaaaaattggtgaaagaggaaagtgctcgaaacagccctgaactcgcctcagagtccgtaactcagaggagacaccagccagcgccagtccattacgtgtcatttcagtctgagcactcagcctttgatagggtccccagcaaggcagcaggctctacacgacagccaatccgtggctatgtccaacccgcagataccggtcacaccgccaagctggtgacgccagaaaccccagaaaatgcatctgagtgtagctgggtagcatcagccacccagaatgtccccaaacctcccagcttgacggttctagaaggtgacggaagggatagcccagttctccatatctgcgagtcaaaagcagaagaagaagaaggggaaggagaaggagaagaaaaagaagaagatgtgtgcttcactgaagctctcgagcaaagcaagaaaaccctactggctttggagggtgatgggctagtgagaagcccagaagatccctctagaaatgaggactttggtaagcctgctgtgagcacagtcaccttagagcatcagaaggaactggaaaacgtggcacaaccccctcaagctccgcaccagcccactgagaggacaggcaggagcgagatggttctctacattcaaagtgagcctgtgtcccaagacgccaaaccaactggtcacaacagggaagcctcgaaaaagcgcaaggtccgtacccgctctctgtcagatttcacaggcccccctcagctccaggccttgaagtataaggacccagcttccaggagagagctggagctgcccagctccaagaccgaagggccttatggggagatcagcatgctggacacaaaggtctctgtcgcccagctccgaagtgcgttcctggcatctgccaacgcctgcaggagacctgaactcaaatcacgggtagagaggtcggctgaaggacctggcttgcccaccggtgtggaacgggagagagggtcccggaaaccaagacgctatttttctcctggtgaaagtagaaaaacttccgagagatttagaacccaacctataacttcagcagaacgaaaggaatcggataggtgcacttcacattcagaaacgccaactgtcgatgatgaagaaaaggtggatgaacgagccaagctgagcgtcgccgccaagaggttgcttttcagggagatggaaaaatcttttgatgaacaaaatgttccaaagcgacgctcaagaaacacagctgtggagcagaggctacgccgtctgcaggacaggtccctcacccagcccatcaccactgaagaggtggtcatcgcagccactgaacctatccccgcttcgtgttctgggggcacccaccctgtaatggcgagacttcctagccccactgtagctaggagcgctgtgcagcctgccagattgcaggcctctgctcaccaaaaggccttagccaaggaccagacaaatgagggcaaagagcttgctgagcaaggagaacctgattcctccactctaagcttggccgaaaagttggccttgtttaacaaattgtcccagccagtctcaaaagcgatttctacccggaacagaatagacacgagacagaggagaatgaacgctcgctatcaaactcagccagtcacactgggagaggtggagcaggtgcagagtggaaagctcattcctttctcacctgccgtgaacacatcagtgtctaccgtagcatccacggttgctccaatgtatgccggagatcttcgcacaaagccacctcttgaccacaatgcaagtgccactgactataagttttcttcttcaatagaaaattcggactctccagttagaagcattctgaaatcgcaagcttggcagcctttggtagagggtagcgagaacaagggaatgttgagagaatatggagagacagaaagcaagagagctttgacaggtcgagacagtgggatggagaagtatgggtcctttgaggaagcagaagcatcctaccccatcctgaaccgagccagggaaggagacagccataaggaatctaaatatgctgttcccagaagaggaagcctggaacgggcgaaccctcccatcacccacctcggggatgaaccgaaggaattttccatggctaaaatgaatgcacaaggaaacttggacttgagggacaggctgccctttgaagagaaggtggaggtggagaatgttatgaaaaggaagttttcactaagagcggcagagttcggggagcccacttccgagcagacggggacagctgctgggaaaactattgctcaaaccacagcccccgtgtcctggaagccccaggattcttcggaacagccacaggagaagctctgcaagaatccatgtgcgatgtttgctgctggagagatcaaaacgccgacaggggagggccttcttgactcacccagcaaaaccatgtctattaaagaaagattggcactgttgaagaaaagcggggaggaagattggagaaacagactcagcaggaggcaggagggcggcaaggcgccggccagcagcctgcacacccaggaagcagggcggtccctcatcaagaagcgggtcacagaaagtcgagagagccaaatgacgattgaggagaggaagcagctcatcactgtgagagaggaggcctggaagacgagaggcagaggagcggccaacgactcgacccagttcactgtggctggcaggatggtgaagaaaggtttggcgtcacctactgccataaccccagtagcctcagccatttgcggtaaaacaagaggcaccacacccgtttccaaacccctggaagatatcgaagccagaccagatatgcagttagaatcggacctgaagttggacaggctggaaacctttctaagaaggctgaataacaaagttggcgggatgcacgaaacggtgctcactgtcaccggcaaatctgtgaaggaggtgatgaagccagatgatgatgaaacctttgccaaattttaccgcagcgtggattataatatgccaagaagtcctgtggagatggatgaggacttcgatgtcattttcgatccttatgcacccaaattgacgtcttccgtggccgagcacaagcgggcagttaggcccaagcgccgggttcaggcctccaaaaaccccctgaaaatgctggcggcaagagaagatctccttcaggaatacactgagcagagattaaacgttgccttcatggagtcaaagcggatgaaagtagaaaagatgtcttccaactccaacttctcagaagtcaccctggcgggtttagccagtaaagaaaacttcagcaacgtcagcctgcggagcgtcaacctgacggaacagaactctaacaacagcgccgtgccctacaagaggctgatgctgttgcagattaaaggaagaagacatgtgcagaccaggctggtggaacctcgagcttcggcgctcaacagtggggactgcttcctcctgctctctccccactgctgcttcctgtgggtaggagagtttgcaaacgtcatagaaaaggcgaaggcctcagaacttgcaactttaattcagacaaagagggaacttggttgtagagctacttatatccaaaccattgaagaaggaattaatacacacactcatgcagccaaagacttctggaagcttctgggtggccaaaccagttaccaatctgctggagacccaaaagaagatgaactctatgaagcagccataatagaaactaactgcatttaccgtctcatggatgacaaacttgttcctgatgacgactactgggggaaaattccgaagtgctcccttctgcaacccaaagaggtactggtgtttgattttggtagtgaagtttacgtatggcatgggaaagaagtcacattagcacaacgaaaaatagcatttcagctggcaaagcacttatggaatggaacctttgactatgagaactgtgacatcaatcccctggatcctggagaatgcaatccgcttatccccagaaaaggacaggggcggcccgactgggcgatatttgggagacttactgaacacaatgagacgattttgttcaaagagaagtttctggattggacggaactgaagagatcgaatgagaagaaccccggggaacttgcccagcacaaggaagaccccaggactgatgtcaaggcatacgatgtgacacggatggtgtccatgccccagacgacagcaggcaccatcctggacggagtgaacgtcggccgtggctatggcctggtggaaggacacgacaggaggcagtttgagatcaccagcgtttccgtggatgtctggcacatcctggaattcgactatagcaggctccccaaacaaagcatcgggcagttccatgagggggatgcctatgtggtcaagtggaagttcatggtgagcacggcagtgggaagtcgccagaagggagagcactcggtgagggcagccggcaaagagaagtgcgtctacttcttctggcaaggccggcactccaccgtgagtgagaagggcacgtcggcgctgatgacggtggagctggacgaggaaaggggggcccaggtccaggttctccagggaaaggagcccccctgtttcctgcagtgtttccagggggggatggtggtgcactcggggaggcgggaagaggaagaagaaaatgtgcaaagtgagtggcggctgtactgcgtgcgtggagaggtgcccgtggaagggaatttgctggaagtggcctgtcactgtagcagcctgaggtccagaacttccatggtggtgcttaacgtcaacaaggccctcatctacctgtggcacggatgcaaagcccaggcccacacgaaggaggtcggaaggaccgctgcgaacaagatcaaggaacaatgtcccctggaagcaggactgcatagtagcagcaaagtcacaatacacgagtgtgatgaaggctccgagccactcggattctgggatgccttaggaaggagagacaggaaagcctacgattgcatgcttcaagatcctggaagttttaacttcgcgccccgcctgttcatcctcagcagctcctctggggattttgcagccacagagtttgtgtaccctgcccgagccccctctgtggtcagttccatgcccttcctgcaggaagatctgtacagcgcgccccagccagcacttttccttgttgacaatcaccacgaggtgtacctctggcaaggctggtggcccatcgagaacaagatcactggttccgcccgcatccgctgggcctccgaccggaagagtgcgatggagactgtgctccagtactgcaaaggaaaaaatctcaagaaaccagcccccaagtcttaccttatccacgctggtctggagcccctgacattcaccaatatgtttcccagctgggagcacagagaggacatcgctgagatcacagagatggacacggaagtttccaatcagatcaccctcgtggaagacgtcttagccaagctctgtaaaaccatttacccgctggccgacctcctggccaggccactcccggagggggtcgatcctctgaagcttgagatctatctcaccgacgaagacttcgagtttgcactagacatgacgagggatgaatacaacgccctgcccgcctggaagcaggtgaacctgaagaaagcaaaaggcctgttctgagtggggagacgccagaggagcctcacggtcacgtccaacaacaccactgcaccagggaaatggatatatatttttggactggtgtttttcacaaagtatttttcaatcagagttttcagaacctgacattgttaaagatactgcttgtcccggagttgtgtattttgtaaatgttcaagggaactgtttggaaacttctttccaccattcaggaggttatcagaattaataaaagtatctgttatgtgcacttaagccgcagctgctatagatagcactgccttcttgttccagctaggcaatgcctttttttttttttttgaagcagttctctttataaagtgttattttgatagtttgtggattctaaaatatatatatatttatataaacaccatataagtcaaatatgtatttaacaaagcaatatgtattcattcactttcaagatttgttttggtgtcaaaataacatgaaaaggtagatggagttgcttctgttgaattagctctgccaccaatatgtatcttcatacacgtttggaaatgtttcctgcagcattaggtatgacttgttctgagtactgcttccggtgctaaaatgaacaaagaatttgtacttaatggcatggactctggagaatctatgcgaatcaacctttctaccttaatatctccccaaaaatgtatagtgccttgtttttatgtacagtttatatacagaaaagtttgctctgcatttttgatgatggtttggaacattatctacaattttactctcaaatagtcaaaataaaaacatctcaatttctaataccggttgtaaacaaacagtacacatgtcattttgtgatataggactcccaaataaaagtatcagaataaacacaacaattaactggtaaaaaaaaagaa

SEQ ID NO: 362751 - DNA, 692 bp, Homo sapiens
ggtgagtgttctatttgtgtcttttgcacattttattgatatttattttttccttatgtatgtcccttcatgtattaaggatattaactagttgctgtattacaaatatttcccatttgttacttggtttttcttttctttttaattttgcattgtttttcatttttatataattaatgcattattttcccttttgattggttcttttactattgcacttgaaaaggctttctccaccttgaagctcagataaatcctacctgtgtttccacagtgctttgaattatttcatattttacattcattcttcatctggaatttactttgatgcacatgatatcttcagctttgttctcttttctttcaaagatcctggaagttttaacttcgcgccccgcctgttcatcctcagcagctcctctggggattttgcagccacagagtttgtgtaccctgcccgagccccctctgtggtcagttccatgcccttcctgcaggaagatctgtacagcgcgccccagccaggtaaggcctgcagggggcagctatgctgagcagtagaaggcacatcttccagaaagccttttgattttacgttggtatttattaagcagcttctgtttgccaagtacattcccagagcacccagaacatgtgcttacactcttttcatcctcacccctacaccaaaa

SEQ ID NO: 362752 - DNA, 639 bp, Homo sapiens
ttcactgctctgactgcgtcctccccaggctgaagtgtcctcaggtttcatgtggatttgcccagtaatggatggctccaccgaggccaggttggggaagttcagcctcgaggacactaggggacgaaaaacttcaaaaagaagactctttttattaatattttggcgttctttttggagaggaacttttgggatgtagcctttacctgtttcctgaatttgacatccaaaaagccttttggaaaacaccattctaaatttatcctgttctgaatcatcatcgcttctgatagatgcagttgcttgctgacatcgtgatctttgattttgtacaacgctatttgggctaacttttgggattttactttgtgcttagaatttgaaagtagtattcattggaaagagactccaagaaaatactcgaagacatcaaaagctggattcgagggtataacgtgttttgttttgttttttaaattagaaaaataaggaattgcagtgtgattttctttccccctttaacttagaggaacgaggattatacagaaatttgaagtaagtgaaaaatcttcctataaatctaaatgcagtaggtttttttttgttgtttttgtttttgcttttttttaagtgccatct

SEQ ID NO: 362753 - DNA, 1169 bp, Homo sapiens
tatatacccacaaattttaaatttaaaaaaagcagacaataacaagtattggcaaggatgtgaaaattggaacccttacacattacttggaaaacagtctagcaatttctcaaaagatttaacaatacagttaccatatgactagcaactctactagatatctacccaagagaaatgaaaacacttgtacatgaaggttcatagccatattagtcatagtggccaaaagatggaaataacccaaatatctaccaacatattaatggatgaaaaaaattagtggaatattattctgccataaaaaagaattcagtattgatacatgctacaacatggatgcaccttaaaaacattacactaagtttaaaaactcagtcacaaaggaacatatatatataattccatctgtatgaaatgtccaaaacaggcaagtccataaatacaggagtagattagtggattctgaggactaaggatgggggaaatgcggagtgactgctaacgggtacagggcttcttcttccgggagatgaaaatgttctgaaattagtgatgacagttgcacaactctgtgaataaactgaaatctgtacacataaaaagagtgaattttatgacatgtgaattatatctcaataaagctattataaagctgttatcataatagtaataataattttgggtcaccagcactctccagacttataaagaactcttggagtttctcccttgcagatgtcccctggaagcaggactgcatagtagcagcaaagtcacaatacacgagtgtgatgaaggctccgagccactcggattctgggatgccttaggaaggagagacaggaaagcctacgattgcatgcttcaaggtaatgtggcatccacagtctgcgatctggtttttttgtttgtttttggaaacaagagtcttgctctgttatccaggctggagtatagtggtatgatcacagctcactgcagcttcaacctcctgggctcaagtgatcagcctgcctcagcctctcaaagtgcaggcttgagccactgtgccccattcatgttttatcttaattcttcagtgtgtcttaaatctagtgtgatgagtattatgtccagctgattgaacagtttttttcttcccaggggtgagtttaacttggacaccagga

SEQ ID NO: 362754 - DNA, 532 bp, Homo sapiens
cttatactcaactccattgtcaatattattttccccaagaagaaaaataaaaaatgaaaagacacaacactaatcttttgtctccacaggatgtggcaaaatgagaaataacaattacacgttattttcaaaggtggtccgactgcttcagccgtggaccacttacactaaagagaaaatttccagcacttcacaagatccagctgttctttcacagacgactaataaaaaagtaaaagaagcgacattaagctgcgcccaaacaggccaggaatgggtcctaaggcatcacgaaacttcccgaggacattatgtatttagagaaggccccacagaaaccctcaagcgggaaagttacgtcttctgggtctcggggtggcaggcagcctgaaccccgaggggctcgaggcgaggcgcccccggccggattcgggcccaaaccagcccgccacgccctgagctccgcgcagcaaaccggccggccgagcggcggccctcggaatggtgttttctcggcgccacaggagggaga

SEQ ID NO: 362755 - DNA, 475 bp, Homo sapiens
gcaccaccaaggccccgcgctagtgtgcacccccggcccgggcccggcaggtgggcgaggagggcgggcgcagtcgggctctgcaggagcgcgcggagattctggctacattggagattggttgctttctaaaactgaaggagaagcccatgaagagatggtggattctcactgagttttgactagcggaagaaaaggtctttagacaataacttaactctttcaaccaatttccagacagaaaatctttgactccacctatgacctgtaagcccccaccccccaagttgtcccgcctttctggatcgaaccagtgtataccttccatgtattgattaatgtcttctgtctctgtaaagcacataaaaccaagctgtaacccaaccgccttgggtacatgttctcaggagctcttgagtctgtgtcacaggtcatgatccataaccttggcaaaataaacttctaaattgactga

SEQ ID NO: 362756 - DNA, 6574 bp, Homo sapiens
gcacttgggctgtggtttcctggagatgggagatcgggagctttggtgtacttcttgaaggtttcagaaaaaggccaagacttcttcagaactatttcaacaagaaaaacttaagcttccttggattcccacgtcaaaggaaagtttcaagctttcagaaggagttctcactcgaagataaagaacagctcgctaaccacgaaagaggaatcgatgctcagcttttagttgcacttcctaaagttgcagaattaagacaaatctttgaaccaaagaagaaagaattcttagaaatgaaaagaaaagaaagaattgccaggcgcctggaagggattgaaaatgacactcagcccatcctcttgcagagctgcacaggattggtgactcaccgcctgctggaggaagacacccctcgatacatgagagccagcgaccctgccagcccccacatcggccgatcaaatgaagaggaggaaacttctgattcttctctagaaaagcaaactcgatccaaatactgcacagaaacctccggtgtccacggtgactcaccctatggttcgggtaccatggacacccacagtctggagtccaaagccgaaagaattgcaaggtacaaagcagaaagaaggcgacagctggcagagaagtatgggctgactctggatcccgaggccgactccgagtatttatcccgctataccaagtccaggaaggagcctgatgctgtcgagaagcggggaggaaaaagtgacaaacaggaagagtcaagcagagatgcgagttctctgtaccccgggaccgagacgatggggctcaggacctgtgccggtgaatccaaggactatgccctccatgcgggtgacggctcttccgacccggaggtgctgctgaacatagaaaaccaaagacgaggtcaagagctgagtgccacccggcaggcccatgacctgtccccagcagccgagagttcctcgaccttctctttctctgggcgagactcctccttcactgaagtgccacggtcccccaagcacgcccacagctcctccctgcagcaggcagcctcccggagcccctcctttggtgacccacagctatcccctgaggcccgacccaggtgcacttcacattcagaaacgccaactgtcgatgatgaagaaaaggtggatgaacgagccaagctgagcgtcgccgccaagaggttgcttttcagggagatggaaaaatcttttgatgaacaaaatgttccaaagcgacgctcaagaaacacagctgtggagcagaggctacgccgtctgcaggacaggtccctcacccagcccatcaccactgaagaggtggtcatcgcagccacattgcaggcctctgctcaccaaaaggccttagccaaggaccagacaaatgagggcaaagagcttgctgagcaaggagaacctgattcctccactctaagcttggccgaaaagttggccttgtttaacaaattgtcccagccagtctcaaaagcgatttctacccggaacagaatagacacgagacagaggagaatgaacgctcgctatcaaactcagccagtcacactgggagaggtggagcaggtgcagagtggaaagctcattcctttctcacctgccgtgaacacatcagtgtctaccgtagcatccacggttgctccaatgtatgccggagatcttcgcacaaagccacctcttgaccacaatgcaagtgccactgactataagttttcttcttcaatagaaaattcggactctccagttagaagcattctgaaatcgcaagcttggcagcctttggtagagggtagcgagaacaagggaatgttgagagaatatggagagacagaaagcaagagagctttgacaggtcgagacagtgggatggagaagtatgggtcctttgaggaagcagaagcatcctaccccatcctgaaccgagccagggaaggagacagccataaggaatctaaatatgctgttcccagaagaggaagcctggaacgggcgaaccctcccatcacccacctcggggatgaaccgaaggaattttccatggctaaaatgaatgcacaaggaaacttggacttgagggacaggctgccctttgaagagaaggtggaggtggagaatgttatgaaaaggaagttttcactaagagcggcagagttcggggagcccacttccgagcagacggggacagctgctgggaaaactattgctcaaaccacagcccccgtgtcctggaagccccaggattcttcggaacagccacaggagaagctctgcaagaatccatgtgcgatgtttgctgctggagagatcaaaacgccgacaggggagggccttcttgactcacccagcaaaaccatgtctattaaagaaagattggcactgttgaagaaaagcggggaggaagattggagaaacagactcagcaggaggcaggagggcggcaaggcgccggccagcagcctgcacacccaggaagcagggcggtccctcatcaagaagcgggtcacagaaagtcgagagagccaaatgacgattgaggagaggaagcagctcatcactgtgagagaggaggcctggaagacgagaggcagaggagcggccaacgactcgacccagttcactgtggctggcaggatggtgaagaaaggtttggcgtcacctactgccataaccccagtagcctcagccatttgcggtaaaacaagaggcaccacacccgtttccaaacccctggaagatatcgaagccagaccagatatgcagttagaatcggacctgaagttggacaggctggaaacctttctaagaaggctgaataacaaagttggcgggatgcacgaaacggtgctcactgtcaccggcaaatctgtgaaggaggtgatgaagccagatgatgatgaaacctttgccaaattttaccgcagcgtggattataatatgccaagaagtcctgtggagatggatgaggacttcgatgtcattttcgatccttatgcacccaaattgacgtcttccgtggccgagcacaagcgggcagttaggcccaagcgccgggttcaggcctccaaaaaccccctgaaaatgctggcggcaagagaagatctccttcaggaatacactgagcagagattaaacgttgccttcatggagtcaaagcggatgaaagtagaaaagatgtcttccaactccaacttctcagaagtcaccctggcgggtttagccagtaaagaaaacttcagcaacgtcagcctgcggagcgtcaacctgacggaacagaactctaacaacagcgccgtgccctacaagaggctgatgctgttgcagattaaaggaagaagacatgtgcagaccaggctggtggaacctcgagcttcggcgctcaacagtggggactgcttcctcctgctctctccccactgctgcttcctgtgggtaggagagtttgcaaacgtcatagaaaaggcgaaggcctcagaacttgcaactttaattcagacaaagagggaacttggttgtagagctacttatatccaaaccattgaagaaggaattaatacacacactcatgcagccaaagacttctggaagcttctgggtggccaaaccagttaccaatctgctggagacccaaaagaagatgaactctatgaagcagccataatagaaactaactgcatttaccgtctcatggatgacaaacttgttcctgatgacgactactgggggaaaattccgaagtgctcccttctgcaacccaaagaggtactggtgtttgattttggtagtgaagtttacgtatggcatgggaaagaagtcacattagcacaacgaaaaatagcatttcagctggcaaagcacttatggaatggaacctttgactatgagaactgtgacatcaatcccctggatcctggagaatgcaatccgcttatccccagaaaaggacaggggcggcccgactgggcgatatttgggagacttactgaacacaatgagacgattttgttcaaagagaagtttctggattggacggaactgaagagatcgaatgagaagaaccccggggaacttgcccagcacaaggaagaccccaggactgatgtcaaggcatacgatgtgacacggatggtgtccatgccccagacgacagcaggcaccatcctggacggagtgaacgtcggccgtggctatggcctggtggaaggacacgacaggaggcagtttgagatcaccagcgtttccgtggatgtctggcacatcctggaattcgactatagcaggctccccaaacaaagcatcgggcagttccatgagggggatgcctatgtggtcaagtggaagttcatggtgagcacggcagtgggaagtcgccagaagggagagcactcggtgagggcagccggcaaagagaagtgcgtctacttcttctggcaaggccggcactccaccgtgagtgagaagggcacgtcggcgctgatgacggtggagctggacgaggaaaggggggcccaggtccaggttctccagggaaaggagcccccctgtttcctgcagtgtttccagggggggatggtggtgcactcggggaggcgggaagaggaagaagaaaatgtgcaaagtgagtggcggctgtactgcgtgcgtggagaggtgcccgtggaagggaatttgctggaagtggcctgtcactgtagcagcctgaggtccagaacttccatggtggtgcttaacgtcaacaaggccctcatctacctgtggcacggatgcaaagcccaggcccacacgaaggaggtcggaaggaccgctgcgaacaagatcaaggaacaatgtcccctggaagcaggactgcatagtagcagcaaagtcacaatacacgagtgtgatgaaggctccgagccactcggattctgggatgccttaggaaggagagacaggaaagcctacgattgcatgcttcaagatcctggaagttttaacttcgcgccccgcctgttcatcctcagcagctcctctggggattttgcagccacagagtttgtgtaccctgcccgagccccctctgtggtcagttccatgcccttcctgcaggaagatctgtacagcgcgccccagccagcacttttccttgttgacaatcaccacgaggtgtacctctggcaaggctggtggcccatcgagaacaagatcactggttccgcccgcatccgctgggcctccgaccggaagagtgcgatggagactgtgctccagtactgcaaaggaaaaaatctcaagaaaccagcccccaagtcttaccttatccacgctggtctggagcccctgacattcaccaatatgtttcccagctgggagcacagagaggacatcgctgagatcacagagatggacacggaagtttccaatcagatcaccctcgtggaagacgtcttagccaagctctgtaaaaccatttacccgctggccgacctcctggccaggccactcccggagggggtcgatcctctgaagcttgagatctatctcaccgacgaagacttcgagtttgcactagacatgacgagggatgaatacaacgccctgcccgcctggaagcaggtgaacctgaagaaagcaaaaggcctgttctgagtggggagacgccagaggagcctcacggtcacgtccaacaacaccactgcaccagggaaatggatatatatttttggactggtgtttttcacaaagtatttttcaatcagagttttcagaacctgacattgttaaagatactgcttgtcccggagttgtgtattttgtaaatgttcaagggaactgtttggaaacttctttccaccattcaggaggttatcagaattaataaaagtatctgttatgtgcacttaagccgcagctgctatagatagcactgccttcttgttccagctaggcaatgcctttttttttttttttgaagcagttctctttataaagtgttattttgatagtttgtggattctaaaatatatatatatttatataaacaccatataagtcaaatatgtatttaacaaagcaatatgtattcattcactttcaagatttgttttggtgtcaaaataacatgaaaaggtagatggagttgcttctgttgaattagctctgccaccaatatgtatcttcatacacgtttggaaatgtttcctgcagcattaggtatgacttgttctgagtactgcttccggtgctaaaatgaacaaagaatttgtacttaatggcatggactctggagaatctatgcgaatcaacctttctaccttaatatctccccaaaaatgtatagtgccttgtttttatgtacagtttatatacagaaaagtttgctctgcatttttgatgatggtttggaacattatctacaattttactctcaaatagtcaaaataaaaacatctcaatttctaataccggttgtaaacaaacagtacacatgtcattttgtgatataggactcccaaataaaagtatcagaataaacacaacaattaactggtaaaaaaaaagaa

SEQ ID NO: 362757 - DNA, 8056 bp, Homo sapiens
ttcactgctctgactgcgtcctccccaggctgaagtgtcctcaggtttcatgtggatttgcccagtaatggatggctccaccgaggccaggttggggaagttcagcctcgaggacactaggggacgaaaaacttcaaaaagaagactctttttattaatattttggcgttctttttggagaggaacttttgggatgtagcctttacctgtttcctgaatttgacatccaaaaagccttttggaaaacaccattctaaatttatcctgttctgaatcatcatcgcttctgatagatgcagttgcttgctgacatcgtgatctttgattttgtacaacgctatttgggctaacttttgggattttactttgtgcttagaatttgaaagtagtattcattggaaagagactccaagaaaatactcgaagacatcaaaagctggattcgagggtataacgtgttttgttttgttttttaaattagaaaaataaggaattgcagtgtgattttctttccccctttaacttagaggaacgaggattatacagaaatttgaaatttcaacaagaaaaacttaagcttccttggattcccacgtcaaaggaaagtttcaagctttcagaaggagttctcactcgaagataaagaacagctcgctaaccacgaaagaggaatcgatgctcagcttttagttgcacttcctaaagttgcagaattaagacaaatctttgaaccaaagaagaaagaattcttagaaatgaaaagaaaagaaagaattgccaggcgcctggaagggattgaaaatgacactcagcccatcctcttgcagagctgcacaggattggtgactcaccgcctgctggaggaagacacccctcgatacatgagagccagcgaccctgccagcccccacatcggccgatcaaatgaagaggaggaaacttctgattcttctctagaaaagcaaactcgatccaaatactgcacagaaacctccggtgtccacggtgactcaccctatggttcgggtaccatggacacccacagtctggagtccaaagccgaaagaattgcaaggtacaaagcagaaagaaggcgacagctggcagagaagtatgggctgactctggatcccgaggccgactccgagtatttatcccgctataccaagtccaggaaggagcctgatgctgtcgagaagcggggaggaaaaagtgacaaacaggaagagtcaagcagagatgcgagttctctgtaccccgggaccgagacgatggggctcaggacctgtgccggtgaatccaaggactatgccctccatgcgggtgacggctcttccgacccggaggtgctgctgaacatagaaaaccaaagacgaggtcaagagctgagtgccacccggcaggcccatgacctgtccccagcagccgagagttcctcgaccttctctttctctgggcgagactcctccttcactgaagtgccacggtcccccaagcacgcccacagctcctccctgcagcaggcagcctcccggagcccctcctttggtgacccacagctatcccctgaggcccgacccagtacagggaaacccaaacatgagtggtttctccagaaagattccgaaggggacacaccttcacttatcaactggccttccagagttaaagttagagaaaaattggtgaaagaggaaagtgctcgaaacagccctgaactcgcctcagagtccgtaactcagaggagacaccagccagcgccagtccattacgtgtcatttcagtctgagcactcagcctttgatagggtccccagcaaggcagcaggctctacacgacagccaatccgtggctatgtccaacccgcagataccggtcacaccgccaagctggtgacgccagaaaccccagaaaatgcatctgagtgtagctgggtagcatcagccacccagaatgtccccaaacctcccagcttgacggttctagaaggtgacggaagggatagcccagttctccatatctgcgagtcaaaagcagaagaagaagaaggggaaggagaaggagaagaaaaagaagaagatgtgtgcttcactgaagctctcgagcaaagcaagaaaaccctactggctttggagggtgatgggctagtgagaagcccagaagatccctctagaaatgaggactttggtaagcctgctgtgagcacagtcaccttagagcatcagaaggaactggaaaacgtggcacaaccccctcaagctccgcaccagcccactgagaggacaggcaggagcgagatggttctctacattcaaagtgagcctgtgtcccaagacgccaaaccaactggtcacaacagggaagcctcgaaaaagcgcaaggtccgtacccgctctctgtcagatttcacaggcccccctcagctccaggccttgaagtataaggacccagcttccaggagagagctggagctgcccagctccaagaccgaagggccttatggggagatcagcatgctggacacaaaggtctctgtcgcccagctccgaagtgcgttcctggcatctgccaacgcctgcaggagacctgaactcaaatcacgggtagagaggtcggctgaaggacctggcttgcccaccggtgtggaacgggagagagggtcccggaaaccaagacgctatttttctcctggtgaaagtagaaaaacttccgagagatttagaacccaacctataacttcagcagaacgaaaggaatcggataggtgcacttcacattcagaaacgccaactgtcgatgatgaagaaaaggtggatgaacgagccaagctgagcgtcgccgccaagaggttgcttttcagggagatggaaaaatcttttgatgaacaaaatgttccaaagcgacgctcaagaaacacagctgtggagcagaggctacgccgtctgcaggacaggtccctcacccagcccatcaccactgaagaggtggtcatcgcagccactgaacctatccccgcttcgtgttctgggggcacccaccctgtaatggcgagacttcctagccccactgtagctaggagcgctgtgcagcctgccagattgcaggcctctgctcaccaaaaggccttagccaaggaccagacaaatgagggcaaagagcttgctgagcaaggagaacctgattcctccactctaagcttggccgaaaagttggccttgtttaacaaattgtcccagccagtctcaaaagcgatttctacccggaacagaatagacacgagacagaggagaatgaacgctcgctatcaaactcagccagtcacactgggagaggtggagcaggtgcagagtggaaagctcattcctttctcacctgccgtgaacacatcagtgtctaccgtagcatccacggttgctccaatgtatgccggagatcttcgcacaaagccacctcttgaccacaatgcaagtgccactgactataagttttcttcttcaatagaaaattcggactctccagttagaagcattctgaaatcgcaagcttggcagcctttggtagagggtagcgagaacaagggaatgttgagagaatatggagagacagaaagcaagagagctttgacaggtcgagacagtgggatggagaagtatgggtcctttgaggaagcagaagcatcctaccccatcctgaaccgagccagggaaggagacagccataaggaatctaaatatgctgttcccagaagaggaagcctggaacgggcgaaccctcccatcacccacctcggggatgaaccgaaggaattttccatggctaaaatgaatgcacaaggaaacttggacttgagggacaggctgccctttgaagagaaggtggaggtggagaatgttatgaaaaggaagttttcactaagagcggcagagttcggggagcccacttccgagcagacggggacagctgctgggaaaactattgctcaaaccacagcccccgtgtcctggaagccccaggattcttcggaacagccacaggagaagctctgcaagaatccatgtgcgatgtttgctgctggagagatcaaaacgccgacaggggagggccttcttgactcacccagcaaaaccatgtctattaaagaaagattggcactgttgaagaaaagcggggaggaagattggagaaacagactcagcaggaggcaggagggcggcaaggcgccggccagcagcctgcacacccaggaagcagggcggtccctcatcaagaagcgggtcacagaaagtcgagagagccaaatgacgattgaggagaggaagcagctcatcactgtgagagaggaggcctggaagacgagaggcagaggagcggccaacgactcgacccagttcactgtggctggcaggatggtgaagaaaggtttggcgtcacctactgccataaccccagtagcctcagccatttgcggtaaaacaagaggcaccacacccgtttccaaacccctggaagatatcgaagccagaccagatatgcagttagaatcggacctgaagttggacaggctggaaacctttctaagaaggctgaataacaaagttggcgggatgcacgaaacggtgctcactgtcaccggcaaatctgtgaaggaggtgatgaagccagatgatgatgaaacctttgccaaattttaccgcagcgtggattataatatgccaagaagtcctgtggagatggatgaggacttcgatgtcattttcgatccttatgcacccaaattgacgtcttccgtggccgagcacaagcgggcagttaggcccaagcgccgggttcaggcctccaaaaaccccctgaaaatgctggcggcaagagaagatctccttcaggaatacactgagcagagattaaacgttgccttcatggagtcaaagcggatgaaagtagaaaagatgtcttccaactccaacttctcagaagtcaccctggcgggtttagccagtaaagaaaacttcagcaacgtcagcctgcggagcgtcaacctgacggaacagaactctaacaacagcgccgtgccctacaagaggctgatgctgttgcagattaaaggaagaagacatgtgcagaccaggctggtggaacctcgagcttcggcgctcaacagtggggactgcttcctcctgctctctccccactgctgcttcctgtgggtaggagagtttgcaaacgtcatagaaaaggcgaaggcctcagaacttgcaactttaattcagacaaagagggaacttggttgtagagctacttatatccaaaccattgaagaaggaattaatacacacactcatgcagccaaagacttctggaagcttctgggtggccaaaccagttaccaatctgctggagacccaaaagaagatgaactctatgaagcagccataatagaaactaactgcatttaccgtctcatggatgacaaacttgttcctgatgacgactactgggggaaaattccgaagtgctcccttctgcaacccaaagaggtactggtgtttgattttggtagtgaagtttacgtatggcatgggaaagaagtcacattagcacaacgaaaaatagcatttcagctggcaaagcacttatggaatggaacctttgactatgagaactgtgacatcaatcccctggatcctggagaatgcaatccgcttatccccagaaaaggacaggggcggcccgactgggcgatatttgggagacttactgaacacaatgagacgattttgttcaaagagaagtttctggattggacggaactgaagagatcgaatgagaagaaccccggggaacttgcccagcacaaggaagaccccaggactgatgtcaaggcatacgatgtgacacggatggtgtccatgccccagacgacagcaggcaccatcctggacggagtgaacgtcggccgtggctatggcctggtggaaggacacgacaggaggcagtttgagatcaccagcgtttccgtggatgtctggcacatcctggaattcgactatagcaggctccccaaacaaagcatcgggcagttccatgagggggatgcctatgtggtcaagtggaagttcatggtgagcacggcaggtgagtggcggctgtactgcgtgcgtggagaggtgcccgtggaagggaatttgctggaagtggcctgtcactgtagcagcctgaggtccagaacttccatggtggtgcttaacgtcaacaaggccctcatctacctgtggcacggatgcaaagcccaggcccacacgaaggaggtcggaaggaccgctgcgaacaagatcaaggaacaatgtcccctggaagcaggactgcatagtagcagcaaagtcacaatacacgagtgtgatgaaggctccgagccactcggattctgggatgccttaggaaggagagacaggaaagcctacgattgcatgcttcaagatcctggaagttttaacttcgcgccccgcctgttcatcctcagcagctcctctggggattttgcagccacagagtttgtgtaccctgcccgagccccctctgtggtcagttccatgcccttcctgcaggaagatctgtacagcgcgccccagccagcacttttccttgttgacaatcaccacgaggtgtacctctggcaaggctggtggcccatcgagaacaagatcactggttccgcccgcatccgctgggcctccgaccggaagagtgcgatggagactgtgctccagtactgcaaaggaaaaaatctcaagaaaccagcccccaagtcttaccttatccacgctggtctggagcccctgacattcaccaatatgtttcccagctgggagcacagagaggacatcgctgagatcacagagatggacacggaagtttccaatcagatcaccctcgtggaagacgtcttagccaagctctgtaaaaccatttacccgctggccgacctcctggccaggccactcccggagggggtcgatcctctgaagcttgagatctatctcaccgacgaagacttcgagtttgcactagacatgacgagggatgaatacaacgccctgcccgcctggaagcaggtgaacctgaagaaagcaaaaggcctgttctgagtggggagacgccagaggagcctcacggtcacgtccaacaacaccactgcaccagggaaatggatatatatttttggactggtgtttttcacaaagtatttttcaatcagagttttcagaacctgacattgttaaagatactgcttgtcccggagttgtgtattttgtaaatgttcaagggaactgtttggaaacttctttccaccattcaggaggttatcagaattaataaaagtatctgttatgtgcacttaagccgcagctgctatagatagcactgccttcttgttccagctaggcaatgcctttttttttttttttgaagcagttctctttataaagtgttattttgatagtttgtggattctaaaatatatatatatttatataaacaccatataagtcaaatatgtatttaacaaagcaatatgtattcattcactttcaagatttgttttggtgtcaaaataacatgaaaaggtagatggagttgcttctgttgaattagctctgccaccaatatgtatcttcatacacgtttggaaatgtttcctgcagcattaggtatgacttgttctgagtactgcttccggtgctaaaatgaacaaagaatttgtacttaatggcatggactctggagaatctatgcgaatcaacctttctaccttaatatctccccaaaaatgtatagtgccttgtttttatgtacagtttatatacagaaaagtttgctctgcatttttgatgatggtttggaacattatctacaattttactctcaaatagtcaaaataaaaacatctcaatttctaataccggttgtaaacaaacagtacacatgtcattttgtgatataggactcccaaataaaagtatcagaataaacacaacaattaactggtaaaaaaaaagaa

SEQ ID NO: 362758 - DNA, 8238 bp, Homo sapiens
  misc_feature (7819)..(7819): n is a, c, g, or t
  misc_feature (7821)..(7821): n is a, c, g, or t
  misc_feature (7823)..(7823): n is a, c, g, or t
  misc_feature (7826)..(7826): n is a, c, g, or t
  misc_feature (7831)..(7831): n is a, c, g, or t
  misc_feature (7835)..(7836): n is a, c, g, or t
  misc_feature (7839)..(7839): n is a, c, g, or t
  misc_feature (7846)..(7847): n is a, c, g, or t
ttcactgctctgactgcgtcctccccaggctgaagtgtcctcaggtttcatgtggatttgcccagtaatggatggctccaccgaggccaggttggggaagttcagcctcgaggacactaggggacgaaaaacttcaaaaagaagactctttttattaatattttggcgttctttttggagaggaacttttgggatgtagcctttacctgtttcctgaatttgacatccaaaaagccttttggaaaacaccattctaaatttatcctgttctgaatcatcatcgcttctgatagatgcagttgcttgctgacatcgtgatctttgattttgtacaacgctatttgggctaacttttgggattttactttgtgcttagaatttgaaagtagtattcattggaaagagactccaagaaaatactcgaagacatcaaaagctggattcgagggtataacgtgttttgttttgttttttaaattagaaaaataaggaattgcagtgtgattttctttccccctttaacttagaggaacgaggattatacagaaatttgaaatttcaacaagaaaaacttaagcttccttggattcccacgtcaaaggaaagtttcaagctttcagaaggagttctcactcgaagataaagaacagctcgctaaccacgaaagaggaatcgatgctcagcttttagttgcacttcctaaagttgcagaattaagacaaatctttgaaccaaagaagaaagaattcttagaaatgaaaagaaaagaaagaattgccaggcgcctggaagggattgaaaatgacactcagcccatcctcttgcagagctgcacaggattggtgactcaccgcctgctggaggaagacacccctcgatacatgagagccagcgaccctgccagcccccacatcggccgatcaaatgaagaggaggaaacttctgattcttctctagaaaagcaaactcgatccaaatactgcacagaaacctccggtgtccacggtgactcaccctatggttcgggtaccatggacacccacagtctggagtccaaagccgaaagaattgcaaggtacaaagcagaaagaaggcgacagctggcagagaagtatgggctgactctggatcccgaggccgactccgagtatttatcccgctataccaagtccaggaaggagcctgatgctgtcgagaagcggggaggaaaaagtgacaaacaggaagagtcaagcagagatgcgagttctctgtaccccgggaccgagacgatggggctcaggacctgtgccggtgaatccaaggactatgccctccatgcgggtgacggctcttccgacccggaggtgctgctgaacatagaaaaccaaagacgaggtcaagagctgagtgccacccggcaggcccatgacctgtccccagcagccgagagttcctcgaccttctctttctctgggcgagactcctccttcactgaagtgccacggtcccccaagcacgcccacagctcctccctgcagcaggcagcctcccggagcccctcctttggtgacccacagctatcccctgaggcccgacccagtacagggaaacccaaacatgagtggtttctccagaaagattccgaaggggacacaccttcacttatcaactggccttccagagttaaagttagagaaaaattggtgaaagaggaaagtgctcgaaacagccctgaactcgcctcagagtccgtaactcagaggagacaccagccagcgccagtccattacgtgtcatttcagtctgagcactcagcctttgatagggtccccagcaaggcagcaggctctacacgacagccaatccgtggctatgtccaacccgcagataccggtcacaccgccaagctggtgacgccagaaaccccagaaaatgcatctgagtgtagctgggtagcatcagccacccagaatgtccccaaacctcccagcttgacggttctagaaggtgacggaagggatagcccagttctccatatctgcgagtcaaaagcagaagaagaagaaggggaaggagaaggagaagaaaaagaagaagatgtgtgcttcactgaagctctcgagcaaagcaagaaaaccctactggctttggagggtgatgggctagtgagaagcccagaagatccctctagaaatgaggactttggtaagcctgctgtgagcacagtcaccttagagcatcagaaggaactggaaaacgtggcacaaccccctcaagctccgcaccagcccactgagaggacaggcaggagcgagatggttctctacattcaaagtgagcctgtgtcccaagacgccaaaccaactggtcacaacagggaagcctcgaaaaagcgcaaggtccgtacccgctctctgtcagatttcacaggcccccctcagctccaggccttgaagtataaggacccagcttccaggagagagctggagctgcccagctccaagaccgaagggccttatggggagatcagcatgctggacacaaaggtctctgtcgcccagctccgaagtgcgttcctggcatctgccaacgcctgcaggagacctgaactcaaatcacgggtagagaggtcggctgaaggacctggcttgcccaccggtgtggaacgggagagagggtcccggaaaccaagacgctatttttctcctggtgaaagtagaaaaacttccgagagatttagaacccaacctataacttcagcagaacgaaaggaatcggataggtgcacttcacattcagaaacgccaactgtcgatgatgaagaaaaggtggatgaacgagccaagctgagcgtcgccgccaagaggttgcttttcagggagatggaaaaatcttttgatgaacaaaatgttccaaagcgacgctcaagaaacacagctgtggagcagaggctacgccgtctgcaggacaggtccctcacccagcccatcaccactgaagaggtggtcatcgcagccactgaacctatccccgcttcgtgttctgggggcacccaccctgtaatggcgagacttcctagccccactgtagctaggagcgctgtgcagcctgccagattgcaggcctctgctcaccaaaaggccttagccaaggaccagacaaatgagggcaaagagcttgctgagcaaggagaacctgattcctccactctaagcttggccgaaaagttggccttgtttaacaaattgtcccagccagtctcaaaagcgatttctacccggaacagaatagacacgagacagaggagaatgaacgctcgctatcaaactcagccagtcacactgggagaggtggagcaggtgcagagtggaaagctcattcctttctcacctgccgtgaacacatcagtgtctaccgtagcatccacggttgctccaatgtatgccggagatcttcgcacaaagccacctcttgaccacaatgcaagtgccactgactataagttttcttcttcaatagaaaattcggactctccagttagaagcattctgaaatcgcaagcttggcagcctttggtagagggtagcgagaacaagggaatgttgagagaatatggagagacagaaagcaagagagctttgacaggtcgagacagtgggatggagaagtatgggtcctttgaggaagcagaagcatcctaccccatcctgaaccgagccagggaaggagacagccataaggaatctaaatatgctgttcccagaagaggaagcctggaacgggcgaaccctcccatcacccacctcggggatgaaccgaaggaattttccatggctaaaatgaatgcacaaggaaacttggacttgagggacaggctgccctttgaagagaaggtggaggtggagaatgttatgaaaaggaagttttcactaagagcggcagagttcggggagcccacttccgagcagacggggacagctgctgggaaaactattgctcaaaccacagcccccgtgtcctggaagccccaggattcttcggaacagccacaggagaagctctgcaagaatccatgtgcgatgtttgctgctggagagatcaaaacgccgacaggggagggccttcttgactcacccagcaaaaccatgtctattaaagaaagattggcactgttgaagaaaagcggggaggaagattggagaaacagactcagcaggaggcaggagggcggcaaggcgccggccagcagcctgcacacccaggaagcagggcggtccctcatcaagaagcgggtcacagaaagtcgagagagccaaatgacgattgaggagaggaagcagctcatcactgtgagagaggaggcctggaagacgagaggcagaggagcggccaacgactcgacccagttcactgtggctggcaggatggtgaagaaaggtttggcgtcacctactgccataaccccagtagcctcagccatttgcggtaaaacaagaggcaccacacccgtttccaaacccctggaagatatcgaagccagaccagatatgcagttagaatcggacctgaagttggacaggctggaaacctttctaagaaggctgaataacaaagttggcgggatgcacgaaacggtgctcactgtcaccggcaaatctgtgaaggaggtgatgaagccagatgatgatgaaacctttgccaaattttaccgcagcgtggattataatatgccaagaagtcctgtggagatggatgaggacttcgatgtcattttcgatccttatgcacccaaattgacgtcttccgtggccgagcacaagcgggcagttaggcccaagcgccgggttcaggcctccaaaaaccccctgaaaatgctggcggcaagagaagatctccttcaggaatacactgagcagagattaaacgttgccttcatggagtcaaagcggatgaaagtagaaaagatgtcttccaactccaacttctcagaagtcaccctggcgggtttagccagtaaagaaaacttcagcaacgtcagcctgcggagcgtcaacctgacggaacagaactctaacaacagcgccgtgccctacaagaggctgatgctgttgcagattaaaggaagaagacatgtgcagaccaggctggtggaacctcgagcttcggcgctcaacagtggggactgcttcctcctgctctctccccactgctgcttcctgtgggtaggagagtttgcaaacgtcatagaaaaggcgaaggcctcagaacttgcaactttaattcagacaaagagggaacttggttgtagagctacttatatccaaaccattgaagaaggaattaatacacacactcatgcagccaaagacttctggaagcttctgggtggccaaaccagttaccaatctgctggagacccaaaagaagatgaactctatgaagcagccataatagaaactaactgcatttaccgtctcatggatgacaaacttgttcctgatgacgactactgggggaaaattccgaagtgctcccttctgcaacccaaagaggtactggtgtttgattttggtagtgaagtttacgtatggcatgggaaagaagtcacattagcacaacgaaaaatagcatttcagctggcaaagcacttatggaatggaacctttgactatgagaactgtgacatcaatcccctggatcctggagaatgcaatccgcttatccccagaaaaggacaggggcggcccgactgggcgatatttgggagacttactgaacacaatgagacgattttgttcaaagagaagtttctggattggacggaactgaagagatcgaatgagaagaaccccggggaacttgcccagcacaaggaagaccccaggactgatgtcaaggcatacgatgtgacacggatggtgtccatgccccagacgacagcaggcaccatcctggacggagtgaacgtcggccgtggctatggcctggtggaaggacacgacaggaggcagtttgagatcaccagcgtttccgtggatgtctggcacatcctggaattcgactatagcaggctccccaaacaaagcatcgggcagttccatgagggggatgcctatgtggtcaagtggaagttcatggtgagcacggcagtgggaagtcgccagaagggagagcactcggtgagggcagccggcaaagagaagtgcgtctacttcttctggcaaggccggcactccaccgtgagtgagaagggcacgtcggcgctgatgacggtggagctggacgaggaaaggggggcccaggtccaggttctccagggaaaggagcccccctgtttcctgcagtgtttccagggggggatggtggtgcactcggggaggcgggaagaggaagaagaaaatgtgcaaagtgagtggcggctgtactgcgtgcgtggagaggtgcccgtggaagggaatttgctggaagtggcctgtcactgtagcagcctgaggtccagaacttccatggtggtgcttaacgtcaacaaggccctcatctacctgtggcacggatgcaaagcccaggcccacacgaaggaggtcggaaggaccgctgcgaacaagatcaaggaacaatgtcccctggaagcaggactgcatagtagcagcaaagtcacaatacacgagtgtgatgaaggctccgagccactcggattctgggatgccttaggaaggagagacaggaaagcctacgattgcatgcttcaagatcctggaagttttaacttcgcgccccgcctgttcatcctcagcagctcctctggggattttgcagccacagagtttgtgtaccctgcccgagccccctctgtggtcagttccatgcccttcctgcaggaagatctgtacagcgcgccccagccagcacttttccttgttgacaatcaccacgaggtgtacctctggcaaggctggtggcccatcgagaacaagatcactggttccgcccgcatccgctgggcctccgaccggaagagtgcgatggagactgtgctccagtactgcaaaggaaaaaatctcaagaaaccagcccccaagtcttaccttatccacgctggtctggagcccctgacattcaccaatatgtttcccagctgggagcacagagaggacatcgctgagatcacagagatggacacggaagtttccaatcagatcaccctcgtggaagacgtcttagccaagctctgtaaaaccatttacccgctggccgacctcctggccaggccactcccggagggggtcgatcctctgaagcttgagatctatctcaccgacgaagacttcgagtttgcactagacatgacgagggatgaatacaacgccctgcccgcctggaagcaggtgaacctgaagaaagcaaaaggcctgttctgagtggggagacgccagaggagcctcacggtcacgtccaacaacaccactgcaccagggaaatggatatatatttttggactggtgtttttcacaaagtatttttcaatcagagttttcagaacctgacattgttaaagatactgcttgtcccggagttgtgtattttgtaaatgttcaagggaactgtttggaaacttctttccaccattcaggaggttatcagaattaataaaagtatctgttatgtgcacttaagccgcagctgctatagatagcactgccttcttgttccagctaggcaatgcctttttttttttttttgaagcagttctctttataaagtgttattttgatagtttgtggattctaaaatatatatatatttatataaacaccatataagtcaaattttgttttcncncnaangcaanttgnnttncactccnnttccaagcatgtgttgggggtccaaactaccctgaaccggttacatgggcagtgcactctggggaattaagtctggcccccaatatgtttcttcataccggttgggaaggttccggcacatacgggagaactggccgagaaaggcccggggcaacggtcaccaattggctaagggccgggcggggaacactgcgacagcgctaaatccccttaaaaccgtcgggtggtgacaacagaaaccacctgggggagccgagacggcgcgaccaacaacacacccactaggggcgtcaacacacctcgcaccccagggagctcgcgtgttggtgtcacaaacatacgcacagcacatagggaggaaacacacacgcaacagaccgagcctatgtgg

SEQ ID NO: 362759 - DNA, 5659 bp, Homo sapiens
aggtcaagagatcaagaccatcctggccaacatggtgaaacctcatctctaataaaaatacaaaaattaactgggcgtggtggtgcgcgcctgtaatcccagctactcaggaggctgaggcaggagaatcacttgaccccgggaggcggagtttgcagtgagccaagatcatgccactgcactccagcctggtgacagagacagactccatctccaaaaaagaaaaagaaagaaaaaaattagattggaaacaatattctaaaacacagacataatctactgattttttgatagctaatatttgcttttttgaattattattttttttacaccaagacatgtattctcaagacagagtaaatcctcccagctctgaacacctattcttaccccattggctttgggtagccactatctcttatttcctgagttggtatttgcttttgaagttctttcgtgattttttctccccaaaaataattagcaaaatattctgttaaaatttttgatttaacgtttctgaatttaaaactatgctgtccttaatgcttcttttcttctctctccttatgaatgtttcctcttgtggcaattgcttttaaagtgaacctatccccgcttcgtgttctgggggcacccaccctgtaatggcgagacttcctagccccactgtagctaggagcgctgtgcagcctgccagattgcaggcctctgctcaccaaaaggccttagccaaggaccagacaaatgagggcaaagagcttgctgagcaaggagaacctgattcctccactctaagcttggccgaaaagttggccttgtttaacaaattgtcccagccagtctcaaaagcgatttctacccggaacagaatagacacgagacagaggagaatgaacgctcgctatcaaactcagccagtcacactgggagaggtggagcaggtgcagagtggaaagctcattcctttctcacctgccgtgaacacatcagtgtctaccgtagcatccacggttgctccaatgtatgccggagatcttcgcacaaagccacctcttgaccacaatgcaagtgccactgactataagttttcttcttcaatagaaaattcggactctccagttagaagcattctgaaatcgcaagcttggcagcctttggtagagggtagcgagaacaagggaatgttgagagaatatggagagacagaaagcaagagagctttgacaggtcgagacagtgggatggagaagtatgggtcctttgaggaagcagaagcatcctaccccatcctgaaccgagccagggaaggagacagccataaggaatctaaatatgctgttcccagaagaggaagcctggaacgggcgaaccctcccatcacccacctcggggatgaaccgaaggaattttccatggctaaaatgaatgcacaaggaaacttggacttgagggacaggctgccctttgaagagaaggtggaggtggagaatgttatgaaaaggaagttttcactaagagcggcagagttcggggagcccacttccgagcagacggggacagctgctgggaaaactattgctcaaaccacagcccccgtgtcctggaagccccaggattcttcggaacagccacaggagaagctctgcaagaatccatgtgcgatgtttgctgctggagagatcaaaacgccgacaggggagggccttcttgactcacccagcaaaaccatgtctattaaagaaagattggcactgttgaagaaaagcggggaggaagattggagaaacagactcagcaggaggcaggagggcggcaaggcgccggccagcagcctgcacacccaggaagcagggcggtccctcatcaagaagcgggtcacagaaagtcgagagagccaaatgacgattgaggagaggaagcagctcatcactgtgagagaggaggcctggaagacgagaggcagaggagcggccaacgactcgacccagttcactgtggctggcaggatggtgaagaaaggtttggcgtcacctactgccataaccccagtagcctcagccatttgcggtaaaacaagaggcaccacacccgtttccaaacccctggaagatatcgaagccagaccagatatgcagttagaatcggacctgaagttggacaggctggaaacctttctaagaaggctgaataacaaagttggcgggatgcacgaaacggtgctcactgtcaccggcaaatctgtgaaggaggtgatgaagccagatgatgatgaaacctttgccaaattttaccgcagcgtggattataatatgccaagaagtcctgtggagatggatgaggacttcgatgtcattttcgatccttatgcacccaaattgacgtcttccgtggccgagcacaagcgggcagttaggcccaagcgccgggttcaggcctccaaaaaccccctgaaaatgctggcggcaagagaagatctccttcaggaatacactgagcagagattaaacgttgccttcatggagtcaaagcggatgaaagtagaaaagatgtcttccaactccaacttctcagaagtcaccctggcgggtttagccagtaaagaaaacttcagcaacgtcagcctgcggagcgtcaacctgacggaacagaactctaacaacagcgccgtgccctacaagaggctgatgctgttgcagattaaaggaagaagacatgtgcagaccaggctggtggaacctcgagcttcggcgctcaacagtggggactgcttcctcctgctctctccccactgctgcttcctgtgggtaggagagtttgcaaacgtcatagaaaaggcgaaggcctcagaacttgcaactttaattcagacaaagagggaacttggttgtagagctacttatatccaaaccattgaagaaggaattaatacacacactcatgcagccaaagacttctggaagcttctgggtggccaaaccagttaccaatctgctggagacccaaaagaagatgaactctatgaagcagccataatagaaactaactgcatttaccgtctcatggatgacaaacttgttcctgatgacgactactgggggaaaattccgaagtgctcccttctgcaacccaaagaggtactggtgtttgattttggtagtgaagtttacgtatggcatgggaaagaagtcacattagcacaacgaaaaatagcatttcagctggcaaagcacttatggaatggaacctttgactatgagaactgtgacatcaatcccctggatcctggagaatgcaatccgcttatccccagaaaaggacaggggcggcccgactgggcgatatttgggagacttactgaacacaatgagacgattttgttcaaagagaagtttctggattggacggaactgaagagatcgaatgagaagaaccccggggaacttgcccagcacaaggaagaccccaggactgatgtcaaggcatacgatgtgacacggatggtgtccatgccccagacgacagcaggcaccatcctggacggagtgaacgtcggccgtggctatggcctggtggaaggacacgacaggaggcagtttgagatcaccagcgtttccgtggatgtctggcacatcctggaattcgactatagcaggctccccaaacaaagcatcgggcagttccatgagggggatgcctatgtggtcaagtggaagttcatggtgagcacggcaggtgagtggcggctgtactgcgtgcgtggagaggtgcccgtggaagggaatttgctggaagtggcctgtcactgtagcagcctgaggtccagaacttccatggtggtgcttaacgtcaacaaggccctcatctacctgtggcacggatgcaaagcccaggcccacacgaaggaggtcggaaggaccgctgcgaacaagatcaaggaacaatgtcccctggaagcaggactgcatagtagcagcaaagtcacaatacacgagtgtgatgaaggctccgagccactcggattctgggatgccttaggaaggagagacaggaaagcctacgattgcatgcttcaagatcctggaagttttaacttcgcgccccgcctgttcatcctcagcagctcctctggggattttgcagccacagagtttgtgtaccctgcccgagccccctctgtggtcagttccatgcccttcctgcaggaagatctgtacagcgcgccccagccagcacttttccttgttgacaatcaccacgaggtgtacctctggcaaggctggtggcccatcgagaacaagatcactggttccgcccgcatccgctgggcctccgaccggaagagtgcgatggagactgtgctccagtactgcaaaggaaaaaatctcaagaaaccagcccccaagtcttaccttatccacgctggtctggagcccctgacattcaccaatatgtttcccagctgggagcacagagaggacatcgctgagatcacagagatggacacggaagtttccaatcagatcaccctcgtggaagacgtcttagccaagctctgtaaaaccatttacccgctggccgacctcctggccaggccactcccggagggggtcgatcctctgaagcttgagatctatctcaccgacgaagacttcgagtttgcactagacatgacgagggatgaatacaacgccctgcccgcctggaagcaggtgaacctgaagaaagcaaaaggcctgttctgagtggggagacgccagaggagcctcacggtcacgtccaacaacaccactgcaccagggaaatggatatatatttttggactggtgtttttcacaaagtatttttcaatcagagttttcagaacctgacattgttaaagatactgcttgtcccggagttgtgtattttgtaaatgttcaagggaactgtttggaaacttctttccaccattcaggaggttatcagaattaataaaagtatctgttatgtgcacttaagccgcagctgctatagatagcactgccttcttgttccagctaggcaatgcctttttttttttttttgaagcagttctctttataaagtgttattttgatagtttgtggattctaaaatatatatatatttatataaacaccatataagtcaaatatgtatttaacaaagcaatatgtattcattcactttcaagatttgttttggtgtcaaaataacatgaaaaggtagatggagttgcttctgttgaattagctctgccaccaatatgtatcttcatacacgtttggaaatgtttcctgcagcattaggtatgacttgttctgagtactgcttccggtgctaaaatgaacaaagaatttgtacttaatggcatggactctggagaatctatgcgaatcaacctttctaccttaatatctccccaaaaatgtatagtgccttgtttttatgtacagtttatatacagaaaagtttgctctgcatttttgatgatggtttggaacattatctacaattttactctcaaatagtcaaaataaaaacatctcaatttctaataccggttgtaaacaaacagtacacatgtcattttgtgatataggactcccaaataaaagtatcagaataaacacaacaattaactggtaaaaaaaaagaa

SEQ ID NO: 362760 - DNA, 8359 bp, Homo sapiens
ttcactgctctgactgcgtcctccccaggctgaagtgtcctcaggtttcatgtggatttgcccagtaatggatggctccaccgaggccaggttggggaagttcagcctcgaggacactaggggacgaaaaacttcaaaaagaagactctttttattaatattttggcgttctttttggagaggaacttttgggatgtagcctttacctgtttcctgaatttgacatccaaaaagccttttggaaaacaccattctaaatttatcctgttctgaatcatcatcgcttctgatagatgcagttgcttgctgacatcgtgatctttgattttgtacaacgctatttgggctaacttttgggattttactttgtgcttagaatttgaaagtagtattcattggaaagagactccaagaaaatactcgaagacatcaaaagctggattcgagggtataacgtgttttgttttgttttttaaattagaaaaataaggaattgcagtgtgattttctttccccctttaacttagaggaacgaggattatacagaaatttgaaatttcaacaagaaaaacttaagcttccttggattcccacgtcaaaggaaagtttcaagctttcagaaggagttctcactcgaagataaagaacagctcgctaaccacgaaagaggaatcgatgctcagcttttagttgcacttcctaaagttgcagaattaagacaaatctttgaaccaaagaagaaagaattcttagaaatgaaaagaaaagaaagaattgccaggcgcctggaagggattgaaaatgacactcagcccatcctcttgcagagctgcacaggattggtgactcaccgcctgctggaggaagacacccctcgatacatgagagccagcgaccctgccagcccccacatcggccgatcaaatgaagaggaggaaacttctgattcttctctagaaaagcaaactcgatccaaatactgcacagaaacctccggtgtccacggtgactcaccctatggttcgggtaccatggacacccacagtctggagtccaaagccgaaagaattgcaaggtacaaagcagaaagaaggcgacagctggcagagaagtatgggctgactctggatcccgaggccgactccgagtatttatcccgctataccaagtccaggaaggagcctgatgctgtcgagaagcggggaggaaaaagtgacaaacaggaagagtcaagcagagatgcgagttctctgtaccccgggaccgagacgatggggctcaggacctgtgccggtgaatccaaggactatgccctccatgcgggtgacggctcttccgacccggaggtgctgctgaacatagaaaaccaaagacgaggtcaagagctgagtgccacccggcaggcccatgacctgtccccagcagccgagagttcctcgaccttctctttctctgggcgagactcctccttcactgaagtgccacggtcccccaagcacgcccacagctcctccctgcagcaggcagcctcccggagcccctcctttggtgacccacagctatcccctgaggcccgacccagtacagggaaacccaaacatgagtggtttctccagaaagattccgaaggggacacaccttcacttatcaactggccttccagagttaaagttagagaaaaattggtgaaagaggaaagtgctcgaaacagccctgaactcgcctcagagtccgtaactcagaggagacaccagccagcgccagtccattacgtgtcatttcagtctgagcactcagcctttgatagggtccccagcaaggcagcaggctctacacgacagccaatccgtggctatgtccaacccgcagataccggtcacaccgccaagctggtgacgccagaaaccccagaaaatgcatctgagtgtagctgggtagcatcagccacccagaatgtccccaaacctcccagcttgacggttctagaaggtgacggaagggatagcccagttctccatatctgcgagtcaaaagcagaagaagaagaaggggaaggagaaggagaagaaaaagaagaagatgtgtgcttcactgaagctctcgagcaaagcaagaaaaccctactggctttggagggtgatgggctagtgagaagcccagaagatccctctagaaatgaggactttggtaagcctgctgtgagcacagtcaccttagagcatcagaaggaactggaaaacgtggcacaaccccctcaagctccgcaccagcccactgagaggacaggcaggagcgagatggttctctacattcaaagtgagcctgtgtcccaagacgccaaaccaactggtcacaacagggaagcctcgaaaaagcgcaaggtccgtacccgctctctgtcagatttcacaggcccccctcagctccaggccttgaagtataaggacccagcttccaggagagagctggagctgcccagctccaagaccgaagggccttatggggagatcagcatgctggacacaaaggtctctgtcgcccagctccgaagtgcgttcctggcatctgccaacgcctgcaggagacctgaactcaaatcacgggtagagaggtcggctgaaggacctggcttgcccaccggtgtggaacgggagagagggtcccggaaaccaagacgctatttttctcctggtgaaagtagaaaaacttccgagagatttagaacccaacctataacttcagcagaacgaaaggaatcggataggtgcacttcacattcagaaacgccaactgtcgatgatgaagaaaaggtggatgaacgagccaagctgagcgtcgccgccaagaggttgcttttcagggagatggaaaaatcttttgatgaacaaaatgttccaaagcgacgctcaagaaacacagctgtggagcagaggctacgccgtctgcaggacaggtccctcacccagcccatcaccactgaagaggtggtcatcgcagccactgaacctatccccgcttcgtgttctgggggcacccaccctgtaatggcgagacttcctagccccactgtagctaggagcgctgtgcagcctgccagattgcaggcctctgctcaccaaaaggccttagccaaggaccagacaaatgagggcaaagagcttgctgagcaaggagaacctgattcctccactctaagcttggccgaaaagttggccttgtttaacaaattgtcccagccagtctcaaaagcgatttctacccggaacagaatagacacgagacagaggagaatgaacgctcgctatcaaactcagccagtcacactgggagaggtggagcaggtgcagagtggaaagctcattcctttctcacctgccgtgaacacatcagtgtctaccgtagcatccacggttgctccaatgtatgccggagatcttcgcacaaagccacctcttgaccacaatgcaagtgccactgactataagttttcttcttcaatagaaaattcggactctccagttagaagcattctgaaatcgcaagcttggcagcctttggtagagggtagcgagaacaagggaatgttgagagaatatggagagacagaaagcaagagagctttgacaggtcgagacagtgggatggagaagtatgggtcctttgaggaagcagaagcatcctaccccatcctgaaccgagccagggaaggagacagccataaggaatctaaatatgctgttcccagaagaggaagcctggaacgggcgaaccctcccatcacccacctcggggatgaaccgaaggaattttccatggctaaaatgaatgcacaaggaaacttggacttgagggacaggctgccctttgaagagaaggtggaggtggagaatgttatgaaaaggaagttttcactaagagcggcagagttcggggagcccacttccgagcagacggggacagctgctgggaaaactattgctcaaaccacagcccccgtgtcctggaagccccaggattcttcggaacagccacaggagaagctctgcaagaatccatgtgcgatgtttgctgctggagagatcaaaacgccgacaggggagggccttcttgactcacccagcaaaaccatgtctattaaagaaagattggcactgttgaagaaaagcggggaggaagattggagaaacagactcagcaggaggcaggagggcggcaaggcgccggccagcagcctgcacacccaggaagcagggcggtccctcatcaagaagcgggtcacagaaagtcgagagagccaaatgacgattgaggagaggaagcagctcatcactgtgagagaggaggcctggaagacgagaggcagaggagcggccaacgactcgacccagttcactgtggctggcaggatggtgaagaaaggtttggcgtcacctactgccataaccccagtagcctcagccatttgcggtaaaacaagaggcaccacacccgtttccaaacccctggaagatatcgaagccagaccagatatgcagttagaatcggacctgaagttggacaggctggaaacctttctaagaaggctgaataacaaagttggcgggatgcacgaaacggtgctcactgtcaccggcaaatctgtgaaggaggtgatgaagccagatgatgatgaaacctttgccaaattttaccgcagcgtggattataatatgccaagaagtcctgtggagatggatgaggacttcgatgtcattttcgatccttatgcacccaaattgacgtcttccgtggccgagcacaagcgggcagttaggcccaagcgccgggttcaggcctccaaaaaccccctgaaaatgctggcggcaagagaagatctccttcaggaatacactgagcagagattaaacgttgccttcatggagtcaaagcggatgaaagtagaaaagatgtcttccaactccaacttctcagaagtcaccctggcgggtttagccagtaaagaaaacttcagcaacgtcagcctgcggagcgtcaacctgacggaacagaactctaacaacagcgccgtgccctacaagaggctgatgctgttgcagattaaaggaagaagacatgtgcagaccaggctggtggaacctcgagcttcggcgctcaacagtggggactgcttcctcctgctctctccccactgctgcttcctgtgggtaggagagtttgcaaacgtcatagaaaaggcgaaggcctcagaacttgcaactttaattcagacaaagagggaacttggttgtagagctacttatatccaaaccattgaagaaggaattaatacacacactcatgcagccaaagacttctggaagcttctgggtggccaaaccagttaccaatctgctggagacccaaaagaagatgaactctatgaagcagccataatagaaactaactgcatttaccgtctcatggatgacaaacttgttcctgatgacgactactgggggaaaattccgaagtgctcccttctgcaacccaaagaggtactggtgtttgattttggtagtgaagtttacgtatggcatgggaaagaagtcacattagcacaacgaaaaatagcatttcagctggcaaagcacttatggaatggaacctttgactatgagaactgtgacatcaatcccctggatcctggagaatgcaatccgcttatccccagaaaaggacaggggcggcccgactgggcgatatttgggagacttactgaacacaatgagacgattttgttcaaagagaagtttctggattggacggaactgaagagatcgaatgagaagaaccccggggaacttgcccagcacaaggaagaccccaggactgatgtcaaggcatacgatgtgacacggatggtgtccatgccccagacgacagcaggcaccatcctggacggagtgaacgtcggccgtggctatggcctggtggaaggacacgacaggaggcagtttgagatcaccagcgtttccgtggatgtctggcacatcctggaattcgactatagcaggctccccaaacaaagcatcgggcagttccatgagggggatgcctatgtggtcaagtggaagttcatggtgagcacggcagtgggaagtcgccagaagggagagcactcggtgagggcagccggcaaagagaagtgcgtctacttcttctggcaaggccggcactccaccgtgagtgagaagggcacgtcggcgctgatgacggtggagctggacgaggaaaggggggcccaggtccaggttctccagggaaaggagcccccctgtttcctgcagtgtttccagggggggatggtggtgcactcggggaggcgggaagaggaagaagaaaatgtgcaaagtgagtggcggctgtactgcgtgcgtggagaggtgcccgtggaagggaatttgctggaagtggcctgtcactgtagcagcctgaggtccagaacttccatggtggtgcttaacgtcaacaaggccctcatctacctgtggcacggatgcaaagcccaggcccacacgaaggaggtcggaaggaccgctgcgaacaagatcaaggaacacactctccagacttataaagaactcttggagtttctcccttgcagatgtcccctggaagcaggactgcatagtagcagcaaagtcacaatacacgagtgtgatgaaggctccgagccactcggattctgggatgccttaggaaggagagacaggaaagcctacgattgcatgcttcaagatcctggaagttttaacttcgcgccccgcctgttcatcctcagcagctcctctggggattttgcagccacagagtttgtgtaccctgcccgagccccctctgtggtcagttccatgcccttcctgcaggaagatctgtacagcgcgccccagccagcacttttccttgttgacaatcaccacgaggtgtacctctggcaaggctggtggcccatcgagaacaagatcactggttccgcccgcatccgctgggcctccgaccggaagagtgcgatggagactgtgctccagtactgcaaaggaaaaaatctcaagaaaccagcccccaagtcttaccttatccacgctggtctggagcccctgacattcaccaatatgtttcccagctgggagcacagagaggacatcgctgagatcacagagatggacacggaagtttccaatcagatcaccctcgtggaagacgtcttagccaagctctgtaaaaccatttacccgctggccgacctcctggccaggccactcccggagggggtcgatcctctgaagcttgagatctatctcaccgacgaagacttcgagtttgcactagacatgacgagggatgaatacaacgccctgcccgcctggaagcaggtgaacctgaagaaagcaaaaggcctgttctgagtggggagacgccagaggagcctcacggtcacgtccaacaacaccactgcaccagggaaatggatatatatttttggactggtgtttttcacaaagtatttttcaatcagagttttcagaacctgacattgttaaagatactgcttgtcccggagttgtgtattttgtaaatgttcaagggaactgtttggaaacttctttccaccattcaggaggttatcagaattaataaaagtatctgttatgtgcacttaagccgcagctgctatagatagcactgccttcttgttccagctaggcaatgcctttttttttttttttgaagcagttctctttataaagtgttattttgatagtttgtggattctaaaatatatatatatttatataaacaccatataagtcaaatatgtatttaacaaagcaatatgtattcattcactttcaagatttgttttggtgtcaaaataacatgaaaaggtagatggagttgcttctgttgaattagctctgccaccaatatgtatcttcatacacgtttggaaatgtttcctgcagcattaggtatgacttgttctgagtactgcttccggtgctaaaatgaacaaagaatttgtacttaatggcatggactctggagaatctatgcgaatcaacctttctaccttaatatctccccaaaaatgtatagtgccttgtttttatgtacagtttatatacagaaaagtttgctctgcatttttgatgatggtttggaacattatctacaattttactctcaaatagtcaaaataaaaacatctcaatttctaataccggttgtaaacaaacagtacacatgtcattttgtgatataggactcccaaataaaagtatcagaataaacacaacaattaactggtaaaaaaaaagaa

SEQ ID NO: 362761 - DNA, 3989 bp, Homo sapiens
agccttcagagtcagtcctgttcattagctgcggagttaacggcctctgtgctaatgaactcctctgatgtctcttctcttaagcatccttctagtttggcgtcacctactgccataaccccagtagcctcagccatttgcggtaaaacaagaggcaccacacccgtttccaaacccctggaagatatcgaagccagaccagatatgcagttagaatcggacctgaagttggacaggctggaaacctttctaagaaggctgaataacaaagttggcgggatgcacgaaacggtgctcactgtcaccggcaaatctgtgaaggaggtgatgaagccagatgatgatgaaacctttgccaaattttaccgcagcgtggattataatatgccaagaagtcctgtggagatggatgaggacttcgatgtcattttcgatccttatgcacccaaattgacgtcttccgtggccgagcacaagcgggcagttaggcccaagcgccgggttcaggcctccaaaaaccccctgaaaatgctggcggcaagagaagatctccttcaggaatacactgagcagagattaaacgttgccttcatggagtcaaagcggatgaaagtagaaaagatgtcttccaactccaacttctcagaagtcaccctggcgggtttagccagtaaagaaaacttcagcaacgtcagcctgcggagcgtcaacctgacggaacagaactctaacaacagcgccgtgccctacaagaggctgatgctgttgcagattaaaggaagaagacatgtgcagaccaggctggtggaacctcgagcttcggcgctcaacagtggggactgcttcctcctgctctctccccactgctgcttcctgtgggtaggagagtttgcaaacgtcatagaaaaggcgaaggcctcagaacttgcaactttaattcagacaaagagggaacttggttgtagagctacttatatccaaaccattgaagaaggaattaatacacacactcatgcagccaaagacttctggaagcttctgggtggccaaaccagttaccaatctgctggagacccaaaagaagatgaactctatgaagcagccataatagaaactaactgcatttaccgtctcatggatgacaaacttgttcctgatgacgactactgggggaaaattccgaagtgctcccttctgcaacccaaagaggtactggtgtttgattttggtagtgaagtttacgtatggcatgggaaagaagtcacattagcacaacgaaaaatagcatttcagctggcaaagcacttatggaatggaacctttgactatgagaactgtgacatcaatcccctggatcctggagaatgcaatccgcttatccccagaaaaggacaggggcggcccgactgggcgatatttgggagacttactgaacacaatgagacgattttgttcaaagagaagtttctggattggacggaactgaagagatcgaatgagaagaaccccggggaacttgcccagcacaaggaagaccccaggactgatgtcaaggcatacgatgtgacacggatggtgtccatgccccagacgacagcaggcaccatcctggacggagtgaacgtcggccgtggctatggcctggtggaaggacacgacaggaggcagtttgagatcaccagcgtttccgtggatgtctggcacatcctggaattcgactatagcaggctccccaaacaaagcatcgggcagttccatgagggggatgcctatgtggtcaagtggaagttcatggtgagcacggcagtgggaagtcgccagaagggagagcactcggtgagggcagccggcaaagagaagtgcgtctacttcttctggcaaggccggcactccaccgtgagtgagaagggcacgtcggcgctgatgacggtggagctggacgaggaaaggggggcccaggtccaggttctccagggaaaggagcccccctgtttcctgcagtgtttccagggggggatggtggtgcactcggggaggcgggaagaggaagaagaaaatgtgcaaagtgagtggcggctgtactgcgtgcgtggagaggtgcccgtggaagggaatttgctggaagtggcctgtcactgtagcagcctgaggtccagaacttccatggtggtgcttaacgtcaacaaggccctcatctacctgtggcacggatgcaaagcccaggcccacacgaaggaggtcggaaggaccgctgcgaacaagatcaaggaacaatgtcccctggaagcaggactgcatagtagcagcaaagtcacaatacacgagtgtgatgaaggctccgagccactcggattctgggatgccttaggaaggagagacaggaaagcctacgattgcatgcttcaagatcctggaagttttaacttcgcgccccgcctgttcatcctcagcagctcctctggggattttgcagccacagagtttgtgtaccctgcccgagccccctctgtggtcagttccatgcccttcctgcaggaagatctgtacagcgcgccccagccagcacttttccttgttgacaatcaccacgaggtgtacctctggcaaggctggtggcccatcgagaacaagatcactggttccgcccgcatccgctgggcctccgaccggaagagtgcgatggagactgtgctccagtactgcaaaggaaaaaatctcaagaaaccagcccccaagtcttaccttatccacgctggtctggagcccctgacattcaccaatatgtttcccagctgggagcacagagaggacatcgctgagatcacagagatggacacggaagtttccaatcagatcaccctcgtggaagacgtcttagccaagctctgtaaaaccatttacccgctggccgacctcctggccaggccactcccggagggggtcgatcctctgaagcttgagatctatctcaccgacgaagacttcgagtttgcactagacatgacgagggatgaatacaacgccctgcccgcctggaagcaggtgaacctgaagaaagcaaaaggcctgttctgagtggggagacgccagaggagcctcacggtcacgtccaacaacaccactgcaccagggaaatggatatatatttttggactggtgtttttcacaaagtatttttcaatcagagttttcagaacctgacattgttaaagatactgcttgtcccggagttgtgtattttgtaaatgttcaagggaactgtttggaaacttctttccaccattcaggaggttatcagaattaataaaagtatctgttatgtgcacttaagccgcagctgctatagatagcactgccttcttgttccagctaggcaatgcctttttttttttttttgaagcagttctctttataaagtgttattttgatagtttgtggattctaaaatatatatatatttatataaacaccatataagtcaaatatgtatttaacaaagcaatatgtattcattcactttcaagatttgttttggtgtcaaaataacatgaaaaggtagatggagttgcttctgttgaattagctctgccaccaatatgtatcttcatacacgtttggaaatgtttcctgcagcattaggtatgacttgttctgagtactgcttccggtgctaaaatgaacaaagaatttgtacttaatggcatggactctggagaatctatgcgaatcaacctttctaccttaatatctccccaaaaatgtatagtgccttgtttttatgtacagtttatatacagaaaagtttgctctgcatttttgatgatggtttggaacattatctacaattttactctcaaatagtcaaaataaaaacatctcaatttctaataccggttgtaaacaaacagtacacatgtcattttgtgatataggactcccaaataaaagtatcagaataaacacaacaattaactggtaaaaaaaaagaa

SEQ ID NO: 362762 - DNA, 3014 bp, Homo sapiens
ttttacaatgtgaaattcattcacattttacattgcagctactttgcaatgtaaaatgtgatgctctcctgttcttcttatccccaagctgctggagacccaaaagaagatgaactctatgaagcagccataatagaaactaactgcatttaccgtctcatggatgacaaacttgttcctgatgacgactactgggggaaaattccgaagtgctcccttctgcaacccaaagaggtactggtgtttgattttggtagtgaagtttacgtatggcatgggaaagaagtcacattagcacaacgaaaaatagcatttcagctggcaaagcacttatggaatggaacctttgactatgagaactgtgacatcaatcccctggatcctggagaatgcaatccgcttatccccagaaaaggacaggggcggcccgactgggcgatatttgggagacttactgaacacaatgagacgattttgttcaaagagaagtttctggattggacggaactgaagagatcgaatgagaagaaccccggggaacttgcccagcacaaggaagaccccaggactgatgtcaaggcatacgatgtgacacggatggtgtccatgccccagacgacagcaggcaccatcctggacggagtgaacgtcggccgtggctatggcctggtggaaggacacgacaggaggcagtttgagatcaccagcgtttccgtggatgtctggcacatcctggaattcgactatagcaggctccccaaacaaagcatcgggcagttccatgagggggatgcctatgtggtcaagtggaagttcatggtgagcacggcagtgggaagtcgccagaagggagagcactcggtgagggcagccggcaaagagaagtgcgtctacttcttctggcaaggccggcactccaccgtgagtgagaagggcacgtcggcgctgatgacggtggagctggacgaggaaaggggggcccaggtccaggttctccagggaaaggagcccccctgtttcctgcagtgtttccagggggggatggtggtgcactcggggaggcgggaagaggaagaagaaaatgtgcaaagtgagtggcggctgtactgcgtgcgtggagaggtgcccgtggaagggaatttgctggaagtggcctgtcactgtagcagcctgaggtccagaacttccatggtggtgcttaacgtcaacaaggccctcatctacctgtggcacggatgcaaagcccaggcccacacgaaggaggtcggaaggaccgctgcgaacaagatcaaggaacaatgtcccctggaagcaggactgcatagtagcagcaaagtcacaatacacgagtgtgatgaaggctccgagccactcggattctgggatgccttaggaaggagagacaggaaagcctacgattgcatgcttcaagatcctggaagttttaacttcgcgccccgcctgttcatcctcagcagctcctctggggattttgcagccacagagtttgtgtaccctgcccgagccccctctgtggtcagttccatgcccttcctgcaggaagatctgtacagcgcgccccagccagcacttttccttgttgacaatcaccacgaggtgtacctctggcaaggctggtggcccatcgagaacaagatcactggttccgcccgcatccgctgggcctccgaccggaagagtgcgatggagactgtgctccagtactgcaaaggaaaaaatctcaagaaaccagcccccaagtcttaccttatccacgctggtctggagcccctgacattcaccaatatgtttcccagctgggagcacagagaggacatcgctgagatcacagagatggacacggaagtttccaatcagatcaccctcgtggaagacgtcttagccaagctctgtaaaaccatttacccgctggccgacctcctggccaggccactcccggagggggtcgatcctctgaagcttgagatctatctcaccgacgaagacttcgagtttgcactagacatgacgagggatgaatacaacgccctgcccgcctggaagcaggtgaacctgaagaaagcaaaaggcctgttctgagtggggagacgccagaggagcctcacggtcacgtccaacaacaccactgcaccagggaaatggatatatatttttggactggtgtttttcacaaagtatttttcaatcagagttttcagaacctgacattgttaaagatactgcttgtcccggagttgtgtattttgtaaatgttcaagggaactgtttggaaacttctttccaccattcaggaggttatcagaattaataaaagtatctgttatgtgcacttaagccgcagctgctatagatagcactgccttcttgttccagctaggcaatgcctttttttttttttttgaagcagttctctttataaagtgttattttgatagtttgtggattctaaaatatatatatatttatataaacaccatataagtcaaatatgtatttaacaaagcaatatgtattcattcactttcaagatttgttttggtgtcaaaataacatgaaaaggtagatggagttgcttctgttgaattagctctgccaccaatatgtatcttcatacacgtttggaaatgtttcctgcagcattaggtatgacttgttctgagtactgcttccggtgctaaaatgaacaaagaatttgtacttaatggcatggactctggagaatctatgcgaatcaacctttctaccttaatatctccccaaaaatgtatagtgccttgtttttatgtacagtttatatacagaaaagtttgctctgcatttttgatgatggtttggaacattatctacaattttactctcaaatagtcaaaataaaaacatctcaatttctaataccggttgtaaacaaacagtacacatgtcattttgtgatataggactcccaaataaaagtatcagaataaacacaacaattaactggtaaaaaaaaagaa

SEQ ID NO: 362763 - DNA, 2393 bp, Homo sapiens
tctcaccatgttcccaaggctggtcttgaactcctgagctcaagcgatcctcccacctcagcatcccaaagatttgagatcaccagcgtttccgtggatgtctggcacatcctggaattcgactatagcaggctccccaaacaaagcatcgggcagttccatgagggggatgcctatgtggtcaagtggaagttcatggtgagcacggcagtgggaagtcgccagaagggagagcactcggtgagggcagccggcaaagagaagtgcgtctacttcttctggcaaggccggcactccaccgtgagtgagaagggcacgtcggcgctgatgacggtggagctggacgaggaaaggggggcccaggtccaggttctccagggaaaggagcccccctgtttcctgcagtgtttccagggggggatggtggtgcactcggggaggcgggaagaggaagaagaaaatgtgcaaagtgagtggcggctgtactgcgtgcgtggagaggtgcccgtggaagggaatttgctggaagtggcctgtcactgtagcagcctgaggtccagaacttccatggtggtgcttaacgtcaacaaggccctcatctacctgtggcacggatgcaaagcccaggcccacacgaaggaggtcggaaggaccgctgcgaacaagatcaaggaacaatgtcccctggaagcaggactgcatagtagcagcaaagtcacaatacacgagtgtgatgaaggctccgagccactcggattctgggatgccttaggaaggagagacaggaaagcctacgattgcatgcttcaagatcctggaagttttaacttcgcgccccgcctgttcatcctcagcagctcctctggggattttgcagccacagagtttgtgtaccctgcccgagccccctctgtggtcagttccatgcccttcctgcaggaagatctgtacagcgcgccccagccagcacttttccttgttgacaatcaccacgaggtgtacctctggcaaggctggtggcccatcgagaacaagatcactggttccgcccgcatccgctgggcctccgaccggaagagtgcgatggagactgtgctccagtactgcaaaggaaaaaatctcaagaaaccagcccccaagtcttaccttatccacgctggtctggagcccctgacattcaccaatatgtttcccagctgggagcacagagaggacatcgctgagatcacagagatggacacggaagtttccaatcagatcaccctcgtggaagacgtcttagccaagctctgtaaaaccatttacccgctggccgacctcctggccaggccactcccggagggggtcgatcctctgaagcttgagatctatctcaccgacgaagacttcgagtttgcactagacatgacgagggatgaatacaacgccctgcccgcctggaagcaggtgaacctgaagaaagcaaaaggcctgttctgagtggggagacgccagaggagcctcacggtcacgtccaacaacaccactgcaccagggaaatggatatatatttttggactggtgtttttcacaaagtatttttcaatcagagttttcagaacctgacattgttaaagatactgcttgtcccggagttgtgtattttgtaaatgttcaagggaactgtttggaaacttctttccaccattcaggaggttatcagaattaataaaagtatctgttatgtgcacttaagccgcagctgctatagatagcactgccttcttgttccagctaggcaatgcctttttttttttttttgaagcagttctctttataaagtgttattttgatagtttgtggattctaaaatatatatatatttatataaacaccatataagtcaaatatgtatttaacaaagcaatatgtattcattcactttcaagatttgttttggtgtcaaaataacatgaaaaggtagatggagttgcttctgttgaattagctctgccaccaatatgtatcttcatacacgtttggaaatgtttcctgcagcattaggtatgacttgttctgagtactgcttccggtgctaaaatgaacaaagaatttgtacttaatggcatggactctggagaatctatgcgaatcaacctttctaccttaatatctccccaaaaatgtatagtgccttgtttttatgtacagtttatatacagaaaagtttgctctgcatttttgatgatggtttggaacattatctacaattttactctcaaatagtcaaaataaaaacatctcaatttctaataccggttgtaaacaaacagtacacatgtcattttgtgatataggactcccaaataaaagtatcagaataaacacaacaattaactggtaaaaaaaaagaa

SEQ ID NO: 362764 - DNA, 2451 bp, Homo sapiens
tatatacccacaaattttaaatttaaaaaaagcagacaataacaagtattggcaaggatgtgaaaattggaacccttacacattacttggaaaacagtctagcaatttctcaaaagatttaacaatacagttaccatatgactagcaactctactagatatctacccaagagaaatgaaaacacttgtacatgaaggttcatagccatattagtcatagtggccaaaagatggaaataacccaaatatctaccaacatattaatggatgaaaaaaattagtggaatattattctgccataaaaaagaattcagtattgatacatgctacaacatggatgcaccttaaaaacattacactaagtttaaaaactcagtcacaaaggaacatatatatataattccatctgtatgaaatgtccaaaacaggcaagtccataaatacaggagtagattagtggattctgaggactaaggatgggggaaatgcggagtgactgctaacgggtacagggcttcttcttccgggagatgaaaatgttctgaaattagtgatgacagttgcacaactctgtgaataaactgaaatctgtacacataaaaagagtgaattttatgacatgtgaattatatctcaataaagctattataaagctgttatcataatagtaataataattttgggtcaccagcactctccagacttataaagaactcttggagtttctcccttgcagatgtcccctggaagcaggactgcatagtagcagcaaagtcacaatacacgagtgtgatgaaggctccgagccactcggattctgggatgccttaggaaggagagacaggaaagcctacgattgcatgcttcaagatcctggaagttttaacttcgcgccccgcctgttcatcctcagcagctcctctggggattttgcagccacagagtttgtgtaccctgcccgagccccctctgtggtcagttccatgcccttcctgcaggaagatctgtacagcgcgccccagccagcacttttccttgttgacaatcaccacgaggtgtacctctggcaaggctggtggcccatcgagaacaagatcactggttccgcccgcatccgctgggcctccgaccggaagagtgcgatggagactgtgctccagtactgcaaaggaaaaaatctcaagaaaccagcccccaagtcttaccttatccacgctggtctggagcccctgacattcaccaatatgtttcccagctgggagcacagagaggacatcgctgagatcacagagatggacacggaagtttccaatcagatcaccctcgtggaagacgtcttagccaagctctgtaaaaccatttacccgctggccgacctcctggccaggccactcccggagggggtcgatcctctgaagcttgagatctatctcaccgacgaagacttcgagtttgcactagacatgacgagggatgaatacaacgccctgcccgcctggaagcaggtgaacctgaagaaagcaaaaggcctgttctgagtggggagacgccagaggagcctcacggtcacgtccaacaacaccactgcaccagggaaatggatatatatttttggactggtgtttttcacaaagtatttttcaatcagagttttcagaacctgacattgttaaagatactgcttgtcccggagttgtgtattttgtaaatgttcaagggaactgtttggaaacttctttccaccattcaggaggttatcagaattaataaaagtatctgttatgtgcacttaagccgcagctgctatagatagcactgccttcttgttccagctaggcaatgcctttttttttttttttgaagcagttctctttataaagtgttattttgatagtttgtggattctaaaatatatatatatttatataaacaccatataagtcaaatatgtatttaacaaagcaatatgtattcattcactttcaagatttgttttggtgtcaaaataacatgaaaaggtagatggagttgcttctgttgaattagctctgccaccaatatgtatcttcatacacgtttggaaatgtttcctgcagcattaggtatgacttgttctgagtactgcttccggtgctaaaatgaacaaagaatttgtacttaatggcatggactctggagaatctatgcgaatcaacctttctaccttaatatctccccaaaaatgtatagtgccttgtttttatgtacagtttatatacagaaaagtttgctctgcatttttgatgatggtttggaacattatctacaattttactctcaaatagtcaaaataaaaacatctcaatttctaataccggttgtaaacaaacagtacacatgtcattttgtgatataggactcccaaataaaagtatcagaataaacacaacaattaactggtaaaaaaaaagaa

SEQ ID NO: 362765 - DNA, 1362 bp, Homo sapiens
gaagaaaagatttcaagggaaatcagagaaagacagggtctccctggggtctactgacattgccatctgtgtaactacaggaaaaaatctcaagaaaccagcccccaagtcttaccttatccacgctggtctggagcccctgacattcaccaatatgtttcccagctgggagcacagagaggacatcgctgagatcacagagatggacacggaagtttccaatcagatcaccctcgtggaagacgtcttagccaagctctgtaaaaccatttacccgctggccgacctcctggccaggccactcccggagggggtcgatcctctgaagcttgagatctatctcaccgacgaagacttcgagtttgcactagacatgacgagggatgaatacaacgccctgcccgcctggaagcaggtgaacctgaagaaagcaaaaggcctgttctgagtggggagacgccagaggagcctcacggtcacgtccaacaacaccactgcaccagggaaatggatatatatttttggactggtgtttttcacaaagtatttttcaatcagagttttcagaacctgacattgttaaagatactgcttgtcccggagttgtgtattttgtaaatgttcaagggaactgtttggaaacttctttccaccattcaggaggttatcagaattaataaaagtatctgttatgtgcacttaagccgcagctgctatagatagcactgccttcttgttccagctaggcaatgcctttttttttttttttgaagcagttctctttataaagtgttattttgatagtttgtggattctaaaatatatatatatttatataaacaccatataagtcaaatatgtatttaacaaagcaatatgtattcattcactttcaagatttgttttggtgtcaaaataacatgaaaaggtagatggagttgcttctgttgaattagctctgccaccaatatgtatcttcatacacgtttggaaatgtttcctgcagcattaggtatgacttgttctgagtactgcttccggtgctaaaatgaacaaagaatttgtacttaatggcatggactctggagaatctatgcgaatcaacctttctaccttaatatctccccaaaaatgtatagtgccttgtttttatgtacagtttatatacagaaaagtttgctctgcatttttgatgatggtttggaacattatctacaattttactctcaaatagtcaaaataaaaacatctcaatttctaataccggttgtaaacaaacagtacacatgtcattttgtgatataggactcccaaataaaagtatcagaataaacacaacaattaactggtaaaaaaaaagaa

SEQ ID NO: 362766 - DNA, 6537 bp, Homo sapiens
  misc_feature (6491)..(6491): n is a, c, g, or t
ttcactgctctgactgcgtcctccccaggctgaagtgtcctcaggtttcatgtggatttgcccagtaatggatggctccaccgaggccaggttggggaagttcagcctcgaggacactaggggacgaaaaacttcaaaaagaagactctttttattaatattttggcgttctttttggagaggaacttttgggatgtagcctttacctgtttcctgaatttgacatccaaaaagccttttggaaaacaccattctaaatttatcctgttctgaatcatcatcgcttctgatagatgcagttgcttgctgacatcgtgatctttgattttgtacaacgctatttgggctaacttttgggattttactttgtgcttagaatttgaaagtagtattcattggaaagagactccaagaaaatactcgaagacatcaaaagctggattcgagggtataacgtgttttgttttgttttttaaattagaaaaataaggaattgcagtgtgattttctttccccctttaacttagaggaacgaggattatacagaaatttgaaatttcaacaagaaaaacttaagcttccttggattcccacgtcaaaggaaagtttcaagctttcagaaggagttctcactcgaagataaagaacagctcgctaaccacgaaagaggaatcgatgctcagcttttagttgcacttcctaaagttgcagaattaagacaaatctttgaaccaaagaagaaagaattcttagaaatgaaaagaaaagaaagaattgccaggcgcctggaagggattgaaaatgacactcagcccatcctcttgcagagctgcacaggattggtgactcaccgcctgctggaggaagacacccctcgatacatgagagccagcgaccctgccagcccccacatcggccgatcaaatgaagaggaggaaacttctgattcttctctagaaaagcaaactcgatccaaatactgcacagaaacctccggtgtccacggtgactcaccctatggttcgggtaccatggacacccacagtctggagtccaaagccgaaagaattgcaaggtacaaagcagaaagaaggcgacagctggcagagaagtatgggctgactctggatcccgaggccgactccgagtatttatcccgctataccaagtccaggaaggagcctgatgctgtcgagaagcggggaggaaaaagtgacaaacaggaagagtcaagcagagatgcgagttctctgtaccccgggaccgagacgatggggctcaggacctgtgccggtgaatccaaggactatgccctccatgcgggtgacggctcttccgacccggaggtgctgctgaacatagaaaaccaaagacgaggtcaagagctgagtgccacccggcaggcccatgacctgtccccagcagccgagagttcctcgaccttctctttctctgggcgagactcctccttcactgaagtgccacggtcccccaagcacgcccacagctcctccctgcagcaggcagcctcccggagcccctcctttggtgacccacagctatcccctgaggcccgacccagtacagggaaacccaaacatgagtggtttctccagaaagattccgaaggggacacaccttcacttatcaactggccttccagagttaaagttagagaaaaattggtgaaagaggaaagtgctcgaaacagccctgaactcgcctcagagtccgtaactcagaggagacaccagccagcgccagtccattacgtgtcatttcagtctgagcactcagcctttgatagggtccccagcaaggcagcaggctctacacgacagccaatccgtggctatgtccaacccgcagataccggtcacaccgccaagctggtgacgccagaaaccccagaaaatgcatctgagtgtagctgggtagcatcagccacccagaatgtccccaaacctcccagcttgacggttctagaaggtgacggaagggatagcccagttctccatatctgcgagtcaaaagcagaagaagaagaaggggaaggagaaggagaagaaaaagaagaagatgtgtgcttcactgaagctctcgagcaaagcaagaaaaccctactggctttggagggtgatgggctagtgagaagcccagaagatccctctagaaatgaggactttggtaagcctgctgtgagcacagtcaccttagagcatcagaaggaactggaaaacgtggcacaaccccctcaagctccgcaccagcccactgagaggacaggcaggagcgagatggttctctacattcaaagtgagcctgtgtcccaagacgccaaaccaactggtcacaacagggaagcctcgaaaaagcgcaaggtccgtacccgctctctgtcagatttcacaggcccccctcagctccaggccttgaagtataaggacccagcttccaggagagagctggagctgcccagctccaagaccgaagggccttatggggagatcagcatgctggacacaaaggtctctgtcgcccagctccgaagtgcgttcctggcatctgccaacgcctgcaggagacctgaactcaaatcacgggtagagaggtcggctgaaggacctggcttgcccaccggtgtggaacgggagagagggtcccggaaaccaagacgctatttttctcctggtgaaagtagaaaaacttccgagagatttagaacccaacctataacttcagcagaacgaaaggaatcggataggtgcacttcacattcagaaacgccaactgtcgatgatgaagaaaaggtggatgaacgagccaagctgagcgtcgccgccaagaggttgcttttcagggagatggaaaaatcttttgatgaacaaaatgttccaaagcgacgctcaagaaacacagctgtggagcagaggctacgccgtctgcaggacaggtccctcacccagcccatcaccactgaagaggtggtcatcgcagccactgaacctatccccgcttcgtgttctgggggcacccaccctgtaatggcgagacttcctagccccactgtagctaggagcgctgtgcagcctgccagattgcaggcctctgctcaccaaaaggccttagccaaggaccagacaaatgagggcaaagagcttgctgagcaaggagaacctgattcctccactctaagcttggccgaaaagttggccttgtttaacaaattgtcccagccagtctcaaaagcgatttctacccggaacagaatagacacgagacagaggagaatgaacgctcgctatcaaactcagccagtcacactgggagaggtggagcaggtgcagagtggaaagctcattcctttctcacctgccgtgaacacatcagtgtctaccgtagcatccacggttgctccaatgtatgccggagatcttcgcacaaagccacctcttgaccacaatgcaagtgccactgactataagttttcttcttcaatagaaaattcggactctccagttagaagcattctgaaatcgcaagcttggcagcctttggtagagggtagcgagaacaagggaatgttgagagaatatggagagacagaaagcaagagagctttgacaggtcgagacagtgggatggagaagtatgggtcctttgaggaagcagaagcatcctaccccatcctgaaccgagccagggaaggagacagccataaggaatctaaatatgctgttcccagaagaggaagcctggaacgggcgaaccctcccatcacccacctcggggatgaaccgaaggaattttccatggctaaaatgaatgcacaaggaaacttggacttgagggacaggctgccctttgaagagaaggtggaggtggagaatgttatgaaaaggaagttttcactaagagcggcagagttcggggagcccacttccgagcagacggggacagctgctgggaaaactattgctcaaaccacagcccccgtgtcctggaagccccaggattcttcggaacagccacaggagaagctctgcaagaatccatgtgcgatgtttgctgctggagagatcaaaacgccgacaggggagggccttcttgactcacccagcaaaaccatgtctattaaagaaagattggcactgttgaagaaaagcggggaggaagattggagaaacagactcagcaggaggcaggagggcggcaaggcgccggccagcagcctgcacacccaggaagcagggcggtccctcatcaagaagcgggtcacagaaagtcgagagagccaaatgacgattgaggagaggaagcagctcatcactgtgagagaggaggcctggaagacgagaggcagaggagcggccaacgactcgacccagttcactgtggctggcaggatggtgaagaaaggtttggcgtcacctactgccataaccccagtagcctcagccatttgcggtaaaacaagaggcaccacacccgtttccaaacccctggaagatatcgaagccagaccagatatgcagttagaatcggacctgaagttggacaggctggaaacctttctaagaaggctgaataacaaagttggcgggatgcacgaaacggtgctcactgtcaccggcaaatctgtgaaggaggtgatgaagccagatgatgatgaaacctttgccaaattttaccgcagcgtggattataatatgccaagaagtcctgtggagatggatgaggacttcgatgtcattttcgatccttatgcacccaaattgacgtcttccgtggccgagcacaagcgggcagttaggcccaagcgccgggttcaggcctccaaaaaccccctgaaaatgctggcggcaagagaagatctccttcaggaatacactgagcagagattaaacgttgccttcatggagtcaaagcggatgaaagtagaaaagatgtcttccaactccaacttctcagaagtcaccctggcgggtttagccagtaaagaaaacttcagcaacgtcagcctgcggagcgtcaacctgacggaacagaactctaacaacagcgccgtgccctacaagaggctgatgctgttgcagattaaaggaagaagacatgtgcagaccaggctggtggaacctcgagcttcggcgctcaacagtggggactgcttcctcctgctctctccccactgctgcttcctgtgggtaggagagtttgcaaacgtcatagaaaaggcgaaggcctcagaacttgcaactttaattcagacaaagagggaacttggttgtagagctacttatatccaaaccattgaagaaggaattaatacacacactcatgcagccaaagacttctggaagcttctgggtggccaaaccagttaccaatctgctggagacccaaaagaagatgaactctatgaagcagccataatagaaactaactgcatttaccgtctcatggatgacaaacttgttcctgatgacgactactgggggaaaattccgaagtgctcccttctgcaacccaaagaggtactggtgtttgattttggtagtgaagtttacgtatggcatgggaaagaagtcacattagcacaacgaaaaatagcatttcagctggcaaagcacttatggaatggaacctttgactatgagaactgtgacatcaatcccctggatcctggagaatgcaatccgcttatccccagaaaaggacaggggcggcccgactgggcgatatttgggagacttactgaacacaatgagacgattttgttcaaagagaagtttctggattggacggaactgaagagatcgaatgagaagaaccccggggaacttgcccagcacaaggaagaccccaggactgatgtcaaggcatacgatgtgacacggatggtgtccatgccccagacgacagcaggcaccatcctggacggagtgaacgtcggccgtggctatggcctggtggaaggacacgacaggaggcagtttgagatcaccagcgtttccgtggatgtctggcacatcctggaattcgactatagcaggctccccaaacaaagcatcgggcagttccatgagggggatgcctatgtggtcaagtggaagttcatggtgagcacggcagtgggaagtcgccagaagggagagcactcggtgagggcagccggcaaagagaagtgcgtctacttcttctggcaaggccggcactccaccgtgagtgagaagggcacgtcggcgctgatgacggtggagctggacgaggaaaggggggcccaggtccaggttctccagggcggtccctcatcaagaagcgggtcacagaaagtcgagagagccaaatgacgattgaggagaggaagcagctcatcactgtgagagaggaggcctggaagacgagaggcagaggagcggccaacgactcgacccagttcactgtggctggcaggatgttgaagaaaggtttggcgtcacctactgtacttnccatgagagatgccccggccgaattgagatcctctagatcgaccca

SEQ ID NO: 362767 - DNA, 6509 bp, Homo sapiens
ttcactgctctgactgcgtcctccccaggctgaagtgtcctcaggtttcatgtggatttgcccagtaatggatggctccaccgaggccaggttggggaagttcagcctcgaggacactaggggacgaaaaacttcaaaaagaagactctttttattaatattttggcgttctttttggagaggaacttttgggatgtagcctttacctgtttcctgaatttgacatccaaaaagccttttggaaaacaccattctaaatttatcctgttctgaatcatcatcgcttctgatagatgcagttgcttgctgacatcgtgatctttgattttgtacaacgctatttgggctaacttttgggattttactttgtgcttagaatttgaaagtagtattcattggaaagagactccaagaaaatactcgaagacatcaaaagctggattcgagggtataacgtgttttgttttgttttttaaattagaaaaataaggaattgcagtgtgattttctttccccctttaacttagaggaacgaggattatacagaaatttgaaatttcaacaagaaaaacttaagcttccttggattcccacgtcaaaggaaagtttcaagctttcagaaggagttctcactcgaagataaagaacagctcgctaaccacgaaagaggaatcgatgctcagcttttagttgcacttcctaaagttgcagaattaagacaaatctttgaaccaaagaagaaagaattcttagaaatgaaaagaaaagaaagaattgccaggcgcctggaagggattgaaaatgacactcagcccatcctcttgcagagctgcacaggattggtgactcaccgcctgctggaggaagacacccctcgatacatgagagccagcgaccctgccagcccccacatcggccgatcaaatgaagaggaggaaacttctgattcttctctagaaaagcaaactcgatccaaatactgcacagaaacctccggtgtccacggtgactcaccctatggttcgggtaccatggacacccacagtctggagtccaaagccgaaagaattgcaaggtacaaagcagaaagaaggcgacagctggcagagaagtatgggctgactctggatcccgaggccgactccgagtatttatcccgctataccaagtccaggaaggagcctgatgctgtcgagaagcggggaggaaaaagtgacaaacaggaagagtcaagcagagatgcgagttctctgtaccccgggaccgagacgatggggctcaggacctgtgccggtgaatccaaggactatgccctccatgcgggtgacggctcttccgacccggaggtgctgctgaacatagaaaaccaaagacgaggtcaagagctgagtgccacccggcaggcccatgacctgtccccagcagccgagagttcctcgaccttctctttctctgggcgagactcctccttcactgaagtgccacggtcccccaagcacgcccacagctcctccctgcagcaggcagcctcccggagcccctcctttggtgacccacagctatcccctgaggcccgacccagtacagggaaacccaaacatgagtggtttctccagaaagattccgaaggggacacaccttcacttatcaactggccttccagagttaaagttagagaaaaattggtgaaagaggaaagtgctcgaaacagccctgaactcgcctcagagtccgtaactcagaggagacaccagccagcgccagtccattacgtgtcatttcagtctgagcactcagcctttgatagggtccccagcaaggcagcaggctctacacgacagccaatccgtggctatgtccaacccgcagataccggtcacaccgccaagctggtgacgccagaaaccccagaaaatgcatctgagtgtagctgggtagcatcagccacccagaatgtccccaaacctcccagcttgacggttctagaaggtgacggaagggatagcccagttctccatatctgcgagtcaaaagcagaagaagaagaaggggaaggagaaggagaagaaaaagaagaagatgtgtgcttcactgaagctctcgagcaaagcaagaaaaccctactggctttggagggtgatgggctagtgagaagcccagaagatccctctagaaatgaggactttggtaagcctgctgtgagcacagtcaccttagagcatcagaaggaactggaaaacgtggcacaaccccctcaagctccgcaccagcccactgagaggacaggcaggagcgagatggttctctacattcaaagtgagcctgtgtcccaagacgccaaaccaactggtcacaacagggaagcctcgaaaaagcgcaaggtccgtacccgctctctgtcagatttcacaggcccccctcagctccaggccttgaagtataaggacccagcttccaggagagagctggagctgcccagctccaagaccgaagggccttatggggagatcagcatgctggacacaaaggtctctgtcgcccagctccgaagtgcgttcctggcatctgccaacgcctgcaggagacctgaactcaaatcacgggtagagaggtcggctgaaggacctggcttgcccaccggtgtggaacgggagagagggtcccggaaaccaagacgctatttttctcctggtgaaagtagaaaaacttccgagagatttagaacccaacctataacttcagcagaacgaaaggaatcggataggtgcacttcacattcagaaacgccaactgtcgatgatgaagaaaaggtggatgaacgagccaagctgagcgtcgccgccaagaggttgcttttcagggagatggaaaaatcttttgatgaacaaaatgttccaaagcgacgctcaagaaacacagctgtggagcagaggctacgccgtctgcaggacaggtccctcacccagcccatcaccactgaagaggtggtcatcgcagccactgaacctatccccgcttcgtgttctgggggcacccaccctgtaatggcgagacttcctagccccactgtagctaggagcgctgtgcagcctgccagattgcaggcctctgctcaccaaaaggccttagccaaggaccagacaaatgagggcaaagagcttgctgagcaaggagaacctgattcctccactctaagcttggccgaaaagttggccttgtttaacaaattgtcccagccagtctcaaaagcgatttctacccggaacagaatagacacgagacagaggagaatgaacgctcgctatcaaactcagccagtcacactgggagaggtggagcaggtgcagagtggaaagctcattcctttctcacctgccgtgaacacatcagtgtctaccgtagcatccacggttgctccaatgtatgccggagatcttcgcacaaagccacctcttgaccacaatgcaagtgccactgactataagttttcttcttcaatagaaaattcggactctccagttagaagcattctgaaatcgcaagcttggcagcctttggtagagggtagcgagaacaagggaatgttgagagaatatggagagacagaaagcaagagagctttgacaggtcgagacagtgggatggagaagtatgggtcctttgaggaagcagaagcatcctaccccatcctgaaccgagccagggaaggagacagccataaggaatctaaatatgctgttcccagaagaggaagcctggaacgggcgaaccctcccatcacccacctcggggatgaaccgaaggaattttccatggctaaaatgaatgcacaaggaaacttggacttgagggacaggctgccctttgaagagaaggtggaggtggagaatgttatgaaaaggaagttttcactaagagcggcagagttcggggagcccacttccgagcagacggggacagctgctgggaaaactattgctcaaaccacagcccccgtgtcctggaagccccaggattcttcggaacagccacaggagaagctctgcaagaatccatgtgcgatgtttgctgctggagagatcaaaacgccgacaggggagggccttcttgactcacccagcaaaaccatgtctattaaagaaagattggcactgttgaagaaaagcggggaggaagattggagaaacagactcagcaggaggcaggagggcggcaaggcgccggccagcagcctgcacacccaggaagcagggcggtccctcatcaagaagcgggtcacagaaagtcgagagagccaaatgacgattgaggagaggaagcagctcatcactgtgagagaggaggcctggaagacgagaggcagaggagcggccaacgactcgacccagttcactgtggctggcaggatggtgaagaaaggtttggcgtcacctactgccataaccccagtagcctcagccatttgcggtaaaacaagaggcaccacacccgtttccaaacccctggaagatatcgaagccagaccagatatgcagttagaatcggacctgaagttggacaggctggaaacctttctaagaaggctgaataacaaagttggcgggatgcacgaaacggtgctcactgtcaccggcaaatctgtgaaggaggtgatgaagccagatgatgatgaaacctttgccaaattttaccgcagcgtggattataatatgccaagaagtcctgtggagatggatgaggacttcgatgtcattttcgatccttatgcacccaaattgacgtcttccgtggccgagcacaagcgggcagttaggcccaagcgccgggttcaggcctccaaaaaccccctgaaaatgctggcggcaagagaagatctccttcaggaatacactgagcagagattaaacgttgccttcatggagtcaaagcggatgaaagtagaaaagatgtcttccaactccaacttctcagaagtcaccctggcgggtttagccagtaaagaaaacttcagcaacgtcagcctgcggagcgtcaacctgacggaacagaactctaacaacagcgccgtgccctacaagaggctgatgctgttgcagattaaaggaagaagacatgtgcagaccaggctggtggaacctcgagcttcggcgctcaacagtggggactgcttcctcctgctctctccccactgctgcttcctgtgggtaggagagtttgcaaacgtcatagaaaaggcgaaggcctcagaacttgcaactttaattcagacaaagagggaacttggttgtagagctacttatatccaaaccattgaagaaggaattaatacacacactcatgcagccaaagacttctggaagcttctgggtggccaaaccagttaccaatctgctggagacccaaaagaagatgaactctatgaagcagccataatagaaactaactgcatttaccgtctcatggatgacaaacttgttcctgatgacgactactgggggaaaattccgaagtgctcccttctgcaacccaaagaggtactggtgtttgattttggtagtgaagtttacgtatggcatgggaaagaagtcacattagcacaacgaaaaatagcatttcagctggcaaagcacttatggaatggaacctttgactatgagaactgtgacatcaatcccctggatcctggagaatgcaatccgcttatccccagaaaaggacaggggcggcccgactgggcgatatttgggagacttactgaacacaatgagacgattttgttcaaagagaagtttctggattggacggaactgaagagatcgaatgagaagaaccccggggaacttgcccagcacaaggaagaccccaggactgatgtcaaggcatacgatgtgacacggatggtgtccatgccccagacgacagcaggcaccatcctggacggagtgaacgtcggccgtggctatggcctggtggaaggacacgacaggaggcagtttgagatcaccagcgtttccgtggatgtctggcacatcctggaattcgactatagcaggctccccaaacaaagcatcgggcagttccatgagggggatgcctatgtggtcaagtggaagttcatggtgagcacggcagggttagtgagcgcttgtggttttttccagctgaaagaggctggcccggcagccctgcgggagccagcttctccaatgaaccctgtcatgccctctgctgcgtccgtgcagtggggcactgcagtcatgcgcctttgagagccacctagtaaactacagagatgaaaagaagtaaggccgaattcctaacaacctagcattgccgaggccgctggtgttcacctgtagaaattgaacttgcacatcaaggcttctcagctccctctctccctcccctgcccctgtccccagagcttttctgggaaagagatgattggcctctaaatgatatttcccatgtggctgtgtgctgcttcaattaaagtcgttaagtacaaa

SEQ ID NO: 362768 - DNA, 5270 bp, Homo sapiens
ttcactgctctgactgcgtcctccccaggctgaagtgtcctcaggtttcatgtggatttgcccagtaatggatggctccaccgaggccaggttggggaagttcagcctcgaggacactaggggacgaaaaacttcaaaaagaagactctttttattaatattttggcgttctttttggagaggaacttttgggatgtagcctttacctgtttcctgaatttgacatccaaaaagccttttggaaaacaccattctaaatttatcctgttctgaatcatcatcgcttctgatagatgcagttgcttgctgacatcgtgatctttgattttgtacaacgctatttgggctaacttttgggattttactttgtgcttagaatttgaaagtagtattcattggaaagagactccaagaaaatactcgaagacatcaaaagctggattcgagggtataacgtgttttgttttgttttttaaattagaaaaataaggaattgcagtgtgattttctttccccctttaacttagaggaacgaggattatacagaaatttgaaatttcaacaagaaaaacttaagcttccttggattcccacgtcaaaggaaagtttcaagctttcagaaggagttctcactcgaagataaagaacagctcgctaaccacgaaagaggaatcgatgctcagcttttagttgcacttcctaaagttgcagaattaagacaaatctttgaaccaaagaagaaagaattcttagaaatgaaaagaaaagaaagaattgccaggcgcctggaagggattgaaaatgacactcagcccatcctcttgcagagctgcacaggattggtgactcaccgcctgctggaggaagacacccctcgatacatgagagccagcgaccctgccagcccccacatcggccgatcaaatgaagaggaggaaacttctgattcttctctagaaaagcaaactcgatccaaatactgcacagaaacctccggtgtccacggtgactcaccctatggttcgggtaccatggacacccacagtctggagtccaaagccgaaagaattgcaaggtacaaagcagaaagaaggcgacagctggcagagaagtatgggctgactctggatcccgaggccgactccgagtatttatcccgctataccaagtccaggaaggagcctgatgctgtcgagaagcggggaggaaaaagtgacaaacaggaagagtcaagcagagatgcgagttctctgtaccccgggaccgagacgatggggctcaggacctgtgccggtgaatccaaggactatgccctccatgcgggtgacggctcttccgacccggaggtgctgctgaacatagaaaaccaaagacgaggtcaagagctgagtgccacccggcaggcccatgacctgtccccagcagccgagagttcctcgaccttctctttctctgggcgagactcctccttcactgaagtgccacggtcccccaagcacgcccacagctcctccctgcagcaggcagcctcccggagcccctcctttggtgacccacagctatcccctgaggcccgacccagtacagggaaacccaaacatgagtggtttctccagaaagattccgaaggggacacaccttcacttatcaactggccttccagagttaaagttagagaaaaattggtgaaagaggaaagtgctcgaaacagccctgaactcgcctcagagtccgtaactcagaggagacaccagccagcgccagtccattacgtgtcatttcagtctgagcactcagcctttgatagggtccccagcaaggcagcaggctctacacgacagccaatccgtggctatgtccaacccgcagataccggtcacaccgccaagctggtgacgccagaaaccccagaaaatgcatctgagtgtagctgggtagcatcagccacccagaatgtccccaaacctcccagcttgacggttctagaaggtgacggaagggatagcccagttctccatatctgcgagtcaaaagcagaagaagaagaaggggaaggagaaggagaagaaaaagaagaagatgtgtgcttcactgaagctctcgagcaaagcaagaaaaccctactggctttggagggtgatgggctagtgagaagcccagaagatccctctagaaatgaggactttggtaagcctgctgtgagcacagtcaccttagagcatcagaaggaactggaaaacgtggcacaaccccctcaagctccgcaccagcccactgagaggacaggcaggagcgagatggttctctacattcaaagtgagcctgtgtcccaagacgccaaaccaactggtcacaacagggaagcctcgaaaaagcgcaaggtccgtacccgctctctgtcagatttcacaggcccccctcagctccaggccttgaagtataaggacccagcttccaggagagagctggagctgcccagctccaagaccgaagggccttatggggagatcagcatgctggacacaaaggtctctgtcgcccagctccgaagtgcgttcctggcatctgccaacgcctgcaggagacctgaactcaaatcacgggtagagaggtcggctgaaggacctggcttgcccaccggtgtggaacgggagagagggtcccggaaaccaagacgctatttttctcctggtgaaagtagaaaaacttccgagagatttagaacccaacctataacttcagcagaacgaaaggaatcggataggtgcacttcacattcagaaacgccaactgtcgatgatgaagaaaaggtggatgaacgagccaagctgagcgtcgccgccaagaggttgcttttcagggagatggaaaaatcttttgatgaacaaaatgttccaaagcgacgctcaagaaacacagctgtggagcagaggctacgccgtctgcaggacaggtccctcacccagcccatcaccactgaagaggtggtcatcgcagccactgaacctatccccgcttcgtgttctgggggcacccaccctgtaatggcgagacttcctagccccactgtagctaggagcgctgtgcagcctgccagattgcaggcctctgctcaccaaaaggccttagccaaggaccagacaaatgagggcaaagagcttgctgagcaaggagaacctgattcctccactctaagcttggccgaaaagttggccttgtttaacaaattgtcccagccagtctcaaaagcgatttctacccggaacagaatagacacgagacagaggagaatgaacgctcgctatcaaactcagccagtcacactgggagaggtggagcaggtgcagagtggaaagctcattcctttctcacctgccgtgaacacatcagtgtctaccgtagcatccacggttgctccaatgtatgccggagatcttcgcacaaagccacctcttgaccacaatgcaagtgccactgactataagttttcttcttcaatagaaaattcggactctccagttagaagcattctgaaatcgcaagcttggcagcctttggtagagggtagcgagaacaagggaatgttgagagaatatggagagacagaaagcaagagagctttgacaggtcgagacagtgggatggagaagtatgggtcctttgaggaagcagaagcatcctaccccatcctgaaccgagccagggaaggagacagccataaggaatctaaatatgctgttcccagaagaggaagcctggaacgggcgaaccctcccatcacccacctcggggatgaaccgaaggaattttccatggctaaaatgaatgcacaaggaaacttggacttgagggacaggctgccctttgaagagaaggtggaggtggagaatgttatgaaaaggaagttttcactaagagcggcagagttcggggagcccacttccgagcagacggggacagctgctgggaaaactattgctcaaaccacagcccccgtgtcctggaagccccaggattcttcggaacagccacaggagaagctctgcaagaatccatgtgcgatgtttgctgctggagagatcaaaacgccgacaggggagggccttcttgactcacccagcaaaaccatgtctattaaagaaagattggcactgttgaagaaaagcggggaggaagattggagaaacagactcagcaggaggcaggagggcggcaaggcgccggccagcagcctgcacacccaggaagcagggcggtccctcatcaagaagcgggtcacagaaagtcgagagagccaaatgacgattgaggagaggaagcagctcatcactgtgagagaggaggcctggaagacgagaggcagaggagcggccaacgactcgacccagttcactgtggctggcaggatggtgaagaaaggtttggcgtcacctactgccataaccccagtagcctcagccatttgcggtaaaacaagaggcaccacacccgtttccaaacccctggaagatatcgaagccagaccagatatgcagttagaatcggacctgaagttggacaggctggaaacctttctaagaaggctgaataacaaagttggcgggatgcacgaaacggtgctcactgtcaccggcaaatctgtgaaggaggtgatgaagccagatgatgatgaaacctttgccaaattttaccgcagcgtggattataatatgccaagaagtcctgtggagatggatgaggacttcgatgtcattttcgatccttatgcacccaaattgacgtcttccgtggccgagcacaagcgggcagttaggcccaagcgccgggttcaggcctccaaaaaccccctgaaaatgctggcggcaagagaagatctccttcaggaatacactgagcagagattaaacgttgccttcatggagtcaaagcggatgaaagtagaaaagatgtcttccaactccaacttctcagaagtcaccctggcgggtttagccagtaaagaaaacttcagcaacgtcagcctgcggagcgtcaacctgacggaacagaactctaacaacagcgccgtgccctacaagaggctgatgctgttgcagattaaaggaagaagacatgtgcagaccaggctggtggaacctcgagcttcggcgctcaacagtggggactgcttcctcctgctctctccccactgctgcttcctgtgggtaggagagtttgcaaacgtcatagaaaaggcgaagcctcagactgcacttatccgacgaccaccg

SEQ ID NO: 362769 - DNA, 1150 bp, Homo sapiens
ttcactgctctgactgcgtcctccccaggctgaagtgtcctcaggtttcatgtggatttgcccagtaatggatggctccaccgaggccaggttggggaagttcagcctcgaggacactaggggacgaaaaacttcaaaaagaagactctttttattaatattttggcgttctttttggagaggaacttttgggatgtagcctttacctgtttcctgaatttgacatccaaaaagccttttggaaaacaccattctaaatttatcctgttctgaatcatcatcgcttctgatagatgcagttgcttgctgacatcgtgatctttgattttgtacaacgctatttgggctaacttttgggattttactttgtgcttagaatttgaaagtagtattcattggaaagagactccaagaaaatactcgaagacatcaaaagctggattcgagggtataacgtgttttgttttgttttttaaattagaaaaataaggaattgcagtgtgattttctttccccctttaacttagaggaacgaggattatacagaaatttgaaatttcaacaagaaaaacttaagcttccttggattcccacgtcaaaggaaagtttcaagctttcagaaggagttctcactcgaagataaagaacagctcgctaaccacgaaagaggaatcgatgctcagcttttagttgcacttcctaaagttgcagaattaagacaaatctttgaaccaaagaagaaagaattcttagaaatgaaaagaaaagaaagaattgccaggcgcctggaagggattgaaaatgacactcagcccatcctcttgcagagctgcacagggaacaaagaatttgtacttaatggcatggactctggagaatctatgcgaatcaacctttctaccttaatatctccccaaaaatgtatagtgccttgtttttatgtacagtttatatacagaaaagtttgctctgcatttttgatgatggtttggaacattatctacaattttactctcaaatagtcaaaataaaaacatctcaatttctaataccggttgtaaacaaacagtacacatgtcattttgtgatataggactcccaaataaaagtatcagaataaacacaacaattaactggtaaaaaaaaagaa

SEQ ID NO: 362770 - DNA, 317 bp, Homo sapiens
gcaccaccaaggccccgcgctagtgtgcacccccggcccgggcccggcaggtgggcgaggagggcgggcgcagtcgggctctgcaggagcgcgcggagattctggctacattggagattggttgctttctaaaactgaaggagaagcccatgaagagatggtggattctcactgagttttgactagcggaagaaaagaggaaatagatgaaaagtgaagtcggtgcctgcagtctctggggtctctgcgcctggtgttccaaggaggattttgatctggtccctcatcagactctgttgttgctcttagggttggat

SEQ ID NO: 362771 - DNA, 371 bp, Homo sapiens
aggccttagtgatgctgtctcactgacggtttctgcttgcctagatatcgaagccagaccagatatgcagttagaatcggacctgaagttggacaggctggaaacctttctaagaaggctgaataacaaaggtacctactggaagccagaaggctttgctttcagaatctctaaatcctaattctgattgcttttcttcctcagccaaaaaaaagaagttttggtcaagactgattagagaaacaagccctgattcacttgataacgtactaaattggggattcccaataatacatttttttcttgaatctaagcccttgggatgccatccaattggaattgtgaactgagtgattttgcttataactctg

SEQ ID NO: 362772 - DNA, 401 bp, Homo sapiens
ggccccggccacgccaagcagtttctgatcagaagaggccttagtgatgctgtctcactgacggtttctgcttgcctagatatcgaagccagaccagatatgcagttagaatcggacctgaagttggacaggctggaaacctttctaagaaggctgaataacaaaggtacctactggaagccagaaggctttgctttcagaatctctaaatcctaattctgattgcttttcttcctcagccaaaaaaaagaagttttggtcaagactgattagagaaacaagccctgattcacttgataacgtactaaattggggattcccaataatacatttttttcttgaatctaagcccttgggatgccatccaattggaattgtgaactgagtgattttgcttataa

SEQ ID NO: 362773 - DNA, 319 bp, Homo sapiens
ggttaaatgcaaaccgattcattccatttcatttaagtatatatttctaggctttggaaattacatcctatgatttttttaaaacttttctcccccagattctggctacattggagattggttgctttctaaaactgaaggagaagcccatgaagagatggtggattctcactgagttttgactagcggaagaaaaggtaattattgatgatttcggaatatgtttgcagtatcatgtggagttcagctgcagtagcagcaaagacaaaactgagagttttagacattttctgttataataacaactggtaccactcta

SEQ ID NO: 362774 - DNA, 521 bp, Homo sapiens
aaacagactcagcaggaggcaggagggcggcaaggcgccggccagcagcctgcacacccaggaagcagggcggtccctcatcaagaaggtaacattccccatgttaggaaaagccttccgactaacatcactcttggaagtgcatcaaaaagacaagcgtgtgccacctaattcctactctgtgaagcatttgtgcatttttgcccttagggtacacactgagagtctgtcacagagcagctaaaattgggcagaaggctgtgcctggagatgttttaaaactgggatcagcaacacacacacactatgtcagcaagcaagtgcctgaattttaaagtgtggactttttcttcagtttaaaaaccttcttaaatgaagtctggctttcatgtgttattaaagcctttataatgaaaaaaattgaattcaccactaatatctttaagttccatgtaaaatacagacttgtgtttcccatgcagagattttaaacctaagtataaaaaataaggacataattg

SEQ ID NO: 362775 - DNA, 531 bp, Homo sapiens
ctccaggtgccaacggtttctcccctgccctaggtccgaggctctttgccactggtccttgcaggcccggggaaagtgagccagacatttgcttctcctcgggtgtctcagctgctgacctgtccctctgccattctgtgtttgcagtgggaagtcgccagaagggagagcactcggtgagggcagccggcaaagagaagtgcgtctacttcttctggcaaggccggcactccaccgtgagtgagaagggcacgtcggcgctgatgacggtggagctggacgaggaaaggggggcccaggtgagtcctggggagctctgcaccccggggactgagaggagcatcctctcctgggagccgatggcactcggcctggtccctcccaacatgattctgataatggaagaccacgtcacccaaagcacttcagtcctggtctggcttctgcaggtctcaggctgtgcctcccatttctttcctcctcccactttttgtaagatgatcctggagaaaatgttgtatctgcaaatag

SEQ ID NO: 362776 - DNA, 468 bp, Homo sapiens
caacagggaagcctcgaaaaagcgcaaggtccgtacccgctctctgtcagatttcacaggcccccctcagctccaggccttgaagtataaggacccagcttccaggagagagctggagctgcccagctccaagaccgaagggccttatggggagatcagcatgctggacacaaaggtctctgtcgcccagctccgaagtgcgttcctggcatctgccaacgcctgcaggagacctgaactgtaggtgatgcttcacacgccctccagctgtgtcacttgcacgtccctggcagaatgattcactcctcgacctgtgttgtgttctgcattgaatcatattagcttagctcacaagtgcgtgcagggcgactatgcggaaaatggctcaaaaactaccactctgcttctgcctactaatggggaactagtggattgggtgtctggaatgtctccttccttacgtgcatg

SEQ ID NO: 362777 - DNA, 227 bp, Homo sapiens
taaaaatcagcctttaggttttaagttatggtaaagtctgtgtatatgttgacgttttaatagagattatctggttttgttttttgtacacaatagtacagggaaacccaaacatgagtggtttctccagaaagattccgaaggggacacaccttcacttatcaactggccttccaggtacccgcacgccggccctctggggcttgtgtgcatgagtgttgcttcct

SEQ ID NO: 362778 - DNA, 8212 bp, Homo sapiens
ttcactgctctgactgcgtcctccccaggctgaagtgtcctcaggtttcatgtggatttgcccagtaatggatggctccaccgaggccaggttggggaagttcagcctcgaggacactaggggacgaaaaacttcaaaaagaagactctttttattaatattttggcgttctttttggagaggaacttttgggatgtagcctttacctgtttcctgaatttgacatccaaaaagccttttggaaaacaccattctaaatttatcctgttctgaatcatcatcgcttctgatagatgcagttgcttgctgacatcgtgatctttgattttgtacaacgctatttgggctaacttttgggattttactttgtgcttagaatttgaaagtagtattcattggaaagagactccaagaaaatactcgaagacatcaaaagctggattcgagggtataacgtgttttgttttgttttttaaattagaaaaataaggaattgcagtgtgattttctttccccctttaacttagaggaacgaggattatacagaaatttgaaatttcaacaagaaaaacttaagcttccttggattcccacgtcaaaggaaagtttcaagctttcagaaggagttctcactcgaagataaagaacagctcgctaaccacgaaagaggaatcgatgctcagcttttagttgcacttcctaaagttgcagaattaagacaaatctttgaaccaaagaagaaagaattcttagaaatgaaaagaaaagaaagaattgccaggcgcctggaagggattgaaaatgacactcagcccatcctcttgcagagctgcacaggattggtgactcaccgcctgctggaggaagacacccctcgatacatgagagccagcgaccctgccagcccccacatcggccgatcaaatgaagaggaggaaacttctgattcttctctagaaaagcaaactcgatccaaatactgcacagaaacctccggtgtccacggtgactcaccctatggttcgggtaccatggacacccacagtctggagtccaaagccgaaagaattgcaaggtacaaagcagaaagaaggcgacagctggcagagaagtatgggctgactctggatcccgaggccgactccgagtatttatcccgctataccaagtccaggaaggagcctgatgctgtcgagaagcggggaggaaaaagtgacaaacaggaagagtcaagcagagatgcgagttctctgtaccccgggaccgagacgatggggctcaggacctgtgccggtgaatccaaggactatgccctccatgcgggtgacggctcttccgacccggaggtgctgctgaacatagaaaaccaaagacgaggtcaagagctgagtgccacccggcaggcccatgacctgtccccagcagccgagagttcctcgaccttctctttctctgggcgagactcctccttcactgaagtgccacggtcccccaagcacgcccacagctcctccctgcagcaggcagcctcccggagcccctcctttggtgacccacagctatcccctgaggcccgacccagtacagggaaacccaaacatgagtggtttctccagaaagattccgaaggggacacaccttcacttatcaactggccttccagagttaaagttagagaaaaattggtgaaagaggaaagtgctcgaaacagccctgaactcgcctcagagtccgtaactcagaggagacaccagccagcgccagtccattacgtgtcatttcagtctgagcactcagcctttgatagggtccccagcaaggcagcaggctctacacgacagccaatccgtggctatgtccaacccgcagataccggtcacaccgccaagctggtgacgccagaaaccccagaaaatgcatctgagtgtagctgggtagcatcagccacccagaatgtccccaaacctcccagcttgacggttctagaaggtgacggaagggatagcccagttctccatatctgcgagtcaaaagcagaagaagaagaaggggaaggagaaggagaagaaaaagaagaagatgtgtgcttcactgaagctctcgagcaaagcaagaaaaccctactggctttggagggtgatgggctagtgagaagcccagaagatccctctagaaatgaggactttggtaagcctgctgtgagcacagtcaccttagagcatcagaaggaactggaaaacgtggcacaaccccctcaagctccgcaccagcccactgagaggacaggcaggagcgagatggttctctacattcaaagtgagcctgtgtcccaagacgccaaaccaactggtcacaacagggaagcctcgaaaaagcgcaaggtccgtacccgctctctgtcagatttcacaggcccccctcagctccaggccttgaagtataaggacccagcttccaggagagagctggagctgcccagctccaagaccgaagggccttatggggagatcagcatgctggacacaaaggtctctgtcgcccagctccgaagtgcgttcctggcatctgccaacgcctgcaggagacctgaactcaaatcacgggtagagaggtcggctgaaggacctggcttgcccaccggtgtggaacgggagagagggtcccggaaaccaagacgctatttttctcctggtgaaagtagaaaaacttccgagagatttagaacccaacctataacttcagcagaacgaaaggaatcggataggtgcacttcacattcagaaacgccaactgtcgatgatgaagaaaaggtggatgaacgagccaagctgagcgtcgccgccaagaggttgcttttcagggagatggaaaaatcttttgatgaacaaaatgttccaaagcgacgctcaagaaacacagctgtggagcagaggctacgccgtctgcaggacaggtccctcacccagcccatcaccactgaagaggtggtcatcgcagccactgaacctatccccgcttcgtgttctgggggcacccaccctgtaatggcgagacttcctagccccactgtagctaggagcgctgtgcagcctgccagattgcaggcctctgctcaccaaaaggccttagccaaggaccagacaaatgagggcaaagagcttgctgagcaaggagaacctgattcctccactctaagcttggccgaaaagttggccttgtttaacaaattgtcccagccagtctcaaaagcgatttctacccggaacagaatagacacgagacagaggagaatgaacgctcgctatcaaactcagccagtcacactgggagaggtggagcaggtgcagagtggaaagctcattcctttctcacctgccgtgaacacatcagtgtctaccgtagcatccacggttgctccaatgtatgccggagatcttcgcacaaagccacctcttgaccacaatgcaagtgccactgactataagttttcttcttcaatagaaaattcggactctccagttagaagcattctgaaatcgcaagcttggcagcctttggtagagggtagcgagaacaagggaatgttgagagaatatggagagacagaaagcaagagagctttgacaggtcgagacagtgggatggagaagtatgggtcctttgaggaagcagaagcatcctaccccatcctgaaccgagccagggaaggagacagccataaggaatctaaatatgctgttcccagaagaggaagcctggaacgggcgaaccctcccatcacccacctcggggatgaaccgaaggaattttccatggctaaaatgaatgcacaaggaaacttggacttgagggacaggctgccctttgaagagaaggtggaggtggagaatgttatgaaaaggaagttttcactaagagcggcagagttcggggagcccacttccgagcagacggggacagctgctgggaaaactattgctcaaaccacagcccccgtgtcctggaagccccaggattcttcggaacagccacaggagaagctctgcaagaatccatgtgcgatgtttgctgctggagagatcaaaacgccgacaggggagggccttcttgactcacccagcaaaaccatgtctattaaagaaagattggcactgttgaagaaaagcggggaggaagattggagaaacagactcagcaggaggcaggagggcggcaaggcgccggccagcagcctgcacacccaggaagcagggcggtccctcatcaagaagcgggtcacagaaagtcgagagagccaaatgacgattgaggagaggaagcagctcatcactgtgagagaggaggcctggaagacgagaggcagaggagcggccaacgactcgacccagttcactgtggctggcaggatggtgaagaaaggtttggcgtcacctactgccataaccccagtagcctcagccatttgcggtaaaacaagaggcaccacacccgtttccaaacccctggaagatatcgaagccagaccagatatgcagttagaatcggacctgaagttggacaggctggaaacctttctaagaaggctgaataacaaagttggcgggatgcacgaaacggtgctcactgtcaccggcaaatctgtgaaggaggtgatgaagccagatgatgatgaaacctttgccaaattttaccgcagcgtggattataatatgccaagaagtcctgtggagatggatgaggacttcgatgtcattttcgatccttatgcacccaaattgacgtcttccgtggccgagcacaagcgggcagttaggcccaagcgccgggttcaggcctccaaaaaccccctgaaaatgctggcggcaagagaagatctccttcaggaatacactgagcagagattaaacgttgccttcatggagtcaaagcggatgaaagtagaaaagatgtcttccaactccaacttctcagaagtcaccctggcgggtttagccagtaaagaaaacttcagcaacgtcagcctgcggagcgtcaacctgacggaacagaactctaacaacagcgccgtgccctacaagaggctgatgctgttgcagattaaaggaagaagacatgtgcagaccaggctggtggaacctcgagcttcggcgctcaacagtggggactgcttcctcctgctctctccccactgctgcttcctgtgggtaggagagtttgcaaacgtcatagaaaaggcgaaggcctcagaacttgcaactttaattcagacaaagagggaacttggttgtagagctacttatatccaaaccattgaagaaggaattaatacacacactcatgcagccaaagacttctggaagcttctgggtggccaaaccagttaccaatctgctggagacccaaaagaagatgaactctatgaagcagccataatagaaactaactgcatttaccgtctcatggatgacaaacttgttcctgatgacgactactgggggaaaattccgaagtgctcccttctgcaacccaaagaggtactggtgtttgattttggtagtgaagtttacgtatggcatgggaaagaagtcacattagcacaacgaaaaatagcatttcagctggcaaagcacttatggaatggaacctttgactatgagaactgtgacatcaatcccctggatcctggagaatgcaatccgcttatccccagaaaaggacaggggcggcccgactgggcgatatttgggagacttactgaacacaatgagacgattttgttcaaagagaagtttctggattggacggaactgaagagatcgaatgagaagaaccccggggaacttgcccagcacaaggaagaccccaggactgatgtcaaggcatacgatgtgacacggatggtgtccatgccccagacgacagcaggcaccatcctggacggagtgaacgtcggccgtggctatggcctggtggaaggacacgacaggaggcagtttgagatcaccagcgtttccgtggatgtctggcacatcctggaattcgactatagcaggctccccaaacaaagcatcgggcagttccatgagggggatgcctatgtggtcaagtggaagttcatggtgagcacggcagtgggaagtcgccagaagggagagcactcggtgagggcagccggcaaagagaagtgcgtctacttcttctggcaaggccggcactccaccgtgagtgagaagggcacgtcggcgctgatgacggtggagctggacgaggaaaggggggcccaggtccaggttctccagggaaaggagcccccctgtttcctgcagtgtttccagggggggatggtggtgcactcggggaggcgggaagaggaagaagaaaatgtgcaaagtgagtggcggctgtactgcgtgcgtggagaggtgcccgtggaagggaatttgctggaagtggcctgtcactgtagcagcctgaggtccagaacttccatggtggtgcttaacgtcaacaaggccctcatctacctgtggcacggatgcaaagcccaggcccacacgaaggaggtcggaaggaccgctgcgaacaagatcaaggaacaatgtcccctggaagcaggactgcatagtagcagcaaagtcacaatacacgagtgtgatgaaggctccgagccactcggattctgggatgccttaggaaggagagacaggaaagcctacgattgcatgcttcaagatcctggaagttttaacttcgcgccccgcctgttcatcctcagcagctcctctggggattttgcagccacagagtttgtgtaccctgcccgagccccctctgtggtcagttccatgcccttcctgcaggaagatctgtacagcgcgccccagccagcacttttccttgttgacaatcaccacgaggtgtacctctggcaaggctggtggcccatcgagaacaagatcactggttccgcccgcatccgctgggcctccgaccggaagagtgcgatggagactgtgctccagtactgcaaaggaaaaaatctcaagaaaccagcccccaagtcttaccttatccacgctggtctggagcccctgacattcaccaatatgtttcccagctgggagcacagagaggacatcgctgagatcacagagatggacacggaagtttccaatcagatcaccctcgtggaagacgtcttagccaagctctgtaaaaccatttacccgctggccgacctcctggccaggccactcccggagggggtcgatcctctgaagcttgagatctatctcaccgacgaagacttcgagtttgcactagacatgacgagggatgaatacaacgccctgcccgcctggaagcaggtgaacctgaagaaagcaaaaggcctgttctgagtggggagacgccagaggagcctcacggtcacgtccaacaacaccactgcaccagggaaatggatatatatttttggactggtgtttttcacaaagtatttttcaatcagagttttcagaacctgacattgttaaagatactgcttgtcccggagttgtgtattttgtaaatgttcaagggaactgtttggaaacttctttccaccattcaggaggttatcagaattaataaaagtatctgttatgtgcacttaagccgcagctgctatagatagcactgccttcttgttccagctaggcaatgcctttttttttttttttgaagcagttctctttataaagtgttattttgatagtttgtggattctaaaatatatatatatttatataaacaccatataagtcaaatatgtatttaacaaagcaatatgtattcattcactttcaagatttgttttggtgtcaaaataacatgaaaaggtagatggagttgcttctgttgaattagctctgccaccaatatgtatcttcatacacgtttggaaatgtttcctgcagcattaggtatgacttgttctgagtactgcttccggtgctaaaatgaacaaagaatttgtacttaatggcatggactctggagaatctatgcgaatcaacctttctaccttaatatctccccaaaaatgtatagtgccttgtttttatgtacagtttatatacagaaaagtttgctctgcatttttgatgatggtttggaacattatctacaattttactctcaaatagtcaaaataaaaacatctcaatttcta

SEQ ID NO: 362779 - DNA, 8355 bp, Homo sapiens
ttcactgctctgactgcgtcctccccaggctgaagtgtcctcaggtttcatgtggatttgcccagtaatggatggctccaccgaggccaggttggggaagttcagcctcgaggacactaggggacgaaaaacttcaaaaagaagactctttttattaatattttggcgttctttttggagaggaacttttgggatgtagcctttacctgtttcctgaatttgacatccaaaaagccttttggaaaacaccattctaaatttatcctgttctgaatcatcatcgcttctgatagatgcagttgcttgctgacatcgtgatctttgattttgtacaacgctatttgggctaacttttgggattttactttgtgcttagaatttgaaagtagtattcattggaaagagactccaagaaaatactcgaagacatcaaaagctggattcgagggtataacgtgttttgttttgttttttaaattagaaaaataaggaattgcagtgtgattttctttccccctttaacttagaggaacgaggattatacagaaatttgaaatttcaacaagaaaaacttaagcttccttggattcccacgtcaaaggaaagtttcaagctttcagaaggagttctcactcgaagataaagaacagctcgctaaccacgaaagaggaatcgatgctcagcttttagttgcacttcctaaagttgcagaattaagacaaatctttgaaccaaagaagaaagaattcttagaaatgaaaagaaaagaaagaattgccaggcgcctggaagggattgaaaatgacactcagcccatcctcttgcagagctgcacaggattggtgactcaccgcctgctggaggaagacacccctcgatacatgagagccagcgaccctgccagcccccacatcggccgatcaaatgaagaggaggaaacttctgattcttctctagaaaagcaaactcgatccaaatactgcacagaaacctccggtgtccacggtgactcaccctatggttcgggtaccatggacacccacagtctggagtccaaagccgaaagaattgcaaggtacaaagcagaaagaaggcgacagctggcagagaagtatgggctgactctggatcccgaggccgactccgagtatttatcccgctataccaagtccaggaaggagcctgatgctgtcgagaagcggggaggaaaaagtgacaaacaggaagagtcaagcagagatgcgagttctctgtaccccgggaccgagacgatggggctcaggacctgtgccggtgaatccaaggactatgccctccatgcgggtgacggctcttccgacccggaggtgctgctgaacatagaaaaccaaagacgaggtcaagagctgagtgccacccggcaggcccatgacctgtccccagcagccgagagttcctcgaccttctctttctctgggcgagactcctccttcactgaagtgccacggtcccccaagcacgcccacagctcctccctgcagcaggcagcctcccggagcccctcctttggtgacccacagctatcccctgaggcccgacccagtacagggaaacccaaacatgagtggtttctccagaaagattccgaaggggacacaccttcacttatcaactggccttccagagttaaagttagagaaaaattggtgaaagaggaaagtgctcgaaacagccctgaactcgcctcagagtccgtaactcagaggagacaccagccagcgccagtccattacgtgtcatttcagtctgagcactcagcctttgatagggtccccagcaaggcagcaggctctacacgacagccaatccgtggctatgtccaacccgcagataccggtcacaccgccaagctggtgacgccagaaaccccagaaaatgcatctgagtgtagctgggtagcatcagccacccagaatgtccccaaacctcccagcttgacggttctagaaggtgacggaagggatagcccagttctccatatctgcgagtcaaaagcagaagaagaagaaggggaaggagaaggagaagaaaaagaagaagatgtgtgcttcactgaagctctcgagcaaagcaagaaaaccctactggctttggagggtgatgggctagtgagaagcccagaagatccctctagaaatgaggactttggtaagcctgctgtgagcacagtcaccttagagcatcagaaggaactggaaaacgtggcacaaccccctcaagctccgcaccagcccactgagaggacaggcaggagcgagatggttctctacattcaaagtgagcctgtgtcccaagacgccaaaccaactggtcacaacagggaagcctcgaaaaagcgcaaggtccgtacccgctctctgtcagatttcacaggcccccctcagctccaggccttgaagtataaggacccagcttccaggagagagctggagctgcccagctccaagaccgaagggccttatggggagatcagcatgctggacacaaaggtctctgtcgcccagctccgaagtgcgttcctggcatctgccaacgcctgcaggagacctgaactcaaatcacgggtagagaggtcggctgaaggacctggcttgcccaccggtgtggaacgggagagagggtcccggaaaccaagacgctatttttctcctggtgaaagtagaaaaacttccgagagatttagaacccaacctataacttcagcagaacgaaaggaatcggataggtgcacttcacattcagaaacgccaactgtcgatgatgaagaaaaggtggatgaacgagccaagctgagcgtcgccgccaagaggttgcttttcagggagatggaaaaatcttttgatgaacaaaatgttccaaagcgacgctcaagaaacacagctgtggagcagaggctacgccgtctgcaggacaggtccctcacccagcccatcaccactgaagaggtggtcatcgcagccactgaacctatccccgcttcgtgttctgggggcacccaccctgtaatggcgagacttcctagccccactgtagctaggagcgctgtgcagcctgccagattgcaggcctctgctcaccaaaaggccttagccaaggaccagacaaatgagggcaaagagcttgctgagcaaggagaacctgattcctccactctaagcttggccgaaaagttggccttgtttaacaaattgtcccagccagtctcaaaagcgatttctacccggaacagaatagacacgagacagaggagaatgaacgctcgctatcaaactcagccagtcacactgggagaggtggagcaggtgcagagtggaaagctcattcctttctcacctgccgtgaacacatcagtgtctaccgtagcatccacggttgctccaatgtatgccggagatcttcgcacaaagccacctcttgaccacaatgcaagtgccactgactataagttttcttcttcaatagaaaattcggactctccagttagaagcattctgaaatcgcaagcttggcagcctttggtagagggtagcgagaacaagggaatgttgagagaatatggagagacagaaagcaagagagctttgacaggtcgagacagtgggatggagaagtatgggtcctttgaggaagcagaagcatcctaccccatcctgaaccgagccagggaaggagacagccataaggaatctaaatatgctgttcccagaagaggaagcctggaacgggcgaaccctcccatcacccacctcggggatgaaccgaaggaattttccatggctaaaatgaatgcacaaggaaacttggacttgagggacaggctgccctttgaagagaaggtggaggtggagaatgttatgaaaaggaagttttcactaagagcggcagagttcggggagcccacttccgagcagacggggacagctgctgggaaaactattgctcaaaccacagcccccgtgtcctggaagccccaggattcttcggaacagccacaggagaagctctgcaagaatccatgtgcgatgtttgctgctggagagatcaaaacgccgacaggggagggccttcttgactcacccagcaaaaccatgtctattaaagaaagattggcactgttgaagaaaagcggggaggaagattggagaaacagactcagcaggaggcaggagggcggcaaggcgccggccagcagcctgcacacccaggaagcagggcggtccctcatcaagaagcgggtcacagaaagtcgagagagccaaatgacgattgaggagaggaagcagctcatcactgtgagagaggaggcctggaagacgagaggcagaggagcggccaacgactcgacccagttcactgtggctggcaggatggtgaagaaaggtttggcgtcacctactgccataaccccagtagcctcagccatttgcggtaaaacaagaggcaccacacccgtttccaaacccctggaagatatcgaagccagaccagatatgcagttagaatcggacctgaagttggacaggctggaaacctttctaagaaggctgaataacaaagttggcgggatgcacgaaacggtgctcactgtcaccggcaaatctgtgaaggaggtgatgaagccagatgatgatgaaacctttgccaaattttaccgcagcgtggattataatatgccaagaagtcctgtggagatggatgaggacttcgatgtcattttcgatccttatgcacccaaattgacgtcttccgtggccgagcacaagcgggcagttaggcccaagcgccgggttcaggcctccaaaaaccccctgaaaatgctggcggcaagagaagatctccttcaggaatacactgagcagagattaaacgttgccttcatggagtcaaagcggatgaaagtagaaaagatgtcttccaactccaacttctcagaagtcaccctggcgggtttagccagtaaagaaaacttcagcaacgtcagcctgcggagcgtcaacctgacggaacagaactctaacaacagcgccgtgccctacaagaggctgatgctgttgcagattaaaggaagaagacatgtgcagaccaggctggtggaacctcgagcttcggcgctcaacagtggggactgcttcctcctgctctctccccactgctgcttcctgtgggtaggagagtttgcaaacgtcatagaaaaggcgaaggcctcagaacttgcaactttaattcagacaaagagggaacttggttgtagagctacttatatccaaaccattgaagaaggaattaatacacacactcatgcagccaaagacttctggaagcttctgggtggccaaaccagttaccaatctgctggagacccaaaagaagatgaactctatgaagcagccataatagaaactaactgcatttaccgtctcatggatgacaaacttgttcctgatgacgactactgggggaaaattccgaagtgctcccttctgcaacccaaagaggtactggtgtttgattttggtagtgaagtttacgtatggcatgggaaagaagtcacattagcacaacgaaaaatagcatttcagctggcaaagcacttatggaatggaacctttgactatgagaactgtgacatcaatcccctggatcctggagaatgcaatccgcttatccccagaaaaggacaggggcggcccgactgggcgatatttgggagacttactgaacacaatgagacgattttgttcaaagagaagtttctggattggacggaactgaagagatcgaatgagaagaaccccggggaacttgcccagcacaaggaagaccccaggactgatgtcaaggcatacgatgtgacacggatggtgtccatgccccagacgacagcaggcaccatcctggacggagtgaacgtcggccgtggctatggcctggtggaaggacacgacaggaggcagtttgagatcaccagcgtttccgtggatgtctggcacatcctggaattcgactatagcaggctccccaaacaaagcatcgggcagttccatgagggggatgcctatgtggtcaagtggaagttcatggtgagcacggcagtgggaagtcgccagaagggagagcactcggtgagggcagccggcaaagagaagtgcgtctacttcttctggcaaggccggcactccaccgtgagtgagaagggcacgtcggcgctgatgacggtggagctggacgaggaaaggggggcccaggtccaggttctccagggaaaggagcccccctgtttcctgcagtgtttccagggggggatggtggtgcactcggggaggcgggaagaggaagaagaaaatgtgcaaagtgagtggcggctgtactgcgtgcgtggagaggtgcccgtggaagggaatttgctggaagtggcctgtcactgtagcagcctgaggtccagaacttccatggtggtgcttaacgtcaacaaggccctcatctacctgtggcacggatgcaaagcccaggcccacacgaaggaggtcggaaggaccgctgcgaacaagatcaaggaacaatgtcccctggaagcaggactgcatagtagcagcaaagtcacaatacacgagtgtgatgaaggctccgagccactcggattctgggatgccttaggaaggagagacaggaaagcctacgattgcatgcttcaagatcctggaagttttaacttcgcgccccgcctgttcatcctcagcagctcctctggggattttgcagccacagagtttgtgtaccctgcccgagccccctctgtggtcagttccatgcccttcctgcaggaagatctgtacagcgcgccccagccagcacttttccttgttgacaatcaccacgaggtgtacctctggcaaggctggtggcccatcgagaacaagatcactggttccgcccgcatccgctgggcctccgaccggaagagtgcgatggagactgtgctccagtactgcaaaggaaaaaatctcaagaaaccagcccccaagtcttaccttatccacgctggtctggagcccctgacattcaccaatatgtttcccagctgggagcacagagaggacatcgctgagatcacagagatggacacggaagtttccaatcagatcaccctcgtggaagacgtcttagccaagctctgtaaaaccatttacccgctggccgacctcctggccaggccactcccggagggggtcgatcctctgaagcttgagatctatctcaccgacgaagacttcgagtttgcactagacatgacgagggatgaatacaacgccctgcccgcctggaagcaggtgaacctgaagaaagcaaaaggcctgttctgagtggggagacgccagaggagcctcacggtcacgtccaacaacaccactgcaccagggaaatggatatatatttttggactggtgtttttcacaaagtatttttcaatcagagttttcagaacctgacattgttaaagatactgcttgtcccggagttgtgtattttgtaaatgttcaagggaactgtttggaaacttctttccaccattcaggaggttatcagaattaataaaagtatctgttatgtgcacttaagccgcagctgctatagatagcactgccttcttgttccagctaggcaatgcctttttttttttttttgaagcagttctctttataaagtgttattttgatagtttgtggattctaaaatatatatatatttatataaacaccatataagtcaaatatgtatttaacaaagcaatatgtattcattcactttcaagatttgttttggtgtcaaaataacatgaaaaggtagatggagttgcttctgttgaattagctctgccaccaatatgtatcttcatacacgtttggaaatgtttcctgcagcattaggtatgacttgttctgagtactgcttccggtgctaaaatgaacaaagaatttgtacttaatggcatggactctggagaatctatgcgaatcaacctttctaccttaatatctccccaaaaatgtatagtgccttgtttttatgtacagtttatatacagaaaagtttgctctgcatttttgatgtacagtttatatacagaaaagtttgctctgcatttttgatgatggtttggaacattatctacaattttactctcaaatagtcaaaataaaaacatctcaatttctaataccggttgtaaacaaacagtacacatgtcattttgtgatataggactcccaaataaaagtatcagaataaacacaacaattaactggtaaaaaaaaagaa

SEQ ID NO: 362780 - DNA, 8061 bp, Homo sapiens
ttcactgctctgactgcgtcctccccaggctgaagtgtcctcaggtttcatgtggatttgcccagtaatggatggctccaccgaggccaggttggggaagttcagcctcgaggacactaggggacgaaaaacttcaaaaagaagactctttttattaatattttggcgttctttttggagaggaacttttgggatgtagcctttacctgtttcctgaatttgacatccaaaaagccttttggaaaacaccattctaaatttatcctgttctgaatcatcatcgcttctgatagatgcagttgcttgctgacatcgtgatctttgattttgtacaacgctatttgggctaacttttgggattttactttgtgcttagaatttgaaagtagtattcattggaaagagactccaagaaaatactcgaagacatcaaaagctggattcgagggtataacgtgttttgttttgttttttaaattagaaaaataaggaattgcagtgtgattttctttccccctttaacttagaggaacgaggattatacagaaatttgaaatttcaacaagaaaaacttaagcttccttggattcccacgtcaaaggaaagtttcaagctttcagaaggagttctcactcgaagataaagaacagctcgctaaccacgaaagaggaatcgatgctcagcttttagttgcacttcctaaagttgcagaattaagacaaatctttgaaccaaagaagaaagaattcttagaaatgaaaagaaaagaaagaattgccaggcgcctggaagggattgaaaatgacactcagcccatcctcttgcagagctgcacaggattggtgactcaccgcctgctggaggaagacacccctcgatacatgagagccagcgaccctgccagcccccacatcggccgatcaaatgaagaggaggaaacttctgattcttctctagaaaagcaaactcgatccaaatactgcacagaaacctccggtgtccacggtgactcaccctatggttcgggtaccatggacacccacagtctggagtccaaagccgaaagaattgcaaggtacaaagcagaaagaaggcgacagctggcagagaagtatgggctgactctggatcccgaggccgactccgagtatttatcccgctataccaagtccaggaaggagcctgatgctgtcgagaagcggggaggaaaaagtgacaaacaggaagagtcaagcagagatgcgagttctctgtaccccgggaccgagacgatggggctcaggacctgtgccggtgaatccaaggactatgccctccatgcgggtgacggctcttccgacccggaggtgctgctgaacatagaaaaccaaagacgaggtcaagagctgagtgccacccggcaggcccatgacctgtccccagcagccgagagttcctcgaccttctctttctctgggcgagactcctccttcactgaagtgccacggtcccccaagcacgcccacagctcctccctgcagcaggcagcctcccggagcccctcctttggtgacccacagctatcccctgaggcccgacccagtacagggaaacccaaacatgagtggtttctccagaaagattccgaaggggacacaccttcacttatcaactggccttccagagttaaagttagagaaaaattggtgaaagaggaaagtgctcgaaacagccctgaactcgcctcagagtccgtaactcagaggagacaccagccagcgccagtccattacgtgtcatttcagtctgagcactcagcctttgatagggtccccagcaaggcagcaggctctacacgacagccaatccgtggctatgtccaacccgcagataccggtcacaccgccaagctggtgacgccagaaaccccagaaaatgcatctgagtgtagctgggtagcatcagccacccagaatgtccccaaacctcccagcttgacggttctagaaggtgacggaagggatagcccagttctccatatctgcgagtcaaaagcagaagaagaagaaggggaaggagaaggagaagaaaaagaagaagatgtgtgcttcactgaagctctcgagcaaagcaagaaaaccctactggctttggagggtgatgggctagtgagaagcccagaagatccctctagaaatgaggactttggtaagcctgctgtgagcacagtcaccttagagcatcagaaggaactggaaaacgtggcacaaccccctcaagctccgcaccagcccactgagaggacaggcaggagcgagatggttctctacattcaaagtgagcctgtgtcccaagacgccaaaccaactggtcacaacagggaagcctcgaaaaagcgcaaggtccgtacccgctctctgtcagatttcacaggcccccctcagctccaggccttgaagtataaggacccagcttccaggagagagctggagctgcccagctccaagaccgaagggccttatggggagatcagcatgctggacacaaaggtctctgtcgcccagctccgaagtgcgttcctggcatctgccaacgcctgcaggagacctgaactcaaatcacgggtagagaggtcggctgaaggacctggcttgcccaccggtgtggaacgggagagagggtcccggaaaccaagacgctatttttctcctggtgaaagtagaaaaacttccgagagatttagaacccaacctataacttcagcagaacgaaaggaatcggataggtgcacttcacattcagaaacgccaactgtcgatgatgaagaaaaggtggatgaacgagccaagctgagcgtcgccgccaagaggttgcttttcagggagatggaaaaatcttttgatgaacaaaatgttccaaagcgacgctcaagaaacacagctgtggagcagaggctacgccgtctgcaggacaggtccctcacccagcccatcaccactgaagaggtggtcatcgcagccactgaacctatccccgcttcgtgttctgggggcacccaccctgtaatggcgagacttcctagccccactgtagctaggagcgctgtgcagcctgccagattgcaggcctctgctcaccaaaaggccttagccaaggaccagacaaatgagggcaaagagcttgctgagcaaggagaacctgattcctccactctaagcttggccgaaaagttggccttgtttaacaaattgtcccagccagtctcaaaagcgatttctacccggaacagaatagacacgagacagaggagaatgaacgctcgctatcaaactcagccagtcacactgggagaggtggagcaggtgcagagtggaaagctcattcctttctcacctgccgtgaacacatcagtgtctaccgtagcatccacggttgctccaatgtatgccggagatcttcgcacaaagccacctcttgaccacaatgcaagtgccactgactataagttttcttcttcaatagaaaattcggactctccagttagaagcattctgaaatcgcaagcttggcagcctttggtagagggtagcgagaacaagggaatgttgagagaatatggagagacagaaagcaagagagctttgacaggtcgagacagtgggatggagaagtatgggtcctttgaggaagcagaagcatcctaccccatcctgaaccgagccagggaaggagacagccataaggaatctaaatatgctgttcccagaagaggaagcctggaacgggcgaaccctcccatcacccacctcggggatgaaccgaaggaattttccatggctaaaatgaatgcacaaggaaacttggacttgagggacaggctgccctttgaagagaaggtggaggtggagaatgttatgaaaaggaagttttcactaagagcggcagagttcggggagcccacttccgagcagacggggacagctgctgggaaaactattgctcaaaccacagcccccgtgtcctggaagccccaggattcttcggaacagccacaggagaagctctgcaagaatccatgtgcgatgtttgctgctggagagatcaaaacgccgacaggggagggccttcttgactcacccagcaaaaccatgtctattaaagaaagattggcactgttgaagaaaagcggggaggaagattggagaaacagactcagcaggaggcaggagggcggcaaggcgccggccagcagcctgcacacccaggaagcagggcggtccctcatcaagaagcgggtcacagaaagtcgagagagccaaatgacgattgaggagaggaagcagctcatcactgtgagagaggaggcctggaagacgagaggcagaggagcggccaacgactcgacccagttcactgtggctggcaggatggtgaagaaaggtttggcgtcacctactgccataaccccagtagcctcagccatttgcggtaaaacaagaggcaccacacccgtttccaaacccctggaagatatcgaagccagaccagatatgcagttagaatcggacctgaagttggacaggctggaaacctttctaagaaggctgaataacaaagttggcgggatgcacgaaacggtgctcactgtcaccggcaaatctgtgaaggaggtgatgaagccagatgatgatgaaacctttgccaaattttaccgcagcgtggattataatatgccaagaagtcctgtggagatggatgaggacttcgatgtcattttcgatccttatgcacccaaattgacgtcttccgtggccgagcacaagcgggcagttaggcccaagcgccgggttcaggcctccaaaaaccccctgaaaatgctggcggcaagagaagatctccttcaggaatacactgagcagagattaaacgttgccttcatggagtcaaagcggatgaaagtagaaaagatgtcttccaactccaacttctcagaagtcaccctggcgggtttagccagtaaagaaaacttcagcaacgtcagcctgcggagcgtcaacctgacggaacagaactctaacaacagcgccgtgccctacaagaggctgatgctgttgcagattaaaggaagaagacatgtgcagaccaggctggtggaacctcgagcttcggcgctcaacagtggggactgcttcctcctgctctctccccactgctgcttcctgtgggtaggagagtttgcaaacgtcatagaaaaggcgaaggcctcagaacttgcaactttaattcagacaaagagggaacttggttgtagagctacttatatccaaaccattgaagaaggaattaatacacacactcatgcagccaaagacttctggaagcttctgggtggccaaaccagttaccaatctgctggagacccaaaagaagatgaactctatgaagcagccataatagaaactaactgcatttaccgtctcatggatgacaaacttgttcctgatgacgactactgggggaaaattccgaagtgctcccttctgcaacccaaagaggtactggtgtttgattttggtagtgaagtttacgtatggcatgggaaagaagtcacattagcacaacgaaaaatagcatttcagctggcaaagcacttatggaatggaacctttgactatgagaactgtgacatcaatcccctggatcctggagaatgcaatccgcttatccccagaaaaggacaggggcggcccgactgggcgatatttgggagacttactgaacacaatgagacgattttgttcaaagagaagtttctggattggacggaactgaagagatcgaatgagaagaaccccggggaacttgcccagcacaaggaagaccccaggactgatgtcaaggcatacgatgtgacacggatggtgtccatgccccagacgacagcaggcaccatcctggacggagtgaacgtcggccgtggctatggcctggtggaaggacacgacaggaggcagtttgagatcaccagcgtttccgtggatgtctggcacatcctggaattcgactatagcaggctccccaaacaaagcatcgggcagttccatgagggggatgcctatgtggtcaagtggaagttcatggtgagcacggcagtgggaagtcgccagaagggagagcactcggtgagggcagccggcaaagagaagtgcgtctacttcttctggcaaggccggcactccaccgtgagtgagaagggcacgtcggcgctgatgacggtggagctggacgaggaaaggggggcccaggtccaggttctccagggaaaggagcccccctgtttcctgcagtgtttccagggggggatggtggtgcactcggggaggcgggaagaggaagaagaaaatgtgcaaagtgagtggcggctgtactgcgtgcgtggagaggtgcccgtggaagggaatttgctggaagtggcctgtcactgtagcagcctgaggtccagaacttccatggtggtgcttaacgtcaacaaggccctcatctacctgtggcacggatgcaaagcccaggcccacacgaaggaggtcggaaggaccgctgcgaacaagatcaaggaacaatgtcccctggaagcaggactgcatagtagcagcaaagtcacaatacacgagtgtgatgaaggctccgagccactcggattctgggatgccttaggaaggagagacaggaaagcctacgattgcatgcttcaagatcctggaagttttaacttcgcgccccgcctgttcatcctcagcagctcctctggggattttgcagccacagagtttgtgtaccctgcccgagccccctctgtggtcagttccatgcccttcctgcaggaagatctgtacagcgcgccccagccagcacttttccttgttgacaatcaccacgaggtgtacctctggcaaggctggtggcccatcgagaacaagatcactggttccgcccgcatccgctgggcctccgaccggaagagtgcgatggagactgtgctccagtactgcaaaggaaaaaatctcaagaaaccagcccccaagtcttaccttatccacgctggtctggagcccctgacattcaccaatatgtttcccagctgggagcacagagaggacatcgctgagatcacagagatggacacggaagtttccaatcagatcaccctcgtggaagacgtcttagccaagctctgtaaaaccatttacccgctggccgacctcctggccaggccactcccggagggggtcgatcctctgaagcttgagatctatctcaccgacgaagacttcgagtttgcactagacatgacgagggatgaatacaacgccctgcccgcctggaagcaggtgaacctgaagaaagcaaaaggcctgttctgagtggggagacgccagaggagcctcacggtcacgtccaacaacaccactgcaccagggaaatggatatatatttttggactggtgtttttcacaaagtatttttcaatcagagttttcagaacctgacattgttaaagatactgcttgtcccggagttgtgtattttgtaaatgttcaagggaactgtttggaaacttctttccaccattcaggaggttatcagaattaataaaagtatctgttatgtgcacttaagccgcagctgctatagatagcactgccttcttgttccagctaggcaatgcctttttttttttttttgaagcagttctctttataaagtgttattttgatagtttgtggattctaaaatatatatatatttatataaacaccatataagtcaaatatgtatttaacaaagcaatatgtattcattcactttcaagatttgttttggtgtcaaaataacatgaaaaggtagatggagttgcttctgttgaattagctctgccaccaatatgtatcttcatacacgtttggaaatgtttcctgcagcattaggtatgacttgttctgagtactgcttccggtgctaaaatctattgttgctgcaagttctggatcaaaggtatcatctgtgaacctcaagagcaggctg

SEQ ID NO: 362781 - DNA, 8919 bp, Homo sapiens
ttcactgctctgactgcgtcctccccaggctgaagtgtcctcaggtttcatgtggatttgcccagtaatggatggctccaccgaggccaggttggggaagttcagcctcgaggacactaggggacgaaaaacttcaaaaagaagactctttttattaatattttggcgttctttttggagaggaacttttgggatgtagcctttacctgtttcctgaatttgacatccaaaaagccttttggaaaacaccattctaaatttatcctgttctgaatcatcatcgcttctgatagatgcagttgcttgctgacatcgtgatctttgattttgtacaacgctatttgggctaacttttgggattttactttgtgcttagaatttgaaagtagtattcattggaaagagactccaagaaaatactcgaagacatcaaaagctggattcgagggtataacgtgttttgttttgttttttaaattagaaaaataaggaattgcagtgtgattttctttccccctttaacttagaggaacgaggattatacagaaatttgaaatttcaacaagaaaaacttaagcttccttggattcccacgtcaaaggaaagtttcaagctttcagaaggagttctcactcgaagataaagaacagctcgctaaccacgaaagaggaatcgatgctcagcttttagttgcacttcctaaagttgcagaattaagacaaatctttgaaccaaagaagaaagaattcttagaaatgaaaagaaaagaaagaattgccaggcgcctggaagggattgaaaatgacactcagcccatcctcttgcagagctgcacaggattggtgactcaccgcctgctggaggaagacacccctcgatacatgagagccagcgaccctgccagcccccacatcggccgatcaaatgaagaggaggaaacttctgattcttctctagaaaagcaaactcgatccaaatactgcacagaaacctccggtgtccacggtgactcaccctatggttcgggtaccatggacacccacagtctggagtccaaagccgaaagaattgcaaggtacaaagcagaaagaaggcgacagctggcagagaagtatgggctgactctggatcccgaggccgactccgagtatttatcccgctataccaagtccaggaaggagcctgatgctgtcgagaagcggggaggaaaaagtgacaaacaggaagagtcaagcagagatgcgagttctctgtaccccgggaccgagacgatggggctcaggacctgtgccggtgaatccaaggactatgccctccatgcgggtgacggctcttccgacccggaggtgctgctgaacatagaaaaccaaagacgaggtcaagagctgagtgccacccggcaggcccatgacctgtccccagcagccgagagttcctcgaccttctctttctctgggcgagactcctccttcactgaagtgccacggtcccccaagcacgcccacagctcctccctgcagcaggcagcctcccggagcccctcctttggtgacccacagctatcccctgaggcccgacccagtacagggaaacccaaacatgagtggtttctccagaaagattccgaaggggacacaccttcacttatcaactggccttccagagttaaagttagagaaaaattggtgaaagaggaaagtgctcgaaacagccctgaactcgcctcagagtccgtaactcagaggagacaccagccagcgccagtccattacgtgtcatttcagtctgagcactcagcctttgatagggtccccagcaaggcagcaggctctacacgacagccaatccgtggctatgtccaacccgcagataccggtcacaccgccaagctggtgacgccagaaaccccagaaaatgcatctgagtgtagctgggtagcatcagccacccagaatgtccccaaacctcccagcttgacggttctagaaggtgacggaagggatagcccagttctccatatctgcgagtcaaaagcagaagaagaagaaggggaaggagaaggagaagaaaaagaagaagatgtgtgcttcactgaagctctcgagcaaagcaagaaaaccctactggctttggagggtgatgggctagtgagaagcccagaagatccctctagaaatgaggactttggtaagcctgctgtgagcacagtcaccttagagcatcagaaggaactggaaaacgtggcacaaccccctcaagctccgcaccagcccactgagaggacaggcaggagcgagatggttctctacattcaaagtgagcctgtgtcccaagacgccaaaccaactggtcacaacagggaagcctcgaaaaagcgcaaggtccgtacccgctctctgtcagatttcacaggcccccctcagctccaggccttgaagtataaggacccagcttccaggagagagctggagctgcccagctccaagaccgaagggccttatggggagatcagcatgctggacacaaaggtctctgtcgcccagctccgaagtgcgttcctggcatctgccaacgcctgcaggagacctgaactcaaatcacgggtagagaggtcggctgaaggacctggcttgcccaccggtgtggaacgggagagagggtcccggaaaccaagacgctatttttctcctggtgaaagtagaaaaacttccgagagatttagaacccaacctataacttcagcagaacgaaaggaatcggataggtgcacttcacattcagaaacgccaactgtcgatgatgaagaaaaggtggatgaacgagccaagctgagcgtcgccgccaagaggttgcttttcagggagatggaaaaatcttttgatgaacaaaatgttccaaagcgacgctcaagaaacacagctgtggagcagaggctacgccgtctgcaggacaggtccctcacccagcccatcaccactgaagaggtggtcatcgcagccactgaacctatccccgcttcgtgttctgggggcacccaccctgtaatggcgagacttcctagccccactgtagctaggagcgctgtgcagcctgccagattgcaggcctctgctcaccaaaaggccttagccaaggaccagacaaatgagggcaaagagcttgctgagcaaggagaacctgattcctccactctaagcttggccgaaaagttggccttgtttaacaaattgtcccagccagtctcaaaagcgatttctacccggaacagaatagacacgagacagaggagaatgaacgctcgctatcaaactcagccagtcacactgggagaggtggagcaggtgcagagtggaaagctcattcctttctcacctgccgtgaacacatcagtgtctaccgtagcatccacggttgctccaatgtatgccggagatcttcgcacaaagccacctcttgaccacaatgcaagtgccactgactataagttttcttcttcaatagaaaattcggactctccagttagaagcattctgaaatcgcaagcttggcagcctttggtagagggtagcgagaacaagggaatgttgagagaatatggagagacagaaagcaagagagctttgacaggtcgagacagtgggatggagaagtatgggtcctttgaggaagcagaagcatcctaccccatcctgaaccgagccagggaaggagacagccataaggaatctaaatatgctgttcccagaagaggaagcctggaacgggcgaaccctcccatcacccacctcggggatgaaccgaaggaattttccatggctaaaatgaatgcacaaggaaacttggacttgagggacaggctgccctttgaagagaaggtggaggtggagaatgttatgaaaaggaagttttcactaagagcggcagagttcggggagcccacttccgagcagacggggacagctgctgggaaaactattgctcaaaccacagcccccgtgtcctggaagccccaggattcttcggaacagccacaggagaagctctgcaagaatccatgtgcgatgtttgctgctggagagatcaaaacgccgacaggggagggccttcttgactcacccagcaaaaccatgtctattaaagaaagattggcactgttgaagaaaagcggggaggaagattggagaaacagactcagcaggaggcaggagggcggcaaggcgccggccagcagcctgcacacccaggaagcagggcggtccctcatcaagaagcgggtcacagaaagtcgagagagccaaatgacgattgaggagaggaagcagctcatcactgtgagagaggaggcctggaagacgagaggcagaggagcggccaacgactcgacccagttcactgtggctggcaggatggtgaagaaaggtttggcgtcacctactgccataaccccagtagcctcagccatttgcggtaaaacaagaggcaccacacccgtttccaaacccctggaagatatcgaagccagaccagatatgcagttagaatcggacctgaagttggacaggctggaaacctttctaagaaggctgaataacaaagttggcgggatgcacgaaacggtgctcactgtcaccggcaaatctgtgaaggaggtgatgaagccagatgatgatgaaacctttgccaaattttaccgcagcgtggattataatatgccaagaagtcctgtggagatggatgaggacttcgatgtcattttcgatccttatgcacccaaattgacgtcttccgtggccgagcacaagcgggcagttaggcccaagcgccgggttcaggcctccaaaaaccccctgaaaatgctggcggcaagagaagatctccttcaggaatacactgagcagagattaaacgttgccttcatggagtcaaagcggatgaaagtagaaaagatgtcttccaactccaacttctcagaagtcaccctggcgggtttagccagtaaagaaaacttcagcaacgtcagcctgcggagcgtcaacctgacggaacagaactctaacaacagcgccgtgccctacaagaggctgatgctgttgcagattaaaggaagaagacatgtgcagaccaggctggtggaacctcgagcttcggcgctcaacagtggggactgcttcctcctgctctctccccactgctgcttcctgtgggtaggagagtttgcaaacgtcatagaaaaggcgaaggttggtacctgaaaaataaaaatgctttagctaacatctcctttacgcaccggaggagtgttcttcctgacgtcagtcacaaagcttctcaaaagccaggtgttgcattcaagtgagaagggataggtaggatttcttttcctgaatgtctctcaaacaagctttcattacatgtttaaatgggatactttaggactatgacctacaccccagtgtttaggtcctgggttccttcctactcctgtgtaaaaaaggaagcggccccactttaaagtcctttatcccaggtagctctgaagttctgccatagacctgttgaatgagactgtcatggggtaaagcccaaagaatagtgttttttaaaagcatcacatgtgacctattgaagatggagaactattgctctaaagaattgatactccctggtctttcagttacattttcttgaggtcattgaaaatacccagtaaccagcatccacccacacccgtggtcacaaggctttccttgcaggcacactgtttctcctctctggttttgacatgtgccactctgtctagccaagggcttttctacccaggcaattgtgttcctctcttttttaggcctcagaacttgcaactttaattcagacaaagagggaacttggttgtagagctacttatatccaaaccattgaagaaggaattaatacacacactcatgcagccaaagacttctggaagcttctgggtggccaaaccagttaccaatctgctggagacccaaaagaagatgaactctatgaagcagccataatagaaactaactgcatttaccgtctcatggatgacaaacttgttcctgatgacgactactgggggaaaattccgaagtgctcccttctgcaacccaaagaggtactggtgtttgattttggtagtgaagtttacgtatggcatgggaaagaagtcacattagcacaacgaaaaatagcatttcagctggcaaagcacttatggaatggaacctttgactatgagaactgtgacatcaatcccctggatcctggagaatgcaatccgcttatccccagaaaaggacaggggcggcccgactgggcgatatttgggagacttactgaacacaatgagacgattttgttcaaagagaagtttctggattggacggaactgaagagatcgaatgagaagaaccccggggaacttgcccagcacaaggaagaccccaggactgatgtcaaggcatacgatgtgacacggatggtgtccatgccccagacgacagcaggcaccatcctggacggagtgaacgtcggccgtggctatggcctggtggaaggacacgacaggaggcagtttgagatcaccagcgtttccgtggatgtctggcacatcctggaattcgactatagcaggctccccaaacaaagcatcgggcagttccatgagggggatgcctatgtggtcaagtggaagttcatggtgagcacggcagtgggaagtcgccagaagggagagcactcggtgagggcagccggcaaagagaagtgcgtctacttcttctggcaaggccggcactccaccgtgagtgagaagggcacgtcggcgctgatgacggtggagctggacgaggaaaggggggcccaggtccaggttctccagggaaaggagcccccctgtttcctgcagtgtttccagggggggatggtggtgcactcggggaggcgggaagaggaagaagaaaatgtgcaaagtgagtggcggctgtactgcgtgcgtggagaggtgcccgtggaagggaatttgctggaagtggcctgtcactgtagcagcctgaggtccagaacttccatggtggtgcttaacgtcaacaaggccctcatctacctgtggcacggatgcaaagcccaggcccacacgaaggaggtcggaaggaccgctgcgaacaagatcaaggaacaatgtcccctggaagcaggactgcatagtagcagcaaagtcacaatacacgagtgtgatgaaggctccgagccactcggattctgggatgccttaggaaggagagacaggaaagcctacgattgcatgcttcaagatcctggaagttttaacttcgcgccccgcctgttcatcctcagcagctcctctggggattttgcagccacagagtttgtgtaccctgcccgagccccctctgtggtcagttccatgcccttcctgcaggaagatctgtacagcgcgccccagccagcacttttccttgttgacaatcaccacgaggtgtacctctggcaaggctggtggcccatcgagaacaagatcactggttccgcccgcatccgctgggcctccgaccggaagagtgcgatggagactgtgctccagtactgcaaaggaaaaaatctcaagaaaccagcccccaagtcttaccttatccacgctggtctggagcccctgacattcaccaatatgtttcccagctgggagcacagagaggacatcgctgagatcacagagatggacacggaagtttccaatcagatcaccctcgtggaagacgtcttagccaagctctgtaaaaccatttacccgctggccgacctcctggccaggccactcccggagggggtcgatcctctgaagcttgagatctatctcaccgacgaagacttcgagtttgcactagacatgacgagggatgaatacaacgccctgcccgcctggaagcaggtgaacctgaagaaagcaaaaggcctgttctgagtggggagacgccagaggagcctcacggtcacgtccaacaacaccactgcaccagggaaatggatatatatttttggactggtgtttttcacaaagtatttttcaatcagagttttcagaacctgacattgttaaagatactgcttgtcccggagttgtgtattttgtaaatgttcaagggaactgtttggaaacttctttccaccattcaggaggttatcagaattaataaaagtatctgttatgtgcacttaagccgcagctgctatagatagcactgccttcttgttccagctaggcaatgcctttttttttttttttgaagcagttctctttataaagtgttattttgatagtttgtggattctaaaatatatatatatttatataaacaccatataagtcaaatatgtatttaacaaagcaatatgtattcattcactttcaagatttgttttggtgtcaaaataacatgaaaaggtagatggagttgcttctgttgaattagctctgccaccaatatgtatcttcatacacgtttggaaatgtttcctgcagcattaggtatgacttgttctgagtactgcttccggtgctaaaatgaacaaagaatttgtacttaatggcatggactctggagaatctatgcgaatcaacctttctaccttaatatctccccaaaaatgtatagtgccttgtttttatgtacagtttatatacagaaaagtttgctctgcatttttgatgatggtttggaacattatctacaattttactctcaaatagtcaaaataaaaacatctcaatttctaataccggttgtaaacaaacagtacacatgtcattttgtgatataggactcccaaataaaagtatcagaataaacacaacaattaactggtaaaaaaaaagaa

SEQ ID NO: 362782 - DNA, 8269 bp, Homo sapiens
ttcactgctctgactgcgtcctccccaggctgaagtgtcctcaggtttcatgtggatttgcccagtaatggatggctccaccgaggccaggttggggaagttcagcctcgaggacactaggggacgaaaaacttcaaaaagaagactctttttattaatattttggcgttctttttggagaggaacttttgggatgtagcctttacctgtttcctgaatttgacatccaaaaagccttttggaaaacaccattctaaatttatcctgttctgaatcatcatcgcttctgatagatgcagttgcttgctgacatcgtgatctttgattttgtacaacgctatttgggctaacttttgggattttactttgtgcttagaatttgaaagtagtattcattggaaagagactccaagaaaatactcgaagacatcaaaagctggattcgagggtataacgtgttttgttttgttttttaaattagaaaaataaggaattgcagtgtgattttctttccccctttaacttagaggaacgaggattatacagaaatttgaaatttcaacaagaaaaacttaagcttccttggattcccacgtcaaaggaaagtttcaagctttcagaaggagttctcactcgaagataaagaacagctcgctaaccacgaaagaggaatcgatgctcagcttttagttgcacttcctaaagttgcagaattaagacaaatctttgaaccaaagaagaaagaattcttagaaatgaaaagaaaagaaagaattgccaggcgcctggaagggattgaaaatgacactcagcccatcctcttgcagagctgcacaggattggtgactcaccgcctgctggaggaagacacccctcgatacatgagagccagcgaccctgccagcccccacatcggccgatcaaatgaagaggaggaaacttctgattcttctctagaaaagcaaactcgatccaaatactgcacagaaacctccggtgtccacggtgactcaccctatggttcgggtaccatggacacccacagtctggagtccaaagccgaaagaattgcaaggtacaaagcagaaagaaggcgacagctggcagagaagtatgggctgactctggatcccgaggccgactccgagtatttatcccgctataccaagtccaggaaggagcctgatgctgtcgagaagcggggaggaaaaagtgacaaacaggaagagtcaagcagagatgcgagttctctgtaccccgggaccgagacgatggggctcaggacctgtgccggtgaatccaaggactatgccctccatgcgggtgacggctcttccgacccggaggtgctgctgaacatagaaaaccaaagacgaggtcaagagctgagtgccacccggcaggcccatgacctgtccccagcagccgagagttcctcgaccttctctttctctgggcgagactcctccttcactgaagtgccacggtcccccaagcacgcccacagctcctccctgcagcaggcagcctcccggagcccctcctttggtgacccacagctatcccctgaggcccgacccagtacagggaaacccaaacatgagtggtttctccagaaagattccgaaggggacacaccttcacttatcaactggccttccagagttaaagttagagaaaaattggtgaaagaggaaagtgctcgaaacagccctgaactcgcctcagagtccgtaactcagaggagacaccagccagcgccagtccattacgtgtcatttcagtctgagcactcagcctttgatagggtccccagcaaggcagcaggctctacacgacagccaatccgtggctatgtccaacccgcagataccggtcacaccgccaagctggtgacgccagaaaccccagaaaatgcatctgagtgtagctgggtagcatcagccacccagaatgtccccaaacctcccagcttgacggttctagaaggtgacggaagggatagcccagttctccatatctgcgagtcaaaagcagaagaagaagaaggggaaggagaaggagaagaaaaagaagaagatgtgtgcttcactgaagctctcgagcaaagcaagaaaaccctactggctttggagggtgatgggctagtgagaagcccagaagatccctctagaaatgaggactttggtaagcctgctgtgagcacagtcaccttagagcatcagaaggaactggaaaacgtggcacaaccccctcaagctccgcaccagcccactgagaggacaggcaggagcgagatggttctctacattcaaagtgagcctgtgtcccaagacgccaaaccaactggtcacaacagggaagcctcgaaaaagcgcaaggtccgtacccgctctctgtcagatttcacaggcccccctcagctccaggccttgaagtataaggacccagcttccaggagagagctggagctgcccagctccaagaccgaagggccttatggggagatcagcatgctggacacaaaggtctctgtcgcccagctccgaagtgcgttcctggcatctgccaacgcctgcaggagacctgaactcaaatcacgggtagagaggtcggctgaaggacctggcttgcccaccggtgtggaacgggagagagggtcccggaaaccaagacgctatttttctcctggtgaaagtagaaaaacttccgagagatttagaacccaacctataacttcagcagaacgaaaggaatcggataggtgcacttcacattcagaaacgccaactgtcgatgatgaagaaaaggtggatgaacgagccaagctgagcgtcgccgccaagaggttgcttttcagggagatggaaaaatcttttgatgaacaaaatgttccaaagcgacgctcaagaaacacagctgtggagcagaggctacgccgtctgcaggacaggtccctcacccagcccatcaccactgaagaggtggtcatcgcagccactgaacctatccccgcttcgtgttctgggggcacccaccctgtaatggcgagacttcctagccccactgtagctaggagcgctgtgcagcctgccagattgcaggcctctgctcaccaaaaggccttagccaaggaccagacaaatgagggcaaagagcttgctgagcaaggagaacctgattcctccactctaagcttggccgaaaagttggccttgtttaacaaattgtcccagccagtctcaaaagcgatttctacccggaacagaatagacacgagacagaggagaatgaacgctcgctatcaaactcagccagtcacactgggagaggtggagcaggtgcagagtggaaagctcattcctttctcacctgccgtgaacacatcagtgtctaccgtagcatccacggttgctccaatgtatgccggagatcttcgcacaaagccacctcttgaccacaatgcaagtgccactgactataagttttcttcttcaatagaaaattcggactctccagttagaagcattctgaaatcgcaagcttggcagcctttggtagagggtagcgagaacaagggaatgttgagagaatatggagagacagaaagcaagagagctttgacaggtcgagacagtgggatggagaagtatgggtcctttgaggaagcagaagcatcctaccccatcctgaaccgagccagggaaggagacagccataaggaatctaaatatgctgttcccagaagaggaagcctggaacgggcgaaccctcccatcacccacctcggggatgaaccgaaggaattttccatggctaaaatgaatgcacaaggaaacttggacttgagggacaggctgccctttgaagagaaggtggaggtggagaatgttatgaaaaggaagttttcactaagagcggcagagttcggggagcccacttccgagcagacggggacagctgctgggaaaactattgctcaaaccacagcccccgtgtcctggaagccccaggattcttcggaacagccacaggagaagctctgcaagaatccatgtgcgatgtttgctgctggagagatcaaaacgccgacaggggagggccttcttgactcacccagcaaaaccatgtctattaaagaaagattggcactgttgaagaaaagcggggaggaagattggagaaacagactcagcaggaggcaggagggcggcaaggcgccggccagcagcctgcacacccaggaagcagggcggtccctcatcaagaagcgggtcacagaaagtcgagagagccaaatgacgattgaggagaggaagcagctcatcactgtgagagaggaggcctggaagacgagaggcagaggagcggccaacgactcgacccagttcactgtggctggcaggatggtgaagaaaggtttggcgtcacctactgccataaccccagtagcctcagccatttgcggtaaaacaagaggcaccacacccgtttccaaacccctggaagatatcgaagccagaccagatatgcagttagaatcggacctgaagttggacaggctggaaacctttctaagaaggctgaataacaaagttggcgggatgcacgaaacggtgctcactgtcaccggcaaatctgtgaaggaggtgatgaagccagatgatgatgaaacctttgccaaattttaccgcagcgtggattataatatgccaagaagtcctgtggagatggatgaggacttcgatgtcattttcgatccttatgcacccaaattgacgtcttccgtggccgagcacaagcgggcagttaggcccaagcgccgggttcaggcctccaaaaaccccctgaaaatgctggcggcaagagaagatctccttcaggaatacactgagcagagattaaacgttgccttcatggagtcaaagcggatgaaagtagaaaagatgtcttccaactccaacttctcagaagtcaccctggcgggtttagccagtaaagaaaacttcagcaacgtcagcctgcggagcgtcaacctgacggaacagaactctaacaacagcgccgtgccctacaagaggctgatgctgttgcagattaaaggaagaagacatgtgcagaccaggctggtggaacctcgagcttcggcgctcaacagtggggactgcttcctcctgctctctccccactgctgcttcctgtgggtaggagagtttgcaaacgtcatagaaaaggcgaaggcctcagaacttgcaactttaattcagacaaagagggaacttggttgtagagctacttatatccaaaccattgaagaaggaattaatacacacactcatgcagccaaagacttctggaagcttctgggtggccaaaccagttaccaatctgctggagacccaaaagaagatgaactctatgaagcagccataatagaaactaactgcatttaccgtctcatggatgacaaacttgttcctgatgacgactactgggggaaaattccgaagtgctcccttctgcaacccaaagaggtactggtgtttgattttggtagtgaagtttacgtatggcatgggaaagaagtcacattagcacaacgaaaaatagcatttcagctggcaaagcacttatggaatggaacctttgactatgagaactgtgacatcaatcccctggatcctggagaatgcaatccgcttatccccagaaaaggacaggggcggcccgactgggcgatatttgggagacttactgaacacaatgagacgattttgttcaaagagaagtttctggattggacggaactgaagagatcgaatgagaagaaccccggggaacttgcccagcacaaggaagaccccaggactgatgtcaaggcatacgatgtgacacggatggtgtccatgccccagacgacagcaggcaccatcctggacggagtgaacgtcggccgtggctatggcctggtggaaggacacgacaggaggcagtttgagatcaccagcgtttccgtggatgtctggcacatcctggaattcgactatagcaggctccccaaacaaagcatcgggcagttccatgagggggatgcctatgtggtcaagtggaagttcatggtgagcacggcagtgggaagtcgccagaagggagagcactcggtgagggcagccggcaaagagaagtgcgtctacttcttctggcaaggccggcactccaccgtgagtgagaagggcacgtcggcgctgatgacggtggagctggacgaggaaaggggggcccaggtccaggttctccagggaaaggagcccccctgtttcctgcagtgtttccagggggggatggtggtgcactcggggaggcgggaagaggaagaagaaaatgtgcaaaggaatttgctggaagtggcctgtcactgtagcagcctgaggtccagaacttccatggtggtgcttaacgtcaacaaggccctcatctacctgtggcacggatgcaaagcccaggcccacacgaaggaggtcggaaggaccgctgcgaacaagatcaaggaacaatgtcccctggaagcaggactgcatagtagcagcaaagtcacaatacacgagtgtgatgaaggctccgagccactcggattctgggatgccttaggaaggagagacaggaaagcctacgattgcatgcttcaagatcctggaagttttaacttcgcgccccgcctgttcatcctcagcagctcctctggggattttgcagccacagagtttgtgtaccctgcccgagccccctctgtggtcagttccatgcccttcctgcaggaagatctgtacagcgcgccccagccagcacttttccttgttgacaatcaccacgaggtgtacctctggcaaggctggtggcccatcgagaacaagatcactggttccgcccgcatccgctgggcctccgaccggaagagtgcgatggagactgtgctccagtactgcaaaggaaaaaatctcaagaaaccagcccccaagtcttaccttatccacgctggtctggagcccctgacattcaccaatatgtttcccagctgggagcacagagaggacatcgctgagatcacagagatggacacggaagtttccaatcagatcaccctcgtggaagacgtcttagccaagctctgtaaaaccatttacccgctggccgacctcctggccaggccactcccggagggggtcgatcctctgaagcttgagatctatctcaccgacgaagacttcgagtttgcactagacatgacgagggatgaatacaacgccctgcccgcctggaagcaggtgaacctgaagaaagcaaaaggcctgttctgagtggggagacgccagaggagcctcacggtcacgtccaacaacaccactgcaccagggaaatggatatatatttttggactggtgtttttcacaaagtatttttcaatcagagttttcagaacctgacattgttaaagatactgcttgtcccggagttgtgtattttgtaaatgttcaagggaactgtttggaaacttctttccaccattcaggaggttatcagaattaataaaagtatctgttatgtgcacttaagccgcagctgctatagatagcactgccttcttgttccagctaggcaatgcctttttttttttttttgaagcagttctctttataaagtgttattttgatagtttgtggattctaaaatatatatatatttatataaacaccatataagtcaaatatgtatttaacaaagcaatatgtattcattcactttcaagatttgttttggtgtcaaaataacatgaaaaggtagatggagttgcttctgttgaattagctctgccaccaatatgtatcttcatacacgtttggaaatgtttcctgcagcattaggtatgacttgttctgagtactgcttccggtgctaaaatgaacaaagaatttgtacttaatggcatggactctggagaatctatgcgaatcaacctttctaccttaatatctccccaaaaatgtatagtgccttgtttttatgtacagtttatatacagaaaagtttgctctgcatttttgatgatggtttggaacattatctacaattttactctcaaatagtcaaaataaaaacatctcaatttctaataccggttgtaaacaaacagtacacatgtcattttgtgatataggactcccaaataaaagtatcagaataaacacaacaattaactggtaaaaaaaaagaa

SEQ ID NO: 362783 - DNA, 4210 bp, Homo sapiens
aggctctagctgtgttgatagcattggaagagtctgcctactcagtcagcattgtgcctggtagtggcacgactttgggactgggggtaagcaaatttgagcagaggtccaatcttccggccagcagcctgcacacccaggaagcagggcggtccctcatcaagaagcgggtcacagaaagtcgagagagccaaatgacgattgaggagaggaagcagctcatcactgtgagagaggaggcctggaagacgagaggcagaggagcggccaacgactcgacccagttcactgtggctggcaggatggtgaagaaaggtttggcgtcacctactgccataaccccagtagcctcagccatttgcggtaaaacaagaggcaccacacccgtttccaaacccctggaagatatcgaagccagaccagatatgcagttagaatcggacctgaagttggacaggctggaaacctttctaagaaggctgaataacaaagttggcgggatgcacgaaacggtgctcactgtcaccggcaaatctgtgaaggaggtgatgaagccagatgatgatgaaacctttgccaaattttaccgcagcgtggattataatatgccaagaagtcctgtggagatggatgaggacttcgatgtcattttcgatccttatgcacccaaattgacgtcttccgtggccgagcacaagcgggcagttaggcccaagcgccgggttcaggcctccaaaaaccccctgaaaatgctggcggcaagagaagatctccttcaggaatacactgagcagagattaaacgttgccttcatggagtcaaagcggatgaaagtagaaaagatgtcttccaactccaacttctcagaagtcaccctggcgggtttagccagtaaagaaaacttcagcaacgtcagcctgcggagcgtcaacctgacggaacagaactctaacaacagcgccgtgccctacaagaggctgatgctgttgcagattaaaggaagaagacatgtgcagaccaggctggtggaacctcgagcttcggcgctcaacagtggggactgcttcctcctgctctctccccactgctgcttcctgtgggtaggagagtttgcaaacgtcatagaaaaggcgaaggcctcagaacttgcaactttaattcagacaaagagggaacttggttgtagagctacttatatccaaaccattgaagaaggaattaatacacacactcatgcagccaaagacttctggaagcttctgggtggccaaaccagttaccaatctgctggagacccaaaagaagatgaactctatgaagcagccataatagaaactaactgcatttaccgtctcatggatgacaaacttgttcctgatgacgactactgggggaaaattccgaagtgctcccttctgcaacccaaagaggtactggtgtttgattttggtagtgaagtttacgtatggcatgggaaagaagtcacattagcacaacgaaaaatagcatttcagctggcaaagcacttatggaatggaacctttgactatgagaactgtgacatcaatcccctggatcctggagaatgcaatccgcttatccccagaaaaggacaggggcggcccgactgggcgatatttgggagacttactgaacacaatgagacgattttgttcaaagagaagtttctggattggacggaactgaagagatcgaatgagaagaaccccggggaacttgcccagcacaaggaagaccccaggactgatgtcaaggcatacgatgtgacacggatggtgtccatgccccagacgacagcaggcaccatcctggacggagtgaacgtcggccgtggctatggcctggtggaaggacacgacaggaggcagtttgagatcaccagcgtttccgtggatgtctggcacatcctggaattcgactatagcaggctccccaaacaaagcatcgggcagttccatgagggggatgcctatgtggtcaagtggaagttcatggtgagcacggcagtgggaagtcgccagaagggagagcactcggtgagggcagccggcaaagagaagtgcgtctacttcttctggcaaggccggcactccaccgtgagtgagaagggcacgtcggcgctgatgacggtggagctggacgaggaaaggggggcccaggtccaggttctccagggaaaggagcccccctgtttcctgcagtgtttccagggggggatggtggtgcactcggggaggcgggaagaggaagaagaaaatgtgcaaagtgagtggcggctgtactgcgtgcgtggagaggtgcccgtggaagggaatttgctggaagtggcctgtcactgtagcagcctgaggtccagaacttccatggtggtgcttaacgtcaacaaggccctcatctacctgtggcacggatgcaaagcccaggcccacacgaaggaggtcggaaggaccgctgcgaacaagatcaaggaacaatgtcccctggaagcaggactgcatagtagcagcaaagtcacaatacacgagtgtgatgaaggctccgagccactcggattctgggatgccttaggaaggagagacaggaaagcctacgattgcatgcttcaagatcctggaagttttaacttcgcgccccgcctgttcatcctcagcagctcctctggggattttgcagccacagagtttgtgtaccctgcccgagccccctctgtggtcagttccatgcccttcctgcaggaagatctgtacagcgcgccccagccagcacttttccttgttgacaatcaccacgaggtgtacctctggcaaggctggtggcccatcgagaacaagatcactggttccgcccgcatccgctgggcctccgaccggaagagtgcgatggagactgtgctccagtactgcaaaggaaaaaatctcaagaaaccagcccccaagtcttaccttatccacgctggtctggagcccctgacattcaccaatatgtttcccagctgggagcacagagaggacatcgctgagatcacagagatggacacggaagtttccaatcagatcaccctcgtggaagacgtcttagccaagctctgtaaaaccatttacccgctggccgacctcctggccaggccactcccggagggggtcgatcctctgaagcttgagatctatctcaccgacgaagacttcgagtttgcactagacatgacgagggatgaatacaacgccctgcccgcctggaagcaggtgaacctgaagaaagcaaaaggcctgttctgagtggggagacgccagaggagcctcacggtcacgtccaacaacaccactgcaccagggaaatggatatatatttttggactggtgtttttcacaaagtatttttcaatcagagttttcagaacctgacattgttaaagatactgcttgtcccggagttgtgtattttgtaaatgttcaagggaactgtttggaaacttctttccaccattcaggaggttatcagaattaataaaagtatctgttatgtgcacttaagccgcagctgctatagatagcactgccttcttgttccagctaggcaatgcctttttttttttttttgaagcagttctctttataaagtgttattttgatagtttgtggattctaaaatatatatatatttatataaacaccatataagtcaaatatgtatttaacaaagcaatatgtattcattcactttcaagatttgttttggtgtcaaaataacatgaaaaggtagatggagttgcttctgttgaattagctctgccaccaatatgtatcttcatacacgtttggaaatgtttcctgcagcattaggtatgacttgttctgagtactgcttccggtgctaaaatgaacaaagaatttgtacttaatggcatggactctggagaatctatgcgaatcaacctttctaccttaatatctccccaaaaatgtatagtgccttgtttttatgtacagtttatatacagaaaagtttgctctgcatttttgatgatggtttggaacattatctacaattttactctcaaatagtcaaaataaaaacatctcaatttctaataccggttgtaaacaaacagtacacatgtcattttgtgatataggactcccaaataaaagtatcagaataaacacaacaattaactggtaaaaaaaaagaa

SEQ ID NO: 362784 - DNA, 1983 bp, Homo sapiens
  misc_feature (58)..(58): n is a, c, g, or t
tctctagacggatcccggttgcacggggaggcgggaagaggaagacgaacatgtgcanagtgagtggcggctgtactgcgtgcgtggagaggtgcccgtggaagggaatttgctggaagtggcctgtcactgtagcagcctgaggtccagaacttccatggtggtgcttaacgtcaacaaggccctcatctacctgtggcacggatgcaaagcccaggcccacacgaaggaggtcggaaggaccgctgcgaacaagatcaaggaacaatgtcccctggaagcaggactgcatagtagcagcaaagtcacaatacacgagtgtgatgaaggctccgagccactcggattctgggatgccttaggaaggagagacaggaaagcctacgattgcatgcttcaagatcctggaagttttaacttcgcgccccgcctgttcatcctcagcagctcctctggggattttgcagccacagagtttgtgtaccctgcccgagccccctctgtggtcagttccatgcccttcctgcaggaagatctgtacagcgcgccccagccagcacttttccttgttgacaatcaccacgaggtgtacctctggcaaggctggtggcccatcgagaacaagatcactggttccgcccgcatccgctgggcctccgaccggaagagtgcgatggagactgtgctccagtactgcaaaggaaaaaatctcaagaaaccagcccccaagtcttaccttatccacgctggtctggagcccctgacattcaccaatatgtttcccagctgggagcacagagaggacatcgctgagatcacagagatggacacggaagtttccaatcagatcaccctcgtggaagacgtcttagccaagctctgtaaaaccatttacccgctggccgacctcctggccaggccactcccggagggggtcgatcctctgaagcttgagatctatctcaccgacgaagacttcgagtttgcactagacatgacgagggatgaatacaacgccctgcccgcctggaagcaggtgaacctgaagaaagcaaaaggcctgttctgagtggggagacgccagaggagcctcacggtcacgtccaacaacaccactgcaccagggaaatggatatatatttttggactggtgtttttcacaaagtatttttcaatcagagttttcagaacctgacattgttaaagatactgcttgtcccggagttgtgtattttgtaaatgttcaagggaactgtttggaaacttctttccaccattcaggaggttatcagaattaataaaagtatctgttatgtgcacttaagccgcagctgctatagatagcactgccttcttgttccagctaggcaatgcctttttttttttttttgaagcagttctctttataaagtgttattttgatagtttgtggattctaaaatatatatatatttatataaacaccatataagtcaaatatgtatttaacaaagcaatatgtattcattcactttcaagatttgttttggtgtcaaaataacatgaaaaggtagatggagttgcttctgttgaattagctctgccaccaatatgtatcttcatacacgtttggaaatgtttcctgcagcattaggtatgacttgttctgagtactgcttccggtgctaaaatgaacaaagaatttgtacttaatggcatggactctggagaatctatgcgaatcaacctttctaccttaatatctccccaaaaatgtatagtgccttgtttttatgtacagtttatatacagaaaagtttgctctgcatttttgatgatggtttggaacattatctacaattttactctcaaatagtcaaaataaaaacatctcaatttctaataccggttgtaaacaaacagtacacatgtcattttgtgatataggactcccaaataaaagtatcagaataaacacaacaattaactggtaaaaaaaaagaa

SEQ ID NO: 362785 - DNA, 1951 bp, Homo sapiens
ggtgagtgttctatttgtgtcttttgcacattttattgatatttattttttccttatgtatgtcccttcatgtattaaggatattaactagttgctgtattacaaatatttcccatttgttacttggtttttcttttctttttaattttgcattgtttttcatttttatataattaatgcattattttcccttttgattggttcttttactattgcacttgaaaaggctttctccaccttgaagctcagataaatcctacctgtgtttccacagtgctttgaattatttcatattttacattcattcttcatctggaatttactttgatgcacatgatatcttcagctttgttctcttttctttcaaagatcctggaagttttaacttcgcgccccgcctgttcatcctcagcagctcctctggggattttgcagccacagagtttgtgtaccctgcccgagccccctctgtggtcagttccatgcccttcctgcaggaagatctgtacagcgcgccccagccagcacttttccttgttgacaatcaccacgaggtgtacctctggcaaggctggtggcccatcgagaacaagatcactggttccgcccgcatccgctgggcctccgaccggaagagtgcgatggagactgtgctccagtactgcaaaggaaaaaatctcaagaaaccagcccccaagtcttaccttatccacgctggtctggagcccctgacattcaccaatatgtttcccagctgggagcacagagaggacatcgctgagatcacagagatggacacggaagtttccaatcagatcaccctcgtggaagacgtcttagccaagctctgtaaaaccatttacccgctggccgacctcctggccaggccactcccggagggggtcgatcctctgaagcttgagatctatctcaccgacgaagacttcgagtttgcactagacatgacgagggatgaatacaacgccctgcccgcctggaagcaggtgaacctgaagaaagcaaaaggcctgttctgagtggggagacgccagaggagcctcacggtcacgtccaacaacaccactgcaccagggaaatggatatatatttttggactggtgtttttcacaaagtatttttcaatcagagttttcagaacctgacattgttaaagatactgcttgtcccggagttgtgtattttgtaaatgttcaagggaactgtttggaaacttctttccaccattcaggaggttatcagaattaataaaagtatctgttatgtgcacttaagccgcagctgctatagatagcactgccttcttgttccagctaggcaatgcctttttttttttttttgaagcagttctctttataaagtgttattttgatagtttgtggattctaaaatatatatatatttatataaacaccatataagtcaaatatgtatttaacaaagcaatatgtattcattcactttcaagatttgttttggtgtcaaaataacatgaaaaggtagatggagttgcttctgttgaattagctctgccaccaatatgtatcttcatacacgtttggaaatgtttcctgcagcattaggtatgacttgttctgagtactgcttccggtgctaaaatgaacaaagaatttgtacttaatggcatggactctggagaatctatgcgaatcaacctttctaccttaatatctccccaaaaatgtatagtgccttgtttttatgtacagtttatatacagaaaagtttgctctgcatttttgatgatggtttggaacattatctacaattttactctcaaatagtcaaaataaaaacatctcaatttctaataccggttgtaaacaaacagtacacatgtcattttgtgatataggactcccaaataaaagtatcagaataaacacaacaattaactggtaaaaaaaaagaa

SEQ ID NO: 362786 - DNA, 7032 bp, Homo sapiens
ttcactgctctgactgcgtcctccccaggctgaagtgtcctcaggtttcatgtggatttgcccagtaatggatggctccaccgaggccaggttggggaagttcagcctcgaggacactaggggacgaaaaacttcaaaaagaagactctttttattaatattttggcgttctttttggagaggaacttttgggatgtagcctttacctgtttcctgaatttgacatccaaaaagccttttggaaaacaccattctaaatttatcctgttctgaatcatcatcgcttctgatagatgcagttgcttgctgacatcgtgatctttgattttgtacaacgctatttgggctaacttttgggattttactttgtgcttagaatttgaaagtagtattcattggaaagagactccaagaaaatactcgaagacatcaaaagctggattcgagggtataacgtgttttgttttgttttttaaattagaaaaataaggaattgcagtgtgattttctttccccctttaacttagaggaacgaggattatacagaaatttgaaatttcaacaagaaaaacttaagcttccttggattcccacgtcaaaggaaagtttcaagctttcagaaggagttctcactcgaagataaagaacagctcgctaaccacgaaagaggaatcgatgctcagcttttagttgcacttcctaaagttgcagaattaagacaaatctttgaaccaaagaagaaagaattcttagaaatgaaaagaaaagaaagaattgccaggcgcctggaagggattgaaaatgacactcagcccatcctcttgcagagctgcacaggattggtgactcaccgcctgctggaggaagacacccctcgatacatgagagccagcgaccctgccagcccccacatcggccgatcaaatgaagaggaggaaacttctgattcttctctagaaaagcaaactcgatccaaatactgcacagaaacctccggtgtccacggtgactcaccctatggttcgggtaccatggacacccacagtctggagtccaaagccgaaagaattgcaaggtacaaagcagaaagaaggcgacagctggcagagaagtatgggctgactctggatcccgaggccgactccgagtatttatcccgctataccaagtccaggaaggagcctgatgctgtcgagaagcggggaggaaaaagtgacaaacaggaagagtcaagcagagatgcgagttctctgtaccccgggaccgagacgatggggctcaggacctgtgccggtgaatccaaggactatgccctccatgcgggtgacggctcttccgacccggaggtgctgctgaacatagaaaaccaaagacgaggtcaagagctgagtgccacccggcaggcccatgacctgtccccagcagccgagagttcctcgaccttctctttctctgggcgagactcctccttcactgaagtgccacggtcccccaagcacgcccacagctcctccctgcagcaggcagcctcccggagcccctcctttggtgacccacagctatcccctgaggcccgacccagtacagggaaacccaaacatgagtggtttctccagaaagattccgaaggggacacaccttcacttatcaactggccttccagagttaaagttagagaaaaattggtgaaagaggaaagtgctcgaaacagccctgaactcgcctcagagtccgtaactcagaggagacaccagccagcgccagtccattacgtgtcatttcagtctgagcactcagcctttgatagggtccccagcaaggcagcaggctctacacgacagccaatccgtggctatgtccaacccgcagataccggtcacaccgccaagctggtgacgccagaaaccccagaaaatgcatctgagtgtagctgggtagcatcagccacccagaatgtccccaaacctcccagcttgacggttctagaaggtgacggaagggatagcccagttctccatatctgcgagtcaaaagcagaagaagaagaaggggaaggagaaggagaagaaaaagaagaagatgtgtgcttcactgaagctctcgagcaaagcaagaaaaccctactggctttggagggtgatgggctagtgagaagcccagaagatccctctagaaatgaggactttggtaagcctgctgtgagcacagtcaccttagagcatcagaaggaactggaaaacgtggcacaaccccctcaagctccgcaccagcccactgagaggacaggcaggagcgagatggttctctacattcaaagtgagcctgtgtcccaagacgccaaaccaactggtcacaacagggaagcctcgaaaaagcgcaaggtccgtacccgctctctgtcagatttcacaggcccccctcagctccaggccttgaagtataaggacccagcttccaggagagagctggagctgcccagctccaagaccgaagggccttatggggagatcagcatgctggacacaaaggtctctgtcgcccagctccgaagtgcgttcctggcatctgccaacgcctgcaggagacctgaactcaaatcacgggtagagaggtcggctgaaggacctggcttgcccaccggtgtggaacgggagagagggtcccggaaaccaagacgctatttttctcctggtgaaagtagaaaaacttccgagagatttagaacccaacctataacttcagcagaacgaaaggaatcggataggtgcacttcacattcagaaacgccaactgtcgatgatgaagaaaaggtggatgaacgagccaagctgagcgtcgccgccaagaggttgcttttcagggagatggaaaaatcttttgatgaacaaaatgttccaaagcgacgctcaagaaacacagctgtggagcagaggctacgccgtctgcaggacaggtccctcacccagcccatcaccactgaagaggtggtcatcgcagccactgaacctatccccgcttcgtgttctgggggcacccaccctgtaatggcgagacttcctagccccactgtagctaggagcgctgtgcagcctgccagattgcaggcctctgctcaccaaaaggccttagccaaggaccagacaaatgagggcaaagagcttgctgagcaaggagaacctgattcctccactctaagcttggccgaaaagttggccttgtttaacaaattgtcccagccagtctcaaaagcgatttctacccggaacagaatagacacgagacagaggagaatgaacgctcgctatcaaactcagccagtcacactgggagaggtggagcaggtgcagagtggaaagctcattcctttctcacctgccgtgaacacatcagtgtctaccgtagcatccacggttgctccaatgtatgccggagatcttcgcacaaagccacctcttgaccacaatgcaagtgccactgactataagttttcttcttcaatagaaaattcggactctccagttagaagcattctgaaatcgcaagcttggcagcctttggtagagggtagcgagaacaagggaatgttgagagaatatggagagacagaaagcaagagagctttgacaggtcgagacagtgggatggagaagtatgggtcctttgaggaagcagaagcatcctaccccatcctgaaccgagccagggaaggagacagccataaggaatctaaatatgctgttcccagaagaggaagcctggaacgggcgaaccctcccatcacccacctcggggatgaaccgaaggaattttccatggctaaaatgaatgcacaaggaaacttggacttgagggacaggctgccctttgaagagaaggtggaggtggagaatgttatgaaaaggaagttttcactaagagcggcagagttcggggagcccacttccgagcagacggggacagctgctgggaaaactattgctcaaaccacagcccccgtgtcctggaagccccaggattcttcggaacagccacaggagaagctctgcaagaatccatgtgcgatgtttgctgctggagagatcaaaacgccgacaggggagggccttcttgactcacccagcaaaaccatgtctattaaagaaagattggcactgttgaagaaaagcggggaggaagattggagaaacagactcagcaggaggcaggagggcggcaaggcgccggccagcagcctgcacacccaggaagcagggcggtccctcatcaagaagcgggtcacagaaagtcgagagagccaaatgacgattgaggagaggaagcagctcatcactgtgagagaggaggcctggaagacgagaggcagaggagcggccaacgactcgacccagttcactgtggctggcaggatggtgaagaaaggtttggcgtcacctactgccataaccccagtagcctcagccatttgcggtaaaacaagaggcaccacacccgtttccaaacccctggaagatatcgaagccagaccagatatgcagttagaatcggacctgaagttggacaggctggaaacctttctaagaaggctgaataacaaagttggcgggatgcacgaaacggtgctcactgtcaccggcaaatctgtgaaggaggtgatgaagccagatgatgatgaaacctttgccaaattttaccgcagcgtggattataatatgccaagaagtcctgtggagatggatgaggacttcgatgtcattttcgatccttatgcacccaaattgacgtcttccgtggccgagcacaagcgggcagttaggcccaagcgccgggttcaggcctccaaaaaccccctgaaaatgctggcggcaagagaagatctccttcaggaatacactgagcagagattaaacgttgccttcatggagtcaaagcggatgaaagtagaaaagatgtcttccaactccaacttctcagaagtcaccctggcgggtttagccagtaaagaaaacttcagcaacgtcagcctgcggagcgtcaacctgacggaacagaactctaacaacagcgccgtgccctacaagaggctgatgctgttgcagattaaaggaagaagacatgtgcagaccaggctggtggaacctcgagcttcggcgctcaacagtggggactgcttcctcctgctctctccccactgctgcttcctgtgggtaggagagtttgcaaacgtcatagaaaaggcgaaggcctcagaacttgcaactttaattcagacaaagagggaacttggttgtagagctacttatatccaaaccattgaagaaggaattaatacacacactcatgcagccaaagacttctggaagcttctgggtggccaaaccagttaccaatctgctggagacccaaaagaagatgaactctatgaagcagccataatagaaactaactgcatttaccgtctcatggatgacaaacttgttcctgatgacgactactgggggaaaattccgaagtgctcccttctgcaacccaaagaggtactggtgtttgattttggtagtgaagtttacgtatggcatgggaaagaagtcacattagcacaacgaaaaatagcatttcagctggcaaagcacttatggaatggaacctttgactatgagaactgtgacatcaatcccctggatcctggagaatgcaatccgcttatccccagaaaaggacaggggcggcccgactgggcgatatttgggagacttactgaacacaatgagacgattttgttcaaagagaagtttctggattggacggaactgaagagatcgaatgagaagaaccccggggaacttgcccagcacaaggaagaccccaggactgatgtcaaggcatacgatgtgacacggatggtgtccatgccccagacgacagcaggcaccatcctggacggagtgaacgtcggccgtggctatggcctggtggaaggacacgacaggaggcagtttgagatcaccagcgtttccgtggatgtctggcacatcctggaattcgactatagcaggctccccaaacaaagcatcgggcagttccatgagggggatgcctatgtggtcaagtggaagttcatggtgagcacggcagtgggaagtcgccagaagggagagcactcggtgagggcagccggcaaagagaagtgcgtctacttcttctggcaaggccggcactccaccgtgagtgagaagggcacgtcggcgctgatgacggtggagctggacgaggaaaggggggcccaggtccaggttctccagggaaaggagcccccctgtttcctgcagtgtttccagggggggatggtggtgcactcggggaggcgggaagaggaagaagaaaatgtgcaaagtgagtggcggctgtactgcgtgcgtggagaggtgcccgtggaagggaatttgctggaagtggcctgtcactgtagcagcctgaggtccagaacttccatggtggtgcttaacgtcaacaaggccctcatctacctgtggcacggatgcaaagcccaggcccacacgaaggaggtcggaaggaccgctgcgaacaagatcaaggaacaatgtcccctggaagcaggactgcatagtagcagcaaagtcacaatacacgagtgtgatgaaggctccgagccactcggattctgggatgccttaggaaggagagacaggaaagcctacgattgcatgcttcaaggtaatgtggcatccacagtctgcgatctggtttttttgtttgtttttggaaacaagagtcttgctctgttatccaggctggagtatagtggtatgatcacagctcactgcagcttcaacctcctgggctcaagtgatcagcctgcctcagcctctcaaagtgcaggcttgagccactgtgccccattcatgttttatcttaattcttcagtgtgtcttaaatctagtgtgatgagtattatgtccagctgattgaacagtttttttcttcccaggggtgagtttaacttggacaccagga

SEQ ID NO: 362787 - DNA, 3343 bp, Homo sapiens
  misc_feature (3218)..(3218): n is a, c, g, or t
  misc_feature (3221)..(3221): n is a, c, g, or t
  misc_feature (3224)..(3224): n is a, c, g, or t
  misc_feature (3278)..(3279): n is a, c, g, or t
  misc_feature (3282)..(3282): n is a, c, g, or t
  misc_feature (3290)..(3290): n is a, c, g, or t
  misc_feature (3298)..(3298): n is a, c, g, or t
  misc_feature (3304)..(3304): n is a, c, g, or t
  misc_feature (3316)..(3316): n is a, c, g, or t
  misc_feature (3323)..(3323): n is a, c, g, or t
  misc_feature (3332)..(3334): n is a, c, g, or t
  misc_feature (3339)..(3339): n is a, c, g, or t
ttcactgctctgactgcgtcctccccaggctgaagtgtcctcaggtttcatgtggatttgcccagtaatggatggctccaccgaggccaggttggggaagttcagcctcgaggacactaggggacgaaaaacttcaaaaagaagactctttttattaatattttggcgttctttttggagaggaacttttgggatgtagcctttacctgtttcctgaatttgacatccaaaaagccttttggaaaacaccattctaaatttatcctgttctgaatcatcatcgcttctgatagatgcagttgcttgctgacatcgtgatctttgattttgtacaacgctatttgggctaacttttgggattttactttgtgcttagaatttgaaagtagtattcattggaaagagactccaagaaaatactcgaagacatcaaaagctggattcgagggtataacgtgttttgttttgttttttaaattagaaaaataaggaattgcagtgtgattttctttccccctttaacttagaggaacgaggattatacagaaatttgaaatttcaacaagaaaaacttaagcttccttggattcccacgtcaaaggaaagtttcaagctttcagaaggagttctcactcgaagataaagaacagctcgctaaccacgaaagaggaatcgatgctcagcttttagttgcacttcctaaagttgcagaattaagacaaatctttgaaccaaagaagaaagaattcttagaaatgaaaagaaaagaaagaattgccaggcgcctggaagggattgaaaatgacactcagcccatcctcttgcagagctgcacaggattggtgactcaccgcctgctggaggaagacacccctcgatacatgagagccagcgaccctgccagcccccacatcggccgatcaaatgaagaggaggaaacttctgattcttctctagaaaagcaaactcgatccaaatactgcacagaaacctccggtgtccacggtgactcaccctatggttcgggtaccatggacacccacagtctggagtccaaagccgaaagaattgcaaggtacaaagcagaaagaaggcgacagctggcagagaagtatgggctgactctggatcccgaggccgactccgagtatttatcccgctataccaagtccaggaaggagcctgatgctgtcgagaagcggggaggaaaaagtgacaaacaggaagagtcaagcagagatgcgagttctctgtaccccgggaccgagacgatggggctcaggacctgtgccggtgaatccaaggactatgccctccatgcgggtgacggctcttccgacccggaggtgctgctgaacatagaaaaccaaagacgaggtcaagagctgagtgccacccggcaggcccatgacctgtccccagcagccgagagttcctcgaccttctctttctctgggcgagactcctccttcactgaagtgccacggtcccccaagcacgcccacagctcctccctgcagcaggcagcctcccggagcccctcctttggtgacccacagctatcccctgaggcccgacccaggtgcacttcacattcagaaacgccaactgtcgatgatgaagaaaaggtggatgaacgagccaagctgagcgtcgccgccaagaggttgcttttcagggagatggaaaaatcttttgatgaacaaaatgttccaaagcgacgctcaagaaacacagctgtggagcagaggctacgccgtctgcaggacaggtccctcacccagcccatcaccactgaagaggtggtcatcgcagccacattgcaggcctctgctcaccaaaaggccttagccaaggaccagacaaatgagggcaaagagcttgctgagcaaggagaacctgattcctccactctaagcttggccgaaaagttggccttgtttaacaaattgtcccagccagtctcaaaagcgattctgatgtaaactgtaaagtaacaaatgtaaatgtaagacagtggtaactgtggaataaataccaaagagggcgaagaggaaagctcttcagaattggaagttcagtctcacaatgcacgtagagccttccctactgtattagtcggttctcacactgctatgaagaaataccggagactaggtaatttataaaggaaaatatttcaattgactcacagttctgcatggctggcgaggcctcagaaaaacttacaatcatgcagaaggcacctcttcacagggcggcaggagaatgagtgcccagtgaagcggggaagccccttataaaaccatcagctcttgtgagaactaactcactatcacaagaacaatggggaaaactgcccccatgattcatttatctccacctggtttcgctcacacacgtggtgattatggaactacaattcaagatgagattggttgggaacacaaccaaaccatatcacctaccgttgagggggaggtgaaaagagtcccatgcccagtgttcctggcaagaatgaatctgtgtctataggagtgtgcacctgtagtctccctatcacaagcaactgcacgtggcccatctgtattactgttctctgcagtgacctctggttccaattacctttccagctccctgtccttccatgaaccctggtagcactggctggggccctgtttgttctagtctcttccccaggacagatggatacttgaataaacatgttggatacaaatagcgcacccaaactctccttagaaatctcattttgtgccctgcatgttcagcccagatagaatctccacagaccagaccagctggatcagactcagctctaccctagcttagtggtttggaccacaggtcctcctgtggaggaggggtctccagccactttccccagctctctcccctccactctaagtcaacattggttccaattacctccctcctcctcattaggagcccacagtactgataatgaccattttaaatatctttttctaaaaatatcaccaaaaacaagaaaggcacaagatagaaggcccaaagaaaatacgaaacatgtagctttaaatttttcatccttcaaaggaaggaccaaagataattaaaatattagtgaaggaagtacaggtagataaaaataggtatttacatatatgctgcccctttgggggggactttcaattttaaaaacttagctgataaaaacntanagntggccgggcgcggtggctcacgcctgtaatcccagcactttgggaggccgaggnnggnggatcacnaggtcagnagatcnagaccatcctgnctaacanggtgaaacnnngtctntact

SEQ ID NO: 362788 - DNA, 4387 bp, Homo sapiens
ttcactgctctgactgcgtcctccccaggctgaagtgtcctcaggtttcatgtggatttgcccagtaatggatggctccaccgaggccaggttggggaagttcagcctcgaggacactaggggacgaaaaacttcaaaaagaagactctttttattaatattttggcgttctttttggagaggaacttttgggatgtagcctttacctgtttcctgaatttgacatccaaaaagccttttggaaaacaccattctaaatttatcctgttctgaatcatcatcgcttctgatagatgcagttgcttgctgacatcgtgatctttgattttgtacaacgctatttgggctaacttttgggattttactttgtgcttagaatttgaaagtagtattcattggaaagagactccaagaaaatactcgaagacatcaaaagctggattcgagggtataacgtgttttgttttgttttttaaattagaaaaataaggaattgcagtgtgattttctttccccctttaacttagaggaacgaggattatacagaaatttgaaatttcaacaagaaaaacttaagcttccttggattcccacgtcaaaggaaagtttcaagctttcagaaggagttctcactcgaagataaagaacagctcgctaaccacgaaagaggaatcgatgctcagcttttagttgcacttcctaaagttgcagaattaagacaaatctttgaaccaaagaagaaagaattcttagaaatgaaaagaaaagaaagaattgccaggcgcctggaagggattgaaaatgacactcagcccatcctcttgcagagctgcacaggattggtgactcaccgcctgctggaggaagacacccctcgatacatgagagccagcgaccctgccagcccccacatcggccgatcaaatgaagaggaggaaacttctgattcttctctagaaaagcaaactcgatccaaatactgcacagaaacctccggtgtccacggtgactcaccctatggttcgggtaccatggacacccacagtctggagtccaaagccgaaagaattgcaaggtacaaagcagaaagaaggcgacagctggcagagaagtatgggctgactctggatcccgaggccgactccgagtatttatcccgctataccaagtccaggaaggagcctgatgctgtcgagaagcggggaggaaaaagtgacaaacaggaagagtcaagcagagatgcgagttctctgtaccccgggaccgagacgatggggctcaggacctgtgccggtgaatccaaggactatgccctccatgcgggtgacggctcttccgacccggaggtgctgctgaacatagaaaaccaaagacgaggtcaagagctgagtgccacccggcaggcccatgacctgtccccagcagccgagagttcctcgaccttctctttctctgggcgagactcctccttcactgaagtgccacggtcccccaagcacgcccacagctcctccctgcagcaggcagcctcccggagcccctcctttggtgacccacagctatcccctgaggcccgacccagtacagggaaacccaaacatgagtggtttctccagaaagattccgaaggggacacaccttcacttatcaactggccttccagagttaaagttagagaaaaattggtgaaagaggaaagtgctcgaaacagccctgaactcgcctcagagtccgtaactcagaggagacaccagccagcgccagtccattacgtgtcatttcagtctgagcactcagcctttgatagggtccccagcaaggcagcaggctctacacgacagccaatccgtggctatgtccaacccgcagataccggtcacaccgccaagctggtgacgccagaaaccccagaaaatgcatctgagtgtagctgggtagcatcagccacccagaatgtccccaaacctcccagcttgacggttctagaaggtgacggaagggatagcccagttctccatatctgcgagtcaaaagcagaagaagaagaaggggaaggagaaggagaagaaaaagaagaagatgtgtgcttcactgaagctctcgagcaaagcaagaaaaccctactggctttggagggtgatgggctagtgagaagcccagaagatccctctagaaatgaggactttggtaagcctgctgtgagcacagtcaccttagagcatcagaaggaactggaaaacgtggcacaaccccctcaagctccgcaccagcccactgagaggacaggcaggagcgagatggttctctacattcaaagtgagcctgtgtcccaagacgccaaaccaactggtcacaacagggaagcctcgaaaaagcgcaaggtccgtacccgctctctgtcagatttcacaggcccccctcagctccaggccttgaagtataaggacccagcttccaggagagagctggagctgcccagctccaagaccgaagggccttatggggagatcagcatgctggacacaaaggtctctgtcgcccagctccgaagtgcgttcctggcatctgccaacgcctgcaggagacctgaactcaaatcacgggtagagaggtcggctgaaggacctggcttgcccaccggtgtggaacgggagagagggtcccggaaaccaagacgctatttttctcctggtgaaagtagaaaaacttccgagagatttagaacccaacctataacttcagcagaacgaaaggaatcggataggtgcacttcacattcagaaacgccaactgtcgatgatgaagaaaaggtggatgaacgagccaagctgagcgtcgccgccaagaggttgcttttcagggagatggaaaaatcttttgatgaacaaaatgttccaaagcgacgctcaagaaacacagctgtggagcagaggctacgccgtctgcaggacaggtccctcacccagcccatcaccactgaagaggtggtcatcgcagccactgaacctatccccgcttcgtgttctgggggcacccaccctgtaatggcgagacttcctagccccactgtagctaggagcgctgtgcagcctgccagattgcaggcctctgctcaccaaaaggccttagccaaggaccagacaaatgagggcaaagagcttgctgagcaaggagaacctgattcctccactctaagcttggccgaaaagttggccttgtttaacaaattgtcccagccagtctcaaaagcgatttctacccggaacagaatagacacgagacagaggagaatgaacgctcgctatcaaactcagccagtcacactgggagaggtggagcaggtgcagagtggaaagctcattcctttctcacctgccgtgaacacatcagtgtctaccgtagcatccacggttgctccaatgtatgccggagatcttcgcacaaagccacctcttgaccacaatgcaagtgccactgactataagttttcttcttcaatagaaaattcggactctccagttagaagcattctgaaatcgcaagcttggcagcctttggtagagggtagcgagaacaagggaatgttgagagaatatggagagacagaaagcaagagagctttgacaggtcgagacagtgggatggagaagtatgggtcctttgaggaagcagaagcatcctaccccatcctgaaccgagccagggaaggagacagccataaggaatctaaatatgctgttcccagaagaggaagcctggaacgggcgaaccctcccatcacccacctcggggatgaaccgaaggaattttccatggctaaaatgaatgcacaaggaaacttggacttgagggacaggctgccctttgaagagaaggtggaggtggagaatgttatgaaaaggaagttttcactaagagcggcagagttcggggagcccacttccgagcagacggggacagctgctgggaaaactattgctcaaaccacagcccccgtgtcctggaagccccaggattcttcggaacagccacaggagaagctctgcaagaatccatgtgcgatgtttgctgctggagagatcaaaacgccgacaggggagggccttcttgactcacccagcaaaaccatgtctattaaagaaagattggcactgttgaagaaaagcggggaggaagattggagaaacagactcagcaggaggcaggagggcggcaaggcgccggccagcagcctgcacacccaggaagcagggcggtccctcatcaagaagcgggtcacagaagtggtattcagtgaatctaggaagacagcagcagacatgtattccaggaaccagtgtttgatgaagctaggactgaggagcaagcgacaatctacattctgtcg

SEQ ID NO: 362789 - DNA, 280 bp, Homo sapiens
acttatggaatggaacctttgactatgagaactgtgacatcaatcccctggatcctggagaatgcaatccgcttatccccaggtactcctgccgccgcccggggacagctcttcaagcgagctgattcccttcgatccctctgttctcaccacagtcctctactctcgctctttatagggttcagttttcataaacgattatatgcagtggactgtgaatattcacaaaaggaacagttctttaacttttatctaactattgcagaaatatggatgtcgt

SEQ ID NO: 362790 - DNA, 246 bp, Homo sapiens
catgggcacccaggtgtgtgctgtgtgcagtagagtgtcattctgtgtgtaaatacatgtctttacttgaaatctgcacctctcatccatgtgaccttcttgtaggccgatcaaatgaagaggaggaaacttctgattcttctctagaaaagcaaactcgatccaaatactgcacagaaacctccggtgtccacggtgactcaccctatggttcgggtaccatggacacccacagtctggagtcca

SEQ ID NO: 362791 - DNA, 6299 bp, Homo sapiens
gcttcggacccgaccgactcggagcagaccttcagggttcaatgccccggaactcctggggcgaggagccacgcccgggcagtttcgggctccggagggtggggagtcggtgcccggcagcgggcgggccgtcagctgcccggcccggcgcctacctccccgccccccggcttcctgcggaggccgcggccgccatgttgttgtggggctgaggcggcgccggcggagccctgagcggctgtgacaggctacgcaacaggttcgcgggcggcggcctgacgaccaagccagctgcagtggcggcgacggcggcagagcagggtctccccgcgcctgcccgcgcccaggctgccggtgctgagggacgcggagtcgcgctgtgacgtgcgggaggcgcggcgagggcgccagatggctgagagctagcaaggaaaactcaggaccatgatggctcagtttcccacagctatgaatggagggccaaacatgtgggctattacctctgaagaacgtactaagcatgacaggcagtttgataacctcaaaccttcaggaggttacataacaggtgatcaagcacgtaattttttcctacaatcaggtctgccggcccctgttttagctgaaatatgggctttatcagacctaaacaaggatgggaagatggatcagcaagagttctccatagctatgaaactcatcaaactgaagcttcaaggccaacagttgcctgtggttctccctcctattatgaagcaaccccctatgttttctccattaatttctgctcgttttggaatgggaagcatgcccaatctgtccattcctcagccattgcctccagctgcacctataacatcattgtcttctgcgacttcagggaccaaccttcctcccttaatgatgcccactcccctagtgccttctgttagcacatcatcattaccaaatggaaccgccagtctcattcagcctttacccattccttattcttcttcaacattgcctcatgggtcatcttatagtctgatgatgggaggatttggaggtgctagtatacagaaagcgcagtctctgattgatttaggatctagtagctcaacttcctcgactgcttcactctcagggaactcacccaagactgggacctcagagtgggcagttcctcagcctacaagattaaaatatcggcaaaaatttaatactcttgacaaaagtatgagtggatatctctcaggttttcaagctagaaatgcccttcttcagtcaaatctttctcaaactcagctggctactatttggactctggctgacgttgatggtgatggacagctaaaagcagaagagtttattcttgcaatgcaccttactgacatggccaaagctggacagccattaccactgactttacctcctgagcttgttcctccatctttcagaggaggaaagcaaattgattccattaatggaactctgccttcatatcagaaaatgcaagaagaggagcctcagaagaaattaccagttacttttgaggacaaacggaaagccaactatgagcgagggaacatggagctggaaaagcgacgccaagccttgatggagcagcaacaaagggaggcagaacgtaaagcccagaaagaaaaggaagagtgggaacgaaaacagagagaattacaagaacaagaatggaagaaacaacttgaattagaaaaacgcttagagaagcaacgggaattggagagacaacgagaggaagaaaggagaaaagacatagaaagacgagaggcagcaaaacaggaacttgaacgacaacgtcgcttagaatgggagagaattcggcgacaggagcttctcaatcaaaagaatagagaacaagaagaaattgtcaggttaaactctaaaaagaagaatcttcatcttgagttggaagcactgaatggcaaacatcagcagatctcaggcagacttcaggatgtccgactcaaaaagcaaactcaaaagactgagctggaagttctggataagcagtgtgacttggaaattatggaaatcaagcaacttcaacaggaacttcaggaatatcagaataagcttatctatctggtacctgagaagcaattattaaatgaaagaattaaaaacatgcagttcagtaacacacctgattcaggggtcagtttacttcataaaaaatcattagaaaaggaagaattatgccaaagacttaaagaacagttagatgctcttgaaaaagaaactgcatctaagctgtcagaaatggattcttttaacaatcaactaaagtgtgggaatatggatgactctgttcttcagtgccttttgtctctgctaagctgtctcaacaacctcttcctcttacttaaggaactgagagaaacctacaacacacagcagttagcccttgaacagctttataagatcaaacgtgacaagttgaaggaaattgaaaggaaaagattagaactaatgcagaaaaagaaactagaagatgaggctgcaaggaaagcaaagcaaggaaaagaaaacttatggaaagaaaatcttagaaaggaggaagaagaaaaacaaaagcgactccaggaagaaaaaacacaagaaaaaattcaagaagaggaacggaaagctgaggagaaacaacgtaaggataaggatactttgaaagctgaggagaaaaaacgtgagacagctagtgttttggtgaattatagagcattatacccctttgaagcaaggaaccatgatgagatgagttttaattctggagatataattcaggttgatgaaaaaaccgtaggagaacctggttggctttatggtagttttcaaggaaattttggctggtttccatgcaattatgtagaaaaaatgccatcaagtgaaaatgaaaaagctgtatctccaaagaaggccttacttcctcctacagtttctttatctgctacctcaacttcctctgaaccactttcttcaaatcaaccagcatcagtgactgattatcaaaatgtatctttttcaaacctaactgtaaatacatcatggcagaaaaaatcagccttcactcgaactgtgtcccctggatctgtatcacctattcatggacagggacaagtggtagaaaacttaaaagcacaggccctttgttcctggactgcaaagaaagataaccacttgaacttctcaaaacatgacattattactgtcttggagcagcaagaaaattggtggtttggggaggtgcatggaggaagaggatggtttcccaaatcttatgtcaagatcattcctgggagtgaagtaaaacgggaagaaccagaagctttgtatgcagctgtaaataagaaacctacctcggcagcctattcagttggagaagaatatattgcactttatccatattcaagtgtggaacctggagatttgactttcacagaaggtgaagaaatattggtgacccagaaagatggagagtggtggacaggaagtattggagatagaagtggaatttttccatcaaactatgtcaaaccaaaggatcaagagagttttgggagtgctagcaagtctggagcatcaaataaaaaacctgagattgctcaggtaacttcagcatatgttgcttctggttctgaacaacttagccttgcaccaggacagttaatattaattctaaagaaaaatacaagtgggtggtggcaaggagagttacaggccagaggaaaaaagcgacagaaaggatggtttcctgccagtcatgttaaacttttgggtccaagtagtgaaagagccacacctgcctttcatcctgtatgtcaggtgattgctatgtatgactatgcagcaaataatgaagatgagctcagtttctccaagggacaactcattaatgttatgaacaaagatgatcctgattggtggcaaggagagatcaacggggtgactggtctctttccttcaaactacgttaagatgacgacagactcagatccaagtcaacagtggtgtgctgatctgcaaaccctggacacaatgcagccaattgagaggaaaagacagggctatattcatgagctgattcagaccgaagagcggtacatggctgaccttcagctcgtcgtcgaggtttttcagaaacgcatggcagagtcaggctttctcactgaaggggagatggccctgatttttgttaactggaaggagctcatcatgtccaacacaaagctgctgaaggctttgcgggtgcggaagaagaccgggggcgagaagatgccggtgcagatgattggggacatcctggccgctgagctgtcccacatgcaggcttacatcaggttctgcagctgccagcttaatggagcagctctgttacagcagaagacagatgaagacacagatttcaaagaatttttaaagaagctggcatctgacccgcggtgtaaaggaatgcccctctccagcttcctgctgaaacccatgcagaggatcacccgctacccactgctcatcagaagtattctggagaacaccccggagagccatgcagaccattcctccctaaagctggccctcgagcgggcagaggagctgtgctctcaagtgaatgagggagttcgggagaaggaaaactcggaccgactggagtggatccaggcgcacgtgcagtgtgaaggcctcgcggagcaacttattttcaactctctcaccaactgcctggggccccggaagctcttacacagtgggaaattatacaagaccaagagcaacaaggaactgcacggattcctcttcaatgacttcctgcttcttacctacatggtcaagcagtttgctgtttcctctggctctgagaaacttttcagctcgaagtccaatgctcaattcaaaatgtataaaacgcccattttcctgaatgaagtcttggtgaaactgcccacagacccttccagcgatgagcctgtcttccacatttcccacattgatcgggtctacaccctccgaacagacaacattaatgagaggaccgcctgggtgcagaagatcaaggcggcgtctgagcagtacatcgacaccgagaagaagaagcgtgagaaagcttaccaagcccgctcccaaaagacttcaggcattgggcgcctgatggtgcatgtcattgaagctacagaattaaaagcctgcaaaccaaatggaaagagcaacccatactgtgaaatcagcatgggctcccagagctacaccaccaggaccatccaggacacactcaatcccaagtggaattttaactgccagttctttattaaggatctctaccaagacgtgctgtgtctcaccctgtttgacagagaccagttttcaccagatgatttcctgggtcgtactgaaattccagtggcaaaaattcgaacagaacaggaaagcaaaggccctatgacccgccgactgctgctgcatgaggtccccaccggggaggtctgggtccgttttgacctgcagctttttgagcaaaaaactctcctgtaggggttctaaaggacagcaccagcgggacagcccacaaggctggggctggagaatgagagactgcgctctcttggggctgagggagcaccatgcagcttcacccctcacaaagccatgcacgctgggggctctgttttcctgcacactaaatagctagcaatctatgcaaacacctttcccataaagaaaccaaaccccatagtacagtgccttgtcctagtgttcacatgttcagctctgtttgtttagatgccaaggtttccattttcagggctataaaaagtattacttggaaatgaggcatcagaccaccagatgttaccgctcggttgaatgtgtccaccgtggagtggtttggtgacgctgtaaccattccacgccagtgacctctgctgggtcacagccactcaggaggggaagggtcaggatgagaggctgcagcctcgacacttggcgcggcctgatactgaaatagcgtctactcgtgcactgaataaaaacagaaacttgatcattttattcctgattagattttatcactctctgctaagacaatatagtctggagtataagtgggaaagcttgatttaaatactgtgaactctaataatgtggaaaatatttttcaactttaattttctgaagtataaattatttatgtaaattcattgtttttgcatatttcttaggacatgcatctttaagctttatcattgcccatatgtacagaaagagaataaagacatatgtttatggatgga

SEQ ID NO: 362792 - DNA, 4054 bp, Homo sapiens
  misc_feature (1426)..(1426): n is a, c, g, or t
  misc_feature (1483)..(1483): n is a, c, g, or t
  misc_feature (1834)..(1834): n is a, c, g, or t
gaattcgcggccgcgtcgaccaagatcattcctgggagtgaagtaaaacgggaagaaccagaagctttgtatgcagctgtaaataagaaacctacctcggcagcctattcagttggagaagaatatattgcactttatccatattcaagtgtggaacctggagatttgactttcacagaaggtgaagaaatattggtgacccagaaagatggagagtggtggacaggaagtattggagatagaagtggaatttttccatcaaactatgtcaaaccaaaggatcaagagagttttgggagtgctagcaagtctggagcatcaaataaaaaacctgagattgctcaggtaacttcagcatatgttgcttctggttctgaacaacttagccttgcaccaggacagttaatattaattctaaagaaaaatacaagtgggtggtggcaaggagagttacaggccagaggaaaaaagcgacagaaaggatggtttcctgccagtcatgttaaacttttgggtccaagtagtgaaagagccacacctgcctttcatcctgtatgtcaggtgattgctatgtatgactatgcagcaaataatgaagatgagctcagtttctccaagggacaactcattaatgttatgaacaaagatgatcctgattggtggcaaggagagatcaacggggtgactggtctctttccttcaaactacgttaagatgacgacagactcagatccaagtcaacagtgacccaatgttgtcttccagttgtgaaagcaccccagagacccactatccaagtttcactctagcgtggaggcagggcaggcagccctgatcaaatatctcctacacaattcgtttacttcgtttgaatgttagagccacttgtgattatttttttgtgtttctaacttacagtttaaatttatttgtaaaaagttaaaggatagtgggtctttgtgtggctttccctgctgttcactctggcatctttagcatttttcttcttttttaatttgataattgtaggtcattagcatgcatattgagtttgcccttatgtggtgggagttcaaacacacaaagacccactatttgcacaaactattcttactggtttggaataggctgccatgcttttttaatgttattgcaacatgtgtattcatttacagaattcagataaaatttgcttatgttctgctattatgtttgatctaatcctaatcacagtgagctcttaattagctcaatatgtggtttgccctcaagtgtgcactgtttattactttgtaatatgccactatgagtactgacatttagatatgtttaaaggccaagaactggaaacagccatgccctgttttctgtgtatttgggatgggaataacaacattttgggggagctttttaaatctcagagaanaggaaagtggcctgctctggcaggtatgtgcagtgtttcatttgttccagtcccaanaatgagcactgtcctatggtagttcgcttaggatctttatgtgctctgggctaatgaaggtactgcatcatgtgctgcagcgtgtgtattctttttcgatgacctataaagggattatttttgaggaatgaaaggctcccatcattgactgtgagatgggaaaaacctttcctagcttagagcatttatatcttaatccattttaaagtcagagttcattgttacctgttttaatcaggtgactacatgtcccagtatacaaaggggcactggttgacattcttcttaatgtatttagtaaatatcataagaaatcctttaagagtttaaatgtccccaaaacagacatgngggctctagtcaagaatgaattagagtgaaggaaagctgtgtaacacctggcattcctctgtgttcatggagcttctttgaggctctaagattgattttaccatcagacttctctaatacctgttcttcaaccatattggctactttgacataagaatttacttcttttcctggaatggaaaacactttaaaaaataataacaaacattattataaactaatatatgtgagagtacttagttgatacaaaaaggagttttagtagacagtattatactatatttgaaaatcaaggagaattttatgcaacttaaaatgtttacaaactgcagtgcaatctactgtttgtgaatgtcaaagtatcaggaaaagtgtatatacaatcacagagtcatatttcctcacaaagttatttacaaagagtgaaatatgtttttgtacctctcagtttcagttagaggcatattttgtgcaatatttatgttaatgtgcctatacattatgaatgaattatttcagtcatacattgcctaaatcataactttatgatgcttgggaaagaatcaacagttaaaacttcataaagttctaatgtctgtgttccaaaatacatcacattattaggatgtagggagataagtatgtgtgctccctagggtggcaatttctagttactagaccacctctatttttagcatttggcatcctcatgatacttttataaatatgacattaataggaaagcaataatttcattttacagatagaataacagatttgcctgcattcactgaaagagtgcaaagactgggtccttgtgaattcaactgactctcccaaattgtattaattacctgttcttgccttttattttctgaacttgctgcttttgcattcttttgagttcaaagacagttactttaaatccatttttaaaccctcggggtagaaatcataccactgttaatcagccacattatttggtctaaggttttttctttataattctgaaactgagtttatctaatacattgatgaattatttcaaacgtatttttatagttcaaatcagttcacttttacactgataaatataaattactaggaatgaccttcagacagcgtttagcatctgtaaccaacctgaaaataatatgttcatcaggtacctatggattaaatcatatactggcgtatttaagctgaatgtcagtctggaaaataaatttactatattaactgaaataccactctttgtgtaggtattttgtcatgtatttaagaaaaagataaaaagaatggaaatcatatgacataataacttaagtctttcttaaaagtgcatgctgtcttttgcaatacctcattcagccaagtatttgttctcttcctcattcagtataagtcagctttcaatttgcttagaaggcaacattagaaggttagagttcatcagaaacatagaattttaaaatgtgagttcaactgaataaatttgaatttctgtaggaggtaaagaatcaaaatacctgtttaaagattgcaattgcaatgtataataatcacttttaaattatttgattaaaccttttaggttttccagaaatgaaaaaaatcagttctaaaaccaaagctgatttttagaaaatttgagaatgtaaatcagccctatccataatatagtttctctaaaactttatcttaaagagtcattttaaaataatataactattaaaaatgtaactgatatttaaatgttttgaaataaaacattttaaaatataaatactgtagtttaaaagaaagaaactgggggaaagaaaagtagagaaagaaataccaattccagtccaaagctttatttgccaggttttcttagaatgacttttaccagtttatgaattcttgtaaacagaatctataatggaaatactgaaagacttttgcctaaagtggcattattgaatgctgctgtgatgctactgtaatgtaataaattattaaattgttgcaaagtgctgtttttgccttaaaattttattttgtgtgtcttgaaaattatagtattaaaggtattgagattgtgcaaatgctgggcacgcttggcatgagataatctgtttttatttttacaaaattgtaatataactatgcaagtgtgtttattaaaagaacacaaactataaaaaaaagtcgacgcggccgcgaattccagctgac

SEQ ID NO: 362793 - DNA, 2036 bp, Homo sapiens
cgaacagtccatgctctaccctggctcctgtctggcagaggagacagacattacacacgatttcagacccagcaggctgtgggctgctcataagcgagggatactggatgcagaggagggaagggatctgggaggtagatgtgggatcagacctgcatcttgaaggatgagtaggatgctgacgggcagagaaagcaggcagggcagaaagagcaagcaggggcttcctagcaggcaacacagcctggggaaaggcacagggcagccagatgctgggctgttgggcccagggcagtggcagatggggacagggagccggtagtgttatggttggtttgaaagacagggtctgcatccttggagaagagattaatgagacttgtcttcctcttttgtagcccgctcccaaaagacttcaggcattgggcgcctgatggtgcatgtcattgaagctacagaattaaaagcctgcaaaccaaatggaaagagcaacccatactgtgaaatcagcatgggctcccagagctacaccaccaggaccatccaggacacactcaatcccaagtggaattttaactgccagttctttattaaggatctctaccaagacgtgctgtgtctcaccctgtttgacagagaccagttttcaccagatggtaagtgtcgctcagccaggggatctaaaggctttcccagtttcctagatcctggagtccagatctaggggcttcagctgtgtgcagaccccatgccacttcagggaagtgacacaggcctgtgtcatctcgctttggcagcaggtgggtggccttcctcaggggaggaggtggcctgagatgtgtttcaggtctttgacccatcactccctacacacacgacgtgaacaccactcctggagcattctcagaatggagatttgaattccatgtggcagcttctcacacacaaacctgccatcattccccacacacccactcacgacattcaacagccatgagccaaaagaagttccttgtttcagatttgaaggttttatgaatccacttcttccggatgtagctctttaatgattttataaagaagaaagacttctgactctcctgtgtttattcaccagatttcctgggtcgtactgaaattccagtggcaaaaattcgaacagaacaggaaagcaaaggccctatgacccgccgactgctgctgcatgaggtccccaccggggaggtctgggtccgttttgacctgcagctttttgagcaaaaaactctcctgtaggggttctaaaggacagcaccagcgggacagcccacaaggctggggctggagaatgagagactgcgctctcttggggctgagggagcaccatgcagcttcacccctcacaaagccatgcacgctgggggctctgttttcctgcacactaaatagctagcaatctatgcaaacacctttcccataaagaaaccaaaccccatagtacagtgccttgtcctagtgttcacatgttcagctctgtttgtttagatgccaaggtttccattttcagggctataaaaagtattacttggaaatgaggcatcagaccaccagatgttaccgctcggttgaatgtgtccaccgtggagtggtttggtgacgctgtaaccattccacgccagtgacctctgctgggtcacagccactcaggaggggaagggtcaggatgagaggctgcagcctcgacacttggcgcggcctgatactgaaatagcgtctactcgtgcactgaataaaaacagaaacttgatcattttattcctgattagattttatcactctctgctaagacaatatagtctggagtataagtgggaaagcttgatttaaatactgtgaactctaataatgtggaaaatatttttcaactttaattttctgaagtataaattatttatgtaaattcattgtttttgcatatttcttaggacatgcatctttaagctttatcattgcccatatgtacagaaagagaataaagacatatgtttatggatgga

SEQ ID NO: 362794 - DNA, 548 bp, Homo sapiens
aatgacttttccagaaatggaggcttcattgttcttacaaatggaggtttcatttgttctgtgtagaagaccttagacgctagacccctttctccttctcaacaaggctcttcagaacaaacagaactctctctggacataggcgggtggagtgttctagcccatctcacagcctgtgttttggccctaattctttcagcccattttcctgaatgaagtcttggtgaaactgcccacagacccttccagcgatgagcctgtcttccacatttcccacattgatcgggtctacaccctccgaacagacaacattaatgagaggtcagtcctgaccatgtgtggcctgccttgaactctgggagaaggcctggacgtctccctctgccataaacccatctccagccgtgcttaagccccactaattctgtatcctgaacctctcttaacacatcccctctgctccagtcccatggtaggccttggtcactgcagctgcctcctaacatgcttcccggcttctagtctctccccacaccactcagcagcct

SEQ ID NO: 362795 - DNA, 635 bp, Homo sapiens
  misc_feature (52)..(52): n is a, c, g, or t
  misc_feature (124)..(124): n is a, c, g, or t
tagattcgcatatatgtgcccaaaggaacgactccatgttttctaaaagccntagagaacatatatcgggtgcctctcctctgtccctttgtgttcgtcattttggcgaattactggaagatgncggttccggccgaaaggagcttctcaatcaaaagaatagagaacaagaagaaattgtcaggttaaactctaaaaagaagaatcttcatcttgagttggaagcactgaatggcaaacatcagcagatctcaggcagacttcaggatgtccgactcaaaaagcaaactcaaaagactgagctggaagttctggataagcagtgtgacttggaaattatggaaatcaagcaacttcaacaggaacttcaggaatatcagaataagcttatctatctggtacctgagaagcaattattaaatgaaagaattaaaaacatgcagttcagtaacacacctgattcaggggtcagtttacttcataaaaaatcattagaaaaggaagaattatgccaagatttacctccatcgaccacagatgtactcagtcggccccgcgattcctcacacgcccaacgacttaactatcgagatttacctcctcggccagattaataccgggtaacgagctcgatt

SEQ ID NO: 362796 - DNA, 6250 bp, Homo sapiens
gcttcggacccgaccgactcggagcagaccttcagggttcaatgccccggaactcctggggcgaggagccacgcccgggcagtttcgggctccggagggtggggagtcggtgcccggcagcgggcgggccgtcagctgcccggcccggcgcctacctccccgccccccggcttcctgcggaggccgcggccgccatgttgttgtggggctgaggcggcgccggcggagccctgagcggctgtgacaggctacgcaacaggttcgcgggcggcggcctgacgaccaagccagctgcagtggcggcgacggcggcagagcagggtctccccgcgcctgcccgcgcccaggctgccggtgctgagggacgcggagtcgcgctgtgacgtgcgggaggcgcggcgagggcgccagatggctgagagctagcaaggaaaactcaggaccatgatggctcagtttcccacagctatgaatggagggccaaacatgtgggctattacctctgaagaacgtactaagcatgacaggcagtttgataacctcaaaccttcaggaggttacataacaggtgatcaagcacgtaattttttcctacaatcaggtctgccggcccctgttttagctgaaatatgggctttatcagacctaaacaaggatgggaagatggatcagcaagagttctccatagctatgaaactcatcaaactgaagcttcaaggccaacagttgcctgtggttctccctcctattatgaagcaaccccctatgttttctccattaatttctgctcgttttggaatgggaagcatgcccaatctgtccattcctcagccattgcctccagctgcacctataacatcattgtcttctgcgacttcagggaccaaccttcctcccttaatgatgcccactcccctagtgccttctgttagcacatcatcattaccaaatggaaccgccagtctcattcagcctttacccattccttattcttcttcaacattgcctcatgggtcatcttatagtctgatgatgggaggatttggaggtgctagtatacagaaagcgcagtctctgattgatttaggatctagtagctcaacttcctcgactgcttcactctcagggaactcacccaagactgggacctcagagtgggcagttcctcagcctacaagattaaaatatcggcaaaaatttaatactcttgacaaaagtatgagtggatatctctcaggttttcaagctagaaatgcccttcttcagtcaaatctttctcaaactcagctggctactatttggactctggctgacgttgatggtgatggacagctaaaagcagaagagtttattcttgcaatgcaccttactgacatggccaaagctggacagccattaccactgactttacctcctgagcttgttcctccatctttcagaggaggaaagcaaattgattccattaatggaactctgccttcatatcagaaaatgcaagaagaggagcctcagaagaaattaccagttacttttgaggacaaacggaaagccaactatgagcgagggaacatggagctggaaaagcgacgccaagccttgatggagcagcaacaaagggaggcagaacgtaaagcccagaaagaaaaggaagagtgggaacgaaaacagagagaattacaagaacaagaatggaagaaacaacttgaattagaaaaacgcttagagaagcaacgggaattggagagacaacgagaggaagaaaggagaaaagacatagaaagacgagaggcagcaaaacaggaacttgaacgacaacgtcgcttagaatgggagagaattcggcgacaggagcttctcaatcaaaagaatagagaacaagaagaaattgtcaggttaaactctaaaaagaagaatcttcatcttgagttggaagcactgaatggcaaacatcagcagatctcaggcagacttcaggatgtccgactcaaaaagcaaactcaaaagactgagctggaagttctggataagcagtgtgacttggaaattatggaaatcaagcaacttcaacaggaacttcaggaatatcagaataagcttatctatctggtacctgagaagcaattattaaatgaaagaattaaaaacatgcagttcagtaacacacctgattcaggggtcagtttacttcataaaaaatcattagaaaaggaagaattatgccaaagacttaaagaacagttagatgctcttgaaaaagaaactgcatctaagctgtcagaaatggattcttttaacaatcaactaaaggaactgagagaaacctacaacacacagcagttagcccttgaacagctttataagatcaaacgtgacaagttgaaggaaattgaaaggaaaagattagaactaatgcagaaaaagaaactagaagatgaggctgcaaggaaagcaaagcaaggaaaagaaaacttatggaaagaaaatcttagaaaggaggaagaagaaaaacaaaagcgactccaggaagaaaaaacacaagaaaaaattcaagaagaggaacggaaagctgaggagaaacaacgtaaggataaggatactttgaaagctgaggagaaaaaacgtgagacagctagtgttttggtgaattatagagcattatacccctttgaagcaaggaaccatgatgagatgagttttaattctggagatataattcaggttgatgaaaaaaccgtaggagaacctggttggctttatggtagttttcaaggaaattttggctggtttccatgcaattatgtagaaaaaatgccatcaagtgaaaatgaaaaagctgtatctccaaagaaggccttacttcctcctacagtttctttatctgctacctcaacttcctctgaaccactttcttcaaatcaaccagcatcagtgactgattatcaaaatgtatctttttcaaacctaactgtaaatacatcatggcagaaaaaatcagccttcactcgaactgtgtcccctggatctgtatcacctattcatggacagggacaagtggtagaaaacttaaaagcacaggccctttgttcctggactgcaaagaaagataaccacttgaacttctcaaaacatgacattattactgtcttggagcagcaagaaaattggtggtttggggaggtgcatggaggaagaggatggtttcccaaatcttatgtcaagatcattcctgggagtgaagtaaaacgggaagaaccagaagctttgtatgcagctgtaaataagaaacctacctcggcagcctattcagttggagaagaatatattgcactttatccatattcaagtgtggaacctggagatttgactttcacagaaggtgaagaaatattggtgacccagaaagatggagagtggtggacaggaagtattggagatagaagtggaatttttccatcaaactatgtcaaaccaaaggatcaagagagttttgggagtgctagcaagtctggagcatcaaataaaaaacctgagattgctcaggtaacttcagcatatgttgcttctggttctgaacaacttagccttgcaccaggacagttaatattaattctaaagaaaaatacaagtgggtggtggcaaggagagttacaggccagaggaaaaaagcgacagaaaggatggtttcctgccagtcatgttaaacttttgggtccaagtagtgaaagagccacacctgcctttcatcctgtatgtcaggtgattgctatgtatgactatgcagcaaataatgaagatgagctcagtttctccaagggacaactcattaatgttatgaacaaagatgatcctgattggtggcaaggagagatcaacggggtgactggtctctttccttcaaactacgttaagatgacgacagactcagatccaagtcaacagtggtgtgctgatctgcaaaccctggacacaatgcagccaattgagaggaaaagacagggctatattcatgagctgattcagaccgaagagcggtacatggctgaccttcagctcgtcgtcgaggtttttcagaaacgcatggcagagtcaggctttctcactgaaggggagatggccctgatttttgttaactggaaggagctcatcatgtccaacacaaagctgctgaaggctttgcgggtgcggaagaagaccgggggcgagaagatgccggtgcagatgattggggacatcctggccgctgagctgtcccacatgcaggcttacatcaggttctgcagctgccagcttaatggagcagctctgttacagcagaagacagatgaagacacagatttcaaagaatttttaaagaagctggcatctgacccgcggtgtaaaggaatgcccctctccagcttcctgctgaaacccatgcagaggatcacccgctacccactgctcatcagaagtattctggagaacaccccggagagccatgcagaccattcctccctaaagctggccctcgagcgggcagaggagctgtgctctcaagtgaatgagggagttcgggagaaggaaaactcggaccgactggagtggatccaggcgcacgtgcagtgtgaaggcctcgcggagcaacttattttcaactctctcaccaactgcctggggccccggaagctcttacacagtgggaaattatacaagaccaagagcaacaaggaactgcacggattcctcttcaatgacttcctgcttcttacctacatggtcaagcagtttgctgtttcctctggctctgagaaacttttcagctcgaagtccaatgctcaattcaaaatgtataaaacgcccattttcctgaatgaagtcttggtgaaactgcccacagacccttccagcgatgagcctgtcttccacatttcccacattgatcgggtctacaccctccgaacagacaacattaatgagaggaccgcctgggtgcagaagatcaaggcggcgtctgagcagtacatcgacaccgagaagaagaagcgtgagaaagcttaccaaggtttcccccattttgttatatactcctaaaagcccgctcccaaaagacttcaggcattgggcgcctgatggtgcatgtcattgaagctacagaattaaaagcctgcaaaccaaatggaaagagcaacccatactgtgaaatcagcatgggctcccagagctacaccaccaggaccatccaggacacactcaatcccaagtggaattttaactgccagttctttattaaggatctctaccaagacgtgctgtgtctcaccctgtttgacagagaccagttttcaccagatgatttcctgggtcgtactgaaattccagtggcaaaaattcgaacagaacaggaaagcaaaggccctatgacccgccgactgctgctgcatgaggtccccaccggggaggtctgggtccgttttgacctgcagctttttgagcaaaaaactctcctgtaggggttctaaaggacagcaccagcgggacagcccacaaggctggggctggagaatgagagactgcgctctcttggggctgagggagcaccatgcagcttcacccctcacaaagccatgcacgctgggggctctgttttcctgcacactaaatagctagcaatctatgcaaacacctttcccataaagaaaccaaaccccatagtacagtgccttgtcctagtgttcacatgttcagctctgtttgtttagatgccaaggtttccattttcagggctataaaaagtattacttggaaatgaggcatcagaccaccagatgttaccgctcggttgaatgtgtccaccgtggagtggtttggtgacgctgtaaccattccacgccagtgacctctgctgggtcacagccactcaggaggggaagggtcaggatgagaggctgcagcctcgacacttggcgcggcctgatactgaaatagcgtctactcgtgcactgaataaaaacagaaacttgatcattttattcctgattagattttatcactctctgctaagacaatatagtctggagtataagtgggaaagcttgatttaaatactgtgaactctaataatgtggaaaatatttttcaactttaattttctgaagtataaattatttatgtaaattcattgtttttgcatatttcttaggacatgcatctttaagctttatcattgcccatatgtacagaaagagaataaagacatatgtttatggatgga

SEQ ID NO: 362797 - DNA, 6165 bp, Homo sapiens
gcttcggacccgaccgactcggagcagaccttcagggttcaatgccccggaactcctggggcgaggagccacgcccgggcagtttcgggctccggagggtggggagtcggtgcccggcagcgggcgggccgtcagctgcccggcccggcgcctacctccccgccccccggcttcctgcggaggccgcggccgccatgttgttgtggggctgaggcggcgccggcggagccctgagcggctgtgacaggctacgcaacaggttcgcgggcggcggcctgacgaccaagccagctgcagtggcggcgacggcggcagagcagggtctccccgcgcctgcccgcgcccaggctgccggtgctgagggacgcggagtcgcgctgtgacgtgcgggaggcgcggcgagggcgccagatggctgagagctagcaaggaaaactcaggaccatgatggctcagtttcccacagctatgaatggagggccaaacatgtgggctattacctctgaagaacgtactaagcatgacaggcagtttgataacctcaaaccttcaggaggttacataacaggtgatcaagcacgtaattttttcctacaatcaggtctgccggcccctgttttagctgaaatatgggctttatcagacctaaacaaggatgggaagatggatcagcaagagttctccatagctatgaaactcatcaaactgaagcttcaaggccaacagttgcctgtggttctccctcctattatgaagcaaccccctatgttttctccattaatttctgctcgttttggaatgggaagcatgcccaatctgtccattcctcagccattgcctccagctgcacctataacatcattgtcttctgcgacttcagggaccaaccttcctcccttaatgatgcccactcccctagtgccttctgttagcacatcatcattaccaaatggaaccgccagtctcattcagcctttacccattccttattcttcttcaacattgcctcatgggtcatcttatagtctgatgatgggaggatttggaggtgctagtatacagaaagcgcagtctctgattgatttaggatctagtagctcaacttcctcgactgcttcactctcagggaactcacccaagactgggacctcagagtgggcagttcctcagcctacaagattaaaatatcggcaaaaatttaatactcttgacaaaagtatgagtggatatctctcaggttttcaagctagaaatgcccttcttcagtcaaatctttctcaaactcagctggctactatttggactctggctgacgttgatggtgatggacagctaaaagcagaagagtttattcttgcaatgcaccttactgacatggccaaagctggacagccattaccactgactttacctcctgagcttgttcctccatctttcagaggaggaaagcaaattgattccattaatggaactctgccttcatatcagaaaatgcaagaagaggagcctcagaagaaattaccagttacttttgaggacaaacggaaagccaactatgagcgagggaacatggagctggaaaagcgacgccaagccttgatggagcagcaacaaagggaggcagaacgtaaagcccagaaagaaaaggaagagtgggaacgaaaacagagagaattacaagaacaagaatggaagaaacaacttgaattagaaaaacgcttagagaagcaacgggaattggagagacaacgagaggaagaaaggagaaaagacatagaaagacgagaggcagcaaaacaggaacttgaacgacaacgtcgcttagaatgggagagaattcggcgacaggagcttctcaatcaaaagaatagagaacaagaagaaattgtcaggttaaactctaaaaagaagaatcttcatcttgagttggaagcactgaatggcaaacatcagcagatctcaggcagacttcaggatgtccgactcaaaaagcaaactcaaaagactgagctggaagttctggataagcagtgtgacttggaaattatggaaatcaagcaacttcaacaggaacttcaggaatatcagaataagcttatctatctggtacctgagaagcaattattaaatgaaagaattaaaaacatgcagttcagtaacacacctgattcaggggtcagtttacttcataaaaaatcattagaaaaggaagaattatgccaaagacttaaagaacagttagatgctcttgaaaaagaaactgcatctaagctgtcagaaatggattcttttaacaatcaactaaaggaactgagagaaacctacaacacacagcagttagcccttgaacagctttataagatcaaacgtgacaagttgaaggaaattgaaaggaaaagattagaactaatgcagaaaaagaaactagaagatgaggctgcaaggaaagcaaagcaaggaaaagaaaacttatggaaagaaaatcttagaaaggaggaagaagaaaaacaaaagcgactccaggaagaaaaaacacaagaaaaaattcaagaagaggaacggaaagctgaggagaaacaacgtaaggataaggatactttgaaagctgaggagaaaaaacgtgagacagctagtgttttggtgaattatagagcattatacccctttgaagcaaggaaccatgatgagatgagttttaattctggagatataattcaggttgatgaaaaaaccgtaggagaacctggttggctttatggtagttttcaaggaaattttggctggtttccatgcaattatgtagaaaaaatgccatcaagtgaaaatgaaaaagctgtatctccaaagaaggccttacttcctcctacagtttctttatctgctacctcaacttcctctgaaccactttcttcaaatcaaccagcatcagtgactgattatcaaaatgtatctttttcaaacctaactgtaaatacatcatggcagaaaaaatcagccttcactcgaactgtgtcccctggatctgtatcacctattcatggacagggacaagtggtagaaaacttaaaagcacaggccctttgttcctggactgcaaagaaagataaccacttgaacttctcaaaacatgacattattactgtcttggagcagcaagaaaattggtggtttggggaggtgcatggaggaagaggatggtttcccaaatcttatgtcaagatcattcctgggagtgaagtaaaacgggaagaaccagaagctttgtatgcagctgtaaataagaaacctacctcggcagcctattcagttggagaagaatatattgcactttatccatattcaagtgtggaacctggagatttgactttcacagaaggtgaagaaatattggtgacccagaaagatggagagtggtggacaggaagtattggagatagaagtggaatttttccatcaaactatgtcaaaccaaaggatcaagagagttttgggagtgctagcaagtctggagcatcaaataaaaaacctgagattgctcaggtaacttcagcatatgttgcttctggttctgaacaacttagccttgcaccaggacagttaatattaattctaaagaaaaatacaagtgggtggtggcaaggagagttacaggccagaggaaaaaagcgacagaaaggatggtttcctgccagtcatgttaaacttttgggtccaagtagtgaaagagccacacctgcctttcatcctgtatgtcaggtgattgctatgtatgactatgcagcaaataatgaagatgagctcagtttctccaagggacaactcattaatgttatgaacaaagatgatcctgattggtggcaaggagagatcaacggggtgactggtctctttccttcaaactacgttaagatgacgacagactcagatccaagtcaacagtggtgtgctgatctgcaaaccctggacacaatgcagccaattgagaggaaaagacagggctatattcatgagctgattcagaccgaagagcggtacatggctgaccttcagctcgtcgtcgaggtttttcagaaacgcatggcagagtcaggctttctcactgaaggggagatggccctgatttttgttaactggaaggagctcatcatgtccaacacaaagctgctgaaggctttgcgggtgcggaagaagaccgggggcgagaagatgccggtgcagatgattggggacatcctggccgctgagctgtcccacatgcaggcttacatcaggttctgcagctgccagcttaatggagcagctctgttacagcagaagacagatgaagacacagatttcaaagaatttttaaagaagctggcatctgacccgcggtgtaaaggaatgcccctctccagcttcctgctgaaacccatgcagaggatcacccgctacccactgctcatcagaagtattctggagaacaccccggagagccatgcagaccattcctccctaaagctggccctcgagcgggcagaggagctgtgctctcaagtgaatgagggagttcgggagaaggaaaactcggaccgactggagtggatccaggcgcacgtgcagtgtgaaggcctcgcggagcaacttattttcaactctctcaccaactgcctggggccccggaagctcttacacagtgggaaattatacaagaccaagagcaacaaggaactgcacggattcctcttcaatgacttcctgcttcttacctacatggtcaagcagtttgctgtttcctctggctctgagaaacttttcagctcgaagtccaatgctcaattcaaaatgtataaaacgcccattttcctgaatgaagtcttggtgaaactgcccacagacccttccagcgatgagcctgtcttccacatttcccacattgatcgggtctacaccctccgaacagacaacattaatgagaggaccgcctgggtgcagaagatcaaggcggcgtctgagcagtacatcgacaccgagaagaagaagcgtgagaaagcttaccaagcccgctcccaaaagacttcaggcattgggcgcctgatggtgcatgtcattgaagctacagaattaaaagcctgcaaaccaaatggaaagagcaacccatactgtgaaatcagcatgggctcccagagctacaccaccaggaccatccaggacacactcaatcccaagtggaattttaactgccagttctttattaaggatctctaccaagacgtgctgtgtctcaccctgtttgacagagaccagttttcaccagatgatttcctgggtcgtactgaaattccagtggcaaaaattcgaacagaacaggaaagcaaaggccctatgacccgccgactgctgctgcatgaggtccccaccggggaggtctgggtccgttttgacctgcagctttttgagcaagctggggctggagaatgagagactgcgctctcttggggctgagggagcaccatgcagcttcacccctcacaaagccatgcacgctgggggctctgttttcctgcacactaaatagctagcaatctatgcaaacacctttcccataaagaaaccaaaccccatagtacagtgccttgtcctagtgttcacatgttcagctctgtttgtttagatgccaaggtttccattttcagggctataaaaagtattacttggaaatgaggcatcagaccaccagatgttaccgctcggttgaatgtgtccaccgtggagtggtttggtgacgctgtaaccattccacgccagtgacctctgctgggtcacagccactcaggaggggaagggtcaggatgagaggctgcagcctcgacacttggcgcggcctgatactgaaatagcgtctactcgtgcactgaataaaaacagaaacttgatcattttattcctgattagattttatcactctctgctaagacaatatagtctggagtataagtgggaaagcttgatttaaatactgtgaactctaataatgtggaaaatatttttcaactttaattttctgaagtataaattatttatgtaaattcattgtttttgcatatttcttaggacatgcatctttaagctttatcattgcccatatgtacagaaagagaataaagacatatgtttatggatgga

SEQ ID NO: 362798 - DNA, 3960 bp, Homo sapiens
taagaggctacagtgaaagagaggtcaatcttcatttcccatagccaaaagccagtaatgtctaaaattgaaaaaattcaagaaaaagcagtataaatatgttattcagaaatataaatggtgatatagaagaaaccaggaagaatggcaggtcaggagtgaaaatcagggcataaggagccatgagataggggaggattgttttccctcattagccatatataatgaatgctatttgtctttgtaaaatattttcatgtaacttggataaaattaaaattaaaaagacaacttgccagtcactggaaatagtagctgttaatttgtagaaaatgccttagctgtttagttagatgggcttaattctgaaaatgagaatactatacaatagttttcatctctttccattgtaaatgtgtgaatttctaagcactgttaatccttctttttatttccgtaggttgatgaaaaaaccgtaggagaacctggttggctttatggtagttttcaaggaaattttggctggtttccatgcaattatgtagaaaaaatgccatcaagtgaaaatgaaaaagctgtatctccaaagaaggccttacttcctcctacagtttctttatctgctacctcaacttcctctgaaccactttcttcaaatcaaccagcatcagtgactgattatcaaaatgtatctttttcaaacctaactgtaaatacatcatggcagaaaaaatcagccttcactcgaactgtgtcccctggatctgtatcacctattcatggacagggacaagtggtagaaaacttaaaagcacaggccctttgttcctggactgcaaagaaagataaccacttgaacttctcaaaacatgacattattactgtcttggagcagcaagaaaattggtggtttggggaggtgcatggaggaagaggatggtttcccaaatcttatgtcaagatcattcctgggagtgaagtaaaacgggaagaaccagaagctttgtatgcagctgtaaataagaaacctacctcggcagcctattcagttggagaagaatatattgcactttatccatattcaagtgtggaacctggagatttgactttcacagaaggtgaagaaatattggtgacccagaaagatggagagtggtggacaggaagtattggagatagaagtggaatttttccatcaaactatgtcaaaccaaaggatcaagagagttttgggagtgctagcaagtctggagcatcaaataaaaaacctgagattgctcaggtaacttcagcatatgttgcttctggttctgaacaacttagccttgcaccaggacagttaatattaattctaaagaaaaatacaagtgggtggtggcaaggagagttacaggccagaggaaaaaagcgacagaaaggatggtttcctgccagtcatgttaaacttttgggtccaagtagtgaaagagccacacctgcctttcatcctgtatgtcaggtgattgctatgtatgactatgcagcaaataatgaagatgagctcagtttctccaagggacaactcattaatgttatgaacaaagatgatcctgattggtggcaaggagagatcaacggggtgactggtctctttccttcaaactacgttaagatgacgacagactcagatccaagtcaacagtggtgtgctgatctgcaaaccctggacacaatgcagccaattgagaggaaaagacagggctatattcatgagctgattcagaccgaagagcggtacatggctgaccttcagctcgtcgtcgaggtttttcagaaacgcatggcagagtcaggctttctcactgaaggggagatggccctgatttttgttaactggaaggagctcatcatgtccaacacaaagctgctgaaggctttgcgggtgcggaagaagaccgggggcgagaagatgccggtgcagatgattggggacatcctggccgctgagctgtcccacatgcaggcttacatcaggttctgcagctgccagcttaatggagcagctctgttacagcagaagacagatgaagacacagatttcaaagaatttttaaagaagctggcatctgacccgcggtgtaaaggaatgcccctctccagcttcctgctgaaacccatgcagaggatcacccgctacccactgctcatcagaagtattctggagaacaccccggagagccatgcagaccattcctccctaaagctggccctcgagcgggcagaggagctgtgctctcaagtgaatgagggagttcgggagaaggaaaactcggaccgactggagtggatccaggcgcacgtgcagtgtgaaggcctcgcggagcaacttattttcaactctctcaccaactgcctggggccccggaagctcttacacagtgggaaattatacaagaccaagagcaacaaggaactgcacggattcctcttcaatgacttcctgcttcttacctacatggtcaagcagtttgctgtttcctctggctctgagaaacttttcagctcgaagtccaatgctcaattcaaaatgtataaaacgcccattttcctgaatgaagtcttggtgaaactgcccacagacccttccagcgatgagcctgtcttccacatttcccacattgatcgggtctacaccctccgaacagacaacattaatgagaggaccgcctgggtgcagaagatcaaggcggcgtctgagcagtacatcgacaccgagaagaagaagcgtgagaaagcttaccaagcccgctcccaaaagacttcaggcattgggcgcctgatggtgcatgtcattgaagctacagaattaaaagcctgcaaaccaaatggaaagagcaacccatactgtgaaatcagcatgggctcccagagctacaccaccaggaccatccaggacacactcaatcccaagtggaattttaactgccagttctttattaaggatctctaccaagacgtgctgtgtctcaccctgtttgacagagaccagttttcaccagatgatttcctgggtcgtactgaaattccagtggcaaaaattcgaacagaacaggaaagcaaaggccctatgacccgccgactgctgctgcatgaggtccccaccggggaggtctgggtccgttttgacctgcagctttttgagcaaaaaactctcctgtaggggttctaaaggacagcaccagcgggacagcccacaaggctggggctggagaatgagagactgcgctctcttggggctgagggagcaccatgcagcttcacccctcacaaagccatgcacgctgggggctctgttttcctgcacactaaatagctagcaatctatgcaaacacctttcccataaagaaaccaaaccccatagtacagtgccttgtcctagtgttcacatgttcagctctgtttgtttagatgccaaggtttccattttcagggctataaaaagtattacttggaaatgaggcatcagaccaccagatgttaccgctcggttgaatgtgtccaccgtggagtggtttggtgacgctgtaaccattccacgccagtgacctctgctgggtcacagccactcaggaggggaagggtcaggatgagaggctgcagcctcgacacttggcgcggcctgatactgaaatagcgtctactcgtgcactgaataaaaacagaaacttgatcattttattcctgattagattttatcactctctgctaagacaatatagtctggagtataagtgggaaagcttgatttaaatactgtgaactctaataatgtggaaaatatttttcaactttaattttctgaagtataaattatttatgtaaattcattgtttttgcatatttcttaggacatgcatctttaagctttatcattgcccatatgtacagaaagagaataaagacatatgtttatggatgga

SEQ ID NO: 362799 - DNA, 7249 bp, Homo sapiens
  misc_feature (4621)..(4621): n is a, c, g, or t
  misc_feature (4678)..(4678): n is a, c, g, or t
  misc_feature (5029)..(5029): n is a, c, g, or t
gcttcggacccgaccgactcggagcagaccttcagggttcaatgccccggaactcctggggcgaggagccacgcccgggcagtttcgggctccggagggtggggagtcggtgcccggcagcgggcgggccgtcagctgcccggcccggcgcctacctccccgccccccggcttcctgcggaggccgcggccgccatgttgttgtggggctgaggcggcgccggcggagccctgagcggctgtgacaggctacgcaacaggttcgcgggcggcggcctgacgaccaagccagctgcagtggcggcgacggcggcagagcagggtctccccgcgcctgcccgcgcccaggctgccggtgctgagggacgcggagtcgcgctgtgacgtgcgggaggcgcggcgagggcgccagatggctgagagctagcaaggaaaactcaggaccatgatggctcagtttcccacagctatgaatggagggccaaacatgtgggctattacctctgaagaacgtactaagcatgacaggcagtttgataacctcaaaccttcaggaggttacataacaggtgatcaagcacgtaattttttcctacaatcaggtctgccggcccctgttttagctgaaatatgggctttatcagacctaaacaaggatgggaagatggatcagcaagagttctccatagctatgaaactcatcaaactgaagcttcaaggccaacagttgcctgtggttctccctcctattatgaagcaaccccctatgttttctccattaatttctgctcgttttggaatgggaagcatgcccaatctgtccattcctcagccattgcctccagctgcacctataacatcattgtcttctgcgacttcagggaccaaccttcctcccttaatgatgcccactcccctagtgccttctgttagcacatcatcattaccaaatggaaccgccagtctcattcagcctttacccattccttattcttcttcaacattgcctcatgggtcatcttatagtctgatgatgggaggatttggaggtgctagtatacagaaagcgcagtctctgattgatttaggatctagtagctcaacttcctcgactgcttcactctcagggaactcacccaagactgggacctcagagtgggcagttcctcagcctacaagattaaaatatcggcaaaaatttaatactcttgacaaaagtatgagtggatatctctcaggttttcaagctagaaatgcccttcttcagtcaaatctttctcaaactcagctggctactatttggactctggctgacgttgatggtgatggacagctaaaagcagaagagtttattcttgcaatgcaccttactgacatggccaaagctggacagccattaccactgactttacctcctgagcttgttcctccatctttcagaggaggaaagcaaattgattccattaatggaactctgccttcatatcagaaaatgcaagaagaggagcctcagaagaaattaccagttacttttgaggacaaacggaaagccaactatgagcgagggaacatggagctggaaaagcgacgccaagccttgatggagcagcaacaaagggaggcagaacgtaaagcccagaaagaaaaggaagagtgggaacgaaaacagagagaattacaagaacaagaatggaagaaacaacttgaattagaaaaacgcttagagaagcaacgggaattggagagacaacgagaggaagaaaggagaaaagacatagaaagacgagaggcagcaaaacaggaacttgaacgacaacgtcgcttagaatgggagagaattcggcgacaggagcttctcaatcaaaagaatagagaacaagaagaaattgtcaggttaaactctaaaaagaagaatcttcatcttgagttggaagcactgaatggcaaacatcagcagatctcaggcagacttcaggatgtccgactcaaaaagcaaactcaaaagactgagctggaagttctggataagcagtgtgacttggaaattatggaaatcaagcaacttcaacaggaacttcaggaatatcagaataagcttatctatctggtacctgagaagcaattattaaatgaaagaattaaaaacatgcagttcagtaacacacctgattcaggggtcagtttacttcataaaaaatcattagaaaaggaagaattatgccaaagacttaaagaacagttagatgctcttgaaaaagaaactgcatctaagctgtcagaaatggattcttttaacaatcaactaaaggaactgagagaaacctacaacacacagcagttagcccttgaacagctttataagatcaaacgtgacaagttgaaggaaattgaaaggaaaagattagaactaatgcagaaaaagaaactagaagatgaggctgcaaggaaagcaaagcaaggaaaagaaaacttatggaaagaaaatcttagaaaggaggaagaagaaaaacaaaagcgactccaggaagaaaaaacacaagaaaaaattcaagaagaggaacggaaagctgaggagaaacaacgtaaggataaggatactttgaaagctgaggagaaaaaacgtgagacagctagtgttttggtgaattatagagcattatacccctttgaagcaaggaaccatgatgagatgagttttaattctggagatataattcaggttgatgaaaaaaccgtaggagaacctggttggctttatggtagttttcaaggaaattttggctggtttccatgcaattatgtagaaaaaatgccatcaagtgaaaatgaaaaagctgtatctccaaagaaggccttacttcctcctacagtttctttatctgctacctcaacttcctctgaaccactttcttcaaatcaaccagcatcagtgactgattatcaaaatgtatctttttcaaacctaactgtaaatacatcatggcagaaaaaatcagccttcactcgaactgtgtcccctggatctgtatcacctattcatggacagggacaagtggtagaaaacttaaaagcacaggccctttgttcctggactgcaaagaaagataaccacttgaacttctcaaaacatgacattattactgtcttggagcagcaagaaaattggtggtttggggaggtgcatggaggaagaggatggtttcccaaatcttatgtcaagatcattcctgggagtgaagtaaaacgggaagaaccagaagctttgtatgcagctgtaaataagaaacctacctcggcagcctattcagttggagaagaatatattgcactttatccatattcaagtgtggaacctggagatttgactttcacagaaggtgaagaaatattggtgacccagaaagatggagagtggtggacaggaagtattggagatagaagtggaatttttccatcaaactatgtcaaaccaaaggatcaagagagttttgggagtgctagcaagtctggagcatcaaataaaaaacctgagattgctcaggtaacttcagcatatgttgcttctggttctgaacaacttagccttgcaccaggacagttaatattaattctaaagaaaaatacaagtgggtggtggcaaggagagttacaggccagaggaaaaaagcgacagaaaggatggtttcctgccagtcatgttaaacttttgggtccaagtagtgaaagagccacacctgcctttcatcctgtatgtcaggtgattgctatgtatgactatgcagcaaataatgaagatgagctcagtttctccaagggacaactcattaatgttatgaacaaagatgatcctgattggtggcaaggagagatcaacggggtgactggtctctttccttcaaactacgttaagatgacgacagactcagatccaagtcaacagtgacccaatgttgtcttccagttgtgaaagcaccccagagacccactatccaagtttcactctagcgtggaggcagggcaggcagccctgatcaaatatctcctacacaattcgtttacttcgtttgaatgttagagccacttgtgattatttttttgtgtttctaacttacagtttaaatttatttgtaaaaagttaaaggatagtgggtctttgtgtggctttccctgctgttcactctggcatctttagcatttttcttcttttttaatttgataattgtaggtcattagcatgcatattgagtttgcccttatgtggtgggagttcaaacacacaaagacccactatttgcacaaactattcttactggtttggaataggctgccatgcttttttaatgttattgcaacatgtgtattcatttacagaattcagataaaatttgcttatgttctgctattatgtttgatctaatcctaatcacagtgagctcttaattagctcaatatgtggtttgccctcaagtgtgcactgtttattactttgtaatatgccactatgagtactgacatttagatatgtttaaaggccaagaactggaaacagccatgccctgttttctgtgtatttgggatgggaataacaacattttgggggagctttttaaatctcagagaanaggaaagtggcctgctctggcaggtatgtgcagtgtttcatttgttccagtcccaanaatgagcactgtcctatggtagttcgcttaggatctttatgtgctctgggctaatgaaggtactgcatcatgtgctgcagcgtgtgtattctttttcgatgacctataaagggattatttttgaggaatgaaaggctcccatcattgactgtgagatgggaaaaacctttcctagcttagagcatttatatcttaatccattttaaagtcagagttcattgttacctgttttaatcaggtgactacatgtcccagtatacaaaggggcactggttgacattcttcttaatgtatttagtaaatatcataagaaatcctttaagagtttaaatgtccccaaaacagacatgngggctctagtcaagaatgaattagagtgaaggaaagctgtgtaacacctggcattcctctgtgttcatggagcttctttgaggctctaagattgattttaccatcagacttctctaatacctgttcttcaaccatattggctactttgacataagaatttacttcttttcctggaatggaaaacactttaaaaaataataacaaacattattataaactaatatatgtgagagtacttagttgatacaaaaaggagttttagtagacagtattatactatatttgaaaatcaaggagaattttatgcaacttaaaatgtttacaaactgcagtgcaatctactgtttgtgaatgtcaaagtatcaggaaaagtgtatatacaatcacagagtcatatttcctcacaaagttatttacaaagagtgaaatatgtttttgtacctctcagtttcagttagaggcatattttgtgcaatatttatgttaatgtgcctatacattatgaatgaattatttcagtcatacattgcctaaatcataactttatgatgcttgggaaagaatcaacagttaaaacttcataaagttctaatgtctgtgttccaaaatacatcacattattaggatgtagggagataagtatgtgtgctccctagggtggcaatttctagttactagaccacctctatttttagcatttggcatcctcatgatacttttataaatatgacattaataggaaagcaataatttcattttacagatagaataacagatttgcctgcattcactgaaagagtgcaaagactgggtccttgtgaattcaactgactctcccaaattgtattaattacctgttcttgccttttattttctgaacttgctgcttttgcattcttttgagttcaaagacagttactttaaatccatttttaaaccctcggggtagaaatcataccactgttaatcagccacattatttggtctaaggttttttctttataattctgaaactgagtttatctaatacattgatgaattatttcaaacgtatttttatagttcaaatcagttcacttttacactgataaatataaattactaggaatgaccttcagacagcgtttagcatctgtaaccaacctgaaaataatatgttcatcaggtacctatggattaaatcatatactggcgtatttaagctgaatgtcagtctggaaaataaatttactatattaactgaaataccactctttgtgtaggtattttgtcatgtatttaagaaaaagataaaaagaatggaaatcatatgacataataacttaagtctttcttaaaagtgcatgctgtcttttgcaatacctcattcagccaagtatttgttctcttcctcattcagtataagtcagctttcaatttgcttagaaggcaacattagaaggttagagttcatcagaaacatagaattttaaaatgtgagttcaactgaataaatttgaatttctgtaggaggtaaagaatcaaaatacctgtttaaagattgcaattgcaatgtataataatcacttttaaattatttgattaaaccttttaggttttccagaaatgaaaaaaatcagttctaaaaccaaagctgatttttagaaaatttgagaatgtaaatcagccctatccataatatagtttctctaaaactttatcttaaagagtcattttaaaataatataactattaaaaatgtaactgatatttaaatgttttgaaataaaacattttaaaatataaatactgtagtttaaaagaaagaaactgggggaaagaaaagtagagaaagaaataccaattccagtccaaagctttatttgccaggttttcttagaatgacttttaccagtttatgaattcttgtaaacagaatctataatggaaatactgaaagacttttgcctaaagtggcattattgaatgctgctgtgatgctactgtaatgtaataaattattaaattgttgcaaagtgctgtttttgccttaaaattttattttgtgtgtcttgaaaattatagtattaaaggtattgagattgtgcaaatgctgggcacgcttggcatgagataatctgtttttatttttacaaaattgtaatataactatgcaagtgtgtttattaaaagaacacaaactataaaaaaaagtcgacgcggccgcgaattccagctgac

SEQ ID NO: 362800 - DNA, 5185 bp, Homo sapiens
gcttcggacccgaccgactcggagcagaccttcagggttcaatgccccggaactcctggggcgaggagccacgcccgggcagtttcgggctccggagggtggggagtcggtgcccggcagcgggcgggccgtcagctgcccggcccggcgcctacctccccgccccccggcttcctgcggaggccgcggccgccatgttgttgtggggctgaggcggcgccggcggagccctgagcggctgtgacaggctacgcaacaggttcgcgggcggcggcctgacgaccaagccagctgcagtggcggcgacggcggcagagcagggtctccccgcgcctgcccgcgcccaggctgccggtgctgagggacgcggagtcgcgctgtgacgtgcgggaggcgcggcgagggcgccagatggctgagagctagcaaggaaaactcaggaccatgatggctcagtttcccacagctatgaatggagggccaaacatgtgggctattacctctgaagaacgtactaagcatgacaggcagtttgataacctcaaaccttcaggaggttacataacaggtgatcaagcacgtaattttttcctacaatcaggtctgccggcccctgttttagctgaaatatgggctttatcagacctaaacaaggatgggaagatggatcagcaagagttctccatagctatgaaactcatcaaactgaagcttcaaggccaacagttgcctgtggttctccctcctattatgaagcaaccccctatgttttctccattaatttctgctcgttttggaatgggaagcatgcccaatctgtccattcctcagccattgcctccagctgcacctataacatcattgtcttctgcgacttcagggaccaaccttcctcccttaatgatgcccactcccctagtgccttctgttagcacatcatcattaccaaatggaaccgccagtctcattcagcctttacccattccttattcttcttcaacattgcctcatgggtcatcttatagtctgatgatgggaggatttggaggtgctagtatacagaaagcgcagtctctgattgatttaggatctagtagctcaacttcctcgactgcttcactctcagggaactcacccaagactgggacctcagagtgggcagttcctcagcctacaagattaaaatatcggcaaaaatttaatactcttgacaaaagtatgagtggatatctctcaggttttcaagctagaaatgcccttcttcagtcaaatctttctcaaactcagctggctactatttggactctggctgacgttgatggtgatggacagctaaaagcagaagagtttattcttgcaatgcaccttactgacatggccaaagctggacagccattaccactgactttacctcctgagcttgttcctccatctttcagaggaggaaagcaaattgattccattaatggaactctgccttcatatcagaaaatgcaagaagaggagcctcagaagaaattaccagttacttttgaggacaaacggaaagccaactatgagcgagggaacatggagctggaaaagcgacgccaagccttgatggagcagcaacaaagggaggcagaacgtaaagcccagaaagaaaaggaagagtgggaacgaaaacagagagaattacaagaacaagaatggaagaaacaacttgaattagaaaaacgcttagagaagcaacgggaattggagagacaacgagaggaagaaaggagaaaagacatagaaagacgagaggcagcaaaacaggaacttgaacgacaacgtcgcttagaatgggagagaattcggcgacaggagcttctcaatcaaaagaatagagaacaagaagaaattgtcaggttaaactctaaaaagaagaatcttcatcttgagttggaagcactgaatggcaaacatcagcagatctcaggcagacttcaggatgtccgactcaaaaagcaaactcaaaagactgagctggaagttctggataagcagtgtgacttggaaattatggaaatcaagcaacttcaacaggaacttcaggaatatcagaataagcttatctatctggtacctgagaagcaattattaaatgaaagaattaaaaacatgcagttcagtaacacacctgattcaggggtcagtttacttcataaaaaatcattagaaaaggaagaattatgccaaagacttaaagaacagttagatgctcttgaaaaagaaactgcatctaagctgtcagaaatggattcttttaacaatcaactaaaggaactgagagaaacctacaacacacagcagttagcccttgaacagctttataagatcaaacgtgacaagttgaaggaaattgaaaggaaaagattagaactaatgcagaaaaagaaactagaagatgaggctgcaaggaaagcaaagcaaggaaaagaaaacttatggaaagaaaatcttagaaaggaggaagaagaaaaacaaaagcgactccaggaagaaaaaacacaagaaaaaattcaagaagaggaacggaaagctgaggagaaacaacgtaaggataaggatactttgaaagctgaggagaaaaaacgtgagacagctagtgttttggtgaattatagagcattatacccctttgaagcaaggaaccatgatgagatgagttttaattctggagatataattcaggttgatgaaaaaaccgtaggagaacctggttggctttatggtagttttcaaggaaattttggctggtttccatgcaattatgtagaaaaaatgccatcaagtgaaaatgaaaaagctgtatctccaaagaaggccttacttcctcctacagtttctttatctgctacctcaacttcctctgaaccactttcttcaaatcaaccagcatcagtgactgattatcaaaatgtatctttttcaaacctaactgtaaatacatcatggcagaaaaaatcagccttcactcgaactgtgtcccctggatctgtatcacctattcatggacagggacaagtggtagaaaacttaaaagcacaggccctttgttcctggactgcaaagaaagataaccacttgaacttctcaaaacatgacattattactgtcttggagcagcaagaaaattggtggtttggggaggtgcatggaggaagaggatggtttcccaaatcttatgtcaagatcattcctgggagtgaagtaaaacgggaagaaccagaagctttgtatgcagctgtaaataagaaacctacctcggcagcctattcagttggagaagaatatattgcactttatccatattcaagtgtggaacctggagatttgactttcacagaaggtgaagaaatattggtgacccagaaagatggagagtggtggacaggaagtattggagatagaagtggaatttttccatcaaactatgtcaaaccaaaggatcaagagagttttgggagtgctagcaagtctggagcatcaaataaaaaacctgagattgctcaggtaacttcagcatatgttgcttctggttctgaacaacttagccttgcaccaggacagttaatattaattctaaagaaaaatacaagtgggtggtggcaaggagagttacaggccagaggaaaaaagcgacagaaaggatggtttcctgccagtcatgttaaacttttgggtccaagtagtgaaagagccacacctgcctttcatcctgtatgtcaggtgattgctatgtatgactatgcagcaaataatgaagatgagctcagtttctccaagggacaactcattaatgttatgaacaaagatgatcctgattggtggcaaggagagatcaacggggtgactggtctctttccttcaaactacgttaagatgacgacagactcagatccaagtcaacagtggtgtgctgatctgcaaaccctggacacaatgcagccaattgagaggaaaagacagggctatattcatgagctgattcagaccgaagagcggtacatggctgaccttcagctcgtcgtcgaggtttttcagaaacgcatggcagagtcaggctttctcactgaaggggagatggccctgatttttgttaactggaaggagctcatcatgtccaacacaaagctgctgaaggctttgcgggtgcggaagaagaccgggggcgagaagatgccggtgcagatgattggggacatcctggccgctgagctgtcccacatgcaggcttacatcaggttctgcagctgccagcttaatggagcagctctgttacagcagaagacagatgaagacacagatttcaaagaatttttaaagaagctggcatctgacccgcggtgtaaaggaatgcccctctccagcttcctgctgaaacccatgcagaggatcacccgctacccactgctcatcagaagtattctggagaacaccccggagagccatgcagaccattcctccctaaagctggccctcgagcgggcagaggagctgtgctctcaagtgaatgagggagttcgggagaaggaaaactcggaccgactggagtggatccaggcgcacgtgcagtgtgaaggcctcgcggagcaacttattttcaactctctcaccaactgcctggggccccggaagctcttacacagtgggaaattatacaagaccaagagcaacaaggaactgcacggattcctcttcaatgacttcctgcttcttacctacatggtcaagcagtttgctgtttcctctggctctgagaaacttttcagctcgaagtccaatgctcaattcaaaatgtataaaacgcccattttcctgaatgaagtcttggtgaaactgcccacagacccttccagcgatgagcctgtcttccacatttcccacattgatcgggtctacaccctccgaacagacaacattaatgagaggtcagtcctgaccatgtgtggcctgccttgaactctgggagaaggcctggacgtctccctctgccataaacccatctccagccgtgcttaagccccactaattctgtatcctgaacctctcttaacacatcccctctgctccagtcccatggtaggccttggtcactgcagctgcctcctaacatgcttcccggcttctagtctctccccacaccactcagcagcct

SEQ ID NO: 362801 - DNA, 3536 bp, Homo sapiens
gcttcggacccgaccgactcggagcagaccttcagggttcaatgccccggaactcctggggcgaggagccacgcccgggcagtttcgggctccggagggtggggagtcggtgcccggcagcgggcgggccgtcagctgcccggcccggcgcctacctccccgccccccggcttcctgcggaggccgcggccgccatgttgttgtggggctgaggcggcgccggcggagccctgagcggctgtgacaggctacgcaacaggttcgcgggcggcggcctgacgaccaagccagctgcagtggcggcgacggcggcagagcagggtctccccgcgcctgcccgcgcccaggctgccggtgctgagggacgcggagtcgcgctgtgacgtgcgggaggcgcggcgagggcgccagatggctgagagctagcaaggaaaactcaggaccatgatggctcagtttcccacagctatgaatggagggccaaacatgtgggctattacctctgaagaacgtactaagcatgacaggcagtttgataacctcaaaccttcaggaggttacataacaggtgatcaagcacgtaattttttcctacaatcaggtctgccggcccctgttttagctgaaatatgggctttatcagacctaaacaaggatgggaagatggatcagcaagagttctccatagctatgaaactcatcaaactgaagcttcaaggccaacagttgcctgtggttctccctcctattatgaagcaaccccctatgttttctccattaatttctgctcgttttggaatgggaagcatgcccaatctgtccattcctcagccattgcctccagctgcacctataacatcattgtcttctgcgacttcagggaccaaccttcctcccttaatgatgcccactcccctagtgccttctgttagcacatcatcattaccaaatggaaccgccagtctcattcagcctttacccattccttattcttcttcaacattgcctcatgggtcatcttatagtctgatgatgggaggatttggaggtgctagtatacagaaagcgcagtctctgattgatttaggatctagtagctcaacttcctcgactgcttcactctcagggaactcacccaagactgggacctcagagtgggcagttcctcagcctacaagattaaaatatcggcaaaaatttaatactcttgacaaaagtatgagtggatatctctcaggttttcaagctagaaatgcccttcttcagtcaaatctttctcaaactcagctggctactatttggactctggctgacgttgatggtgatggacagctaaaagcagaagagtttattcttgcaatgcaccttactgacatggccaaagctggacagccattaccactgactttacctcctgagcttgttcctccatctttcagaggaggaaagcaaattgattccattaatggaactctgccttcatatcagaaaatgcaagaagaggagcctcagaagaaattaccagttacttttgaggacaaacggaaagccaactatgagcgagggaacatggagctggaaaagcgacgccaagccttgatggagcagcaacaaagggaggcagaacgtaaagcccagaaagaaaaggaagagtgggaacgaaaacagagagaattacaagaacaagaatggaagaaacaacttgaattagaaaaacgcttagagaagcaacgggaattggagagacaacgagaggaagaaaggagaaaagacatagaaagacgagaggcagcaaaacaggaacttgaacgacaacgtcgcttagaatgggagagaattcggcgacaggagcttctcaatcaaaagaatagagaacaagaagaaattgtcaggttaaactctaaaaagaagaatcttcatcttgagttggaagcactgaatggcaaacatcagcagatctcaggcagacttcaggatgtccgactcaaaaagcaaactcaaaagactgagctggaagttctggataagcagtgtgacttggaaattatggaaatcaagcaacttcaacaggaacttcaggaatatcagaataagcttatctatctggtacctgagaagcaattattaaatgaaagaattaaaaacatgcagttcagtaacacacctgattcaggggtcagtttacttcataaaaaatcattagaaaaggaagaattatgccaaagacttaaagaacagttagatgctcttgaaaaagaaactgcatctaagctgtcagaaatggattcttttaacaatcaactaaaggaactgagagaaacctacaacacacagcagttagcccttgaacagctttataagatcaaacgtgacaagttgaaggaaattgaaaggaaaagattagaactaatgcagaaaaagaaactagaagatgaggctgcaaggaaagcaaagcaaggaaaagaaaacttatggaaagaaaatcttagaaaggaggaagaagaaaaacaaaagcgactccaggaagaaaaaacacaagaaaaaattcaagaagaggaacggaaagctgaggagaaacaacgtaaggataaggatactttgaaagctgaggagaaaaaacgtgagacagctagtgttttggtgaattatagagcattatacccctttgaagcaaggaaccatgatgagatgagttttaattctggagatataattcaggttgatgaaaaaaccgtaggagaacctggttggctttatggtagttttcaaggaaattttggctggtttccatgcaattatgtagaaaaaatgccatcaagtgaaaatgaaaaagctgtatctccaaagaaggccttacttcctcctacagtttctttatctgctacctcaacttcctctgaaccactttcttcaaatcaaccagcatcagtgactgattatcaaaatgtatctttttcaaacctaactgtaaatacatcatggcagaaaaaatcagccttcactcgaactgtgtcccctggatctgtatcacctattcatggacagggacaagtggtagaaaacttaaaagcacaggccctttgttcctggactgcaaagaaagataaccacttgaacttctcaaaacatgacattattactgtcttggagcagcaagaaaattggtggtttggggaggtgcatggaggaagaggatggtttcccaaatcttatgtcaagatcattcctgggagtgaagtaaaacgggaagaaccagaagctttgtatgcagctgtaaataagaaacctacctcggcagcctattcagttggagaagaatatattgcactttatccatattcaagtgtggaacctggagatttgactttcacagaaggtgaagaaatattggtgacccagaaagatggagagtggtggacaggaagtattggagatagaagtggaatttttccatcaaactatgtcaaaccaaaggatcaagagagttttgggagtgctagcaagtctggagcaacatatgctgaagttacctgagc

SEQ ID NO: 362802 - DNA, 995 bp, Homo sapiens
gcttcggacccgaccgactcggagcagaccttcagggttcaatgccccggaactcctggggcgaggagccacgcccgggcagtttcgggctccggagggtggggagtcggtgcccggcagcgggcgggccgtcagctgcccggcccggcgcctacctccccgccccccggcttcctgcggaggccgcggccgccatgttgttgtggggctgaggcggcgccggcggagccctgagcggctgtgacaggctacgcaacaggttcgcgggcggcggcctgacgaccaagccagctgcagtggcggcgacggcggcagagcagggtctccccgcgcctgcccgcgcccaggctgccggtgctgagggacgcggagtcgcgctgtgacgtgcgggaggcgcggcgagggcgccagatggctgagagctagcaaggaaaactcaggaccatgatggctcagtttcccacagctatgaatggagggccaaacatgtgggctattacctctgaagaacgtactaagcatgacaggcagtttgataacctcaaaccttcaggaggttacataacaggtgatcaagcacgtaattttttcctacaatcaggtctgccggcccctgttttagctgaaatatggtaaagtgttttgtagatgaacctaattttctgatagtattttgtttttttgtaatatagtgttaacataaaattgtttttagttgcattctattggttattaagaatatttctgccagcactttgggagtctgaggtaggaggattgcttgaggccaggctgggcaacatagtgagaaccctgtctctacagaaaattaaaaaaaaaattagctgggtgtggtggccacacctctagtcccagctactcagggaggccaagatggaaggattgcttgagcccaggaattcagtgctgcagtgaactatgattgtgtcactgcaccctagcctggatgacagaatgagactctctttagaaaa

SEQ ID NO: 362803 - DNA, 257 bp, Homo sapiens
aaaaaaaaaaaattctgtacgtagtttaattggctttttatctgccttatcttacagtgtgggaatatggatgactctgttcttcagtgccttttgtctctgctaagctgtctcaacaacctcttcctcttacttaaggttattttctaatatctagcttcttttctttgagttactttgctgttttatttttttaaaactagactattctttgcctttatctgagtatctttgtttgaaataacatatacaatata

SEQ ID NO: 362804 - DNA, 266 bp, Homo sapiens
ttgttgtggggctgaggcggcgccggcggagccctgagcggctgtgacaggctacgcaacaggttcgcgggcggcggcctgacgaccaagccagctgcagtggcggcgacggcggcagagcagggtctccccgcgcctgcccgcgcccaggctgccggtgctgagggacgcggagtcgcgctgtgacgtgcgggaggcgcggcgagggcgccaggtgggtgaagccgctagcggggctgcagcaaggcgcggggcaggtgcgggcg

SEQ ID NO: 362805 - DNA, 608 bp, Homo sapiens
gatccttgttgtacctacccagctttttatagatgaatcacctgtttgtagttcttgtaatagtcaatgaaagctagttaaattatagattaccatttgtgtttctttggcccttttaagtattatttttcattttgttacataattagaactttttttaagatagagaattttaacagttcaaatttgtttagttgatgttgcatgttgttactagtcaaattttatctcacccacctaatttgcattatgttcattttattcctcattttctttttttaggacccaatgttgtcttccagttgtgaaagcaccccagagacccactatccaagtttcactctagcgtggaggcagggcaggcagccctgatcaaatatctcctacacaattcgtttacttcgtttgaatgttagagccacttgtgattatttttttgtgtttctaacttacagtttaaatttatttgtaaaaagttaaaggatagtgggtctttgtgtggctttccctgctgttcactctggcatctttagcatttttcttcttttttaatttgataattgtaggtcattagcatgcatattgagtttgcccttatgtggtgggag

SEQ ID NO: 362806 - DNA, 6218 bp, Homo sapiens
gcttcggacccgaccgactcggagcagaccttcagggttcaatgccccggaactcctggggcgaggagccacgcccgggcagtttcgggctccggagggtggggagtcggtgcccggcagcgggcgggccgtcagctgcccggcccggcgcctacctccccgccccccggcttcctgcggaggccgcggccgccatgttgttgtggggctgaggcggcgccggcggagccctgagcggctgtgacaggctacgcaacaggttcgcgggcggcggcctgacgaccaagccagctgcagtggcggcgacggcggcagagcagggtctccccgcgcctgcccgcgcccaggctgccggtgctgagggacgcggagtcgcgctgtgacgtgcgggaggcgcggcgagggcgccagatggctgagagctagcaaggaaaactcaggaccatgatggctcagtttcccacagctatgaatggagggccaaacatgtgggctattacctctgaagaacgtactaagcatgacaggcagtttgataacctcaaaccttcaggaggttacataacaggtgatcaagcacgtaattttttcctacaatcaggtctgccggcccctgttttagctgaaatatgggctttatcagacctaaacaaggatgggaagatggatcagcaagagttctccatagctatgaaactcatcaaactgaagcttcaaggccaacagttgcctgtggttctccctcctattatgaagcaaccccctatgttttctccattaatttctgctcgttttggaatgggaagcatgcccaatctgtccattcctcagccattgcctccagctgcacctataacatcattgtcttctgcgacttcagggaccaaccttcctcccttaatgatgcccactcccctagtgccttctgttagcacatcatcattaccaaatggaaccgccagtctcattcagcctttacccattccttattcttcttcaacattgcctcatgggtcatcttatagtctgatgatgggaggatttggaggtgctagtatacagaaagcgcagtctctgattgatttaggatctagtagctcaacttcctcgactgcttcactctcagggaactcacccaagactgggacctcagagtgggcagttcctcagcctacaagattaaaatatcggcaaaaatttaatactcttgacaaaagtatgagtggatatctctcaggttttcaagctagaaatgcccttcttcagtcaaatctttctcaaactcagctggctactatttggactctggctgacgttgatggtgatggacagctaaaagcagaagagtttattcttgcaatgcaccttactgacatggccaaagctggacagccattaccactgactttacctcctgagcttgttcctccatctttcagaggaggaaagcaaattgattccattaatggaactctgccttcatatcagaaaatgcaagaagaggagcctcagaagaaattaccagttacttttgaggacaaacggaaagccaactatgagcgagggaacatggagctggaaaagcgacgccaagccttgatggagcagcaacaaagggaggcagaacgtaaagcccagaaagaaaaggaagagtgggaacgaaaacagagagaattacaagaacaagaatggaagaaacaacttgaattagaaaaacgcttagagaagcaacgggaattggagagacaacgagaggaagaaaggagaaaagacatagaaagacgagaggcagcaaaacaggaacttgaacgacaacgtcgcttagaatgggagagaattcggcgacaggagcttctcaatcaaaagaatagagaacaagaagaaattgtcaggttaaactctaaaaagaagaatcttcatcttgagttggaagcactgaatggcaaacatcagcagatctcaggcagacttcaggatgtccgactcaaaaagcaaactcaaaagactgagctggaagttctggataagcagtgtgacttggaaattatggaaatcaagcaacttcaacaggaacttcaggaatatcagaataagcttatctatctggtacctgagaagcaattattaaatgaaagaattaaaaacatgcagttcagtaacacacctgattcaggggtcagtttacttcataaaaaatcattagaaaaggaagaattatgccaaagacttaaagaacagttagatgctcttgaaaaagaaactgcatctaagctgtcagaaatggattcttttaacaatcaactaaaggaactgagagaaacctacaacacacagcagttagcccttgaacagctttataagatcaaacgtgacaagttgaaggaaattgaaaggaaaagattagaactaatgcagaaaaagaaactagaagatgaggctgcaaggaaagcaaagcaaggaaaagaaaacttatggaaagaaaatcttagaaaggaggaagaagaaaaacaaaagcgactccaggaagaaaaaacacaagaaaaaattcaagaagaggaacggaaagctgaggagaaacaacgtaaggataaggatactttgaaagctgaggagaaaaaacgtgagacagctagtgttttggtgaattatagagcattatacccctttgaagcaaggaaccatgatgagatgagttttaattctggagatataattcaggttgatgaaaaaaccgtaggagaacctggttggctttatggtagttttcaaggaaattttggctggtttccatgcaattatgtagaaaaaatgccatcaagtgaaaatgaaaaagctgtatctccaaagaaggccttacttcctcctacagtttctttatctgctacctcaacttcctctgaaccactttcttcaaatcaaccagcatcagtgactgattatcaaaatgtatctttttcaaacctaactgtaaatacatcatggcagaaaaaatcagccttcactcgaactgtgtcccctggatctgtatcacctattcatggacagggacaagtggtagaaaacttaaaagcacaggccctttgttcctggactgcaaagaaagataaccacttgaacttctcaaaacatgacattattactgtcttggagcagcaagaaaattggtggtttggggaggtgcatggaggaagaggatggtttcccaaatcttatgtcaagatcattcctgggagtgaagtaaaacgggaagaaccagaagctttgtatgcagctgtaaataagaaacctacctcggcagcctattcagttggagaagaatatattgcactttatccatattcaagtgtggaacctggagatttgactttcacagaaggtgaagaaatattggtgacccagaaagatggagagtggtggacaggaagtattggagatagaagtggaatttttccatcaaactatgtcaaaccaaaggatcaagagagttttgggagtgctagcaagtctggagcatcaaataaaaaacctgagattgctcaggtaacttcagcatatgttgcttctggttctgaacaacttagccttgcaccaggacagttaatattaattctaaagaaaaatacaagtgggtggtggcaaggagagttacaggccagaggaaaaaagcgacagaaaggatggtttcctgccagtcatgttaaacttttgggtccaagtagtgaaagagccacacctgcctttcatcctgtatgtcaggtgattgctatgtatgactatgcagcaaataatgaagatgagctcagtttctccaagggacaactcattaatgttatgaacaaagatgatcctgattggtggcaaggagagatcaacggggtgactggtctctttccttcaaactacgttaagatgacgacagactcagatccaagtcaacagtggtgtgctgatctgcaaaccctggacacaatgcagccaattgagaggaaaagacagggctatattcatgagctgattcagaccgaagagcggtacatggctgaccttcagctcgtcgtcgaggtttttcagaaacgcatggcagagtcaggctttctcactgaaggggagatggccctgatttttgttaactggaaggagctcatcatgtccaacacaaagctgctgaaggctttgcgggtgcggaagaagaccgggggcgagaagatgccggtgcagatgattggggacatcctggccgctgagctgtcccacatgcaggcttacatcaggttctgcagctgccagcttaatggagcagctctgttacagcagaagacagatgaagacacagatttcaaagaatttttaaagaagctggcatctgacccgcggtgtaaaggaatgcccctctccagcttcctgctgaaacccatgcagaggatcacccgctacccactgctcatcagaagtattctggagaacaccccggagagccatgcagaccattcctccctaaagctggccctcgagcgggcagaggagctgtgctctcaagtgaatgagggagttcgggagaaggaaaactcggaccgactggagtggatccaggcgcacgtgcagtgtgaaggcctcgcggagcaacttattttcaactctctcaccaactgcctggggccccggaagctcttacacagtgggaaattatacaagaccaagagcaacaaggaactgcacggattcctcttcaatgacttcctgcttcttacctacatggtcaagcagtttgctgtttcctctggctctgagaaacttttcagctcgaagtccaatgctcaattcaaaatgtataaaacgcccattttcctgaatgaagtcttggtgaaactgcccacagacccttccagcgatgagcctgtcttccacatttcccacattgatcgggtctacaccctccgaacagacaacattaatgagaggaccgcctgggtgcagaagatcaaggcggcgtctgagcagtacatcgacaccgagaagaagaagcgtgagaaagcttaccaagcccgctcccaaaagacttcaggcattgggcgcctgatggtgcatgtcattgaagctacagaattaaaagcctgcaaaccaaatggaaagagcaacccatactgtgaaatcagcatgggctcccagagctacaccaccaggaccatccaggacacactcaatcccaagtggaattttaactgccagttctttattaaggatctctaccaagacgtgctgtgtctcaccctgtttgacagagaccagttttcaccagatgatttcctgggtcgtactgaaattccagtggcaaaaattcgaacagaacaggaaagcaaaggccctatgacccgccgactgctgctgcatgaggtccccaccggggaggtctgggtccgttttgacctgcagctttttgagcaaaaaactctcctgtaggggttctaaaggacagcaccagcgggacagcccacaaggctggggctggagaatgagagactgcgctctcttggggctgagggagcaccatgcagcttcacccctcacaaagccatgcacgctgggggctctgttttcctgcacactaaatagctagcaatctatgcaaacacctttcccataaagaaaccaaaccccatagtacagtgccttgtcctagtgttcacatgttcagctctgtttgtttagatgccaaggtttccattttcagggctataaaaagtattacttggaaatgaggcatcagaccaccagatgttaccgctcggttgaatgtgtccaccgtggagtggtttggtgacgctgtaaccattccacgccagtgacctctgctgggtcacagccactcaggaggggaagggtcaggatgagaggctgcagcctcgacacttggcgcggcctgatactgaaatagcgtctactcgtgcactgaataaaaacagaaacttgatcattttattcctgattagattttatcactctctgctaagacaatatagtctggagtataagtgggaaagcttgatttaaatactgtgaactctaataatgtggaaaatatttttcaactttaattttctgaagtataaattatttatgtaaattcattgtttttgcatatttcttaggacatgcatctttaagctttatcattgcccatatgtacagaaagagaataaagacatatgtttatggatgga

SEQ ID NO: 362807 - DNA, 4779 bp, Homo sapiens
gcttcggacccgaccgactcggagcagaccttcagggttcaatgccccggaactcctggggcgaggagccacgcccgggcagtttcgggctccggagggtggggagtcggtgcccggcagcgggcgggccgtcagctgcccggcccggcgcctacctccccgccccccggcttcctgcggaggccgcggccgccatgttgttgtggggctgaggcggcgccggcggagccctgagcggctgtgacaggctacgcaacaggttcgcgggcggcggcctgacgaccaagccagctgcagtggcggcgacggcggcagagcagggtctccccgcgcctgcccgcgcccaggctgccggtgctgagggacgcggagtcgcgctgtgacgtgcgggaggcgcggcgagggcgccagatggctgagagctagcaaggaaaactcaggaccatgatggctcagtttcccacagctatgaatggagggccaaacatgtgggctattacctctgaagaacgtactaagcatgacaggcagtttgataacctcaaaccttcaggaggttacataacaggtgatcaagcacgtaattttttcctacaatcaggtctgccggcccctgttttagctgaaatatgggctttatcagacctaaacaaggatgggaagatggatcagcaagagttctccatagctatgaaactcatcaaactgaagcttcaaggccaacagttgcctgtggttctccctcctattatgaagcaaccccctatgttttctccattaatttctgctcgttttggaatgggaagcatgcccaatctgtccattcctcagccattgcctccagctgcacctataacatcattgtcttctgcgacttcagggaccaaccttcctcccttaatgatgcccactcccctagtgccttctgttagcacatcatcattaccaaatggaaccgccagtctcattcagcctttacccattccttattcttcttcaacattgcctcatgggtcatcttatagtctgatgatgggaggatttggaggtgctagtatacagaaagcgcagtctctgattgatttaggatctagtagctcaacttcctcgactgcttcactctcagggaactcacccaagactgggacctcagagtgggcagttcctcagcctacaagattaaaatatcggcaaaaatttaatactcttgacaaaagtatgagtggatatctctcaggttttcaagctagaaatgcccttcttcagtcaaatctttctcaaactcagctggctactatttggactctggctgacgttgatggtgatggacagctaaaagcagaagagtttattcttgcaatgcaccttactgacatggccaaagctggacagccattaccactgactttacctcctgagcttgttcctccatctttcagaggaggaaagcaaattgattccattaatggaactctgccttcatatcagaaaatgcaagaagaggagcctcagaagaaattaccagttacttttgaggacaaacggaaagccaactatgagcgagggaacatggagctggaaaagcgacgccaagccttgatggagcagcaacaaagggaggcagaacgtaaagcccagaaagaaaaggaagagtgggaacgaaaacagagagaattacaagaacaagaatggaagaaacaacttgaattagaaaaacgcttagagaagcaacgggaattggagagacaacgagaggaagaaaggagaaaagacatagaaagacgagaggcagcaaaacaggaacttgaacgacaacgtcgcttagaatgggagagaattcggcgacaggagcttctcaatcaaaagaatagagaacaagaagaaattgtcaggttaaactctaaaaagaagaatcttcatcttgagttggaagcactgaatggcaaacatcagcagatctcaggcagacttcaggatgtccgactcaaaaagcaaactcaaaagactgagctggaagttctggataagcagtgtgacttggaaattatggaaatcaagcaacttcaacaggaacttcaggaatatcagaataagcttatctatctggtacctgagaagcaattattaaatgaaagaattaaaaacatgcagttcagtaacacacctgattcaggggtcagtttacttcataaaaaatcattagaaaaggaagaattatgccaaagacttaaagaacagttagatgctcttgaaaaagaaactgcatctaagctgtcagaaatggattcttttaacaatcaactaaagtgtgggaatatggatgactctgttcttcagtgccttttgtctctgctaagctgtctcaacaacctcttcctcttacttaaggaactgagagaaacctacaacacacagcagttagcccttgaacagctttataagatcaaacgtgacaagttgaaggaaattgaaaggaaaagattagaactaatgcagaaaaagaaactagaagatgaggctgcaaggaaagcaaagcaaggaaaagaaaacttatggaaagaaaatcttagaaaggaggaagaagaaaaacaaaagcgactccaggaagaaaaaacacaagaaaaaattcaagaagaggaacggaaagctgaggagaaacaacgtaaggataaggatactttgaaagctgaggagaaaaaacgtgagacagctagtgttttggtgaattatagagcattatacccctttgaagcaaggaaccatgatgagatgagttttaattctggagatataattcaggttgatgaaaaaaccgtaggagaacctggttggctttatggtagttttcaaggaaattttggctggtttccatgcaattatgtagaaaaaatgccatcaagtgaaaatgaaaaagctgtatctccaaagaaggccttacttcctcctacagtttctttatctgctacctcaacttcctctgaaccactttcttcaaatcaaccagcatcagtgactgattatcaaaatgtatctttttcaaacctaactgtaaatacatcatggcagaaaaaatcagccttcactcgaactgtgtcccctggatctgtatcacctattcatggacagggacaagtggtagaaaacttaaaagcacaggccctttgttcctggactgcaaagaaagataaccacttgaacttctcaaaacatgacattattactgtcttggagcagcaagaaaattggtggtttggggaggtgcatggaggaagaggatggtttcccaaatcttatgtcaagatcattcctgggagtgaagtaaaacgggaagaaccagaagctttgtatgcagctgtaaataagaaacctacctcggcagcctattcagttggagaagaatatattgcactttatccatattcaagtgtggaacctggagatttgactttcacagaaggtgaagaaatattggtgacccagaaagatggagagtggtggacaggaagtattggagatagaagtggaatttttccatcaaactatgtcaaaccaaaggatcaagagagttttgggagtgctagcaagtctggagcatcaaataaaaaacctgagattgctcaggtaacttcagcatatgttgcttctggttctgaacaacttagccttgcaccaggacagttaatattaattctaaagaaaaatacaagtgggtggtggcaaggagagttacaggccagaggaaaaaagcgacagaaaggatggtttcctgccagtcatgttaaacttttgggtccaagtagtgaaagagccacacctgcctttcatcctgtatgtcaggtgattgctatgtatgactatgcagcaaataatgaagatgagctcagtttctccaagggacaactcattaatgttatgaacaaagatgatcctgattggtggcaaggagagatcaacggggtgactggtctctttccttcaaactacgttaagatgacgacagactcagatccaagtcaacagtggtgtgctgatctgcaaaccctggacacaatgcagccaattgagaggaaaagacagggctatattcatgagctgattcagaccgaagagcggtacatggctgaccttcagctcgtcgtcgaggtgaggaggctgctgctggctagctctcggggtatctgctgtctctcatgagagatggtgggcatcagactcagggctgcctccacgcagagtcaaagcaaggcatcacttttgatgtgtgaattcacaaatagtgacggaagctctcacatcctccaaatgctgtctctgcctgccggataatgcttgagattgaaagtctctaatgagctctttcccccagatgaggtcactcagagtgaagcgggagaacaagagggcattcgcatggcttcgttggatgtggcaggagccccatcaaggaaggacggggatagagtggatgggaagggcctatggcagaccgtagcttccttggatatttgcctaatatctgttttaacatctgacattttcataaactggtatctctggaggaactgtgaaacagtgaaagtgttcacctcatggttgtatcagtttggaaaacccaatgggagcatattgtaaaatagttcccaaatatcatatagctactgtttgtttataccagtgacctctacgctgatgacagctatccttattcgagtagcactttaaaatgatttgtgcttgagtgaacaaaagaagactttccatttctactatacctttgtt

SEQ ID NO: 362808 - DNA, 640 bp, Homo sapiens
tgaaccacctcttaaaagcttctaatgcagtttctcctccctgcacccccaatgttaaaaataaaaccataaaaaattattcactgaatatctattttgtaccagaactacaaaaacaagtttatgatcttcaaatactccaaaatctgttctgaacaagctgggaaatggtctttcctcttcaatgacttcctgcttcttacctacatggtcaagcagtttgctgtttcctctggctctgagaaacttttcagctcgaagtccaatgctcaattcaaaatgtataaaacgcccattttcctgaatgaagtcttggtgaaactgcccacagacccttccagcgatgagcctgtcttccacatttcccacattgatcgggtctacaccctccgaacagacaacattaatgagaggtcagtcctgaccatgtgtggcctgccttgaactctgggagaaggcctggacgtctccctctgccataaacccatctccagccgtgcttaagccccactaattctgtatcctgaacctctcttaacacatcccctctgctccagtcccatggtaggccttggtcactgcagctgcctcctaacatgcttcccggcttctagtctctccccacaccactcagcagcct

SEQ ID NO: 362809 - DNA, 6679 bp, Homo sapiens
gcttcggacccgaccgactcggagcagaccttcagggttcaatgccccggaactcctggggcgaggagccacgcccgggcagtttcgggctccggagggtggggagtcggtgcccggcagcgggcgggccgtcagctgcccggcccggcgcctacctccccgccccccggcttcctgcggaggccgcggccgccatgttgttgtggggctgaggcggcgccggcggagccctgagcggctgtgacaggctacgcaacaggttcgcgggcggcggcctgacgaccaagccagctgcagtggcggcgacggcggcagagcagggtctccccgcgcctgcccgcgcccaggctgccggtgctgagggacgcggagtcgcgctgtgacgtgcgggaggcgcggcgagggcgccagatggctgagagctagcaaggaaaactcaggaccatgatggctcagtttcccacagctatgaatggagggccaaacatgtgggctattacctctgaagaacgtactaagcatgacaggcagtttgataacctcaaaccttcaggaggttacataacaggtgatcaagcacgtaattttttcctacaatcaggtctgccggcccctgttttagctgaaatatgggctttatcagacctaaacaaggatgggaagatggatcagcaagagttctccatagctatgaaactcatcaaactgaagcttcaaggccaacagttgcctgtggttctccctcctattatgaagcaaccccctatgttttctccattaatttctgctcgttttggaatgggaagcatgcccaatctgtccattcctcagccattgcctccagctgcacctataacatcattgtcttctgcgacttcagggaccaaccttcctcccttaatgatgcccactcccctagtgccttctgttagcacatcatcattaccaaatggaaccgccagtctcattcagcctttacccattccttattcttcttcaacattgcctcatgggtcatcttatagtctgatgatgggaggatttggaggtgctagtatacagaaagcgcagtctctgattgatttaggatctagtagctcaacttcctcgactgcttcactctcagggaactcacccaagactgggacctcagagtgggcagttcctcagcctacaagattaaaatatcggcaaaaatttaatactcttgacaaaagtatgagtggatatctctcaggttttcaagctagaaatgcccttcttcagtcaaatctttctcaaactcagctggctactatttggactctggctgacgttgatggtgatggacagctaaaagcagaagagtttattcttgcaatgcaccttactgacatggccaaagctggacagccattaccactgactttacctcctgagcttgttcctccatctttcagaggaggaaagcaaattgattccattaatggaactctgccttcatatcagaaaatgcaagaagaggagcctcagaagaaattaccagttacttttgaggacaaacggaaagccaactatgagcgagggaacatggagctggaaaagcgacgccaagccttgatggagcagcaacaaagggaggcagaacgtaaagcccagaaagaaaaggaagagtgggaacgaaaacagagagaattacaagaacaagaatggaagaaacaacttgaattagaaaaacgcttagagaagcaacgggaattggagagacaacgagaggaagaaaggagaaaagacatagaaagacgagaggcagcaaaacaggaacttgaacgacaacgtcgcttagaatgggagagaattcggcgacaggagcttctcaatcaaaagaatagagaacaagaagaaattgtcaggttaaactctaaaaagaagaatcttcatcttgagttggaagcactgaatggcaaacatcagcagatctcaggcagacttcaggatgtccgactcaaaaagcaaactcaaaagactgagctggaagttctggataagcagtgtgacttggaaattatggaaatcaagcaacttcaacaggaacttcaggaatatcagaataagcttatctatctggtacctgagaagcaattattaaatgaaagaattaaaaacatgcagttcagtaacacacctgattcaggggtcagtttacttcataaaaaatcattagaaaaggaagaattatgccaaagacttaaagaacagttagatgctcttgaaaaagaaactgcatctaagctgtcagaaatggattcttttaacaatcaactaaaggaactgagagaaacctacaacacacagcagttagcccttgaacagctttataagatcaaacgtgacaagttgaaggaaattgaaaggaaaagattagaactaatgcagaaaaagaaactagaagatgaggctgcaaggaaagcaaagcaaggaaaagaaaacttatggaaagaaaatcttagaaaggaggaagaagaaaaacaaaagcgactccaggaagaaaaaacacaagaaaaaattcaagaagaggaacggaaagctgaggagaaacaacgtaaggataaggatactttgaaagctgaggagaaaaaacgtgagacagctagtgttttggtgaattatagagcattatacccctttgaagcaaggaaccatgatgagatgagttttaattctggagatataattcaggttgatgaaaaaaccgtaggagaacctggttggctttatggtagttttcaaggaaattttggctggtttccatgcaattatgtagaaaaaatgccatcaagtgaaaatgaaaaagctgtatctccaaagaaggccttacttcctcctacagtttctttatctgctacctcaacttcctctgaaccactttcttcaaatcaaccagcatcagtgactgattatcaaaatgtatctttttcaaacctaactgtaaatacatcatggcagaaaaaatcagccttcactcgaactgtgtcccctggatctgtatcacctattcatggacagggacaagtggtagaaaacttaaaagcacaggccctttgttcctggactgcaaagaaagataaccacttgaacttctcaaaacatgacattattactgtcttggagcagcaagaaaattggtggtttggggaggtgcatggaggaagaggatggtttcccaaatcttatgtcaagatcattcctgggagtgaagtaaaacgggaagaaccagaagctttgtatgcagctgtaaataagaaacctacctcggcagcctattcagttggagaagaatatattgcactttatccatattcaagtgtggaacctggagatttgactttcacagaaggtgaagaaatattggtgacccagaaagatggagagtggtggacaggaagtattggagatagaagtggaatttttccatcaaactatgtcaaaccaaaggatcaagagagttttgggagtgctagcaagtctggagcatcaaataaaaaacctgagattgctcaggtaacttcagcatatgttgcttctggttctgaacaacttagccttgcaccaggacagttaatattaattctaaagaaaaatacaagtgggtggtggcaaggagagttacaggccagaggaaaaaagcgacagaaaggatggtttcctgccagtcatgttaaacttttgggtccaagtagtgaaagagccacacctgcctttcatcctgtatgtcaggtgattgctatgtatgactatgcagcaaataatgaagatgagctcagtttctccaagggacaactcattaatgttatgaacaaagatgatcctgattggtggcaaggagagatcaacggggtgactggtctctttccttcaaactacgttaagatgacgacagactcagatccaagtcaacagtggtgtgctgatctgcaaaccctggacacaatgcagccaattgagaggaaaagacagggctatattcatgagctgattcagaccgaagagcggtacatggctgaccttcagctcgtcgtcgaggtttttcagaaacgcatggcagagtcaggctttctcactgaaggggagatggccctgatttttgttaactggaaggagctcatcatgtccaacacaaagctgctgaaggctttgcgggtgcggaagaagaccgggggcgagaagatgccggtgcagatgattggggacatcctggccgctgagctgtcccacatgcaggcttacatcaggttctgcagctgccagcttaatggagcagctctgttacagcagaagacagatgaagacacagatttcaaagaatttttaaagaagctggcatctgacccgcggtgtaaaggaatgcccctctccagcttcctgctgaaacccatgcagaggatcacccgctacccactgctcatcagaagtattctggagaacaccccggagagccatgcagaccattcctccctaaagctggccctcgagcgggcagaggagctgtgctctcaagtgaatgagggagttcgggagaaggaaaactcggaccgactggagtggatccaggcgcacgtgcagtgtgaaggcctcgcggagcaacttattttcaactctctcaccaactgcctggggccccggaagctcttacacagtgggaaattatacaagaccaagagcaacaaggaactgcacggattcctcttcaatgacttcctgcttcttacctacatggtcaagcagtttgctgtttcctctggctctgagaaacttttcagctcgaagtccaatgctcaattcaaaatgtataaaacgcccattttcctgaatgaagtcttggtgaaactgcccacagacccttccagcgatgagcctgtcttccacatttcccacattgatcgggtctacaccctccgaacagacaacattaatgagaggaccgcctgggtgcagaagatcaaggcggcgtctgagcagtacatcgacaccgagaagaagaagcgtgagaaagcttaccaagcccgctcccaaaagacttcaggcattgggcgcctgatggtgcatgtcattgaagctacagaattaaaagcctgcaaaccaaatggaaagagcaacccatactgtgaaatcagcatgggctcccagagctacaccaccaggaccatccaggacacactcaatcccaagtggaattttaactgccagttctttattaaggatctctaccaagacgtgctgtgtctcaccctgtttgacagagaccagttttcaccagatggtaagtgtcgctcagccaggggatctaaaggctttcccagtttcctagatcctggagtccagatctaggggcttcagctgtgtgcagaccccatgccacttcagggaagtgacacaggcctgtgtcatctcgctttggcagcaggtgggtggccttcctcaggggaggaggtggcctgagatgtgtttcaggtctttgacccatcactccctacacacacgacgtgaacaccactcctggagcattctcagaatggagatttgaattccatgtggcagcttctcacacacaaacctgccatcattccccacacacccactcacgacattcaacagccatgagccaaaagaagttccttgtttcagatttgaaggttttatgaatccacttcttccggatgtagctctttaatgattttataaagaagaaagacttctgactctcctgtgtttattcaccagatttcctgggtcgtactgaaattccagtggcaaaaattcgaacagaacaggaaagcaaaggccctatgacccgccgactgctgctgcatgaggtccccaccggggaggtctgggtccgttttgacctgcagctttttgagcaaaaaactctcctgtaggggttctaaaggacagcaccagcgggacagcccacaaggctggggctggagaatgagagactgcgctctcttggggctgagggagcaccatgcagcttcacccctcacaaagccatgcacgctgggggctctgttttcctgcacactaaatagctagcaatctatgcaaacacctttcccataaagaaaccaaaccccatagtacagtgccttgtcctagtgttcacatgttcagctctgtttgtttagatgccaaggtttccattttcagggctataaaaagtattacttggaaatgaggcatcagaccaccagatgttaccgctcggttgaatgtgtccaccgtggagtggtttggtgacgctgtaaccattccacgccagtgacctctgctgggtcacagccactcaggaggggaagggtcaggatgagaggctgcagcctcgacacttggcgcggcctgatactgaaatagcgtctactcgtgcactgaataaaaacagaaacttgatcattttattcctgattagattttatcactctctgctaagacaatatagtctggagtataagtgggaaagcttgatttaaatactgtgaactctaataatgtggaaaatatttttcaactttaattttctgaagtataaattatttatgtaaattcattgtttttgcatatttcttaggacatgcatctttaagctttatcattgcccatatgtacagaaagagaataaagacatatgtttatggatgga

SEQ ID NO: 362810 - DNA, 6483 bp, Homo sapiens
gcttcggacccgaccgactcggagcagaccttcagggttcaatgccccggaactcctggggcgaggagccacgcccgggcagtttcgggctccggagggtggggagtcggtgcccggcagcgggcgggccgtcagctgcccggcccggcgcctacctccccgccccccggcttcctgcggaggccgcggccgccatgttgttgtggggctgaggcggcgccggcggagccctgagcggctgtgacaggctacgcaacaggttcgcgggcggcggcctgacgaccaagccagctgcagtggcggcgacggcggcagagcagggtctccccgcgcctgcccgcgcccaggctgccggtgctgagggacgcggagtcgcgctgtgacgtgcgggaggcgcggcgagggcgccagatggctgagagctagcaaggaaaactcaggaccatgatggctcagtttcccacagctatgaatggagggccaaacatgtgggctattacctctgaagaacgtactaagcatgacaggcagtttgataacctcaaaccttcaggaggttacataacaggtgatcaagcacgtaattttttcctacaatcaggtctgccggcccctgttttagctgaaatatgggctttatcagacctaaacaaggatgggaagatggatcagcaagagttctccatagctatgaaactcatcaaactgaagcttcaaggccaacagttgcctgtggttctccctcctattatgaagcaaccccctatgttttctccattaatttctgctcgttttggaatgggaagcatgcccaatctgtccattcctcagccattgcctccagctgcacctataacatcattgtcttctgcgacttcagggaccaaccttcctcccttaatgatgcccactcccctagtgccttctgttagcacatcatcattaccaaatggaaccgccagtctcattcagcctttacccattccttattcttcttcaacattgcctcatgggtcatcttatagtctgatgatgggaggatttggaggtgctagtatacagaaagcgcagtctctgattgatttaggatctagtagctcaacttcctcgactgcttcactctcagggaactcacccaagactgggacctcagagtgggcagttcctcagcctacaagattaaaatatcggcaaaaatttaatactcttgacaaaagtatgagtggatatctctcaggttttcaagctagaaatgcccttcttcagtcaaatctttctcaaactcagctggctactatttggactctggctgacgttgatggtgatggacagctaaaagcagaagagtttattcttgcaatgcaccttactgacatggccaaagctggacagccattaccactgactttacctcctgagcttgttcctccatctttcagaggaggaaagcaaattgattccattaatggaactctgccttcatatcagaaaatgcaagaagaggagcctcagaagaaattaccagttacttttgaggacaaacggaaagccaactatgagcgagggaacatggagctggaaaagcgacgccaagccttgatggagcagcaacaaagggaggcagaacgtaaagcccagaaagaaaaggaagagtgggaacgaaaacagagagaattacaagaacaagaatggaagaaacaacttgaattagaaaaacgcttagagaagcaacgggaattggagagacaacgagaggaagaaaggagaaaagacatagaaagacgagaggcagcaaaacaggaacttgaacgacaacgtcgcttagaatgggagagaattcggcgacaggagcttctcaatcaaaagaatagagaacaagaagaaattgtcaggttaaactctaaaaagaagaatcttcatcttgagttggaagcactgaatggcaaacatcagcagatctcaggcagacttcaggatgtccgactcaaaaagcaaactcaaaagactgagctggaagttctggataagcagtgtgacttggaaattatggaaatcaagcaacttcaacaggaacttcaggaatatcagaataagcttatctatctggtacctgagaagcaattattaaatgaaagaattaaaaacatgcagttcagtaacacacctgattcaggggtcagtttacttcataaaaaatcattagaaaaggaagaattatgccaaagacttaaagaacagttagatgctcttgaaaaagaaactgcatctaagctgtcagaaatggattcttttaacaatcaactaaaggaactgagagaaacctacaacacacagcagttagcccttgaacagctttataagatcaaacgtgacaagttgaaggaaattgaaaggaaaagattagaactaatgcagaaaaagaaactagaagatgaggctgcaaggaaagcaaagcaaggaaaagaaaacttatggaaagaaaatcttagaaaggaggaagaagaaaaacaaaagcgactccaggaagaaaaaacacaagaaaaaattcaagaagaggaacggaaagctgaggagaaacaacgtaaggataaggatactttgaaagctgaggagaaaaaacgtgagacagctagtgttttggtgaattatagagcattatacccctttgaagcaaggaaccatgatgagatgagttttaattctggagatataattcaggttgatgaaaaaaccgtaggagaacctggttggctttatggtagttttcaaggaaattttggctggtttccatgcaattatgtagaaaaaatgccatcaagtgaaaatgaaaaagctgtatctccaaagaaggccttacttcctcctacagtttctttatctgctacctcaacttcctctgaaccactttcttcaaatcaaccagcatcagtgactgattatcaaaatgtatctttttcaaacctaactgtaaatacatcatggcagaaaaaatcagccttcactcgaactgtgtcccctggatctgtatcacctattcatggacagggacaagtggtagaaaacttaaaagcacaggccctttgttcctggactgcaaagaaagataaccacttgaacttctcaaaacatgacattattactgtcttggagcagcaagaaaattggtggtttggggaggtgcatggaggaagaggatggtttcccaaatcttatgtcaagatcattcctgggagtgaagtaaaacgggaagaaccagaagctttgtatgcagctgtaaataagaaacctacctcggcagcctattcagttggagaagaatatattgcactttatccatattcaagtgtggaacctggagatttgactttcacagaaggtgaagaaatattggtgacccagaaagatggagagtggtggacaggaagtattggagatagaagtggaatttttccatcaaactatgtcaaaccaaaggatcaagagagttttgggagtgctagcaagtctggagcatcaaataaaaaacctgagattgctcaggtaacttcagcatatgttgcttctggttctgaacaacttagccttgcaccaggacagttaatattaattctaaagaaaaatacaagtgggtggtggcaaggagagttacaggccagaggaaaaaagcgacagaaaggatggtttcctgccagtcatgttaaacttttgggtccaagtagtgaaagagccacacctgcctttcatcctgtatgtcaggtgattgctatgtatgactatgcagcaaataatgaagatgagctcagtttctccaagggacaactcattaatgttatgaacaaagatgatcctgattggtggcaaggagagatcaacggggtgactggtctctttccttcaaactacgttaagatgacgacagactcagatccaagtcaacagtggtgtgctgatctgcaaaccctggacacaatgcagccaattgagaggaaaagacagggctatattcatgagctgattcagaccgaagagcggtacatggctgaccttcagctcgtcgtcgaggtttttcagaaacgcatggcagagtcaggctttctcactgaaggggagatggccctgatttttgttaactggaaggagctcatcatgtccaacacaaagctgctgaaggctttgcgggtgcggaagaagaccgggggcgagaagatgccggtgcagatgattggggacatcctggccgctgagctgtcccacatgcaggcttacatcaggttctgcagctgccagcttaatggagcagctctgttacagcagaagacagatgaagacacagatttcaaagaatttttaaagaagctggcatctgacccgcggtgtaaaggaatgcccctctccagcttcctgctgaaacccatgcagaggatcacccgctacccactgctcatcagaagtattctggagaacaccccggagagccatgcagaccattcctccctaaagctggccctcgagcgggcagaggagctgtgctctcaagtgaatgagggagttcgggagaaggaaaactcggaccgactggagtggatccaggcgcacgtgcagtgtgaaggcctcgcggagcaacttattttcaactctctcaccaactgcctggggccccggaagctcttacacagtgggaaattatacaagaccaagagcaacaaggaactgcacggattcctcttcaatgacttcctgcttcttacctacatggtcaagcagtttgctgtttcctctggctctgagaaacttttcagctcgaagtccaatgctcaattcaaaatgtataaaacgcccattttcctgaatgaagtcttggtgaaactgcccacagacccttccagcgatgagcctgtcttccacatttcccacattgatcgggtctacaccctccgaacagacaacattaatgagaggaccgcctgggtgcagaagatcaaggcggcgtctgagcagtacatcgacaccgagaagaagaagcgtgagaaagcttaccaagcccgctcccaaaagacttcaggcattgggcgcctgatggtgcatgtcattgaagctacagaattaaaagcctgcaaaccaaatggaaagagcaacccatactgtgaaatcagcatgggctcccagagctacaccaccaggaccatccaggacacactcaatcccaagtggaattttaactgccagttctttattaaggatctctaccaagacgtgctgtgtctcaccctgtttgacagagaccagttttcaccagatgatttcctgggtcgtactgaaattccagtggcaaaaattcgaacagaacaggaaagcaaaggccctatgacccgccgactgctgctgcatgaggtccccaccggggaggtctgggtccgttttgacctgcagctttttgagcaaaaaactctcctgtaggggttctaaaggacagcaccagcgggacagcccacaaggctggggctggagaatgagagactgcgctctcttggggctgagggagcaccatgcagcttcacccctcacaaagccatgcacgctgggggctctgttttcctgcacactaaatagctagcaatctatgcaaacacctttcccataaagaaaccaaaccccatagtacagtgccttgtcctagtgttcacatgttcagctctgtttgtttagatgccaaggtttccattttcagggctataaaaagtattacttggaaatgaggcatcagaccaccagatgttaccgctcggttgaatgtgtccaccgtggagtggtttggtgacgctgtaaccattccacgccagtgacctctgctgggtcacagccactcaggaggggaagggtcaggatgagaggctgcagcctcgacacttggcgcggcctgatactgaaatagcgtctactcgtgcactgaataaaaacagaaacttgatcattttattcctgattagattttatcactctctgctaagacaatatagtctggagtataagtgggaaagcttgatttaaatactgtgaactctaataatgtggaaaatatttttcaactttaattttctgaagtataaattatttatgtaaattcattgtttttgcatatttcttaggacatgcatctttaagctttatcattgcccatatgtacagaaagagaataaagacatatgtttatggatggaacttcgtcaaagtctgactgatttactttctatatgaaagctgctttttttctttttaattttctcagccagatgaaaggctcttaaaaggtaccttcacaagttgcctataatgaaaccaagtttccttcctggtacgtgggaaaaccaaggacagagtgaggatgaggtcaggagacccagggcctcatcttgactctgccactaatttgctctgtgactttggtgaatctacctcgtgtttctggggctgggtttctttaat

SEQ ID NO: 362811 - DNA, 7214 bp, Homo sapiens
  misc_feature (4621)..(4621): n is a, c, g, or t
  misc_feature (4678)..(4678): n is a, c, g, or t
  misc_feature (5029)..(5029): n is a, c, g, or t
gcttcggacccgaccgactcggagcagaccttcagggttcaatgccccggaactcctggggcgaggagccacgcccgggcagtttcgggctccggagggtggggagtcggtgcccggcagcgggcgggccgtcagctgcccggcccggcgcctacctccccgccccccggcttcctgcggaggccgcggccgccatgttgttgtggggctgaggcggcgccggcggagccctgagcggctgtgacaggctacgcaacaggttcgcgggcggcggcctgacgaccaagccagctgcagtggcggcgacggcggcagagcagggtctccccgcgcctgcccgcgcccaggctgccggtgctgagggacgcggagtcgcgctgtgacgtgcgggaggcgcggcgagggcgccagatggctgagagctagcaaggaaaactcaggaccatgatggctcagtttcccacagctatgaatggagggccaaacatgtgggctattacctctgaagaacgtactaagcatgacaggcagtttgataacctcaaaccttcaggaggttacataacaggtgatcaagcacgtaattttttcctacaatcaggtctgccggcccctgttttagctgaaatatgggctttatcagacctaaacaaggatgggaagatggatcagcaagagttctccatagctatgaaactcatcaaactgaagcttcaaggccaacagttgcctgtggttctccctcctattatgaagcaaccccctatgttttctccattaatttctgctcgttttggaatgggaagcatgcccaatctgtccattcctcagccattgcctccagctgcacctataacatcattgtcttctgcgacttcagggaccaaccttcctcccttaatgatgcccactcccctagtgccttctgttagcacatcatcattaccaaatggaaccgccagtctcattcagcctttacccattccttattcttcttcaacattgcctcatgggtcatcttatagtctgatgatgggaggatttggaggtgctagtatacagaaagcgcagtctctgattgatttaggatctagtagctcaacttcctcgactgcttcactctcagggaactcacccaagactgggacctcagagtgggcagttcctcagcctacaagattaaaatatcggcaaaaatttaatactcttgacaaaagtatgagtggatatctctcaggttttcaagctagaaatgcccttcttcagtcaaatctttctcaaactcagctggctactatttggactctggctgacgttgatggtgatggacagctaaaagcagaagagtttattcttgcaatgcaccttactgacatggccaaagctggacagccattaccactgactttacctcctgagcttgttcctccatctttcagaggaggaaagcaaattgattccattaatggaactctgccttcatatcagaaaatgcaagaagaggagcctcagaagaaattaccagttacttttgaggacaaacggaaagccaactatgagcgagggaacatggagctggaaaagcgacgccaagccttgatggagcagcaacaaagggaggcagaacgtaaagcccagaaagaaaaggaagagtgggaacgaaaacagagagaattacaagaacaagaatggaagaaacaacttgaattagaaaaacgcttagagaagcaacgggaattggagagacaacgagaggaagaaaggagaaaagacatagaaagacgagaggcagcaaaacaggaacttgaacgacaacgtcgcttagaatgggagagaattcggcgacaggagcttctcaatcaaaagaatagagaacaagaagaaattgtcaggttaaactctaaaaagaagaatcttcatcttgagttggaagcactgaatggcaaacatcagcagatctcaggcagacttcaggatgtccgactcaaaaagcaaactcaaaagactgagctggaagttctggataagcagtgtgacttggaaattatggaaatcaagcaacttcaacaggaacttcaggaatatcagaataagcttatctatctggtacctgagaagcaattattaaatgaaagaattaaaaacatgcagttcagtaacacacctgattcaggggtcagtttacttcataaaaaatcattagaaaaggaagaattatgccaaagacttaaagaacagttagatgctcttgaaaaagaaactgcatctaagctgtcagaaatggattcttttaacaatcaactaaaggaactgagagaaacctacaacacacagcagttagcccttgaacagctttataagatcaaacgtgacaagttgaaggaaattgaaaggaaaagattagaactaatgcagaaaaagaaactagaagatgaggctgcaaggaaagcaaagcaaggaaaagaaaacttatggaaagaaaatcttagaaaggaggaagaagaaaaacaaaagcgactccaggaagaaaaaacacaagaaaaaattcaagaagaggaacggaaagctgaggagaaacaacgtaaggataaggatactttgaaagctgaggagaaaaaacgtgagacagctagtgttttggtgaattatagagcattatacccctttgaagcaaggaaccatgatgagatgagttttaattctggagatataattcaggttgatgaaaaaaccgtaggagaacctggttggctttatggtagttttcaaggaaattttggctggtttccatgcaattatgtagaaaaaatgccatcaagtgaaaatgaaaaagctgtatctccaaagaaggccttacttcctcctacagtttctttatctgctacctcaacttcctctgaaccactttcttcaaatcaaccagcatcagtgactgattatcaaaatgtatctttttcaaacctaactgtaaatacatcatggcagaaaaaatcagccttcactcgaactgtgtcccctggatctgtatcacctattcatggacagggacaagtggtagaaaacttaaaagcacaggccctttgttcctggactgcaaagaaagataaccacttgaacttctcaaaacatgacattattactgtcttggagcagcaagaaaattggtggtttggggaggtgcatggaggaagaggatggtttcccaaatcttatgtcaagatcattcctgggagtgaagtaaaacgggaagaaccagaagctttgtatgcagctgtaaataagaaacctacctcggcagcctattcagttggagaagaatatattgcactttatccatattcaagtgtggaacctggagatttgactttcacagaaggtgaagaaatattggtgacccagaaagatggagagtggtggacaggaagtattggagatagaagtggaatttttccatcaaactatgtcaaaccaaaggatcaagagagttttgggagtgctagcaagtctggagcatcaaataaaaaacctgagattgctcaggtaacttcagcatatgttgcttctggttctgaacaacttagccttgcaccaggacagttaatattaattctaaagaaaaatacaagtgggtggtggcaaggagagttacaggccagaggaaaaaagcgacagaaaggatggtttcctgccagtcatgttaaacttttgggtccaagtagtgaaagagccacacctgcctttcatcctgtatgtcaggtgattgctatgtatgactatgcagcaaataatgaagatgagctcagtttctccaagggacaactcattaatgttatgaacaaagatgatcctgattggtggcaaggagagatcaacggggtgactggtctctttccttcaaactacgttaagatgacgacagactcagatccaagtcaacagtgacccaatgttgtcttccagttgtgaaagcaccccagagacccactatccaagtttcactctagcgtggaggcagggcaggcagccctgatcaaatatctcctacacaattcgtttacttcgtttgaatgttagagccacttgtgattatttttttgtgtttctaacttacagtttaaatttatttgtaaaaagttaaaggatagtgggtctttgtgtggctttccctgctgttcactctggcatctttagcatttttcttcttttttaatttgataattgtaggtcattagcatgcatattgagtttgcccttatgtggtgggagttcaaacacacaaagacccactatttgcacaaactattcttactggtttggaataggctgccatgcttttttaatgttattgcaacatgtgtattcatttacagaattcagataaaatttgcttatgttctgctattatgtttgatctaatcctaatcacagtgagctcttaattagctcaatatgtggtttgccctcaagtgtgcactgtttattactttgtaatatgccactatgagtactgacatttagatatgtttaaaggccaagaactggaaacagccatgccctgttttctgtgtatttgggatgggaataacaacattttgggggagctttttaaatctcagagaanaggaaagtggcctgctctggcaggtatgtgcagtgtttcatttgttccagtcccaanaatgagcactgtcctatggtagttcgcttaggatctttatgtgctctgggctaatgaaggtactgcatcatgtgctgcagcgtgtgtattctttttcgatgacctataaagggattatttttgaggaatgaaaggctcccatcattgactgtgagatgggaaaaacctttcctagcttagagcatttatatcttaatccattttaaagtcagagttcattgttacctgttttaatcaggtgactacatgtcccagtatacaaaggggcactggttgacattcttcttaatgtatttagtaaatatcataagaaatcctttaagagtttaaatgtccccaaaacagacatgngggctctagtcaagaatgaattagagtgaaggaaagctgtgtaacacctggcattcctctgtgttcatggagcttctttgaggctctaagattgattttaccatcagacttctctaatacctgttcttcaaccatattggctactttgacataagaatttacttcttttcctggaatggaaaacactttaaaaaataataacaaacattattataaactaatatatgtgagagtacttagttgatacaaaaaggagttttagtagacagtattatactatatttgaaaatcaaggagaattttatgcaacttaaaatgtttacaaactgcagtgcaatctactgtttgtgaatgtcaaagtatcaggaaaagtgtatatacaatcacagagtcatatttcctcacaaagttatttacaaagagtgaaatatgtttttgtacctctcagtttcagttagaggcatattttgtgcaatatttatgttaatgtgcctatacattatgaatgaattatttcagtcatacattgcctaaatcataactttatgatgcttgggaaagaatcaacagttaaaacttcataaagttctaatgtctgtgttccaaaatacatcacattattaggatgtagggagataagtatgtgtgctccctagggtggcaatttctagttactagaccacctctatttttagcatttggcatcctcatgatacttttataaatatgacattaataggaaagcaataatttcattttacagatagaataacagatttgcctgcattcactgaaagagtgcaaagactgggtccttgtgaattcaactgactctcccaaattgtattaattacctgttcttgccttttattttctgaacttgctgcttttgcattcttttgagttcaaagacagttactttaaatccatttttaaaccctcggggtagaaatcataccactgttaatcagccacattatttggtctaaggttttttctttataattctgaaactgagtttatctaatacattgatgaattatttcaaacgtatttttatagttcaaatcagttcacttttacactgataaatataaattactaggaatgaccttcagacagcgtttagcatctgtaaccaacctgaaaataatatgttcatcaggtacctatggattaaatcatatactggcgtatttaagctgaatgtcagtctggaaaataaatttactatattaactgaaataccactctttgtgtaggtattttgtcatgtatttaagaaaaagataaaaagaatggaaatcatatgacataataacttaagtctttcttaaaagtgcatgctgtcttttgcaatacctcattcagccaagtatttgttctcttcctcattcagtataagtcagctttcaatttgcttagaaggcaacattagaaggttagagttcatcagaaacatagaattttaaaatgtgagttcaactgaataaatttgaatttctgtaggaggtaaagaatcaaaatacctgtttaaagattgcaattgcaatgtataataatcacttttaaattatttgattaaaccttttaggttttccagaaatgaaaaaaatcagttctaaaaccaaagctgatttttagaaaatttgagaatgtaaatcagccctatccataatatagtttctctaaaactttatcttaaagagtcattttaaaataatataactattaaaaatgtaactgatatttaaatgttttgaaataaaacattttaaaatataaatactgtagtttaaaagaaagaaactgggggaaagaaaagtagagaaagaaataccaattccagtccaaagctttatttgccaggttttcttagaatgacttttaccagtttatgaattcttgtaaacagaatctataatggaaatactgaaagacttttgcctaaagtggcattattgaatgctgctgtgatgctactgtaatgtaataaattattaaattgttgcaaagtgctgtttttgccttaaaattttattttgtgtgtcttgaaaattatagtattaaaggtattgagattgtgcaaatgctgggcacgcttggcatgagataatctgtttttatttttacaaaattgtaatataactatgcaagtgtgtttattaaaagaacacaaactata

SEQ ID NO: 362812 - DNA, 7160 bp, Homo sapiens
  misc_feature (4621)..(4621): n is a, c, g, or t
  misc_feature (4678)..(4678): n is a, c, g, or t
  misc_feature (5029)..(5029): n is a, c, g, or t
gcttcggacccgaccgactcggagcagaccttcagggttcaatgccccggaactcctggggcgaggagccacgcccgggcagtttcgggctccggagggtggggagtcggtgcccggcagcgggcgggccgtcagctgcccggcccggcgcctacctccccgccccccggcttcctgcggaggccgcggccgccatgttgttgtggggctgaggcggcgccggcggagccctgagcggctgtgacaggctacgcaacaggttcgcgggcggcggcctgacgaccaagccagctgcagtggcggcgacggcggcagagcagggtctccccgcgcctgcccgcgcccaggctgccggtgctgagggacgcggagtcgcgctgtgacgtgcgggaggcgcggcgagggcgccagatggctgagagctagcaaggaaaactcaggaccatgatggctcagtttcccacagctatgaatggagggccaaacatgtgggctattacctctgaagaacgtactaagcatgacaggcagtttgataacctcaaaccttcaggaggttacataacaggtgatcaagcacgtaattttttcctacaatcaggtctgccggcccctgttttagctgaaatatgggctttatcagacctaaacaaggatgggaagatggatcagcaagagttctccatagctatgaaactcatcaaactgaagcttcaaggccaacagttgcctgtggttctccctcctattatgaagcaaccccctatgttttctccattaatttctgctcgttttggaatgggaagcatgcccaatctgtccattcctcagccattgcctccagctgcacctataacatcattgtcttctgcgacttcagggaccaaccttcctcccttaatgatgcccactcccctagtgccttctgttagcacatcatcattaccaaatggaaccgccagtctcattcagcctttacccattccttattcttcttcaacattgcctcatgggtcatcttatagtctgatgatgggaggatttggaggtgctagtatacagaaagcgcagtctctgattgatttaggatctagtagctcaacttcctcgactgcttcactctcagggaactcacccaagactgggacctcagagtgggcagttcctcagcctacaagattaaaatatcggcaaaaatttaatactcttgacaaaagtatgagtggatatctctcaggttttcaagctagaaatgcccttcttcagtcaaatctttctcaaactcagctggctactatttggactctggctgacgttgatggtgatggacagctaaaagcagaagagtttattcttgcaatgcaccttactgacatggccaaagctggacagccattaccactgactttacctcctgagcttgttcctccatctttcagaggaggaaagcaaattgattccattaatggaactctgccttcatatcagaaaatgcaagaagaggagcctcagaagaaattaccagttacttttgaggacaaacggaaagccaactatgagcgagggaacatggagctggaaaagcgacgccaagccttgatggagcagcaacaaagggaggcagaacgtaaagcccagaaagaaaaggaagagtgggaacgaaaacagagagaattacaagaacaagaatggaagaaacaacttgaattagaaaaacgcttagagaagcaacgggaattggagagacaacgagaggaagaaaggagaaaagacatagaaagacgagaggcagcaaaacaggaacttgaacgacaacgtcgcttagaatgggagagaattcggcgacaggagcttctcaatcaaaagaatagagaacaagaagaaattgtcaggttaaactctaaaaagaagaatcttcatcttgagttggaagcactgaatggcaaacatcagcagatctcaggcagacttcaggatgtccgactcaaaaagcaaactcaaaagactgagctggaagttctggataagcagtgtgacttggaaattatggaaatcaagcaacttcaacaggaacttcaggaatatcagaataagcttatctatctggtacctgagaagcaattattaaatgaaagaattaaaaacatgcagttcagtaacacacctgattcaggggtcagtttacttcataaaaaatcattagaaaaggaagaattatgccaaagacttaaagaacagttagatgctcttgaaaaagaaactgcatctaagctgtcagaaatggattcttttaacaatcaactaaaggaactgagagaaacctacaacacacagcagttagcccttgaacagctttataagatcaaacgtgacaagttgaaggaaattgaaaggaaaagattagaactaatgcagaaaaagaaactagaagatgaggctgcaaggaaagcaaagcaaggaaaagaaaacttatggaaagaaaatcttagaaaggaggaagaagaaaaacaaaagcgactccaggaagaaaaaacacaagaaaaaattcaagaagaggaacggaaagctgaggagaaacaacgtaaggataaggatactttgaaagctgaggagaaaaaacgtgagacagctagtgttttggtgaattatagagcattatacccctttgaagcaaggaaccatgatgagatgagttttaattctggagatataattcaggttgatgaaaaaaccgtaggagaacctggttggctttatggtagttttcaaggaaattttggctggtttccatgcaattatgtagaaaaaatgccatcaagtgaaaatgaaaaagctgtatctccaaagaaggccttacttcctcctacagtttctttatctgctacctcaacttcctctgaaccactttcttcaaatcaaccagcatcagtgactgattatcaaaatgtatctttttcaaacctaactgtaaatacatcatggcagaaaaaatcagccttcactcgaactgtgtcccctggatctgtatcacctattcatggacagggacaagtggtagaaaacttaaaagcacaggccctttgttcctggactgcaaagaaagataaccacttgaacttctcaaaacatgacattattactgtcttggagcagcaagaaaattggtggtttggggaggtgcatggaggaagaggatggtttcccaaatcttatgtcaagatcattcctgggagtgaagtaaaacgggaagaaccagaagctttgtatgcagctgtaaataagaaacctacctcggcagcctattcagttggagaagaatatattgcactttatccatattcaagtgtggaacctggagatttgactttcacagaaggtgaagaaatattggtgacccagaaagatggagagtggtggacaggaagtattggagatagaagtggaatttttccatcaaactatgtcaaaccaaaggatcaagagagttttgggagtgctagcaagtctggagcatcaaataaaaaacctgagattgctcaggtaacttcagcatatgttgcttctggttctgaacaacttagccttgcaccaggacagttaatattaattctaaagaaaaatacaagtgggtggtggcaaggagagttacaggccagaggaaaaaagcgacagaaaggatggtttcctgccagtcatgttaaacttttgggtccaagtagtgaaagagccacacctgcctttcatcctgtatgtcaggtgattgctatgtatgactatgcagcaaataatgaagatgagctcagtttctccaagggacaactcattaatgttatgaacaaagatgatcctgattggtggcaaggagagatcaacggggtgactggtctctttccttcaaactacgttaagatgacgacagactcagatccaagtcaacagtgacccaatgttgtcttccagttgtgaaagcaccccagagacccactatccaagtttcactctagcgtggaggcagggcaggcagccctgatcaaatatctcctacacaattcgtttacttcgtttgaatgttagagccacttgtgattatttttttgtgtttctaacttacagtttaaatttatttgtaaaaagttaaaggatagtgggtctttgtgtggctttccctgctgttcactctggcatctttagcatttttcttcttttttaatttgataattgtaggtcattagcatgcatattgagtttgcccttatgtggtgggagttcaaacacacaaagacccactatttgcacaaactattcttactggtttggaataggctgccatgcttttttaatgttattgcaacatgtgtattcatttacagaattcagataaaatttgcttatgttctgctattatgtttgatctaatcctaatcacagtgagctcttaattagctcaatatgtggtttgccctcaagtgtgcactgtttattactttgtaatatgccactatgagtactgacatttagatatgtttaaaggccaagaactggaaacagccatgccctgttttctgtgtatttgggatgggaataacaacattttgggggagctttttaaatctcagagaanaggaaagtggcctgctctggcaggtatgtgcagtgtttcatttgttccagtcccaanaatgagcactgtcctatggtagttcgcttaggatctttatgtgctctgggctaatgaaggtactgcatcatgtgctgcagcgtgtgtattctttttcgatgacctataaagggattatttttgaggaatgaaaggctcccatcattgactgtgagatgggaaaaacctttcctagcttagagcatttatatcttaatccattttaaagtcagagttcattgttacctgttttaatcaggtgactacatgtcccagtatacaaaggggcactggttgacattcttcttaatgtatttagtaaatatcataagaaatcctttaagagtttaaatgtccccaaaacagacatgngggctctagtcaagaatgaattagagtgaaggaaagctgtgtaacacctggcattcctctgtgttcatggagcttctttgaggctctaagattgattttaccatcagacttctctaatacctgttcttcaaccatattggctactttgacataagaatttacttcttttcctggaatggaaaacactttaaaaaataataacaaacattattataaactaatatatgtgagagtacttagttgatacaaaaaggagttttagtagacagtattatactatatttgaaaatcaaggagaattttatgcaacttaaaatgtttacaaactgcagtgcaatctactgtttgtgaatgtcaaagtatcaggaaaagtgtatatacaatcacagagtcatatttcctcacaaagttatttacaaagagtgaaatatgtttttgtacctctcagtttcagttagaggcatattttgtgcaatatttatgttaatgtgcctatacattatgaatgaattatttcagtcatacattgcctaaatcataactttatgatgcttgggaaagaatcaacagttaaaacttcataaagttctaatgtctgtgttcctggcaatttctagttactagaccacctctatttttagcatttggcatcctcatgatacttttataaatatgacattaataggaaagcaataatttcattttacagatagaataacagatttgcctgcattcactgaaagagtgcaaagactgggtccttgtgaattcaactgactctcccaaattgtattaattacctgttcttgccttttattttctgaacttgctgcttttgcattcttttgagttcaaagacagttactttaaatccatttttaaaccctcggggtagaaatcataccactgttaatcagccacattatttggtctaaggttttttctttataattctgaaactgagtttatctaatacattgatgaattatttcaaacgtatttttatagttcaaatcagttcacttttacactgataaatataaattactaggaatgaccttcagacagcgtttagcatctgtaaccaacctgaaaataatatgttcatcaggtacctatggattaaatcatatactggcgtatttaagctgaatgtcagtctggaaaataaatttactatattaactgaaataccactctttgtgtaggtattttgtcatgtatttaagaaaaagataaaaagaatggaaatcatatgacataataacttaagtctttcttaaaagtgcatgctgtcttttgcaatacctcattcagccaagtatttgttctcttcctcattcagtataagtcagctttcaatttgcttagaaggcaacattagaaggttagagttcatcagaaacatagaattttaaaatgtgagttcaactgaataaatttgaatttctgtaggaggtaaagaatcaaaatacctgtttaaagattgcaattgcaatgtataataatcacttttaaattatttgattaaaccttttaggttttccagaaatgaaaaaaatcagttctaaaaccaaagctgatttttagaaaatttgagaatgtaaatcagccctatccataatatagtttctctaaaactttatcttaaagagtcattttaaaataatataactattaaaaatgtaactgatatttaaatgttttgaaataaaacattttaaaatataaatactgtagtttaaaagaaagaaactgggggaaagaaaagtagagaaagaaataccaattccagtccaaagctttatttgccaggttttcttagaatgacttttaccagtttatgaattcttgtaaacagaatctataatggaaatactgaaagacttttgcctaaagtggcattattgaatgctgctgtgatgctactgtaatgtaataaattattaaattgttgcaaagtgctgtttttgccttaaaattttattttgtgtgtcttgaaaattatagtattaaaggtattgagattgtgcaaatgctgggcacgcttggcatgagataatctgtttttatttttacaaaattgtaatataactatgcaagtgtgtttattaaaagaacacaaactata

SEQ ID NO: 362813 - DNA, 4358 bp, Homo sapiens
gcttcggacccgaccgactcggagcagaccttcagggttcaatgccccggaactcctggggcgaggagccacgcccgggcagtttcgggctccggagggtggggagtcggtgcccggcagcgggcgggccgtcagctgcccggcccggcgcctacctccccgccccccggcttcctgcggaggccgcggccgccatgttgttgtggggctgaggcggcgccggcggagccctgagcggctgtgacaggctacgcaacaggttcgcgggcggcggcctgacgaccaagccagctgcagtggcggcgacggcggcagagcagggtctccccgcgcctgcccgcgcccaggctgccggtgctgagggacgcggagtcgcgctgtgacgtgcgggaggcgcggcgagggcgccagatggctgagagctagcaaggaaaactcaggaccatgatggctcagtttcccacagctatgaatggagggccaaacatgtgggctattacctctgaagaacgtactaagcatgacaggcagtttgataacctcaaaccttcaggaggttacataacaggtgatcaagcacgtaattttttcctacaatcaggtctgccggcccctgttttagctgaaatatgggctttatcagacctaaacaaggatgggaagatggatcagcaagagttctccatagctatgaaactcatcaaactgaagcttcaaggccaacagttgcctgtggttctccctcctattatgaagcaaccccctatgttttctccattaatttctgctcgttttggaatgggaagcatgcccaatctgtccattcctcagccattgcctccagctgcacctataacatcattgtcttctgcgacttcagggaccaaccttcctcccttaatgatgcccactcccctagtgccttctgttagcacatcatcattaccaaatggaaccgccagtctcattcagcctttacccattccttattcttcttcaacattgcctcatgggtcatcttatagtctgatgatgggaggatttggaggtgctagtatacagaaagcgcagtctctgattgatttaggatctagtagctcaacttcctcgactgcttcactctcagggaactcacccaagactgggacctcagagtgggcagttcctcagcctacaagattaaaatatcggcaaaaatttaatactcttgacaaaagtatgagtggatatctctcaggttttcaagctagaaatgcccttcttcagtcaaatctttctcaaactcagctggctactatttggactctggctgacgttgatggtgatggacagctaaaagcagaagagtttattcttgcaatgcaccttactgacatggccaaagctggacagccattaccactgactttacctcctgagcttgttcctccatctttcagaggaggaaagcaaattgattccattaatggaactctgccttcatatcagaaaatgcaagaagaggagcctcagaagaaattaccagttacttttgaggacaaacggaaagccaactatgagcgagggaacatggagctggaaaagcgacgccaagccttgatggagcagcaacaaagggaggcagaacgtaaagcccagaaagaaaaggaagagtgggaacgaaaacagagagaattacaagaacaagaatggaagaaacaacttgaattagaaaaacgcttagagaagcaacgggaattggagagacaacgagaggaagaaaggagaaaagacatagaaagacgagaggcagcaaaacaggaacttgaacgacaacgtcgcttagaatgggagagaattcggcgacaggagcttctcaatcaaaagaatagagaacaagaagaaattgtcaggttaaactctaaaaagaagaatcttcatcttgagttggaagcactgaatggcaaacatcagcagatctcaggcagacttcaggatgtccgactcaaaaagcaaactcaaaagactgagctggaagttctggataagcagtgtgacttggaaattatggaaatcaagcaacttcaacaggaacttcaggaatatcagaataagcttatctatctggtacctgagaagcaattattaaatgaaagaattaaaaacatgcagttcagtaacacacctgattcaggggtcagtttacttcataaaaaatcattagaaaaggaagaattatgccaaagacttaaagaacagttagatgctcttgaaaaagaaactgcatctaagctgtcagaaatggattcttttaacaatcaactaaaggaactgagagaaacctacaacacacagcagttagcccttgaacagctttataagatcaaacgtgacaagttgaaggaaattgaaaggaaaagattagaactaatgcagaaaaagaaactagaagatgaggctgcaaggaaagcaaagcaaggaaaagaaaacttatggaaagaaaatcttagaaaggaggaagaagaaaaacaaaagcgactccaggaagaaaaaacacaagaaaaaattcaagaagaggaacggaaagctgaggagaaacaacgtaaggataaggatactttgaaagctgaggagaaaaaacgtgagacagctagtgttttggtgaattatagagcattatacccctttgaagcaaggaaccatgatgagatgagttttaattctggagatataattcaggttgatgaaaaaaccgtaggagaacctggttggctttatggtagttttcaaggaaattttggctggtttccatgcaattatgtagaaaaaatgccatcaagtgaaaatgaaaaagctgtatctccaaagaaggccttacttcctcctacagtttctttatctgctacctcaacttcctctgaaccactttcttcaaatcaaccagcatcagtgactgattatcaaaatgtatctttttcaaacctaactgtaaatacatcatggcagaaaaaatcagccttcactcgaactgtgtcccctggatctgtatcacctattcatggacagggacaagtggtagaaaacttaaaagcacaggccctttgttcctggactgcaaagaaagataaccacttgaacttctcaaaacatgacattattactgtcttggagcagcaagaaaattggtggtttggggaggtgcatggaggaagaggatggtttcccaaatcttatgtcaagatcattcctgggagtgaagtaaaacgggaagaaccagaagctttgtatgcagctgtaaataagaaacctacctcggcagcctattcagttggagaagaatatattgcactttatccatattcaagtgtggaacctggagatttgactttcacagaaggtgaagaaatattggtgacccagaaagatggagagtggtggacaggaagtattggagatagaagtggaatttttccatcaaactatgtcaaaccaaaggatcaagagagttttgggagtgctagcaagtctggagcatcaaataaaaaacctgagattgctcaggtaacttcagcatatgttgcttctggttctgaacaacttagccttgcaccaggacagttaatattaattctaaagaaaaatacaagtgggtggtggcaaggagagttacaggccagaggaaaaaagcgacagaaaggatggtttcctgccagtcatgttaaacttttgggtccaagtagtgaaagagccacacctgcctttcatcctgtatgtcaggtgattgctatgtatgactatgcagcaaataatgaagatgagctcagtttctccaagggacaactcattaatgttatgaacaaagatgatcctgattggtggcaaggagagatcaacggggtgactggtctctttccttcaaactacgttaagatgacgacagactcagatccaagtcaacagtggtgtgctgatctgcaaaccctggacacaatgcagccaattgagaggaaaagacagggctatattcatgagctgattcagaccgaagagcggtacatggctgaccttcagctcgtcgtcgaggtttttcagaaacgcatggcagagtcaggctttctcactgaaggggagatggccctgatttttgttaactggaaggagctcatcatgtccaacacaaagctgctgaaggctttgcgggtgcggaagaagaccgggggcgagaagatgccggcttctttaaaaattctttgaaatctggtgtcttcatctgtcttctgctgtaacagagctgctccattaagctggcagctgcagaacctgatgtaagcctgcatgtggacagctcagcgccagatgtcccatcatgtgtcctctag

SEQ ID NO: 362814 - DNA, 1861 bp, Homo sapiens
gcttcggacccgaccgactcggagcagaccttcagggttcaatgccccggaactcctggggcgaggagccacgcccgggcagtttcgggctccggagggtggggagtcggtgcccggcagcgggcgggccgtcagctgcccggcccggcgcctacctccccgccccccggcttcctgcggaggccgcggccgccatgttgttgtggggctgaggcggcgccggcggagccctgagcggctgtgacaggctacgcaacaggttcgcgggcggcggcctgacgaccaagccagctgcagtggcggcgacggcggcagagcagggtctccccgcgcctgcccgcgcccaggctgccggtgctgagggacgcggagtcgcgctgtgacgtgcgggaggcgcggcgagggcgccagatggctgagagctagcaaggaaaactcaggaccatgatggctcagtttcccacagctatgaatggagggccaaacatgtgggctattacctctgaagaacgtactaagcatgacaggcagtttgataacctcaaaccttcaggaggttacataacaggtgatcaagcacgtaattttttcctacaatcaggtctgccggcccctgttttagctgaaatatgggctttatcagacctaaacaaggatgggaagatggatcagcaagagttctccatagctatgaaactcatcaaactgaagcttcaaggccaacagttgcctgtggttctccctcctattatgaagcaaccccctatgttttctccattaatttctgctcgttttggaatgggaagcatgcccaatctgtccattcctcagccattgcctccagctgcacctataacatcattgtcttctgcgacttcagggaccaaccttcctcccttaatgatgcccactcccctagtgccttctgttagcacatcatcattaccaaatggaaccgccagtctcattcagcctttacccattccttattcttcttcaacattgcctcatgggtcatcttatagtctgatgatgggaggatttggaggtgctagtatacagaaagcgcagtctctgattgatttaggatctagtagctcaacttcctcgactgcttcactctcagggaactcacccaagactgggacctcagagtgggcagttcctcagcctacaagattaaaatatcggcaaaaatttaatactcttgacaaaagtatgagtggatatctctcaggttttcaagctagaaatgcccttcttcagtcaaatctttctcaaactcagctggctactatttggactctggctgacgttgatggtgatggacagctaaaagcagaagagtttattcttgcaatgcaccttactgacatggccaaagctggacagccattaccactgactttacctcctgagcttgttcctccatctttcaggtgagtgtgcctggaggtggagaactatggttttgataacttggcagatgtgatttagaagagagttaaatatttgcactgccattgattttagtattcaacaagttatacttgaaaagggtacatattagaagtaggtgtgggccaggcgtggcagcttacgcctgtaatcataacactgggagccaaggtgggaggatcacatgaggccgggagttcaggaccagcgtggacaacatagtgagaccccgtatctacaaaaataaaaataattagccaggtgtggtggtgtgcgcctgtagtcctaggtactctggaagctggggcaggaggatcactggagcatagaagttcaaggctacagtaagttgtgattatgccacagcactctagcctgggcagcagagcaagaccctgcctca

SEQ ID NO: 362815 - DNA, 1214 bp, Homo sapiens
agcggaggggccttgtcggttctgcggggcgagcgccttcgcggaaaactccaaagtaccctctgtggagccttgttgagtatcttcaaaccttcagagggaccttttatcagcgacccatgccgcagtttacagaagaacgctttgtgcgtgctttgggacgtatggatcacttttaaactttttcctttgaagctcagacagcttgcggggggcttgggaggagcgctgcccggggagttagaaggcttgggtcaaagtcatagccctcatacttcttgagagtgaccttgggtgagtcgctggaccctgagccccaaatctccgtctgaaaagtaacccatgccttgtatgcgtcctcgggctgttgcaggagtctttggaaatgatggttctgactctgagttggaaactggaacgcacacaacagatgggaggcgttgaaggaaacagaaaggtcggcctgaggggagaggcgtttcaggaggcttgcggatgtgtgaagtgtgcgcactgtgcttggggcgagcccaagcagtaaccccacccgagtgaagcgttcttggggggatcggctccgggtgggcgacgttccccgcgtgcccccttcccccgagagcactttgtagacactgactccaaaagcgggtctggtctctgcccagccccactttggctggcgtgcttaggtgcctctcgggaagctggagaccaccctcccccattccagcaaacgctccattgaggaacctactgcgtgccaggtcctggggagcttagcgtctgatgaaggatacaacaacaaaagactggaaattcagaagcatgaggggacctcccccctcgagggagaaccagagatggcttcacagagcagacgtttgaactgggccttggaggatggatgagtggaatttggcccagtggagaaagtcatagcagcaggagataagattgtaagggtcaggtggtggggctggataatgcgaatcttgactgtcagacacagacacctgccatctaattagtacgcgagggataaattttggactccgcaggataaggacaaggctacacaatggcttagaacagttaatcgggcaacagttggaaagggcctttgcctcaaaattatgtttgccctgtcttgtgtgaatgcctattcagatgcattatttgaaaaataaataaaccaggcaggcatccagcgtgtt

SEQ ID NO: 362816 - DNA, 1003 bp, Homo sapiens
agcggaggggccttgtcggttctgcggggcgagcgccttcgcggaaaactccaaagtaccctctgtggagccttgttgagtatcttcaaaccttcagagggaccttttatcagcgacccatgccgcagtttacagaagaacgctttgtgcgtgctttgggacgagtctttggaaatgatggttctgactctgagttggaaactggaacgcacacaacagatgggaggcgttgaaggaaacagaaaggtcggcctgaggggagaggcgtttcaggaggcttgcggatgtgtgaagtgtgcgcactgtgcttggggcgagcccaagcagtaaccccacccgagtgaagcgttcttggggggatcggctccgggtgggcgacgttccccgcgtgcccccttcccccgagagcactttgtagacactgactccaaaagcgggtctggtctctgcccagccccactttggctggcgtgcttaggtgcctctcgggaagctggagaccaccctcccccattccagcaaacgctccattgaggaacctactgcgtgccaggtcctggggagcttagcgtctgatgaaggatacaacaacaaaagactggaaattcagaagcatgaggggacctcccccctcgagggagaaccagagatggcttcacagagcagacgtttgaactgggccttggaggatggatgagtggaatttggcccagtggagaaagtcatagcagcaggagataagattgtaagggtcaggtggtggggctggataatgcgaatcttgactgtcagacacagacacctgccatctaattagtacgcgagggataaattttggactccgcaggataaggacaaggctacacaatggcttagaacagttaatcgggcaacagttggaaagggcctttgcctcaaaattatgtttgccctgtcttgtgtgaatgcctattcagatgcattatttgaaaaataaataaaccaggcaggcatccagcgtgtt

SEQ ID NO: 362817 - DNA, 288 bp, Homo sapiens
ggaccacatgctggaaatttggtctctgcagcttaaaatctgagagaagatggtgtctgcagcattcaaagggggaccagagggaccctccacccctggcccccccagctattacaaacatgagccctgggaagattcctatcaaaaacccaagctggggcccatgagtcaagtctggacgtgcagtttggggcaagaggacagatggacgccacaggccatctgtctaaatatttccaaattataaattaaactaacagggtgttaaataaagtatgttctaacctc

SEQ ID NO: 362818 - DNA, 1712 bp, Homo sapiens
acccaaagtatcttttctcttcggggtctcaaccggccaaccaccacgtttttaggccgacctgggaggcagggggaacgcaacagactgcgaagtccttaaggaagaatctaaacaagtccgccgtttgctgtttgggagtgcgatacaaaatgaatatgtacgcaggtggaacgtagactgcagattttgagccagcggcgtttctgccgaaatcctggcaaattccggtagaagtcggctgcaggaggcggaggaggagactaaaaaaccagaaaacaaccagcaaaccagctaggcagagctgagcggagaagctccagagccttttaaagagactctcgtcacatgacacccccaaccccgacccccagccggcgcgcctccgccctcgggtggcggggccgcctggcgtgacttccgtccagaccggaacccaagatggctgcgctgttgctgagacacgttggtcgtcattgcctccgagcccactttagccctcagctctgtatcagaaatgctgttcctttgggaaccacggccaaagaagagatggagcggttctggaataagaatataggttcaaaccgtcctctgtctccccacattactatctacagttggtctcttcccatggcgatgtccatctgccaccgtggcactggtattgctttgagtgcaggggtctctctttttggcatgtcggccctgttactccctgggaactttgagtcttatttggaacttgtgaagtccctgtgtctggggccagcactgatccacacagctaagtttgcacttgtcttccctctcatgtatcatacctggaatgggatccgacacttgatgtgggacctaggaaaaggcctgaagattccccagctataccagtctggagtggttgtcctggttcttactgtgttgtcctctatggggctggcagccatgtgaagaaaggaggctcccagcatcatcttcctacacattattacattcacccatctttctgtttgtcattcttatctccagcctgggaaaagttctccttatttgtttagatccttttgtattttcagatctccttggagcagtagagtacctggtagaccataatagtggaaaagggtctagttttccccttgtttctaaagatgaggtggctgcaaaaactccccttttttgcccacagcttgcctactctcggcctagaagcagttattctctctccatattgggctttgatttgtgctgagggtcagcttttggctccttcttcctgagacagtggaaacaatgccagctctgtggcttctgccctggggatgggccgggttggggggtgggttggtgaggctttgggtgccactgcctgtgggttgctggcttaaaggacaattctcttcattggtgagagcccaggccattaacacctacacagtgttattgaaagaagagaggtgggggtggaggggaattagtctgtcccagctagagggagataaagagggctagttagttcttggagcagctgcttttgaggagaaaatatatagctttggacacgaggaagatctagaaaattatcattgaacatattaatggttatttctttttcttggatttccagaaaagcctcttaattttatgctttctcatcgaagtaatgtaccctttttttctgaaactgaattaaatactcattttatctttga

SEQ ID NO: 362819 - DNA, 1298 bp, Homo sapiens
  misc_feature (1221)..(1221): n is a, c, g, or t
  misc_feature (1248)..(1248): n is a, c, g, or t
acccaaagtatcttttctcttcggggtctcaaccggccaaccaccacgtttttaggccgacctgggaggcagggggaacgcaacagactgcgaagtccttaaggaagaatctaaacaagtccgccgtttgctgtttgggagtgcgatacaaaatgaatatgtacgcaggtggaacgtagactgcagattttgagccagcggcgtttctgccgaaatcctggcaaattccggtagaagtcggctgcaggaggcggaggaggagactaaaaaaccagaaaacaaccagcaaaccagctaggcagagctgagcggagaagctccagagccttttaaagagactctcgtcacatgacacccccaaccccgacccccagccggcgcgcctccgccctcgggtggcggggccgcctggcgtgacttccgtccagaccggaacccaagatggctgcgctgttgctgagacacgttggtcgtcattgcctccgagcccactttagccctcagctctgtatcagaaatgctgttcctttgggaaccacggccaaagaagagatggagcggttctggaataagaatataggttcaaaccgtcctctgtctccccacattactatctacagttggtctcttcccatggcgatgtccatctgccaccgtggcactggtattgctttgagtgcagatgtgggacctaggaaaaggcctgaagattccccagctataccagtctggagtggttgtcctggttcttactgtgttgtcctctatggggctggcagccatgtgaagaaaggaggctcccagcatcatcttcctacacattattacattcacccatctttctgtttgtcattcttatctccagcctgggaaaagttctccttatttgtttagatccttttgtattttcagatctccttggagcagtagagtacctggtagaccataatagtggaaaagggtctagttttccccttgtttctaaagatgaggtggctgcaaaaactccccttttttgcccacagcttgcctactctcggcctagaagcagttattctctctccatattgggctttgatttgtgctgagggtcagcttttggctccttcttcctgagacagtggaaacaatgccagctctgtggcttctgccctggggatgggccgggttggggggtgggttggtgaggctttgggtgctggggccccgccggggtgcggntaagcgatccttctggggaagcccgcntactccaggttgaacacacggggggggggatgcccggggaaaggttttgg

SEQ ID NO: 362820 - DNA, 1610 bp, Homo sapiens
acccaaagtatcttttctcttcggggtctcaaccggccaaccaccacgtttttaggccgacctgggaggcagggggaacgcaacagactgcgaagtccttaaggaagaatctaaacaagtccgccgtttgctgtttgggagtgcgatacaaaatgaatatgtacgcaggtggaacgtagactgcagattttgagccagcggcgtttctgccgaaatcctggcaaattccggtagaagtcggctgcaggaggcggaggaggagactaaaaaaccagaaaacaaccagcaaaccagctaggcagagctgagcggagaagctccagagccttttaaagagactctcgtcacatgacacccccaaccccgacccccagccggcgcgcctccgccctcgggtggcggggccgcctggcgtgacttccgtccagaccggaacccaagatggctgcgctgttgctgagacacgttggtcgtcattgcctccgagcccactttagccctcagctctgtatcagaaattggtctcttcccatggcgatgtccatctgccaccgtggcactggtattgctttgagtgcaggggtctctctttttggcatgtcggccctgttactccctgggaactttgagtcttatttggaacttgtgaagtccctgtgtctggggccagcactgatccacacagctaagtttgcacttgtcttccctctcatgtatcatacctggaatgggatccgacacttgatgtgggacctaggaaaaggcctgaagattccccagctataccagtctggagtggttgtcctggttcttactgtgttgtcctctatggggctggcagccatgtgaagaaaggaggctcccagcatcatcttcctacacattattacattcacccatctttctgtttgtcattcttatctccagcctgggaaaagttctccttatttgtttagatccttttgtattttcagatctccttggagcagtagagtacctggtagaccataatagtggaaaagggtctagttttccccttgtttctaaagatgaggtggctgcaaaaactccccttttttgcccacagcttgcctactctcggcctagaagcagttattctctctccatattgggctttgatttgtgctgagggtcagcttttggctccttcttcctgagacagtggaaacaatgccagctctgtggcttctgccctggggatgggccgggttggggggtgggttggtgaggctttgggtgccactgcctgtgggttgctggcttaaaggacaattctcttcattggtgagagcccaggccattaacacctacacagtgttattgaaagaagagaggtgggggtggaggggaattagtctgtcccagctagagggagataaagagggctagttagttcttggagcagctgcttttgaggagaaaatatatagctttggacacgaggaagatctagaaaattatcattgaacatattaatggttatttctttttcttggatttccagaaaagcctcttaattttatgctttctcatcgaagtaatgtaccctttttttctgaaactgaattaaatactcattttatctttga

SEQ ID NO: 362821 - DNA, 2391 bp, Homo sapiens
acccaaagtatcttttctcttcggggtctcaaccggccaaccaccacgtttttaggccgacctgggaggcagggggaacgcaacagactgcgaagtccttaaggaagaatctaaacaagtccgccgtttgctgtttgggagtgcgatacaaaatgaatatgtacgcaggtggaacgtagactgcagattttgagccagcggcgtttctgccgaaatcctggcaaattccggtagaagtcggctgcaggaggcggaggaggagactaaaaaaccagaaaacaaccagcaaaccagctaggcagagctgagcggagaagctccagagccttttaaagagactctcgtcacatgacacccccaaccccgacccccagccggcgcgcctccgccctcgggtggcggggccgcctggcgtgacttccgtccagaccggaacccaagatggctgcgctgttgctgagacacgttggtcgtcattgcctccgagcccactttagccctcagctctgtatcagaaatgctgttcctttgggaaccacggccaaagaagagatggagcggttctggaataagaatataggttcaaaccgtcctctgtctccccacattactatctacagttggtctcttcccatggcgatgtccatctgccaccgtggcactggtattgctttgagtgcaggggtctctctttttggcatgtcggccctgttactccctgggaactttgagtcttatttggaacttgtgaagtccctgtgtctggggccagcactgatccacacagctaagtttgcacttgtcttccctctcatgtatcatacctggaatgggatccgacacttgatgtgggacctaggaaaaggcctgaagattccccagctataccagtctggagtggttgtcctggttcttactgtgttgtcctctatggggctggcagccatgtgaagaaaggaggctcccagcatcatcttcctacacattattacattcacccatctttctgtttgtcattcttatctccagcctgggaaaagttctccttatttgtttagatccttttgtattttcagatctccttggagcagtagagtacctggtagaccataatagtggaaaagggtctagttttccccttgtttctaaagatgaggtggctgcaaaaactccccttttttgcccacagcttgcctactctcggcctagaagcagttattctctctccatattgggctttgatttgtgctgagggtcagcttttggctccttcttcctgagacagtggaaacaatgccagctctgtggcttctgccctggggatgggccgggttggggggtgggttggtgaggctttgggtgccactgcctgtgggttgctggcttaaaggacaattctcttcattggtgagagcccaggccattaacacctacacagtgttattgaaagaagagaggtgggggtggaggggaattagtctgtcccagctagagggagataaagagggctagttagttcttggagcagctgcttttgaggagaaaatatatagctttggacacgaggaagatctagaaaattatcattgaacatattaatggttatttctttttcttggatttccagaaaagcctcttaattttatgctttctcatcgaagtaatgtaccctttttttctgaaactgaattaaatactcattttatctttgactctccttgaaatctagagaaaccaagaaaatggctgttgggaaggaaccaatttcctcctcttccctcgggtctcaggcatttacatcctccctctccccgcaatctgacctttaccaggagggaaacagttctcctacatctcatcattggaaaagttttcagggaatcagatagaacttagccagagatttaaatatcacagaaaagcctcagagaaggaaggagaaaaagaaaagaagtgacgcatgtagagtgcttttgggttataggcaccaaaatcccattaaggactgattataagcttcatggtacagttcagcaaattatgattcattgaggggcacagaggaccagtgttggtgacagctaggggatgatgacctgaggttataggcttggggtgaatgaagcatagagatttttttttaaaaaagaagggattgttgaaaacctggcaaaaatgtataatttaatgagaaaacttgctgcttttaaaatccatataggccaggctttagcaggcatgctgttttgatagtttttgggaactctggaataagagacttatctcatctgtcacttcgagttgttggccagccagttaaagctgtgggtcgaagaggggaaatgttaactggctggtgtcaattggataggaagaccttagttaaggtgg

SEQ ID NO: 362822 - DNA, 1548 bp, Homo sapiens
acccaaagtatcttttctcttcggggtctcaaccggccaaccaccacgtttttaggccgacctgggaggcagggggaacgcaacagactgcgaagtccttaaggaagaatctaaacaagtccgccgtttgctgtttgggagtgcgatacaaaatgaatatgtacgcaggtggaacgtagactgcagattttgagccagcggcgtttctgccgaaatcctggcaaattccggtagaagtcggctgcaggaggcggaggaggagactaaaaaaccagaaaacaaccagcaaaccagctaggcagagctgagcggagaagctccagagccttttaaagagactctcgtcacatgacacccccaaccccgacccccagccggcgcgcctccgccctcgggtggcggggccgcctggcgtgacttccgtccagaccggaacccaagatggctgcgctgttgctgagacacgttggtcgtcattgcctccgagcccactttagccctcagctctgtatcagaaatgctgttcctttgggaaccacggccaaagaagagatggagcggttctggaataagaatataggttcaaaccgtcctctgtctccccacattactatctacagttggtctcttcccatggcgatgtccatctgccaccgtggcactggtattgctttgagtgcagatgtgggacctaggaaaaggcctgaagattccccagctataccagtctggagtggttgtcctggttcttactgtgttgtcctctatggggctggcagccatgtgaagaaaggaggctcccagcatcatcttcctacacattattacattcacccatctttctgtttgtcattcttatctccagcctgggaaaagttctccttatttgtttagatccttttgtattttcagatctccttggagcagtagagtacctggtagaccataatagtggaaaagggtctagttttccccttgtttctaaagatgaggtggctgcaaaaactccccttttttgcccacagcttgcctactctcggcctagaagcagttattctctctccatattgggctttgatttgtgctgagggtcagcttttggctccttcttcctgagacagtggaaacaatgccagctctgtggcttctgccctggggatgggccgggttggggggtgggttggtgaggctttgggtgccactgcctgtgggttgctggcttaaaggacaattctcttcattggtgagagcccaggccattaacacctacacagtgttattgaaagaagagaggtgggggtggaggggaattagtctgtcccagctagagggagataaagagggctagttagttcttggagcagctgcttttgaggagaaaatatatagctttggacacgaggaagatctagaaaattatcattgaacatattaatggttatttctttttcttggatttccagaaaagcctcttaattttatgctttctcatcgaagtaatgtaccctttttttctgaaactgaattaaatactcattttatctttga

SEQ ID NO: 362823 - DNA, 1674 bp, Homo sapiens
  misc_feature (1650)..(1650): n is a, c, g, or t
acccaaagtatcttttctcttcggggtctcaaccggccaaccaccacgtttttaggccgacctgggaggcagggggaacgcaacagactgcgaagtccttaaggaagaatctaaacaagtccgccgtttgctgtttgggagtgcgatacaaaatgaatatgtacgcaggtggaacgtagactgcagattttgagccagcggcgtttctgccgaaatcctggcaaattccggtagaagtcggctgcaggaggcggaggaggagactaaaaaaccagaaaacaaccagcaaaccagctaggcagagctgagcggagaagctccagagccttttaaagagactctcgtcacatgacacccccaaccccgacccccagccggcgcgcctccgccctcgggtggcggggccgcctggcgtgacttccgtccagaccggaacccaagatggctgcgctgttgctgagacacgttggtcgtcattgcctccgagcccactttagccctcagctctgtatcagaaatgctgttcctttgggaaccacggccaaagaagagatggagcggttctggaataagaatataggttcaaaccgtcctctgtctccccacattactatctacagttggtctcttcccatggcgatgtccatctgccaccgtggcactggtattgctttgagtgcaggggtctctctttttggcatgtcggccctgttactccctgggaactttgagtcttatttggaacttgtgaagtccctgtgtctggggccagcactgatccacacagctaagtttgcacttgtcttccctctcatgtatcatacctggaatgggatccgacacttgatgtgggacctaggaaaaggcctgaagattccccagctataccagtctggagtggttgtcctggttcttactgtgttgtcctctatggggctggcagccatgtgaagaaaggaggctcccagcatcatcttcctacacattattacattcacccatctttctgtttgtcattcttatctccagcctgggaaaagttctccttatttgtttagatccttttgtattttcagatctccttggagcagtagagtacctggtagaccataatagtggaaaagggtctagttttccccttgtttctaaagatgaggtggctgcaaaaactccccttttttgcccacagcttgcctactctcggcctagaagcagttattctctctccatattgggctttgatttgtgctgagggtcagcttttggctccttcttcctgagacagtggaaacaatgccagctctgtggcttctgccctggggatgggccgggttggggggtgggttggtgaggctttgggtgccactgcctgtgggttgctggcttaaaggacaattctcttcattggtgagagcccaggccattaacacctacacagtgttattgaaagaagagaggtgggggtggaggggaattagtctgtcccagctagagggagataaagagggctagttagttcttggagcagctgcttttgaggagaaaatatatagctttggacacgaggaagatctagaaaattatcattgaacatattaatggttatttctttttcttggatttccagaaaagcctcttaattataaccantgcgtgttgggtcaaggtctgaaa

SEQ ID NO: 362824 - DNA, 1556 bp, Homo sapiens
acccaaagtatcttttctcttcggggtctcaaccggccaaccaccacgtttttaggccgacctgggaggcagggggaacgcaacagactgcgaagtccttaaggaagaatctaaacaagtccgccgtttgctgtttgggagtgcgatacaaaatgaatatgtacgcaggtggaacgtagactgcagattttgagccagcggcgtttctgccgaaatcctggcaaattccggtagaagtcggctgcaggaggcggaggaggagactaaaaaaccagaaaacaaccagcaaaccagctaggcagagctgagcggagaagctccagagccttttaaagagactctcgtcacatgacacccccaaccccgacccccagccggcgcgcctccgccctcgggtggcggggccgcctggcgtgacttccgtccagaccggaacccaagatggctgcgctgttgctgagacacgttggtcgtcattgcctccgagcccactttagccctcagctctgtatcagaaattggtctcttcccatggcgatgtccatctgccaccgtggcactggtattgctttgagtgcaggggtctctctttttggcatgtcggccctgttactccctgggaactttgagtcttatttggaacttgtgaagtccctgtgtctggggccagcactgatccacacagctaagtttgcacttgtcttccctctcatgtatcatacctggaatgggatccgacacttgatgtgggacctaggaaaaggcctgaagattccccagctataccagtctggagtggttgtcctggttcttactgtgttgtcctctatggggctggcagccatgtgaagaaaggaggctcccagcatcatcttcctacacattattacattcacccatctttctgtttgtcattcttatctccagcctgggaaaagttctccttatttgtttagatccttttgtattttcagatctccttggagcagtagagtacctggtagaccataatagtggaaaagggtctagttttccccttgtttctaaagatgaggtggctgcatctctctccatattgggctttgatttgtgctgagggtcagcttttggctccttcttcctgagacagtggaaacaatgccagctctgtggcttctgccctggggatgggccgggttggggggtgggttggtgaggctttgggtgccactgcctgtgggttgctggcttaaaggacaattctcttcattggtgagagcccaggccattaacacctacacagtgttattgaaagaagagaggtgggggtggaggggaattagtctgtcccagctagagggagataaagagggctagttagttcttggagcagctgcttttgaggagaaaatatatagctttggacacgaggaagatctagaaaattatcattgaacatattaatggttatttctttttcttggatttccagaaaagcctcttaattttatgctttctcatcgaagtaatgtaccctttttttctgaaactgaattaaatactcattttatctttga

SEQ ID NO: 362825 - DNA, 1684 bp, Homo sapiens
acccaaagtatcttttctcttcggggtctcaaccggccaaccaccacgtttttaggccgacctgggaggcagggggaacgcaacagactgcgaagtccttaaggaagaatctaaacaagtccgccgtttgctgtttgggagtgcgatacaaaatgaatatgtacgcaggtggaacgtagactgcagattttgagccagcggcgtttctgccgaaatcctggcaaattccggtagaagtcggctgcaggaggcggaggaggagactaaaaaaccagaaaacaaccagcaaaccagctaggcagagctgagcggagaagctccagagccttttaaagagactctcgtcacatgacacccccaaccccgacccccagccggcgcgcctccgccctcgggtggcggggccgcctggcgtgacttccgtccagaccggaacccaagatggctgcgctgttgctgagacacgttggtcgtcattgcctccgagcccactttagccctcagctctgtatcagaaatgctgttcctttgggaaccacggccaaagaagagatggagcggttctggaataagaatataggttcaaaccgtcctctgtctccccacattactatctacagttggtctcttcccatggcgatgtccatctgccaccccactgcctgtgggttgctggcttaaaggacaattctcttcattggtgagagcccaggccattaacacctacacagtgttattgaaagaagagaggtgggggtggaggggaattagtctgtcccagctagagggagataaagagggctagttagttcttggagcagctgcttttgaggagaaaatatatagctttggacacgaggaagatctagaaaattatcattgaacatattaatggttatttctttttcttggatttccagaaaagcctcttaattttatgctttctcatcgaagtaatgtaccctttttttctgaaactgaattaaatactcattttatctttgactctccttgaaatctagagaaaccaagaaaatggctgttgggaaggaaccaatttcctcctcttccctcgggtctcaggcatttacatcctccctctccccgcaatctgacctttaccaggagggaaacagttctcctacatctcatcattggaaaagttttcagggaatcagatagaacttagccagagatttaaatatcacagaaaagcctcagagaaggaaggagaaaaagaaaagaagtgacgcatgtagagtgcttttgggttataggcaccaaaatcccattaaggactgattataagcttcatggtacagttcagcaaattatgattcattgaggggcacagaggaccagtgttggtgacagctaggggatgatgacctgaggttataggcttggggtgaatgaagcatagagatttttttttaaaaaagaagggattgttgaaaacctggcaaaaatgtataatttaatgagaaaacttgctgcttttaaaatccatataggccaggctttagcaggcatgctgttttgatagtttttgggaactctggaataagagacttatctcatctgtcacttcgagttgttggccagccagttaaagctgtgggtcgaagaggggaaatgttaactggctggtgtcaattggataggaagaccttagttaaggtgg

SEQ ID NO: 362826 - DNA, 1830 bp, Homo sapiens
acccaaagtatcttttctcttcggggtctcaaccggccaaccaccacgtttttaggccgacctgggaggcagggggaacgcaacagactgcgaagtccttaaggaagaatctaaacaagtccgccgtttgctgtttgggagtgcgatacaaaatgaatatgtacgcaggtggaacgtagactgcagattttgagccagcggcgtttctgccgaaatcctggcaaattccggtagaagtcggctgcaggaggcggaggaggagactaaaaaaccagaaaacaaccagcaaaccagctaggcagagctgagcggagaagctccagagccttttaaagagactctcgtcacatgacacccccaaccccgacccccagccggcgcgcctccgccctcgggtggcggggccgcctggcgtgacttccgtccagaccggaacccaagatggctgcgctgttgctgagacacgttggtcgtcattgcctccgagcccactttagccctcagctctgtatcagaaaagtctcgttctgtcgaccaggctggagtgtagtggcgtgatctgggctcactgcaacctccacgtcctgagttcaagtgattatcctgcctcagcctcctaagtagccggaattacagtgctgttcctttgggaaccacggccaaagaagagatggagcggttctggaataagaatataggttcaaaccgtcctctgtctccccacattactatctacagttggtctcttcccatggcgatgtccatctgccaccgtggcactggtattgctttgagtgcaggggtctctctttttggcatgtcggccctgttactccctgggaactttgagtcttatttggaacttgtgaagtccctgtgtctggggccagcactgatccacacagctaagtttgcacttgtcttccctctcatgtatcatacctggaatgggatccgacacttgatgtgggacctaggaaaaggcctgaagattccccagctataccagtctggagtggttgtcctggttcttactgtgttgtcctctatggggctggcagccatgtgaagaaaggaggctcccagcatcatcttcctacacattattacattcacccatctttctgtttgtcattcttatctccagcctgggaaaagttctccttatttgtttagatccttttgtattttcagatctccttggagcagtagagtacctggtagaccataatagtggaaaagggtctagttttccccttgtttctaaagatgaggtggctgcaaaaactccccttttttgcccacagcttgcctactctcggcctagaagcagttattctctctccatattgggctttgatttgtgctgagggtcagcttttggctccttcttcctgagacagtggaaacaatgccagctctgtggcttctgccctggggatgggccgggttggggggtgggttggtgaggctttgggtgccactgcctgtgggttgctggcttaaaggacaattctcttcattggtgagagcccaggccattaacacctacacagtgttattgaaagaagagaggtgggggtggaggggaattagtctgtcccagctagagggagataaagagggctagttagttcttggagcagctgcttttgaggagaaaatatatagctttggacacgaggaagatctagaaaattatcattgaacatattaatggttatttctttttcttggatttccagaaaagcctcttaattttatgctttctcatcgaagtaatgtaccctttttttctgaaactgaattaaatactcattttatctttga

SEQ ID NO: 362827 - DNA, 1553 bp, Homo sapiens
acccaaagtatcttttctcttcggggtctcaaccggccaaccaccacgtttttaggccgacctgggaggcagggggaacgcaacagactgcgaagtccttaaggaagaatctaaacaagtccgccgtttgctgtttgggagtgcgatacaaaatgaatatgtacgcaggtggaacgtagactgcagattttgagccagcggcgtttctgccgaaatcctggcaaattccggtagaagtcggctgcaggaggcggaggaggagactaaaaaaccagaaaacaaccagcaaaccagctaggcagagctgagcggagaagctccagagccttttaaagagactctcgtcacatgacacccccaaccccgacccccagccggcgcgcctccgccctcgggtggcggggccgcctggcgtgacttccgtccagaccggaacccaagatggctgcgctgttgctgagttggtctcttcccatggcgatgtccatctgccaccgtggcactggtattgctttgagtgcaggggtctctctttttggcatgtcggccctgttactccctgggaactttgagtcttatttggaacttgtgaagtccctgtgtctggggccagcactgatccacacagctaagtttgcacttgtcttccctctcatgtatcatacctggaatgggatccgacacttgatgtgggacctaggaaaaggcctgaagattccccagctataccagtctggagtggttgtcctggttcttactgtgttgtcctctatggggctggcagccatgtgaagaaaggaggctcccagcatcatcttcctacacattattacattcacccatctttctgtttgtcattcttatctccagcctgggaaaagttctccttatttgtttagatccttttgtattttcagatctccttggagcagtagagtacctggtagaccataatagtggaaaagggtctagttttccccttgtttctaaagatgaggtggctgcaaaaactccccttttttgcccacagcttgcctactctcggcctagaagcagttattctctctccatattgggctttgatttgtgctgagggtcagcttttggctccttcttcctgagacagtggaaacaatgccagctctgtggcttctgccctggggatgggccgggttggggggtgggttggtgaggctttgggtgccactgcctgtgggttgctggcttaaaggacaattctcttcattggtgagagcccaggccattaacacctacacagtgttattgaaagaagagaggtgggggtggaggggaattagtctgtcccagctagagggagataaagagggctagttagttcttggagcagctgcttttgaggagaaaatatatagctttggacacgaggaagatctagaaaattatcattgaacatattaatggttatttctttttcttggatttccagaaaagcctcttaattttatgctttctcatcgaagtaatgtaccctttttttctgaaactgaattaaatactcattttatctttga

SEQ ID NO: 362828 - DNA, 1658 bp, Homo sapiens
acccaaagtatcttttctcttcggggtctcaaccggccaaccaccacgtttttaggccgacctgggaggcagggggaacgcaacagactgcgaagtccttaaggaagaatctaaacaagtccgccgtttgctgtttgggagtgcgatacaaaatgaatatgtacgcaggtggaacgtagactgcagattttgagccagcggcgtttctgccgaaatcctggcaaattccggtagaagtcggctgcaggaggcggaggaggagactaaaaaaccagaaaacaaccagcaaaccagctaggcagagctgagcggagaagctccagagccttttaaagagactctcgtcacatgacacccccaaccccgacccccagccggcgcgcctccgccctcgggtggcggggccgcctggcgtgacttccgtccagaccggaacccaagatggctgcgctgttgctgagacacgttggtcgtcattgcctccgagcccactttagccctcagctctgtatcagaaatgctgttcctttgggaaccacggccaaagaagagatggagcggttctggaataagaatataggttcaaaccgtcctctgtctccccacattactatctacagttggtctcttcccatggcgatgtccatctgccaccgtggcactggtattgctttgagtgcaggggtctctctttttggcatgtcggccctgttactccctgggaactttgagtcttatttggaacttgtgaagtccctgtgtctggggccagcactgatccacacagctaagtttgcacttgtcttccctctcatgtatcatacctggaatgggatccgacacttgatgtgggacctaggaaaaggcctgaagattccccagctataccagtctggagtggttgtcctggttcttactgtgttgtcctctatggggctggcagccatgtgaagaaaggaggctcccagcatcatcttcctacacattattacattcacccatctttctgtttgtcattcttatctccagcctgggaaaagttctccttatttgtttagatccttttgtattttcagatctccttggagcagtagagtacctggtagaccataatagtggaaaagggtctagttttccccttgtttctaaagatgaggtggctgcatctctctccatattgggctttgatttgtgctgagggtcagcttttggctccttcttcctgagacagtggaaacaatgccagctctgtggcttctgccctggggatgggccgggttggggggtgggttggtgaggctttgggtgccactgcctgtgggttgctggcttaaaggacaattctcttcattggtgagagcccaggccattaacacctacacagtgttattgaaagaagagaggtgggggtggaggggaattagtctgtcccagctagagggagataaagagggctagttagttcttggagcagctgcttttgaggagaaaatatatagctttggacacgaggaagatctagaaaattatcattgaacatattaatggttatttctttttcttggatttccagaaaagcctcttaattttatgctttctcatcgaagtaatgtaccctttttttctgaaactgaattaaatactcattttatctttga

SEQ ID NO: 362829 - DNA, 1446 bp, Homo sapiens
acccaaagtatcttttctcttcggggtctcaaccggccaaccaccacgtttttaggccgacctgggaggcagggggaacgcaacagactgcgaagtccttaaggaagaatctaaacaagtccgccgtttgctgtttgggagtgcgatacaaaatgaatatgtacgcaggtggaacgtagactgcagattttgagccagcggcgtttctgccgaaatcctggcaaattccggtagaagtcggctgcaggaggcggaggaggagactaaaaaaccagaaaacaaccagcaaaccagctaggcagagctgagcggagaagctccagagccttttaaagagactctcgtcacatgacacccccaaccccgacccccagccggcgcgcctccgccctcgggtggcggggccgcctggcgtgacttccgtccagaccggaacccaagatggctgcgctgttgctgagacacgttggtcgtcattgcctccgagcccactttagccctcagctctgtatcagaaattggtctcttcccatggcgatgtccatctgccaccgtggcactggtattgctttgagtgcagatgtgggacctaggaaaaggcctgaagattccccagctataccagtctggagtggttgtcctggttcttactgtgttgtcctctatggggctggcagccatgtgaagaaaggaggctcccagcatcatcttcctacacattattacattcacccatctttctgtttgtcattcttatctccagcctgggaaaagttctccttatttgtttagatccttttgtattttcagatctccttggagcagtagagtacctggtagaccataatagtggaaaagggtctagttttccccttgtttctaaagatgaggtggctgcaaaaactccccttttttgcccacagcttgcctactctcggcctagaagcagttattctctctccatattgggctttgatttgtgctgagggtcagcttttggctccttcttcctgagacagtggaaacaatgccagctctgtggcttctgccctggggatgggccgggttggggggtgggttggtgaggctttgggtgccactgcctgtgggttgctggcttaaaggacaattctcttcattggtgagagcccaggccattaacacctacacagtgttattgaaagaagagaggtgggggtggaggggaattagtctgtcccagctagagggagataaagagggctagttagttcttggagcagctgcttttgaggagaaaatatatagctttggacacgaggaagatctagaaaattatcattgaacatattaatggttatttctttttcttggatttccagaaaagcctcttaattttatgctttctcatcgaagtaatgtaccctttttttctgaaactgaattaaatactcattttatctttga

SEQ ID NO: 362830 - DNA, 1479 bp, Homo sapiens
acccaaagtatcttttctcttcggggtctcaaccggccaaccaccacgtttttaggccgacctgggaggcagggggaacgcaacagactgcgaagtccttaaggaagaatctaaacaagtccgccgtttgctgtttgggagtgcgatacaaaatgaatatgtacgcaggtggaacgtagactgcagattttgagccagcggcgtttctgccgaaatcctggcaaattccggtagaagtcggctgcaggaggcggaggaggagactaaaaaaccagaaaacaaccagcaaaccagctaggcagagctgagcggagaagctccagagccttttaaagagactctcgtcacatgacacccccaaccccgacccccagccggcgcgcctccgccctcgggtggcggggccgcctggcgtgacttccgtccagaccggaacccaagatggctgcgctgttgctgagacacgttggtcgtcattgcctccgagcccactttagccctcagctctgtatcagaaatgctgttcctttgggaaccacggccaaagaagagatggagcggttctggaataagaatataggttcaaaccgtcctctgtctccccacattactatctacagttggtctcttcccatggcgatgtccatctgccaccgtggcactggtattgctttgagtgcagactgtgttgtcctctatggggctggcagccatgtgaagaaaggaggctcccagcatcatcttcctacacattattacattcacccatctttctgtttgtcattcttatctccagcctgggaaaagttctccttatttgtttagatccttttgtattttcagatctccttggagcagtagagtacctggtagaccataatagtggaaaagggtctagttttccccttgtttctaaagatgaggtggctgcaaaaactccccttttttgcccacagcttgcctactctcggcctagaagcagttattctctctccatattgggctttgatttgtgctgagggtcagcttttggctccttcttcctgagacagtggaaacaatgccagctctgtggcttctgccctggggatgggccgggttggggggtgggttggtgaggctttgggtgccactgcctgtgggttgctggcttaaaggacaattctcttcattggtgagagcccaggccattaacacctacacagtgttattgaaagaagagaggtgggggtggaggggaattagtctgtcccagctagagggagataaagagggctagttagttcttggagcagctgcttttgaggagaaaatatatagctttggacacgaggaagatctagaaaattatcattgaacatattaatggttatttctttttcttggatttccagaaaagcctcttaattttatgctttctcatcgaagtaatgtaccctttttttctgaaactgaattaaatactcattttatctttga

SEQ ID NO: 362831 - DNA, 1355 bp, Homo sapiens
  misc_feature (1289)..(1289): n is a, c, g, or t
acccaaagtatcttttctcttcggggtctcaaccggccaaccaccacgtttttaggccgacctgggaggcagggggaacgcaacagactgcgaagtccttaaggaagaatctaaacaagtccgccgtttgctgtttgggagtgcgatacaaaatgaatatgtacgcaggtggaacgtagactgcagattttgagccagcggcgtttctgccgaaatcctggcaaattccggtagaagtcggctgcaggaggcggaggaggagactaaaaaaccagaaaacaaccagcaaaccagctaggcagagctgagcggagaagctccagagccttttaaagagactctcgtcacatgacacccccaaccccgacccccagccggcgcgcctccgccctcgggtggcggggccgcctggcgtgacttccgtccagaccggaacccaagatggctgcgctgttgctgagacacgttggtcgtcattgcctccgagcccactttagccctcagctctgtatcagaaatgctgttcctttgggaaccacggccaaagaagagatggagcggttctggaataagaatataggttcaaaccgtcctctgtctccccacattactatctacagttggtctcttcccatggcgatgtccatctgccaccgtggcactggtattgctttgagtgcaggggtctctctttttggcatgtcggccctgttactccctgggaactttgagtcttatttggaacttgtgaagtccctgtgtctggggccagcactgatccacacagctaagtttgcacttgtcttccctctcatgtatcatacctggaatgggatccgacacttgatgtgggacctaggaaaaggcctgaagattccccagctataccagtctggagtggttgtcctggttcttactgtgttgtcctctatggggctggcagccatgtgaagaaaggaggctcccagcatcatcttcctacacattattacattcacccatctttctgtttgtcattcttatctccagcctgggaaaagttctccttatttgtttagatccttttgtattttcagatctccttggagcagtagagtacctggtagaccataatagtggaaaagggtctagttttccccttgtttctaaagatgaggtggctgcaaaaactccccttttttgcccacagcttgcctactctcggcctagaagcagttattctctctccatattgggctttgatttgtgctgagggtcagcttttggctccttcttcctgagacagtggngttgttaaggctttggtccaatggctgagggttgctggctggaacatcttttcattggtggccccg

SEQ ID NO: 362832 - DNA, 779 bp, Homo sapiens
ctgcaagtttctgttttaaatgataaactaatgaagaaaactgacttgaaactgatgagtgttctttatttgataatggttaagttatgattttggttaaaactgttgagtacattttcctttgcttatactcccattttctttcagtgggccacagttacatttcatcttcctcatcatgtgttgaagtccattgccagtgccattgtaaatgaactcaagaaaataaatcaaaatgttgctgccttacctgtggcgtcctcagtgatggacagattgtcttacctcttacctagtgcacgtccagaactcggagtggggccaggccgttctgtagacaggtatgaaccttgctaacaaaggtgacagtgagatagaattgattagtttttgcattaaacaaggaataactagaaaatctggttatgatttttaaaaatttcacaatttctagcctaattttgaaattaaaaaaaaatcaatatgaattagaatctgaaaaccagatttaaagtaaactgcctacttgaattgctatttttaaacactatattttagtacactaaaggtatttgaagggattataaagccacattttggaaattccagtttagtacttgcttagtaaatattttagtcaaattaaaattactataattatttaatgattaataactatttttccattgatgacattttgtgacctttgagataaattttgcctaacttaccatgccctaatgtgagtataaggaaagtgctatcattttataatgaaa

SEQ ID NO: 362833 - DNA, 4233 bp, Homo sapiens
cctaaattcctttatattgccttagtattaaggataatattatcttgcataatcttcctctgaaatatttattacttcccttcttaatgatttggaaaagcagtgtattttagataatatcttcttacagatactccaagtatcacagctaaattaattagtgaacaaaaagatgacaaagaaaagaaaaaccatgaagagaaagaaaaagttaaagcggaaaatggatttcaagacaattacagtgttgttgttgcctctgggctgaagtctcaatctaaacgtgctgtgtcagctacaccacctcgcccaccatccaggagggggaggacaatacctgataaaataggaagtacttcaggagcagaggctgccaacaaaataattactgtcccagtgtttcacctgtttcacaaactcttggcaggccagccattgccagctgaaatgacacttgcccagcttttaactctcctatatgaccgaaaacttcctcagggttaccgctcaatagatctgactgttaaattgggatcaagagttataacagaccccagtctatcaaaaacagattcttataaaagactacaccctgaaaaagatcatggagacttacttgctagctgtccagaagatgaggctctcactccaggtgatgaatgcatggatgggatactggatgaatctttgcttgaaacctgtccaattcagtcaccattacaagtttttgcaggaatgggtggactggctcttattgctgaaagactacccatgctatatccagaagtaattcaacaggtgagtgctccagttgtaacatctaccactcaggaaaagccgaaggatagcgatcagtttgaatgggtgaccattgaacagtcaggggagttagtttatgaagcaccagaaactgttgcggctgaacctccacctatcaagtcagcagtacagaccatgtctcccatacctgcccattctttggctgcttttggattatttcttcgtcttccgggctatgcggaagtgctactgaaagagagaaaacatgcccagtgccttcttcgattggtattgggagtgacagatgatggagaaggaagtcatattcttcaatctccatcagccaatgtgcttccaacccttcctttccacgtccttcgtagcttgtttagcactacacctttgacaactgatgatggtgtacttctaaggcggatggcattggaaattggagccttacacctcattcttgtctgtctctctgctttgagccaccattccccacgagttccaaactctagcgtgaatcaaactgagccacaggtgtcaagctctcataaccctacatcaacagaagaacaacagttatattgggccaaagggactggctttggaacaggctctacagcttctgggtgggatgtggaacaagccttaactaagcaaaggctggaagaggaacatgttacctgccttctgcaggttcttgccagttacataaatcccgtcagtagtgcggtaaatggagaagctcagtcatctcatgagactagagggcagaacagtaatgcccttccttctgtacttctcgagcttctcagtcagtcctgcctcatcccagccatgtcatcttatctacgaaatgattcagttctggacatggcaagacatgtgccactctatcgggcactgctggaattgcttcgggccattgcttcttgtgctgccatggtgcccctattgttgcccctttctacagagaacggtgaagaggaagaagaacagtcagaatgtcaaacttctgttggtacattgttagccaaaatgaagacctgtgttgatacctataccaaccgtttaagggcagtgatcacaaccagattcaacgtatgcacaaagcagcggataccatggtagcggccgtcgctgattgcttttaccatgttggatccattgtcagtctcaaagacctacttccagctaggtgccttgaactcaaatagcttttcacacagacttcaggatgtgagctaagatctaaaagggaaaatgttaaaacaggagtaaaaccagatgcgtctgatcaagaaccagaaggacttactcttttggtaccagacatccaaaagactgctgagatagtttatgcagccaccaccagtttgcggcaagcaaatcaggaaaaaaaactgggtgaatactccaagaaggcggctatgaaacccaaacctttgtcagtattaaagtcacttgaagaaaaatatgtggctgttatgaagaaattacagtttgatacgtttgaaatggtttctgaagatgaagatgggaaattgggatttaaagtaaattaccactacatgtctcaggtgaaaaatgctaatgatgcgaacagtgctgccagagctcgccgccttgcccaggaagctgtgacgctttcaacctcactgcctctgtcttcatcctctagtgtgtttgtacgctgtgatgaggagcgacttgatatcatgaaggttctaataactggtccagcggacaccccttatgcaaatggctgctttgagtttgatgtgtattttcctcaagattatcccagttcaccccctcttgtgaatctagagacaactggtggtcatagcgtgcgattcaatccaaacctttataatgatggcaaggtttgtttaagcatcttaaacacgtggcatggaagaccagaagagaagtggaatcctcagacctcaagctttttgcaagtgttggtgtctgtccagtcccttatattagtagctgagccttattttaatgaaccgggatatgaacggtctagaggcactcccagtggcacacagagttctcgagaatatgatggaaacattcgacaagcaacagttaagtgggcaatgctagaacaaatcagaaacccttcaccatgttttaaagaggtaatacacaaacatttttacttgaaaagagttgagataatggcccaatgtgaggagtggattgcggatatccagcagtacagcagtgataagcgggtaggcaggactatgtctcaccatgcagcagctctcaagcgtcacactgctcagctccgcgaagagttgctgaaacttccctgccctgaaggcttggatcctgacactgacgatgccccagaggtgtgcagagccacaacaggtgctgaggagactctaatgcatgatcaggttaaacccagcagcagcaaagaactccccagtgacttccagttatgagctgcattgatgtggacttcatagacacaaaggcttcgaagcacaagccaaatatgtcaatatttgtatgtaagaaactaattatgtaataggtaatgaaactgaaactatactatgcccttaaggagatccagtttaattcaaggtgatcttttatttacctgtacaggagtgtaaacttttttgtgcttttatttttcaattgtgagaaccactgattggtatgttcaacaaatttgtgtatacaaagaaatggataaatcactgctatataagggaaactaccttaggaaagaatgtttactgaatgtttattttattttttttttttttactatagagtgaggggttgttaacaaagaatatatattggtcattcttacaactactatttaaagtcagcaacttttcactgaatttgatagattttatgtttggccatatcttcatgctcacatttgatttctgaagacctcctacatacacttcaataaaagttaaatggacatactccctcttttttgatttactggtacatttttaaaataataaatctgccataaaatgcattatatctggagacttgcacttgtatggatgaatttattacattcaacatatttaattttatgccttctaattctaagatgcagaaaaaaataaatgaacatgattttattctatgccaacatttgggcctctgaatgtatctgttatttgaatttaagtatttgaaaaggaatggtcaatttgaaagtcattctaaactgattttttttttctaaagggctccttttttcctggactatgtggttttatgactaaagtcacatgtatgtattaaacattgaggctctgtagaggagagaggatgtacctctctggtgctgttacagtacattctgtacctgccatacaggctcattttcatgcaaattcttcctagagccaaataaataaagacttaggtgaattagta

SEQ ID NO: 362834 - DNA, 690 bp, Homo sapiens
ccgggtcccgcctccctccctgcttctccccctctcccgtcagcctccctccgagtttggcccctccgccgggcgatcgacgttccgcgtgcgtgcgggcgcctgacttcacttccggctaacgcgctcggcttgccccctggccccggatggtgactggtggtggtgctgcacctcccgggactgtcactgagccgcttcccagtgtgattgtgctgagcgcaggccggaagatggcggctgcggctgcggcggcctcgggccccggctgctcctcggcggcgggggcgggggcggccggggtctcagagtggctggtgctgcgggacggctgcatgcactgcgacgccgacgggctgcacagcctgtcctaccaccctgcgctcaacgccatcctggccgtcactagccgcgggaccatcaaagtcatcgacggcacctcgggggccacactgcaggcctccgcgctcagtggtgagtcttccgcacgccgggcgggcgcgaagccggggaaagaagccgtccagccccggggctcggcctcgcgactcggggaagcgagatggcgagagggcagggctgggggttcgggcccagccgtgaagggaggcccggaagctgatggagggggaccttaggacttggctttttcagcggctgcagttgggaggaaagaccggcgagtcaggg

SEQ ID NO: 362835 - DNA, 581 bp, Homo sapiens
  misc_feature (409)..(409): n is a, c, g, or t
  misc_feature (435)..(435): n is a, c, g, or t
gaggatccccgtctgagcacgctgggaagtaggaacattacctgccttctgaggttcttgccagttacataaatcccgtcagtagtgcggtaaatggagaagctcagtcatctcatgagactagagggcagaacagtaatgcccttccttctgtacttctcgagcttctcagtcagtcctgcctcatcccagccatgtcatcttatctacgaaatgattcaggtaaataatccctgtaaatgtgtctgtggatgaataattttgtttgcttattttatcattgtctaatagtaagtttcagttgaaatagttgatggatttatttcctaaaaagtattctggaaatatttagttggtttttggtgcctgtgctataggtgtcatatacaataaatcattggcaaggccnatgtcaagaatatttttccctatgtnttcttctggaagttttacagtttcagatcttacctttaagtcttttatcccttttgagtttatttttgctgtatggtgtaaaatagggttcatgttgccatatggatatccagttttcccagctgctcagacggtaccggctcgat

SEQ ID NO: 362836 - DNA, 749 bp, Homo sapiens
  misc_feature (54)..(54): n is a, c, g, or t
  misc_feature (63)..(63): n is a, c, g, or t
aaactggaaatgccaaattttcagcccagggttttttcaccacccaaactaaanatgacttantacatgggaacttcaatgcaacaagtagaatttgtactacctaaagcttgtatggttggacatgtggacttcaaattcgttttgaactcaaacatcaccaatattccacagatacaagtgacactgctgaaaaataaagctccaggattagggaaagtcaatggtaagaatgtatcaaaatttatctttgaagattttattttgtggttgatttctgaaaactaattttcaccttggctaagtttcgtgtccctttctgtcccttgttgccatttgcctgctttactttttgtgattttatttaaaaaagtaattcagagaacatttcagaacttttcagtaacccagtaatgttcagaattgcataaacttgaatcatataattatacttttttggaagtgagattagttcctttgtaaattagtttgacttttagcattactagctttatgtatttcttttcctaggagaagacttaattgtgaatagaactgttatggaagttacttttaaggttattagtgaagccagcctttcatgtaatgctaaaaatacactcatttttatctttcttacaagttcagaatttgttgcattgagttattaaagtagattatacacatttagcatggttagaaactagatgttactactgagtgttttctccttaataagttagtttaag

SEQ ID NO: 362837 - DNA, 382 bp, Homo sapiens
ttcaatttctacacttagatttcttaaggtgtctcaaattcaacacatcccaaacaagaggagatatatcttggggtggtgcttgggctcagtattccttaacttgcatgctacaagatattttagcaggagaggttcaatttctacacatatgggagaacaaaaagctgatgtatagccctgtatacagtgtagatattatttttgtaaaaacacaaggctaaattaatgaacaagaatactgaatatttcatcattaaaaatttcttgtatttcttgtgcattaatctgacgataatttccctgtatattatgttcatttagctgtttgtaatttttgttaattagatcaggttgtctgcattgttggtgtagaaattga

SEQ ID NO: 362838 - DNA, 238 bp, Homo sapiens
caaagaggcagagatttctatagctaatgacttaattgacttgtgtttttattatatcaacataagatataatttttttatgactgaatttttgtaaatataaaaaatggccattatttcatttggaaactaagttgcattatttcttataacatcatttgttttatgagcgcatgtactttaatttctgatatttctgtgagagctatgtgaattgtcattttataataaaagtgag

SEQ ID NO: 362839 - DNA, 15243 bp, Homo sapiens
ccgggtcccgcctccctccctgcttctccccctctcccgtcagcctccctccgagtttggcccctccgccgggcgatcgacgttccgcgtgcgtgcgggcgcctgacttcacttccggctaacgcgctcggcttgccccctggccccggatggtgactggtggtggtgctgcacctcccgggactgtcactgagccgcttcccagtgtgattgtgctgagcgcaggccggaagatggcggctgcggctgcggcggcctcgggccccggctgctcctcggcggcgggggcgggggcggccggggtctcagagtggctggtgctgcgggacggctgcatgcactgcgacgccgacgggctgcacagcctgtcctaccaccctgcgctcaacgccatcctggccgtcactagccgcgggaccatcaaagtcatcgacggcacctcgggggccacactgcaggcctccgcgctcagtgctaaaccaggtggacaggtgaaatgtcagtatatctctgctgtggataaagttatatttgtggatgattatgcagtagggtgtaggaaggaccttaatggaatcttgttgttagacactgctctgcaaactccagtttcaaagcaggatgatgtggttcagcttgaattacccgttacagaggcacagcagctcttatcagcatgtttagaaaaggtagatatttctagtacagagggttatgatttgttcatcacacagctcaaagatggtttaaaaaatacatctcatgagactgcagcaaaccacaaagttgctaagtgggccacagttacatttcatcttcctcatcatgtgttgaagtccattgccagtgccattgtaaatgaactcaagaaaataaatcaaaatgttgctgccttacctgtggcgtcctcagtgatggacagattgtcttacctcttacctagtgcacgtccagaactcggagtggggccaggccgttctgtagacagatcactgatgtatagtgaagctaacagacgggagacatttacctcatggcctcatgtaggctataggtgggcacaaccagatcccatggctcaagctggattttatcatcagcctgcctcatctggagatgatagagccatgtgttttacttgtagtgtatgcctcgtttgttgggaacctactgatgaaccttggtctgaacacgaaagacattccccaaactgcccatttgtgaaaggtgagcacacacagaatgtgccattgtcagtcactcttgcaacaagtcctgcacagtttccttgtacggatggaactgacagaatatcttgctttgggtcggggagctgccctcattttctagctgctgcaactaaacgaggaaagatctgcatatgggatgtttccaaacttatgaaggtgcacttaaagtttgaaattaatgcctatgatccagcaattgtacaacagcttattctatcaggagacccaagctcaggagttgattcaaggagaccaactttggcgtggctggaggactcctctagttgctcagatataccaaaattggaaggagatagtgatgatttactggaggattcagacagtgaagagcattccagatcagattctgtgacagggcatacatcacagaaggaagccatggaagtaagccttgatataacagcactcagcattctccaacagccagaaaaacttcagtgggagattgttgcaaatgtgcttgaagatactgttaaggatcttgaagaacttggggcaaatccttgtttaacaaactctaagagtgaaaagacaaaggaaaagcaccaggagcaacacaacattccttttccatgtttattagctggaggtttattaacatataaatctcctgctacctcacccattagtagtaattctcacaggtcactggatggtttaagcagaactcagggtgaaagtatatcagaacaagggtcaactgacaatgaatcctgcactaattcagaactaaattctcctctggtaaggaggactttaccggttttgcttctttatagcatcaaggaatctgatgagaaagcaggaaagatcttttcacagatgaacaatattatgagtaaaagtttgcatgatgatggttttactgttccacagattattgaaatggagctggatagtcaggagcagttgttattgcaggatcctcctgtgacttacattcagcaatttgcagatgcagcagccaaccttacctctccggattctgagaagtggaactctgtgtttcccaagcctgggactttggttcagtgcttgaggctgccaaagtttgcagaggaggagaatctttgtatagactcaataactccttgtgctgacggaattcatttgttggtaggactgcggacatgccctgttgaatccttgagtgcaataaatcaagtagaggccttgaataatttaaataaattaaactctgcactatgtaatagacggaaaggtgagctggaatcaaatcttgctgtagtgaatggtgcaaatattagtgtaatccaacatgaatcaccagcagatgtacagactcctttaataattcagcctgagcagaggaatgttagtggtggatatttagtgctttataaaatgaattatgccactcggatagtgactttagaagaggagccaataaaaatacaacatatcaaagatccccaggacacaattacctcgctcattttgcttccacccgatatattggataatcgagaggatgactgtgaggaacctattgaggacatgcagttaacctcaaagaatggttttgagagagaaaaaacgtctgacatttctactcttggacacctggtaataaccactcagggaggatatgtaaaaatactagatctttcaaactttgaaattttggccaaagtggagcctcccaaaaaggagggcactgaggaacaggacacatttgtttctgtgatttactgttctggcacagacaggctgtgtgcatgcaccaaaggtggtgagcttcattttctccaaattggaggaacctgtgatgatattgatgaagctgatatactagtggatggatctctttctaaaggaatagaaccatcttcagaaggttccaaacctttatcaaatccttcaagtcctggcatttcaggagttgatttattggtggaccagccattcacccttgaaatcttgacatccctagtggagctaacccgctttgagactttgactccaaggttttcagcgactgttcctccatgctgggtagaagttcaacaagaacagcagcaaaggaggcatcctcaacatttgcatcagcaacaccatggtgatgctgctcagcatactcgaacttggaaactacagaccgacagcaacagctgggatgaacatgtatttgaattagtactacctaaagcttgtatggttggacatgtggacttcaaattcgttttgaactcaaacatcaccaatattccacagatacaagtgacactgctgaaaaataaagctccaggattagggaaagtcaatgctcttaacattgaagtggaacaaaatgggaaaccgtccctggttgatttgaatgaagaaatgcagcacatggatgtagaggaatcccagtgtcttagattatgtccatttttggaggatcataaagaagacattctatgtgggccagtatggcttgctagtggccttgatctatcagggcatgctggaatgttgacgttaacaagccccaaacttgttaaaggtatggcaggaggaaaatatcgttcgtttttaatccatgtcaaggcagtgaatgaaagaggaacagaagagatttgtaatggtggtatgcgtcctgtagtaaggcttccatccctaaaacaccagagtaacaagggttattcacttgcttcacttttggctaaagttgcagcaggcaaggaaaaatcatctaatgttaagaatgaaaatacaagtggcacccgtaaatctgaaaacctccggggctgtgatttacttcaagaggtctcagtcaccattcgaagatttaagaaaacctcaatttctaaggaaagagtgcaacgatgtgccatgttacagttttcagaatttcatgagaagcttcttaatactctttgcagaaaaacagatgatggccagatcacagaacatgcccagagccttgtgttggatactctctgttggttagctggagttcattcaaatggacccggaagctcaaaggaaggaaatgagaacctactttcaaaaacacgaaaatttctgtcagacatcgtacgtgtttgcttctttgaggcaggacgaagtatagcccataagtgtgcccgatttctagccttgtgcattagtaatggcaaatgtgacccatgtcaaccagcatttggacctgttctgttgaaggctttacttgataatatgtcatttttacctgcagcaacaactggtggttctgtctattggtattttgtcttactgaattatgtgaaagatgaagatctggctggatgcagtacagcttgtgcatctttgcttactgcagtgtccagacagttacaggacaggctaacaccaatggaggctttacttcagacaagatatggattatatagctcaccatttgatccagtcctctttgatttggagatgagtggctcttcttgtaaaaatgtttataacagcagcattggtgtccagtcagatgaaattgatttatcagatgtcctttcaggaaatggaaaggtcagtagttgcacagctgctgagggtagtttcacatctctcactggacttttggaagttgaacctctgcactttacttgtgtgtcaactagtgatggaaccagaatagaaagggatgatgcaagtacgtttactgtgagttccttcggggttactcctgcagtaggtggactatcatctgggacagttggggaagcctcgacagccctgagttcagcagcccaggtagctttgcagtctctctctcatgcaatggcttcagccgagcaacagctacaggtgctgcaagagaaacagcagcagcttttgaagcttcagcaacagaaagcaaagctggaagccaagttacatcagacaacagctgcagcagctgcagcagcatcagcagtaggtcctgttcacaactctgtgccttccaacccagtggctgcccctggattcttcattcatccatctgatgttattccacccactccaaaaacaacacctctttttatgactccaccactcactccacccaatgaagcagtttccgttgtgattaatgccgaacttgcacagcttttcccaggctcagtcattgatcccccagcagtcaatcttgctgcacataacaaaaattccaacaagtccagaatgaatccacttggttctggtctagcccttgcaatttctcatgcttcacattttcttcaacctccgcctcaccagtccattattatagagcgaatgcattcaggagcaagaagatttgtgaccttggattttgggaggcctatattgttgactgatgtattgattcccacttgtggagacttggcctctttgtcaattgacatttggacattaggagaagaggtggatggaaggcggttggtagtggcaactgatataagcactcattcactaattcttcatgacttaataccacctcccgtgtgcagattcatgaagatcactgttattggacgttacgggagtacaaatgccagagccaaaatcccattaggattttactatggtcatacctacatcttgccttgggaaagtgaactgaagttaatgcatgatcctctaaagggagagggagaatctgcaaaccagccagaaattgaccagcatttagcaatgatggttgctttgcaggaggatatacagtgcaggtataacttggcttgtcatcgtctggaaacccttttgcaaagtattgatcttcctcctctaaacagtgctaacaatgcacagtactttttacgaaaaccagataaggcagttgaggaagacagtagggttttttctgcttatcaagattgtattcagctacagcttcaactaaatttggctcataatgcagtgcagaggctcaaagtggcgctaggtgcaagccggaagatgttgagtgaaacatcaaatccagaagatttaattcagacatcttccacagagcagttacgtactatcatcagatatttactggacactttgctcagcctgcttcatgcttctaatggacactctgttcctgcagttttgcagagcacatttcatgcccaggcctgtgaagagctctttaaacacttgtgcatcagtggaaccccaaagatacggttacatactggtcttcttcttgttcaactgtgtggtggtgaaaggtggtggggtcaatttctttctaatgtccttcaggaattgtacaattcggaacagcttctcatctttccacaggatagggtcttcatgttactttcctgcattggtcaaagatcacttagtaatagtggagtattagaaagcttacttaatctcttggataatttattgtcacctcttcagccacagttacccatgcataggaggacagaaggagtactagatattcccatgatcagttgggttgttatgctggtgtccaggttgctggattatgtggcaactgttgaagatgaagcagcagctgcaaagaaacctttgaatggtaatcagtggagttttattaacaataatctacacactcagagcttaaatagatcttctaaaggcagcagtagccttgatagattatattccagaaaaatcagaaagcagcttgttcatcataaacagcaacttaacctactaaaagcaaagcagaaggcattggtagaacagatggaaaaagaaaaaatacaaagtaacaaaggatcatcatataaactcctggtagaacaagcaaaactaaagcaggccacttcaaagcactttaaggatttaattcgtttacgtcggacagcagaatggtcccgttctaatttagacacagaagttacaacagcaaaagaaagtcctgagatagaaccacttccatttactctggcccatgagcgttgtatctcagtagtccagaaacttgttctgtttcttctctccatggactttacatgtcatgcagatctcttattgtttgtttgtaaggttcttgcacgcattgcaaatgccacgaggccaactattcatctgtgtgagattgtgaacgaaccccagctggaaagactgctgttacttttggttggaactgacttcaatagaggagatatatcttggggtggtgcttgggctcagtattccttaacttgcatgctacaagatattttagcaggagaattactggctccagtagccgcagaagccatggaggaaggaacagtgggtgatgatgtaggtgcgacagctggtgactctgatgactcccttcaacagtcctcagttcagttgctggaaactatagatgaacctttgacacatgacataacaggtgcacctcctctgtcctctttggaaaaagataaagaaattgaccttgagttacttcaggatctaatggaagttgacattgatcctttagatattgatttggaaaaggaccctcttgcagccaaggtttttaagccaataagcagtacatggtatgattattggggtgctgattatgggacctacaattacaacccttacattggaggtctgggaattcctgtagcaaagccaccagcaaacacggagaagaacggatcacagacagttagcgtttcagtctctcaggccctggatgctcgcctagaagttggacttgaacagcaagcagaactgatgttgaaaatgatgtctactctggaggcagattccattttacaggcattaacaaatacatctcctacattatcacagtctcccactggaacagatgattcacttctagggggtttacaagcagcaaaccaaaccagccagcttattatacagttatcatctgtcccaatgttaaatgtttgtttcaacaaacttttttccatgcttcaagtccatcatgttcagttggagtcacttctccaattgtggctcacactgagcctgaattctagttcaactggaaacaaagaaaatggagcagacatatttttatataatgctaataggatacctgttatttcattaaatcaagcatcaataactagctttctcacagtgttagcttggtatcccaatactttgctccggacatggtgccttgtgcttcatagcctaacactcatgacaaacatgcagcttaattctggttccagcagtgccattggaactcaggagagtactgctcatttgttggtttcagatccaaacctaattcatgtattagtgaaatttctttctggcaccagtccacatggaacaaatcaacacagtccacaggttggtcctacagctacacaagctatgcaagaatttcttactcgattacaagtgcatctttcttcaacatgtcctcagatattcagtgaatttttgctcaagctaattcatatactttcaactgaaaggggtgctttccagacaggccaaggacctctcgatgcccaagtgaagctcttagaattcactctggagcagaattttgaagtcgtttcagttagtactatttctgccgtgatagaatcggttacatttttagtgcaccactatatcacttgctcagacaaagtaatgtcaagaagtggatcagatagctccgtgggtgctcgagcatgctttgggggactctttgccaatcttattcgtccgggtgatgcaaaagcagtttgtggcgaaatgacaagagatcaactcatgtttgatttgttaaaacttgttaacattttagtgcagctgcctctttcaggcaatagggaatacagtgcaagagtgtctgtgaccacaaatacaacagatagtgtttcagatgaagaaaaagtctcaggaggcaaagatggcaatggaagcagtaccagtgttcaaggatcgcctgcatatgttgctgacttagtcttagccaaccaacaaattatgagccagattttgtctgctctgggcctgtgtaatagcagtgccatggcaatgataattggagcaagtggattacatctcactaaacatgaaaactttcatggtgggttggatgccatatcagttggggatggattatttaccatactgacaacccttagtaaaaaagcttctacagtccacatgatgctgcagccaattttaacatacatggcctgtggatatatgggcagacaaggctctcttgctacttgccagttatctgagccattattgtggttcattttgagagtattggatactagtgatgccttgaaagcatttcatgatatgggtggtgttcagctcatatgcaataatatggttactagtacaagggctattgtgaacactgcaagaagtatggtatcaactattatgaaatttcttgactctggtccaaataaagctgttgacagcacattgaaaacaagaatactagcttctgagcctgacaatgctgaagggattcataactttgcacccctcggtacaatcacatctagcagtcctactgcccaaccagctgaagtgctattgcaggccacacctcctcacagaagagctcgctctgctgcttggtcctacatctttcttccagaggaggcttggtgtgaccttaccattcaccttcctgcagcagtgctgcttaaggagatacatatccagcctcatcttgcatctcttgcaacctgcccttcctcagtgtctgttgaagtaagtgcagatggggtaaatatgctacctttgtccactcctgttgtcacaagtggcctcacctacataaaaattcagcttgtaaaagccgaagtagcttctgctgtctgccttagactacatcgtccacgggatgccagcacattaggcctttcacaaattaaattattggggctcactgcttttggtaccacctcttctgcaacagttaataatccattccttccatctgaagatcaggtatccaaaacaagtattggatggttacggttattacatcattgccttactcacataagtgatctagaaggaatgatggcaagtgcagctgcacctactgctaatctgctgcagacttgtgcggccttattgatgtcaccttactgtggaatgcattcacccaacatcgaggttgtgcttgtaaagataggactgcagtctactagaattggcctgaagctcatagacattctcctgagaaattgtgcagcatcaggcagtgatcctacagatttgaatagtcctttactttttggaagactaaatggactctcttctgactctacgatagatattctttaccagcttggaacaactcaggatcctggtacaaaagacagaattcaggccttgttaaaatgggttagtgattctgcaagagtggctgctatgaagagaagtggcaggatgaactacatgtgtcctaactcctcaacagtagagtatggtcttctgatgccatctccttctcatttgcactgtgtagcagccattctgtggcatagttatgagctgcttgtagaatatgacttaccagcactcctggaccaagagctctttgagttactttttaattggtccatgtctcttccctgcaatatggttttgaagaaagctgttgacagtctactttgctcaatgtgtcacgtacacccaaactatttttctttgctcatgggctggatgggaattacccctcctccagtgcaatgtcatcatagactgtccatgacagatgatagcaaaaagcaggatcttagttcatctttaacagatgactctaaaaatgcacaagcacctctcgcattaactgaatcacatttggctacccttgcttcctcttctcaatctcctgaagctattaaacaattactagactcaggtttgccttctcttcttgtgaggagtctggctagtttctgctttagccacatttctagctcagaaagcattgcccagtcaatagatatttcccaggacaaactcaggcgccatcatgtcccacaacaatgtaataagatgcctatcacagccgacctagttgctcctattcttaggtttttgacagaagttggcaatagccatattatgaaagattggcttggtggttctgaagtcaatccactatggacagcacttctgtttttattgtgtcactctgggtccacttctggaagccataatttaggtgcacaacagaccagtgcaagatcagcttctctttcttcagctgctacaacaggactgactactcaacagcgcacagcaattgagaatgcaactgttgcgttctttctacagtgcatttcatgccatcctaataatcaaaagctgatggcacaggttctttgtgaactatttcagacatctcctcaaagagggaaccttccaacatctgggaacatttcagggtttatacgaagattatttttacagttgatgctggaagatgagaaagtgacaatgtttcttcagtctccatgtccactgtacaaaggtagaattaatgctactagccacgtcatccagcatccaatgtatggagcaggccacaaattccgtactcttcatttgccagtctcaacaacattatcagatgttcttgacagagtgtcagatactccaagtatcacagctaaattaattagtgaacaaaaagatgacaaagaaaagaaaaaccatgaagagaaagaaaaagttaaagcggaaaatggatttcaagacaattacagtgttgttgttgcctctgggctgaagtctcaatctaaacgtgctgtgtcagctacaccacctcgcccaccatccaggagggggaggacaatacctgataaaataggaagtacttcaggagcagaggctgccaacaaaataattactgtcccagtgtttcacctgtttcacaaactcttggcaggccagccattgccagctgaaatgacacttgcccagcttttaactctcctatatgaccgaaaacttcctcagggttaccgctcaatagatctgactgttaaattgggatcaagagttataacagaccccagtctatcaaaaacagattcttataaaagactacaccctgaaaaagatcatggagacttacttgctagctgtccagaagatgaggctctcactccaggtgatgaatgcatggatgggatactggatgaatctttgcttgaaacctgtccaattcagtcaccattacaagtttttgcaggaatgggtggactggctcttattgctgaaagactacccatgctatatccagaagtaattcaacaggtgagtgctccagttgtaacatctaccactcaggaaaagccgaaggatagcgatcagtttgaatgggtgaccattgaacagtcaggggagttagtttatgaagcaccagaaactgttgcggctgaacctccacctatcaagtcagcagtacagaccatgtctcccatacctgcccattctttggctgcttttggattatttcttcgtcttccgggctatgcggaagtgctactgaaagagagaaaacatgcccagtgccttcttcgattggtattgggagtgacagatgatggagaaggaagtcatattcttcaatctccatcagccaatgtgcttccaacccttcctttccacgtccttcgtagcttgtttagcactacacctttgacaactgatgatggtgtacttctaaggcggatggcattggaaattggagccttacacctcattcttgtctgtctctctgctttgagccaccattccccacgagttccaaactctagcgtgaatcaaactgagccacaggtgtcaagctctcataaccctacatcaacagaagaacaacagttatattgggccaaagggactggctttggaacaggctctacagcttctgggtgggatgtggaacaagccttaactaagcaaaggctggaagaggaacatgttacctgccttctgcaggttcttgccagttacataaatcccgtcagtagtgcggtaaatggagaagctcagtcatctcatgagactagagggcagaacagtaatgcccttccttctgtacttctcgagcttctcagtcagtcctgcctcatcccagccatgtcatcttatctacgaaatgattcagttctggacatggcaagacatgtgccactctatcgggcactgctggaattgcttcgggccattgcttcttgtgctgccatggtgcccctattgttgcccctttctacagagaacggtgaagaggaagaagaacagtcagaatgtcaaacttctgttggtacattgttagccaaaatgaagacctgtgttgatacctataccaaccgtttaagatctaaaagggaaaatgttaaaacaggagtaaaaccagatgcgtctgatcaagaaccagaaggacttactcttttggtaccagacatccaaaagactgctgagatagtttatgcagccaccaccagtttgcggcaagcaaatcaggaaaaaaaactgggtgaatactccaagaaggcggctatgaaacccaaacctttgtcagtattaaagtcacttgaagaaaaatatgtggctgttatgaagaaattacagtttgatacgtttgaaatggtttctgaagatgaagatgggaaattgggatttaaagtaaattaccactacatgtctcaggtgaaaaatgctaatgatgcgaacagtgctgccagagctcgccgccttgcccaggaagctgtgacgctttcaacctcactgcctctgtcttcatcctctagtgtgtttgtacgctgtgatgaggagcgacttgatatcatgaaggttctaataactggtccagcggacaccccttatgcaaatggctgctttgagtttgatgtgtattttcctcaagattatcccagttcaccccctcttgtgaatctagagacaactggtggtcatagcgtgcgattcaatccaaacctttataatgatggcaaggtttgtttaagcatcttaaacacgtggcatggaagaccagaagagaagtggaatcctcagacctcaagctttttgcaagtgttggtgtctgtccagtcccttatattagtagctgagccttattttaatgaaccgggatatgaacggtctagaggcactcccagtggcacacagagttctcgagaatatgatggaaacattcgacaagcaacagttaagtgggcaatgctagaacaaatcagaaacccttcaccatgttttaaagaggtaatacacaaacatttttacttgaaaagagttgagataatggcccaatgtgaggagtggattgcggatatccagcagtacagcagtgataagcgggtaggcaggactatgtctcaccatgcagcagctctcaagcgtcacactgctcagctccgcgaagagttgctgaaacttccctgccctgaaggcttggatcctgacactgacgatgccccagaggtgtgcagagccacaacaggtgctgaggagactctaatgcatgatcaggttaaacccagcagcagcaaagaactccccagtgacttccagttatgagctgcattgatgtggacttcatagacacaaaggcttcgaagcacaagccaaatatgtcaatatttgtatgtaagaaactaattatgtaataggtaatgaaactgaaactatactatgcccttaaggagatccagtttaattcaaggtgatcttttatttacctgtacaggagtgtaaacttttttgtgcttttatttttcaattgtgagaaccactgattggtatgttcaacaaatttgtgtatacaaagaaatggataaatcactgctatataagggaaactaccttaggaaagaatgtttactgaatgtttattttattttttttttttttactatagagtgaggggttgttaacaaagaatatatattggtcattcttacaactactatttaaagtcagcaacttttcactgaatttgatagattttatgtttggccatatcttcatgctcacatttgatttctgaagacctcctacatacacttcaataaaagttaaatggaca

SEQ ID NO: 362840 - DNA, 15967 bp, Homo sapiens
ccgggtcccgcctccctccctgcttctccccctctcccgtcagcctccctccgagtttggcccctccgccgggcgatcgacgttccgcgtgcgtgcgggcgcctgacttcacttccggctaacgcgctcggcttgccccctggccccggatggtgactggtggtggtgctgcacctcccgggactgtcactgagccgcttcccagtgtgattgtgctgagcgcaggccggaagatggcggctgcggctgcggcggcctcgggccccggctgctcctcggcggcgggggcgggggcggccggggtctcagagtggctggtgctgcgggacggctgcatgcactgcgacgccgacgggctgcacagcctgtcctaccaccctgcgctcaacgccatcctggccgtcactagccgcgggaccatcaaagtcatcgacggcacctcgggggccacactgcaggcctccgcgctcagtgctaaaccaggtggacaggtgaaatgtcagtatatctctgctgtggataaagttatatttgtggatgattatgcagtagggtgtaggaaggaccttaatggaatcttgttgttagacactgctctgcaaactccagtttcaaagcaggatgatgtggttcagcttgaattacccgttacagaggcacagcagctcttatcagcatgtttagaaaaggtagatatttctagtacagagggttatgatttgttcatcacacagctcaaagatggtttaaaaaatacatctcatgagactgcagcaaaccacaaagttgctaagtgggccacagttacatttcatcttcctcatcatgtgttgaagtccattgccagtgccattgtaaatgaactcaagaaaataaatcaaaatgttgctgccttacctgtggcgtcctcagtgatggacagattgtcttacctcttacctagtgcacgtccagaactcggagtggggccaggccgttctgtagacagatcactgatgtatagtgaagctaacagacgggagacatttacctcatggcctcatgtaggctataggtgggcacaaccagatcccatggctcaagctggattttatcatcagcctgcctcatctggagatgatagagccatgtgttttacttgtagtgtatgcctcgtttgttgggaacctactgatgaaccttggtctgaacacgaaagacattccccaaactgcccatttgtgaaaggtgagcacacacagaatgtgccattgtcagtcactcttgcaacaagtcctgcacagtttccttgtacggatggaactgacagaatatcttgctttgggtcggggagctgccctcattttctagctgctgcaactaaacgaggaaagatctgcatatgggatgtttccaaacttatgaaggtgcacttaaagtttgaaattaatgcctatgatccagcaattgtacaacagcttattctatcaggagacccaagctcaggagttgattcaaggagaccaactttggcgtggctggaggactcctctagttgctcagatataccaaaattggaaggagatagtgatgatttactggaggattcagacagtgaagagcattccagatcagattctgtgacagggcatacatcacagaaggaagccatggaagtaagccttgatataacagcactcagcattctccaacagccagaaaaacttcagtgggagattgttgcaaatgtgcttgaagatactgttaaggatcttgaagaacttggggcaaatccttgtttaacaaactctaagagtgaaaagacaaaggaaaagcaccaggagcaacacaacattccttttccatgtttattagctggaggtttattaacatataaatctcctgctacctcacccattagtagtaattctcacaggtcactggatggtttaagcagaactcagggtgaaagtatatcagaacaagggtcaactgacaatgaatcctgcactaattcagaactaaattctcctctggtaaggaggactttaccggttttgcttctttatagcatcaaggaatctgatgagaaagcaggaaagatcttttcacagatgaacaatattatgagtaaaagtttgcatgatgatggttttactgttccacagattattgaaatggagctggatagtcaggagcagttgttattgcaggatcctcctgtgacttacattcagcaatttgcagatgcagcagccaaccttacctctccggattctgagaagtggaactctgtgtttcccaagcctgggactttggttcagtgcttgaggctgccaaagtttgcagaggaggagaatctttgtatagactcaataactccttgtgctgacggaattcatttgttggtaggactgcggacatgccctgttgaatccttgagtgcaataaatcaagtagaggccttgaataatttaaataaattaaactctgcactatgtaatagacggaaaggtgagctggaatcaaatcttgctgtagtgaatggtgcaaatattagtgtaatccaacatgaatcaccagcagatgtacagactcctttaataattcagcctgagcagaggaatgttagtggtggatatttagtgctttataaaatgaattatgccactcggatagtgactttagaagaggagccaataaaaatacaacatatcaaagatccccaggacacaattacctcgctcattttgcttccacccgatatattggataatcgagaggatgactgtgaggaacctattgaggacatgcagttaacctcaaagaatggttttgagagagaaaaaacgtctgacatttctactcttggacacctggtaataaccactcagggaggatatgtaaaaatactagatctttcaaactttgaaattttggccaaagtggagcctcccaaaaaggagggcactgaggaacaggacacatttgtttctgtgatttactgttctggcacagacaggctgtgtgcatgcaccaaagagtctcaccctgtcaacaggctggggtgcagttacgcaatcttggctcactgcaacttctgcctcccaggttcaagtgattctccggccttagcctcctgagtagctgggaccacaggtggtgagcttcattttctccaaattggaggaacctgtgatgatattgatgaagctgatatactagtggatggatctctttctaaaggaatagaaccatcttcagaaggttccaaacctttatcaaatccttcaagtcctggcatttcaggagttgatttattggtggaccagccattcacccttgaaatcttgacatccctagtggagctaacccgctttgagactttgactccaaggttttcagcgactgttcctccatgctgggtagaagttcaacaagaacagcagcaaaggaggcatcctcaacatttgcatcagcaacaccatggtgatgctgctcagcatactcgaacttggaaactacagaccgacagcaacagctgggatgaacatgtatttgaattagtactacctaaagcttgtatggttggacatgtggacttcaaattcgttttgaactcaaacatcaccaatattccacagatacaagtgacactgctgaaaaataaagctccaggattagggaaagtcaatgctcttaacattgaagtggaacaaaatgggaaaccgtccctggttgatttgaatgaagaaatgcagcacatggatgtagaggaatcccagtgtcttagattatgtccatttttggaggatcataaagaagacattctatgtgggccagtatggcttgctagtggccttgatctatcagggcatgctggaatgttgacgttaacaagccccaaacttgttaaaggtatggcaggaggaaaatatcgttcgtttttaatccatgtcaaggcagtgaatgaaagaggaacagaagagatttgtaatggtggtatgcgtcctgtagtaaggcttccatccctaaaacaccagagtaacaagggttattcacttgcttcacttttggctaaagttgcagcaggcaagagtgcaacgatgtgccatgttacagttttcagaatttcatgagaagcttcttaatactctttgcagaaaaacagatgatggccagatcacagaacatgcccagagccttgtgttggatactctctgttggttagctggagttcattcaaatggacccggaagctcaaaggaaggaaatgagaacctactttcaaaaacacgaaaatttctgtcagacatcgtacgtgtttgcttctttgaggcaggacgaagtatagcccataagtgtgcccgatttctagccttgtgcattagtaatggcaaatgtgacccatgtcaaccagcatttggacctgttctgttgaaggctttacttgataatatgtcatttttacctgcagcaacaactggtggttctgtctattggtattttgtcttactgaattatgtgaaagatgaagatctggctggatgcagtacagcttgtgcatctttgcttactgcagtgtccagacagttacaggacaggctaacaccaatggaggctttacttcagacaagatatggattatatagctcaccatttgatccagtcctctttgatttggagatgagtggctcttcttgtaaaaatgtttataacagcagcattggtgtccagtcagatgaaattgatttatcagatgtcctttcaggaaatggaaaggtcagtagttgcacagctgctgagggtagtttcacatctctcactggacttttggaagttgaacctctgcactttacttgtgtgtcaactagtgatggaaccagaatagaaagggatgatgcaagtacgtttactgtgagttccttcggggttactcctgcagtaggtggactatcatctgggacagttggggaagcctcgacagccctgagttcagcagcccaggtagctttgcagtctctctctcatgcaatggcttcagccgagcaacagctacaggtgctgcaagagaaacagcagcagcttttgaagcttcagcaacagaaagcaaagctggaagccaagttacatcagacaacagctgcagcagctgcagcagcatcagcagtaggtcctgttcacaactctgtgccttccaacccagtggctgcccctggattcttcattcatccatctgatgttattccacccactccaaaaacaacacctctttttatgactccaccactcactccacccaatgaagcagtttccgttgtgattaatgccgaacttgcacagcttttcccaggctcagtcattgatcccccagcagtcaatcttgctgcacataacaaaaattccaacaagtccagaatggtaaattatgttttaaataggtgttggcttagacatttgaaaatatcttgaaatatactcttactttagaaggccaaatttttaataccaactagatgtatcaagttattttcttttataaaatattacaggacatacattaagaggagaaacttattaatttgctattatggttagtagtttttataggactatagtaatatcaatataaagttagatttttttttttttgccctgctctagaatccacttggttctggtctagcccttgcaatttctcatgcttcacattttcttcaacctccgcctcaccagtccattattatagagcgaatgcattcaggagcaagaagatttgtgaccttggattttgggaggcctatattgttgactgatgtattgattcccacttgtggagacttggcctctttgtcaattgacatttggacattaggagaagaggtggatggaaggcggttggtagtggcaactgatataagcactcattcactaattcttcatgacttaataccacctcccgtgtgcagattcatgaagatcactgttattggacgttacgggagtacaaatgccagagccaaaatcccattaggattttactatggtcatacctacatcttgccttgggaaagtgaactgaagttaatgcatgatcctctaaagggagagggagaatctgcaaaccagccagaaattgaccagcatttagcaatgatggttgctttgcaggaggatatacagtgcaggtataacttggcttgtcatcgtctggaaacccttttgcaaagtattgatcttcctcctctaaacagtgctaacaatgcacagtactttttacgaaaaccagataaggcagttgaggaagacagtagggttttttctgcttatcaagattgtattcagctacagcttcaactaaatttggctcataatgcagtgcagaggctcaaagtggcgctaggtgcaagccggaagatgttgagtgaaacatcaaatccagaagatttaattcagacatcttccacagagcagttacgtactatcatcagatatttactggacactttgctcagcctgcttcatgcttctaatggacactctgttcctgcagttttgcagagcacatttcatgcccaggcctgtgaagagctctttaaacacttgtgcatcagtggaaccccaaagatacggttacatactggtcttcttcttgttcaactgtgtggtggtgaaaggtggtggggtcaatttctttctaatgtccttcaggaattgtacaattcggaacagcttctcatctttccacaggatagggtcttcatgttactttcctgcattggtcaaagatcacttagtaatagtggagtattagaaagcttacttaatctcttggataatttattgtcacctcttcagccacagttacccatgcataggaggacagaaggagtactagatattcccatgatcagttgggttgttatgctggtgtccaggttgctggattatgtggcaactgttgaagatgaagcagcagctgcaaagaaacctttgaatggtaaagacagggagaggtttctgacaggtaatcagtggagttttattaacaataatctacacactcagagcttaaatagatcttctaaaggcagcagtagccttgatagattatattccagaaaaatcagaaagcagcttgttcatcataaacagcaacttaacctactaaaagcaaagcagaaggcattggtagaacagatggaaaaagaaaaaatacaaagtaacaaaggatcatcatataaactcctggtagaacaagcaaaactaaagcaggccacttcaaagcactttaaggatttaattcgtttacgtcggacagcagaatggtcccgttctaatttagacacagaagttacaacagcaaaagaaagtcctgagatagaaccacttccatttactctggcccatgagcgttgtatctcagtagtccagaaacttgttctgtttcttctctccatggactttacatgtcatgcagatctcttattgtttgtttgtaaggttcttgcacgcattgcaaatgccacgaggccaactattcatctgtgtgagattgtgaacgaaccccagctggaaagactgctgttacttttggttggaactgacttcaatagaggagatatatcttggggtggtgcttgggctcagtattccttaacttgcatgctacaagatattttagcaggagaattactggctccagtagccgcagaagccatggaggaaggaacagtgggtgatgatgtaggtgcgacagctggtgactctgatgactcccttcaacagtcctcagttcagttgctggaaactatagatgaacctttgacacatgacataacaggtgcacctcctctgtcctctttggaaaaagataaagaaattgaccttgagttacttcaggatctaatggaagttgacattgatcctttagatattgatttggaaaaggaccctcttgcagccaaggtttttaagccaataagcagtacatggtatgattattggggtgctgattatgggacctacaattacaacccttacattggaggtctgggaattcctgtagcaaagccaccagcaaacacggagaagaacggatcacagacagttagcgtttcagtctctcaggccctggatgctcgcctagaagttggacttgaacagcaagcagaactgatgttgaaaatgatgtctactctggaggcagattccattttacaggcattaacaaatacatctcctacattatcacagtctcccactggaacagatgattcacttctagggggtttacaagcagcaaaccaaaccagccagcttattatacagttatcatctgtcccaatgttaaatgtttgtttcaacaaacttttttccatgcttcaagtccatcatgttcagttggagtcacttctccaattgtggctcacactgagcctgaattctagttcaactggaaacaaagaaaatggagcagacatatttttatataatgctaataggatacctgttatttcattaaatcaagcatcaataactagctttctcacagtgttagcttggtatcccaatactttgctccggacatggtgccttgtgcttcatagcctaacactcatgacaaacatgcagcttaattctggttccagcagtgccattggaactcaggagagtactgctcatttgttggtttcagatccaaacctaattcatgtattagtgaaatttctttctggcaccagtccacatggaacaaatcaacacagtccacaggttggtcctacagctacacaagctatgcaagaatttcttactcgattacaagtgcatctttcttcaacatgtcctcagatattcagtgaatttttgctcaagctaattcatatactttcaactgaaaggggtgctttccagacaggccaaggacctctcgatgcccaagtgaagctcttagaattcactctggagcagaattttgaagtcgtttcagttagtactatttctgccgtgatagaatcggttacatttttagtgcaccactatatcacttgctcagacaaagtaatgtcaagaagtggatcagatagctccgtgggtgctcgagcatgctttgggggactctttgccaatcttattcgtccgggtgatgcaaaagcagtttgtggcgaaatgacaagagatcaactcatgtttgatttgttaaaacttgttaacattttagtgcagctgcctctttcaggcaatagggaatacagtgcaagagtgtctgtgaccacaaatacaacagatagtgtttcagatgaagaaaaagtctcaggaggcaaagatggcaatggaagcagtaccagtgttcaaggatcgcctgcatatgttgctgacttagtcttagccaaccaacaaattatgagccagattttgtctgctctgggcctgtgtaatagcagtgccatggcaatgataattggagcaagtggattacatctcactaaacatgaaaactttcatggtgggttggatgccatatcagttggggatggattatttaccatactgacaacccttagtaaaaaagcttctacagtccacatgatgctgcagccaattttaacatacatggcctgtggatatatgggcagacaaggctctcttgctacttgccagttatctgagccattattgtggttcattttgagagtattggatactagtgatgccttgaaagcatttcatgatatgggtggtgttcagctcatatgcaataatatggttactagtacaagggctattgtgaacactgcaagaagtatggtatcaactattatgaaatttcttgactctggtccaaataaagctgttgacagcacattgaaaacaagaatactagcttctgagcctgacaatgctgaagggattcataactttgcacccctcggtacaatcacatctagcagtcctactgcccaaccagctgaagtgctattgcaggccacacctcctcacagaagagctcgctctgctgcttggtcctacatctttcttccagaggaggcttggtgtgaccttaccattcaccttcctgcagcagtgctgcttaaggagatacatatccagcctcatcttgcatctcttgcaacctgcccttcctcagtgtctgttgaagtaagtgcagatggggtaaatatgctacctttgtccactcctgttgtcacaagtggcctcacctacataaaaattcagcttgtaaaagccgaagtagcttctgctgtctgccttagactacatcgtccacgggatgccagcacattaggcctttcacaaattaaattattggggctcactgcttttggtaccacctcttctgcaacagttaataatccattccttccatctgaagatcaggtatccaaaacaagtattggatggttacggttattacatcattgccttactcacataagtgatctagaaggaatgatggcaagtgcagctgcacctactgctaatctgctgcagacttgtgcggccttattgatgtcaccttactgtggaatgcattcacccaacatcgaggttgtgcttgtaaagataggactgcagtctactagaattggcctgaagctcatagacattctcctgagaaattgtgcagcatcaggcagtgatcctacagatttgaatagtcctttactttttggaagactaaatggactctcttctgactctacgatagatattctttaccagcttggaacaactcaggatcctggtacaaaagacagaattcaggccttgttaaaatgggttagtgattctgcaagagtggctgctatgaagagaagtggcaggatgaactacatgtgtcctaactcctcaacagtagagtatggtcttctgatgccatctccttctcatttgcactgtgtagcagccattctgtggcatagttatgagctgcttgtagaatatgacttaccagcactcctggaccaagagctctttgagttactttttaattggtccatgtctcttccctgcaatatggttttgaagaaagctgttgacagtctactttgctcaatgtgtcacgtacacccaaactatttttctttgctcatgggctggatgggaattacccctcctccagtgcaatgtcatcatagactgtccatgacagatgatagcaaaaagcaggatcttagttcatctttaacagatgactctaaaaatgcacaagcacctctcgcattaactgaatcacatttggctacccttgcttcctcttctcaatctcctgaagctattaaacaattactagactcaggtttgccttctcttcttgtgaggagtctggctagtttctgctttagccacatttctagctcagaaagcattgcccagtcaatagatatttcccaggacaaactcaggcgccatcatgtcccacaacaatgtaataagatgcctatcacagccgacctagttgctcctattcttaggtttttgacagaagttggcaatagccatattatgaaagattggcttggtggttctgaagtcaatccactatggacagcacttctgtttttattgtgtcactctgggtccacttctggaagccataatttaggtgcacaacagaccagtgcaagatcagcttctctttcttcagctgctacaacaggactgactactcaacagcgcacagcaattgagaatgcaactgttgcgttctttctacagtgcatttcatgccatcctaataatcaaaagctgatggcacaggttctttgtgaactatttcagacatctcctcaaagagggaaccttccaacatctgggaacatttcagggtttatacgaagattatttttacagttgatgctggaagatgagaaagtgacaatgtttcttcagtctccatgtccactgtacaaaggtagaattaatgctactagccacgtcatccagcatccaatgtatggagcaggccacaaattccgtactcttcatttgccagtctcaacaacattatcagatgttcttgacagagtgtcagatactccaagtatcacagctaaattaattagtgaacaaaaagatgacaaagaaaagaaaaaccatgaagagaaagaaaaagttaaagcggaaaatggatttcaagacaattacagtgttgttgttgcctctgggctgaagtctcaatctaaacgtgctgtgtcagctacaccacctcgcccaccatccaggagggggaggacaatacctgataaaataggaagtacttcaggagcagaggctgccaacaaaataattactgtcccagtgtttcacctgtttcacaaactcttggcaggccagccattgccagctgaaatgacacttgcccagcttttaactctcctatatgaccgaaaacttcctcagggttaccgctcaatagatctgactgttaaattgggatcaagagttataacagaccccagtctatcaaaaacagattcttataaaagactacaccctgaaaaagatcatggagacttacttgctagctgtccagaagatgaggctctcactccaggtgatgaatgcatggatgggatactggatgaatctttgcttgaaacctgtccaattcagtcaccattacaagtttttgcaggaatgggtggactggctcttattgctgaaagactacccatgctatatccagaagtaattcaacaggtgagtgctccagttgtaacatctaccactcaggaaaagccgaaggatagcgatcagtttgaatgggtgaccattgaacagtcaggggagttagtttatgaagcaccagaaactgttgcggctgaacctccacctatcaagtcagcagtacagaccatgtctcccatacctgcccattctttggctgcttttggattatttcttcgtcttccgggctatgcggaagtgctactgaaagagagaaaacatgcccagtgccttcttcgattggtattgggagtgacagatgatggagaaggaagtcatattcttcaatctccatcagccaatgtgcttccaacccttcctttccacgtccttcgtagcttgtttagcactacacctttgacaactgatgatggtgtacttctaaggcggatggcattggaaattggagccttacacctcattcttgtctgtctctctgctttgagccaccattccccacgagttccaaactctagcgtgaatcaaactgagccacaggtgtcaagctctcataaccctacatcaacagaagaacaacagttatattgggccaaagggactggctttggaacaggctctacagcttctgggtgggatgtggaacaagccttaactaagcaaaggctggaagaggaacatgttacctgccttctgcaggttcttgccagttacataaatcccgtcagtagtgcggtaaatggagaagctcagtcatctcatgagactagagggcagaacagtaatgcccttccttctgtacttctcgagcttctcagtcagtcctgcctcatcccagccatgtcatcttatctacgaaatgattcagttctggacatggcaagacatgtgccactctatcgggcactgctggaattgcttcgggccattgcttcttgtgctgccatggtgcccctattgttgcccctttctacagagaacggtgaagaggaagaagaacagtcagaatgtcaaacttctgttggtacattgttagccaaaatgaagacctgtgttgatacctataccaaccgtttaagatctaaaagggaaaatgttaaaacaggagtaaaaccagatgcgtctgatcaagaaccagaaggacttactcttttggtaccagacatccaaaagactgctgagatagtttatgcagccaccaccagtttgcggcaagcaaatcaggaaaaaaaactgggtgaatactccaagaaggcggctatgaaacccaaacctttgtcagtattaaagtcacttgaagaaaaatatgtggctgttatgaagaaattacagtttgatacgtttgaaatggtttctgaagatgaagatgggaaattgggatttaaagtaaattaccactacatgtctcaggtgaaaaatgctaatgatgcgaacagtgctgccagagctcgccgccttgcccaggaagctgtgacgctttcaacctcactgcctctgtcttcatcctctagtgtgtttgtacgctgtgatgaggagcgacttgatatcatgaaggttctaataactggtccagcggacaccccttatgcaaatggctgctttgagtttgatgtgtattttcctcaagattatcccagttcaccccctcttgtgaatctagagacaactggtggtcatagcgtgcgattcaatccaaacctttataatgatggcaaggtttgtttaagcatcttaaacacgtggcatggaagaccagaagagaagtggaatcctcagacctcaagctttttgcaagtgttggtgtctgtccagtcccttatattagtagctgagccttattttaatgaaccgggatatgaacggtctagaggcactcccagtggcacacagagttctcgagaatatgatggaaacattcgacaagcaacagttaagtgggcaatgctagaacaaatcagaaacccttcaccatgttttaaagaggtaatacacaaacatttttacttgaaaagagttgagataatggcccaatgtgaggagtggattgcggatatccagcagtacagcagtgataagcgggtaggcaggactatgtctcaccatgcagcagctctcaagcgtcacactgctcagctccgcgaagagttgctgaaacttccctgccctgaaggcttggatcctgacactgacgatgccccagaggtgtgcagagccacaacaggtgctgaggagactctaatgcatgatcaggttaaacccagcagcagcaaagaactccccagtgacttccagttatgagctgcattgatgtggacttcatagacacaaaggcttcgaagcacaagccaaatatgtcaatatttgtatgtaagaaactaattatgtaataggtaatgaaactgaaactatactatgcccttaaggagatccagtttaattcaaggtgatcttttatttacctgtacaggagtgtaaacttttttgtgcttttatttttcaattgtgagaaccactgattggtatgttcaacaaatttgtgtatacaaagaaatggataaatcactgctatataagggaaactaccttaggaaagaatgtttactgaatgtttattttattttttttttttttactatagagtgaggggttgttaacaaagaatatatattggtcattcttacaactactatttaaagtcagcaacttttcactgaatttgatagattttatgtttggccatatcttcatgctcacatttgatttctgaagacctcctacatacacttcaataaaagttaaatggacatactccctcttttttgatttactggtacatttttaaaataataaatctgccataaaatgcattatatctggagacttgcacttgtatggatgaatttattacattcaacatatttaattttatgccttctaattctaagatgcagaaaaaaataaatgaacatgattttattctatgccaacatttgggcctctgaatgtatctgttatttgaatttaagtatttgaaaaggaatggtcaatttgaaagtcattctaaactgattttttttttctaaagggctccttttttcctggactatgtggttttatgactaaagtcacatgtatgtattaaacattgaggctctgtagaggagagaggatgtacctctctggtgctgttacagtacattctgtacctgccatacaggctcattttcatgcaaattcttcctagagccaaataaataaagacttaggtgaattagta

SEQ ID NO: 362841 - DNA, 12210 bp, Homo sapiens
ggcagatcacctttcctttgtctccagctcttaacattgaagtggaacaaaatgggaaaccgtccctggttgatttgaatgaagaaatgcagcacatggatgtagaggaatcccagtgtcttagattatgtccatttttggaggatcataaagaagacattctatgtgggccagtatggcttgctagtggccttgatctatcagggcatgctggaatgttgacgttaacaagccccaaacttgttaaaggtatggcaggaggaaaatatcgttcgtttttaatccatgtcaaggcagtgaatgaaagaggaacagaagagatttgtaatggtggtatgcgtcctgtagtaaggcttccatccctaaaacaccagagtaacaagggttattcacttgcttcacttttggctaaagttgcagcaggcaaggaaaaatcatctaatgttaagaatgaaaatacaagtggcacccgtaaatctgaaaacctccggggctgtgatttacttcaagaggtctcagtcaccattcgaagatttaagaaaacctcaatttctaaggaaagagtgcaacgatgtgccatgttacagttttcagaatttcatgagaagcttcttaatactctttgcagaaaaacagatgatggccagatcacagaacatgcccagagccttgtgttggatactctctgttggttagctggagttcattcaaatggacccggaagctcaaaggaaggaaatgagaacctactttcaaaaacacgaaaatttctgtcagacatcgtacgtgtttgcttctttgaggcaggacgaagtatagcccataagtgtgcccgatttctagccttgtgcattagtaatggcaaatgtgacccatgtcaaccagcatttggacctgttctgttgaaggctttacttgataatatgtcatttttacctgcagcaacaactggtggttctgtctattggtattttgtcttactgaattatgtgaaagatgaagatctggctggatgcagtacagcttgtgcatctttgcttactgcagtgtccagacagttacaggacaggctaacaccaatggaggctttacttcagacaagatatggattatatagctcaccatttgatccagtcctctttgatttggagatgagtggctcttcttgtaaaaatgtttataacagcagcattggtgtccagtcagatgaaattgatttatcagatgtcctttcaggaaatggaaaggtcagtagttgcacagctgctgagggtagtttcacatctctcactggacttttggaagttgaacctctgcactttacttgtgtgtcaactagtgatggaaccagaatagaaagggatgatgcaagtacgtttactgtgagttccttcggggttactcctgcagtaggtggactatcatctgggacagttggggaagcctcgacagccctgagttcagcagcccaggtagctttgcagtctctctctcatgcaatggcttcagccgagcaacagctacaggtgctgcaagagaaacagcagcagcttttgaagcttcagcaacagaaagcaaagctggaagccaagttacatcagacaacagctgcagcagctgcagcagcatcagcagtaggtcctgttcacaactctgtgccttccaacccagtggctgcccctggattcttcattcatccatctgatgttattccacccactccaaaaacaacacctctttttatgactccaccactcactccacccaatgaagcagtttccgttgtgattaatgccgaacttgcacagcttttcccaggctcagtcattgatcccccagcagtcaatcttgctgcacataacaaaaattccaacaagtccagaatgaatccacttggttctggtctagcccttgcaatttctcatgcttcacattttcttcaacctccgcctcaccagtccattattatagagcgaatgcattcaggagcaagaagatttgtgaccttggattttgggaggcctatattgttgactgatgtattgattcccacttgtggagacttggcctctttgtcaattgacatttggacattaggagaagaggtggatggaaggcggttggtagtggcaactgatataagcactcattcactaattcttcatgacttaataccacctcccgtgtgcagattcatgaagatcactgttattggacgttacgggagtacaaatgccagagccaaaatcccattaggattttactatggtcatacctacatcttgccttgggaaagtgaactgaagttaatgcatgatcctctaaagggagagggagaatctgcaaaccagccagaaattgaccagcatttagcaatgatggttgctttgcaggaggatatacagtgcaggtataacttggcttgtcatcgtctggaaacccttttgcaaagtattgatcttcctcctctaaacagtgctaacaatgcacagtactttttacgaaaaccagataaggcagttgaggaagacagtagggttttttctgcttatcaagattgtattcagctacagcttcaactaaatttggctcataatgcagtgcagaggctcaaagtggcgctaggtgcaagccggaagatgttgagtgaaacatcaaatccagaagatttaattcagacatcttccacagagcagttacgtactatcatcagatatttactggacactttgctcagcctgcttcatgcttctaatggacactctgttcctgcagttttgcagagcacatttcatgcccaggcctgtgaagagctctttaaacacttgtgcatcagtggaaccccaaagatacggttacatactggtcttcttcttgttcaactgtgtggtggtgaaaggtggtggggtcaatttctttctaatgtccttcaggaattgtacaattcggaacagcttctcatctttccacaggatagggtcttcatgttactttcctgcattggtcaaagatcacttagtaatagtggagtattagaaagcttacttaatctcttggataatttattgtcacctcttcagccacagttacccatgcataggaggacagaaggagtactagatattcccatgatcagttgggttgttatgctggtgtccaggttgctggattatgtggcaactgttgaagatgaagcagcagctgcaaagaaacctttgaatggtaaagacagggagaggtttctgacaggtaatcagtggagttttattaacaataatctacacactcagagcttaaatagatcttctaaaggcagcagtagccttgatagattatattccagaaaaatcagaaagcagcttgttcatcataaacagcaacttaacctactaaaagcaaagcagaaggcattggtagaacagatggaaaaagaaaaaatacaaagtaacaaaggatcatcatataaactcctggtagaacaagcaaaactaaagcaggccacttcaaagcactttaaggatttaattcgtttacgtcggacagcagaatggtcccgttctaatttagacacagaagttacaacagcaaaagaaagtcctgagatagaaccacttccatttactctggcccatgagcgttgtatctcagtagtccagaaacttgttctgtttcttctctccatggactttacatgtcatgcagatctcttattgtttgtttgtaaggttcttgcacgcattgcaaatgccacgaggccaactattcatctgtgtgagattgtgaacgaaccccagctggaaagactgctgttacttttggttggaactgacttcaatagaggagatatatcttggggtggtgcttgggctcagtattccttaacttgcatgctacaagatattttagcaggagaattactggctccagtagccgcagaagccatggaggaaggaacagtgggtgatgatgtaggtgcgacagctggtgactctgatgactcccttcaacagtcctcagttcagttgctggaaactatagatgaacctttgacacatgacataacaggtgcacctcctctgtcctctttggaaaaagataaagaaattgaccttgagttacttcaggatctaatggaagttgacattgatcctttagatattgatttggaaaaggaccctcttgcagccaaggtttttaagccaataagcagtacatggtatgattattggggtgctgattatgggacctacaattacaacccttacattggaggtctgggaattcctgtagcaaagccaccagcaaacacggagaagaacggatcacagacagttagcgtttcagtctctcaggccctggatgctcgcctagaagttggacttgaacagcaagcagaactgatgttgaaaatgatgtctactctggaggcagattccattttacaggcattaacaaatacatctcctacattatcacagtctcccactggaacagatgattcacttctagggggtttacaagcagcaaaccaaaccagccagcttattatacagttatcatctgtcccaatgttaaatgtttgtttcaacaaacttttttccatgcttcaagtccatcatgttcagttggagtcacttctccaattgtggctcacactgagcctgaattctagttcaactggaaacaaagaaaatggagcagacatatttttatataatgctaataggatacctgttatttcattaaatcaagcatcaataactagctttctcacagtgttagcttggtatcccaatactttgctccggacatggtgccttgtgcttcatagcctaacactcatgacaaacatgcagcttaattctggttccagcagtgccattggaactcaggagagtactgctcatttgttggtttcagatccaaacctaattcatgtattagtgaaatttctttctggcaccagtccacatggaacaaatcaacacagtccacaggttggtcctacagctacacaagctatgcaagaatttcttactcgattacaagtgcatctttcttcaacatgtcctcagatattcagtgaatttttgctcaagctaattcatatactttcaactgaaaggggtgctttccagacaggccaaggacctctcgatgcccaagtgaagctcttagaattcactctggagcagaattttgaagtcgtttcagttagtactatttctgccgtgatagaatcggttacatttttagtgcaccactatatcacttgctcagacaaagtaatgtcaagaagtggatcagatagctccgtgggtgctcgagcatgctttgggggactctttgccaatcttattcgtccgggtgatgcaaaagcagtttgtggcgaaatgacaagagatcaactcatgtttgatttgttaaaacttgttaacattttagtgcagctgcctctttcaggcaatagggaatacagtgcaagagtgtctgtgaccacaaatacaacagatagtgtttcagatgaagaaaaagtctcaggaggcaaagatggcaatggaagcagtaccagtgttcaaggatcgcctgcatatgttgctgacttagtcttagccaaccaacaaattatgagccagattttgtctgctctgggcctgtgtaatagcagtgccatggcaatgataattggagcaagtggattacatctcactaaacatgaaaactttcatggtgggttggatgccatatcagttggggatggattatttaccatactgacaacccttagtaaaaaagcttctacagtccacatgatgctgcagccaattttaacatacatggcctgtggatatatgggcagacaaggctctcttgctacttgccagttatctgagccattattgtggttcattttgagagtattggatactagtgatgccttgaaagcatttcatgatatgggtggtgttcagctcatatgcaataatatggttactagtacaagggctattgtgaacactgcaagaagtatggtatcaactattatgaaatttcttgactctggtccaaataaagctgttgacagcacattgaaaacaagaatactagcttctgagcctgacaatgctgaagggattcataactttgcacccctcggtacaatcacatctagcagtcctactgcccaaccagctgaagtgctattgcaggccacacctcctcacagaagagctcgctctgctgcttggtcctacatctttcttccagaggaggcttggtgtgaccttaccattcaccttcctgcagcagtgctgcttaaggagatacatatccagcctcatcttgcatctcttgcaacctgcccttcctcagtgtctgttgaagtaagtgcagatggggtaaatatgctacctttgtccactcctgttgtcacaagtggcctcacctacataaaaattcagcttgtaaaagccgaagtagcttctgctgtctgccttagactacatcgtccacgggatgccagcacattaggcctttcacaaattaaattattggggctcactgcttttggtaccacctcttctgcaacagttaataatccattccttccatctgaagatcaggtatccaaaacaagtattggatggttacggttattacatcattgccttactcacataagtgatctagaaggaatgatggcaagtgcagctgcacctactgctaatctgctgcagacttgtgcggccttattgatgtcaccttactgtggaatgcattcacccaacatcgaggttgtgcttgtaaagataggactgcagtctactagaattggcctgaagctcatagacattctcctgagaaattgtgcagcatcaggcagtgatcctacagatttgaatagtcctttactttttggaagactaaatggactctcttctgactctacgatagatattctttaccagcttggaacaactcaggatcctggtacaaaagacagaattcaggccttgttaaaatgggttagtgattctgcaagagtggctgctatgaagagaagtggcaggatgaactacatgtgtcctaactcctcaacagtagagtatggtcttctgatgccatctccttctcatttgcactgtgtagcagccattctgtggcatagttatgagctgcttgtagaatatgacttaccagcactcctggaccaagagctctttgagttactttttaattggtccatgtctcttccctgcaatatggttttgaagaaagctgttgacagtctactttgctcaatgtgtcacgtacacccaaactatttttctttgctcatgggctggatgggaattacccctcctccagtgcaatgtcatcatagactgtccatgacagatgatagcaaaaagcaggatcttagttcatctttaacagatgactctaaaaatgcacaagcacctctcgcattaactgaatcacatttggctacccttgcttcctcttctcaatctcctgaagctattaaacaattactagactcaggtttgccttctcttcttgtgaggagtctggctagtttctgctttagccacatttctagctcagaaagcattgcccagtcaatagatatttcccaggacaaactcaggcgccatcatgtcccacaacaatgtaataagatgcctatcacagccgacctagttgctcctattcttaggtttttgacagaagttggcaatagccatattatgaaagattggcttggtggttctgaagtcaatccactatggacagcacttctgtttttattgtgtcactctgggtccacttctggaagccataatttaggtgcacaacagaccagtgcaagatcagcttctctttcttcagctgctacaacaggactgactactcaacagcgcacagcaattgagaatgcaactgttgcgttctttctacagtgcatttcatgccatcctaataatcaaaagctgatggcacaggttctttgtgaactatttcagacatctcctcaaagagggaaccttccaacatctgggaacatttcagggtttatacgaagattatttttacagttgatgctggaagatgagaaagtgacaatgtttcttcagtctccatgtccactgtacaaaggtagaattaatgctactagccacgtcatccagcatccaatgtatggagcaggccacaaattccgtactcttcatttgccagtctcaacaacattatcagatgttcttgacagagtgtcagatactccaagtatcacagctaaattaattagtgaacaaaaagatgacaaagaaaagaaaaaccatgaagagaaagaaaaagttaaagcggaaaatggatttcaagacaattacagtgttgttgttgcctctgggctgaagtctcaatctaaacgtgctgtgtcagctacaccacctcgcccaccatccaggagggggaggacaatacctgataaaataggaagtacttcaggagcagaggctgccaacaaaataattactgtcccagtgtttcacctgtttcacaaactcttggcaggccagccattgccagctgaaatgacacttgcccagcttttaactctcctatatgaccgaaaacttcctcagggttaccgctcaatagatctgactgttaaattgggatcaagagttataacagaccccagtctatcaaaaacagattcttataaaagactacaccctgaaaaagatcatggagacttacttgctagctgtccagaagatgaggctctcactccaggtgatgaatgcatggatgggatactggatgaatctttgcttgaaacctgtccaattcagtcaccattacaagtttttgcaggaatgggtggactggctcttattgctgaaagactacccatgctatatccagaagtaattcaacaggtgagtgctccagttgtaacatctaccactcaggaaaagccgaaggatagcgatcagtttgaatgggtgaccattgaacagtcaggggagttagtttatgaagcaccagaaactgttgcggctgaacctccacctatcaagtcagcagtacagaccatgtctcccatacctgcccattctttggctgcttttggattatttcttcgtcttccgggctatgcggaagtgctactgaaagagagaaaacatgcccagtgccttcttcgattggtattgggagtgacagatgatggagaaggaagtcatattcttcaatctccatcagccaatgtgcttccaacccttcctttccacgtccttcgtagcttgtttagcactacacctttgacaactgatgatggtgtacttctaaggcggatggcattggaaattggagccttacacctcattcttgtctgtctctctgctttgagccaccattccccacgagttccaaactctagcgtgaatcaaactgagccacaggtgtcaagctctcataaccctacatcaacagaagaacaacagttatattgggccaaagggactggctttggaacaggctctacagcttctgggtgggatgtggaacaagccttaactaagcaaaggctggaagaggaacatgttacctgccttctgcaggttcttgccagttacataaatcccgtcagtagtgcggtaaatggagaagctcagtcatctcatgagactagagggcagaacagtaatgcccttccttctgtacttctcgagcttctcagtcagtcctgcctcatcccagccatgtcatcttatctacgaaatgattcagttctggacatggcaagacatgtgccactctatcgggcactgctggaattgcttcgggccattgcttcttgtgctgccatggtgcccctattgttgcccctttctacagagaacggtgaagaggaagaagaacagtcagaatgtcaaacttctgttggtacattgttagccaaaatgaagacctgtgttgatacctataccaaccgtttaagatctaaaagggaaaatgttaaaacaggagtaaaaccagatgcgtctgatcaagaaccagaaggacttactcttttggtaccagacatccaaaagactgctgagatagtttatgcagccaccaccagtttgcggcaagcaaatcaggaaaaaaaactgggtgaatactccaagaaggcggctatgaaacccaaacctttgtcagtattaaagtcacttgaagaaaaatatgtggctgttatgaagaaattacagtttgatacgtttgaaatggtttctgaagatgaagatgggaaattgggatttaaagtaaattaccactacatgtctcaggtgaaaaatgctaatgatgcgaacagtgctgccagagctcgccgccttgcccaggaagctgtgacgctttcaacctcactgcctctgtcttcatcctctagtgtgtttgtacgctgtgatgaggagcgacttgatatcatgaaggttctaataactggtccagcggacaccccttatgcaaatggctgctttgagtttgatgtgtattttcctcaagattatcccagttcaccccctcttgtgaatctagagacaactggtggtcatagcgtgcgattcaatccaaacctttataatgatggcaaggtttgtttaagcatcttaaacacgtggcatggaagaccagaagagaagtggaatcctcagacctcaagctttttgcaagtgttggtgtctgtccagtcccttatattagtagctgagccttattttaatgaaccgggatatgaacggtctagaggcactcccagtggcacacagagttctcgagaatatgatggaaacattcgacaagcaacagttaagtgggcaatgctagaacaaatcagaaacccttcaccatgttttaaagaggtaatacacaaacatttttacttgaaaagagttgagataatggcccaatgtgaggagtggattgcggatatccagcagtacagcagtgataagcgggtaggcaggactatgtctcaccatgcagcagctctcaagcgtcacactgctcagctccgcgaagagttgctgaaacttccctgccctgaaggcttggatcctgacactgacgatgccccagaggtgtgcagagccacaacaggtgctgaggagactctaatgcatgatcaggttaaacccagcagcagcaaagaactccccagtgacttccagttatgagctgcattgatgtggacttcatagacacaaaggcttcgaagcacaagccaaatatgtcaatatttgtatgtaagaaactaattatgtaataggtaatgaaactgaaactatactatgcccttaaggagatccagtttaattcaaggtgatcttttatttacctgtacaggagtgtaaacttttttgtgcttttatttttcaattgtgagaaccactgattggtatgttcaacaaatttgtgtatacaaagaaatggataaatcactgctatataagggaaactaccttaggaaagaatgtttactgaatgtttattttattttttttttttttactatagagtgaggggttgttaacaaagaatatatattggtcattcttacaactactatttaaagtcagcaacttttcactgaatttgatagattttatgtttggccatatcttcatgctcacatttgatttctgaagacctcctacatacacttcaataaaagttaaatggacatactccctcttttttgatttactggtacatttttaaaataataaatctgccataaaatgcattatatctggagacttgcacttgtatggatgaatttattacattcaacatatttaattttatgccttctaattctaagatgcagaaaaaaataaatgaacatgattttattctatgccaacatttgggcctctgaatgtatctgttatttgaatttaagtatttgaaaaggaatggtcaatttgaaagtcattctaaactgattttttttttctaaagggctccttttttcctggactatgtggttttatgactaaagtcacatgtatgtattaaacattgaggctctgtagaggagagaggatgtacctctctggtgctgttacagtacattctgtacctgccatacaggctcattttcatgcaaattcttcctagagccaaataaataaagacttaggtgaattagta

SEQ ID NO: 362842 - DNA, 9110 bp, Homo sapiens
gcggccgcctactactactactgctcgaattcaagcttctaacgatgtacggggacatgtataactgtgttttttgttttctgggtaggaaaggtactttaaaatcacatttaacagaattattaatacaagttttccttcgcctgtaggtaatcagtggagttttattaacaataatctacacactcagagcttaaatagatcttctaaaggcagcagtagccttgatagattatattccagaaaaatcagaaagcagcttgttcatcataaacagcaacttaacctactaaaagcaaagcagaaggcattggtagaacagatggaaaaagaaaaaatacaaagtaacaaaggatcatcatataaactcctggtagaacaagcaaaactaaagcaggccacttcaaagcactttaaggatttaattcgtttacgtcggacagcagaatggtcccgttctaatttagacacagaagttacaacagcaaaagaaagtcctgagatagaaccacttccatttactctggcccatgagcgttgtatctcagtagtccagaaacttgttctgtttcttctctccatggactttacatgtcatgcagatctcttattgtttgtttgtaaggttcttgcacgcattgcaaatgccacgaggccaactattcatctgtgtgagattgtgaacgaaccccagctggaaagactgctgttacttttggttggaactgacttcaatagaggagatatatcttggggtggtgcttgggctcagtattccttaacttgcatgctacaagatattttagcaggagaattactggctccagtagccgcagaagccatggaggaaggaacagtgggtgatgatgtaggtgcgacagctggtgactctgatgactcccttcaacagtcctcagttcagttgctggaaactatagatgaacctttgacacatgacataacaggtgcacctcctctgtcctctttggaaaaagataaagaaattgaccttgagttacttcaggatctaatggaagttgacattgatcctttagatattgatttggaaaaggaccctcttgcagccaaggtttttaagccaataagcagtacatggtatgattattggggtgctgattatgggacctacaattacaacccttacattggaggtctgggaattcctgtagcaaagccaccagcaaacacggagaagaacggatcacagacagttagcgtttcagtctctcaggccctggatgctcgcctagaagttggacttgaacagcaagcagaactgatgttgaaaatgatgtctactctggaggcagattccattttacaggcattaacaaatacatctcctacattatcacagtctcccactggaacagatgattcacttctagggggtttacaagcagcaaaccaaaccagccagcttattatacagttatcatctgtcccaatgttaaatgtttgtttcaacaaacttttttccatgcttcaagtccatcatgttcagttggagtcacttctccaattgtggctcacactgagcctgaattctagttcaactggaaacaaagaaaatggagcagacatatttttatataatgctaataggatacctgttatttcattaaatcaagcatcaataactagctttctcacagtgttagcttggtatcccaatactttgctccggacatggtgccttgtgcttcatagcctaacactcatgacaaacatgcagcttaattctggttccagcagtgccattggaactcaggagagtactgctcatttgttggtttcagatccaaacctaattcatgtattagtgaaatttctttctggcaccagtccacatggaacaaatcaacacagtccacaggttggtcctacagctacacaagctatgcaagaatttcttactcgattacaagtgcatctttcttcaacatgtcctcagatattcagtgaatttttgctcaagctaattcatatactttcaactgaaaggggtgctttccagacaggccaaggacctctcgatgcccaagtgaagctcttagaattcactctggagcagaattttgaagtcgtttcagttagtactatttctgccgtgatagaatcggttacatttttagtgcaccactatatcacttgctcagacaaagtaatgtcaagaagtggatcagatagctccgtgggtgctcgagcatgctttgggggactctttgccaatcttattcgtccgggtgatgcaaaagcagtttgtggcgaaatgacaagagatcaactcatgtttgatttgttaaaacttgttaacattttagtgcagctgcctctttcaggcaatagggaatacagtgcaagagtgtctgtgaccacaaatacaacagatagtgtttcagatgaagaaaaagtctcaggaggcaaagatggcaatggaagcagtaccagtgttcaaggatcgcctgcatatgttgctgacttagtcttagccaaccaacaaattatgagccagattttgtctgctctgggcctgtgtaatagcagtgccatggcaatgataattggagcaagtggattacatctcactaaacatgaaaactttcatggtgggttggatgccatatcagttggggatggattatttaccatactgacaacccttagtaaaaaagcttctacagtccacatgatgctgcagccaattttaacatacatggcctgtggatatatgggcagacaaggctctcttgctacttgccagttatctgagccattattgtggttcattttgagagtattggatactagtgatgccttgaaagcatttcatgatatgggtggtgttcagctcatatgcaataatatggttactagtacaagggctattgtgaacactgcaagaagtatggtatcaactattatgaaatttcttgactctggtccaaataaagctgttgacagcacattgaaaacaagaatactagcttctgagcctgacaatgctgaagggattcataactttgcacccctcggtacaatcacatctagcagtcctactgcccaaccagctgaagtgctattgcaggccacacctcctcacagaagagctcgctctgctgcttggtcctacatctttcttccagaggaggcttggtgtgaccttaccattcaccttcctgcagcagtgctgcttaaggagatacatatccagcctcatcttgcatctcttgcaacctgcccttcctcagtgtctgttgaagtaagtgcagatggggtaaatatgctacctttgtccactcctgttgtcacaagtggcctcacctacataaaaattcagcttgtaaaagccgaagtagcttctgctgtctgccttagactacatcgtccacgggatgccagcacattaggcctttcacaaattaaattattggggctcactgcttttggtaccacctcttctgcaacagttaataatccattccttccatctgaagatcaggtatccaaaacaagtattggatggttacggttattacatcattgccttactcacataagtgatctagaaggaatgatggcaagtgcagctgcacctactgctaatctgctgcagacttgtgcggccttattgatgtcaccttactgtggaatgcattcacccaacatcgaggttgtgcttgtaaagataggactgcagtctactagaattggcctgaagctcatagacattctcctgagaaattgtgcagcatcaggcagtgatcctacagatttgaatagtcctttactttttggaagactaaatggactctcttctgactctacgatagatattctttaccagcttggaacaactcaggatcctggtacaaaagacagaattcaggccttgttaaaatgggttagtgattctgcaagagtggctgctatgaagagaagtggcaggatgaactacatgtgtcctaactcctcaacagtagagtatggtcttctgatgccatctccttctcatttgcactgtgtagcagccattctgtggcatagttatgagctgcttgtagaatatgacttaccagcactcctggaccaagagctctttgagttactttttaattggtccatgtctcttccctgcaatatggttttgaagaaagctgttgacagtctactttgctcaatgtgtcacgtacacccaaactatttttctttgctcatgggctggatgggaattacccctcctccagtgcaatgtcatcatagactgtccatgacagatgatagcaaaaagcaggatcttagttcatctttaacagatgactctaaaaatgcacaagcacctctcgcattaactgaatcacatttggctacccttgcttcctcttctcaatctcctgaagctattaaacaattactagactcaggtttgccttctcttcttgtgaggagtctggctagtttctgctttagccacatttctagctcagaaagcattgcccagtcaatagatatttcccaggacaaactcaggcgccatcatgtcccacaacaatgtaataagatgcctatcacagccgacctagttgctcctattcttaggtttttgacagaagttggcaatagccatattatgaaagattggcttggtggttctgaagtcaatccactatggacagcacttctgtttttattgtgtcactctgggtccacttctggaagccataatttaggtgcacaacagaccagtgcaagatcagcttctctttcttcagctgctacaacaggactgactactcaacagcgcacagcaattgagaatgcaactgttgcgttctttctacagtgcatttcatgccatcctaataatcaaaagctgatggcacaggttctttgtgaactatttcagacatctcctcaaagagggaaccttccaacatctgggaacatttcagggtttatacgaagattatttttacagttgatgctggaagatgagaaagtgacaatgtttcttcagtctccatgtccactgtacaaaggtagaattaatgctactagccacgtcatccagcatccaatgtatggagcaggccacaaattccgtactcttcatttgccagtctcaacaacattatcagatgttcttgacagagtgtcagatactccaagtatcacagctaaattaattagtgaacaaaaagatgacaaagaaaagaaaaaccatgaagagaaagaaaaagttaaagcggaaaatggatttcaagacaattacagtgttgttgttgcctctgggctgaagtctcaatctaaacgtgctgtgtcagctacaccacctcgcccaccatccaggagggggaggacaatacctgataaaataggaagtacttcaggagcagaggctgccaacaaaataattactgtcccagtgtttcacctgtttcacaaactcttggcaggccagccattgccagctgaaatgacacttgcccagcttttaactctcctatatgaccgaaaacttcctcagggttaccgctcaatagatctgactgttaaattgggatcaagagttataacagaccccagtctatcaaaaacagattcttataaaagactacaccctgaaaaagatcatggagacttacttgctagctgtccagaagatgaggctctcactccaggtgatgaatgcatggatgggatactggatgaatctttgcttgaaacctgtccaattcagtcaccattacaagtttttgcaggaatgggtggactggctcttattgctgaaagactacccatgctatatccagaagtaattcaacaggtgagtgctccagttgtaacatctaccactcaggaaaagccgaaggatagcgatcagtttgaatgggtgaccattgaacagtcaggggagttagtttatgaagcaccagaaactgttgcggctgaacctccacctatcaagtcagcagtacagaccatgtctcccatacctgcccattctttggctgcttttggattatttcttcgtcttccgggctatgcggaagtgctactgaaagagagaaaacatgcccagtgccttcttcgattggtattgggagtgacagatgatggagaaggaagtcatattcttcaatctccatcagccaatgtgcttccaacccttcctttccacgtccttcgtagcttgtttagcactacacctttgacaactgatgatggtgtacttctaaggcggatggcattggaaattggagccttacacctcattcttgtctgtctctctgctttgagccaccattccccacgagttccaaactctagcgtgaatcaaactgagccacaggtgtcaagctctcataaccctacatcaacagaagaacaacagttatattgggccaaagggactggctttggaacaggctctacagcttctgggtgggatgtggaacaagccttaactaagcaaaggctggaagaggaacatgttacctgccttctgcaggttcttgccagttacataaatcccgtcagtagtgcggtaaatggagaagctcagtcatctcatgagactagagggcagaacagtaatgcccttccttctgtacttctcgagcttctcagtcagtcctgcctcatcccagccatgtcatcttatctacgaaatgattcagttctggacatggcaagacatgtgccactctatcgggcactgctggaattgcttcgggccattgcttcttgtgctgccatggtgcccctattgttgcccctttctacagagaacggtgaagaggaagaagaacagtcagaatgtcaaacttctgttggtacattgttagccaaaatgaagacctgtgttgatacctataccaaccgtttaagatctaaaagggaaaatgttaaaacaggagtaaaaccagatgcgtctgatcaagaaccagaaggacttactcttttggtaccagacatccaaaagactgctgagatagtttatgcagccaccaccagtttgcggcaagcaaatcaggaaaaaaaactgggtgaatactccaagaaggcggctatgaaacccaaacctttgtcagtattaaagtcacttgaagaaaaatatgtggctgttatgaagaaattacagtttgatacgtttgaaatggtttctgaagatgaagatgggaaattgggatttaaagtaaattaccactacatgtctcaggtgaaaaatgctaatgatgcgaacagtgctgccagagctcgccgccttgcccaggaagctgtgacgctttcaacctcactgcctctgtcttcatcctctagtgtgtttgtacgctgtgatgaggagcgacttgatatcatgaaggttctaataactggtccagcggacaccccttatgcaaatggctgctttgagtttgatgtgtattttcctcaagattatcccagttcaccccctcttgtgaatctagagacaactggtggtcatagcgtgcgattcaatccaaacctttataatgatggcaaggtttgtttaagcatcttaaacacgtggcatggaagaccagaagagaagtggaatcctcagacctcaagctttttgcaagtgttggtgtctgtccagtcccttatattagtagctgagccttattttaatgaaccgggatatgaacggtctagaggcactcccagtggcacacagagttctcgagaatatgatggaaacattcgacaagcaacagttaagtgggcaatgctagaacaaatcagaaacccttcaccatgttttaaagaggtaatacacaaacatttttacttgaaaagagttgagataatggcccaatgtgaggagtggattgcggatatccagcagtacagcagtgataagcgggtaggcaggactatgtctcaccatgcagcagctctcaagcgtcacactgctcagctccgcgaagagttgctgaaacttccctgccctgaaggcttggatcctgacactgacgatgccccagaggtgtgcagagccacaacaggtgctgaggagactctaatgcatgatcaggttaaacccagcagcagcaaagaactccccagtgacttccagttatgagctgcattgatgtggacttcatagacacaaaggcttcgaagcacaagccaaatatgtcaatatttgtatgtaagaaactaattatgtaataggtaatgaaactgaaactatactatgcccttaaggagatccagtttaattcaaggtgatcttttatttacctgtacaggagtgtaaacttttttgtgcttttatttttcaattgtgagaaccactgattggtatgttcaacaaatttgtgtatacaaagaaatggataaatcactgctatataagggaaactaccttaggaaagaatgtttactgaatgtttattttattttttttttttttactatagagtgaggggttgttaacaaagaatatatattggtcattcttacaactactatttaaagtcagcaacttttcactgaatttgatagattttatgtttggccatatcttcatgctcacatttgatttctgaagacctcctacatacacttcaataaaagttaaatggacatactccctcttttttgatttactggtacatttttaaaataataaatctgccataaaatgcattatatctggagacttgcacttgtatggatgaatttattacattcaacatatttaattttatgccttctaattctaagatgcagaaaaaaataaatgaacatgattttattctatgccaacatttgggcctctgaatgtatctgttatttgaatttaagtatttgaaaaggaatggtcaatttgaaagtcattctaaactgattttttttttctaaagggctccttttttcctggactatgtggttttatgactaaagtcacatgtatgtattaaacattgaggctctgtagaggagagaggatgtacctctctggtgctgttacagtacattctgtacctgccatacaggctcattttcatgcaaattcttcctagagccaaataaataaagacttaggtgaattagta

SEQ ID NO: 362843 - DNA, 8031 bp, Homo sapiens
tgtaattcatgatggcgggttgctgaacatgactgtgctggcgtcgatttacagctgattatgggacctacaattacaacccttacattggaggtctgggaattcctgtagcaaagccaccagcaaacacggagaagaacggatcacagacagttagcgtttcagtctctcaggccctggatgctcgcctagaagttggacttgaacagcaagcagaactgatgttgaaaatgatgtctactctggaggcagattccattttacaggcattaacaaatacatctcctacattatcacagtctcccactggaacagatgattcacttctagggggtttacaagcagcaaaccaaaccagccagcttattatacagttatcatctgtcccaatgttaaatgtttgtttcaacaaacttttttccatgcttcaagtccatcatgttcagttggagtcacttctccaattgtggctcacactgagcctgaattctagttcaactggaaacaaagaaaatggagcagacatatttttatataatgctaataggatacctgttatttcattaaatcaagcatcaataactagctttctcacagtgttagcttggtatcccaatactttgctccggacatggtgccttgtgcttcatagcctaacactcatgacaaacatgcagcttaattctggttccagcagtgccattggaactcaggagagtactgctcatttgttggtttcagatccaaacctaattcatgtattagtgaaatttctttctggcaccagtccacatggaacaaatcaacacagtccacaggttggtcctacagctacacaagctatgcaagaatttcttactcgattacaagtgcatctttcttcaacatgtcctcagatattcagtgaatttttgctcaagctaattcatatactttcaactgaaaggggtgctttccagacaggccaaggacctctcgatgcccaagtgaagctcttagaattcactctggagcagaattttgaagtcgtttcagttagtactatttctgccgtgatagaatcggttacatttttagtgcaccactatatcacttgctcagacaaagtaatgtcaagaagtggatcagatagctccgtgggtgctcgagcatgctttgggggactctttgccaatcttattcgtccgggtgatgcaaaagcagtttgtggcgaaatgacaagagatcaactcatgtttgatttgttaaaacttgttaacattttagtgcagctgcctctttcaggcaatagggaatacagtgcaagagtgtctgtgaccacaaatacaacagatagtgtttcagatgaagaaaaagtctcaggaggcaaagatggcaatggaagcagtaccagtgttcaaggatcgcctgcatatgttgctgacttagtcttagccaaccaacaaattatgagccagattttgtctgctctgggcctgtgtaatagcagtgccatggcaatgataattggagcaagtggattacatctcactaaacatgaaaactttcatggtgggttggatgccatatcagttggggatggattatttaccatactgacaacccttagtaaaaaagcttctacagtccacatgatgctgcagccaattttaacatacatggcctgtggatatatgggcagacaaggctctcttgctacttgccagttatctgagccattattgtggttcattttgagagtattggatactagtgatgccttgaaagcatttcatgatatgggtggtgttcagctcatatgcaataatatggttactagtacaagggctattgtgaacactgcaagaagtatggtatcaactattatgaaatttcttgactctggtccaaataaagctgttgacagcacattgaaaacaagaatactagcttctgagcctgacaatgctgaagggattcataactttgcacccctcggtacaatcacatctagcagtcctactgcccaaccagctgaagtgctattgcaggccacacctcctcacagaagagctcgctctgctgcttggtcctacatctttcttccagaggaggcttggtgtgaccttaccattcaccttcctgcagcagtgctgcttaaggagatacatatccagcctcatcttgcatctcttgcaacctgcccttcctcagtgtctgttgaagtaagtgcagatggggtaaatatgctacctttgtccactcctgttgtcacaagtggcctcacctacataaaaattcagcttgtaaaagccgaagtagcttctgctgtctgccttagactacatcgtccacgggatgccagcacattaggcctttcacaaattaaattattggggctcactgcttttggtaccacctcttctgcaacagttaataatccattccttccatctgaagatcaggtatccaaaacaagtattggatggttacggttattacatcattgccttactcacataagtgatctagaaggaatgatggcaagtgcagctgcacctactgctaatctgctgcagacttgtgcggccttattgatgtcaccttactgtggaatgcattcacccaacatcgaggttgtgcttgtaaagataggactgcagtctactagaattggcctgaagctcatagacattctcctgagaaattgtgcagcatcaggcagtgatcctacagatttgaatagtcctttactttttggaagactaaatggactctcttctgactctacgatagatattctttaccagcttggaacaactcaggatcctggtacaaaagacagaattcaggccttgttaaaatgggttagtgattctgcaagagtggctgctatgaagagaagtggcaggatgaactacatgtgtcctaactcctcaacagtagagtatggtcttctgatgccatctccttctcatttgcactgtgtagcagccattctgtggcatagttatgagctgcttgtagaatatgacttaccagcactcctggaccaagagctctttgagttactttttaattggtccatgtctcttccctgcaatatggttttgaagaaagctgttgacagtctactttgctcaatgtgtcacgtacacccaaactatttttctttgctcatgggctggatgggaattacccctcctccagtgcaatgtcatcatagactgtccatgacagatgatagcaaaaagcaggatcttagttcatctttaacagatgactctaaaaatgcacaagcacctctcgcattaactgaatcacatttggctacccttgcttcctcttctcaatctcctgaagctattaaacaattactagactcaggtttgccttctcttcttgtgaggagtctggctagtttctgctttagccacatttctagctcagaaagcattgcccagtcaatagatatttcccaggacaaactcaggcgccatcatgtcccacaacaatgtaataagatgcctatcacagccgacctagttgctcctattcttaggtttttgacagaagttggcaatagccatattatgaaagattggcttggtggttctgaagtcaatccactatggacagcacttctgtttttattgtgtcactctgggtccacttctggaagccataatttaggtgcacaacagaccagtgcaagatcagcttctctttcttcagctgctacaacaggactgactactcaacagcgcacagcaattgagaatgcaactgttgcgttctttctacagtgcatttcatgccatcctaataatcaaaagctgatggcacaggttctttgtgaactatttcagacatctcctcaaagagggaaccttccaacatctgggaacatttcagggtttatacgaagattatttttacagttgatgctggaagatgagaaagtgacaatgtttcttcagtctccatgtccactgtacaaaggtagaattaatgctactagccacgtcatccagcatccaatgtatggagcaggccacaaattccgtactcttcatttgccagtctcaacaacattatcagatgttcttgacagagtgtcagatactccaagtatcacagctaaattaattagtgaacaaaaagatgacaaagaaaagaaaaaccatgaagagaaagaaaaagttaaagcggaaaatggatttcaagacaattacagtgttgttgttgcctctgggctgaagtctcaatctaaacgtgctgtgtcagctacaccacctcgcccaccatccaggagggggaggacaatacctgataaaataggaagtacttcaggagcagaggctgccaacaaaataattactgtcccagtgtttcacctgtttcacaaactcttggcaggccagccattgccagctgaaatgacacttgcccagcttttaactctcctatatgaccgaaaacttcctcagggttaccgctcaatagatctgactgttaaattgggatcaagagttataacagaccccagtctatcaaaaacagattcttataaaagactacaccctgaaaaagatcatggagacttacttgctagctgtccagaagatgaggctctcactccaggtgatgaatgcatggatgggatactggatgaatctttgcttgaaacctgtccaattcagtcaccattacaagtttttgcaggaatgggtggactggctcttattgctgaaagactacccatgctatatccagaagtaattcaacaggtgagtgctccagttgtaacatctaccactcaggaaaagccgaaggatagcgatcagtttgaatgggtgaccattgaacagtcaggggagttagtttatgaagcaccagaaactgttgcggctgaacctccacctatcaagtcagcagtacagaccatgtctcccatacctgcccattctttggctgcttttggattatttcttcgtcttccgggctatgcggaagtgctactgaaagagagaaaacatgcccagtgccttcttcgattggtattgggagtgacagatgatggagaaggaagtcatattcttcaatctccatcagccaatgtgcttccaacccttcctttccacgtccttcgtagcttgtttagcactacacctttgacaactgatgatggtgtacttctaaggcggatggcattggaaattggagccttacacctcattcttgtctgtctctctgctttgagccaccattccccacgagttccaaactctagcgtgaatcaaactgagccacaggtgtcaagctctcataaccctacatcaacagaagaacaacagttatattgggccaaagggactggctttggaacaggctctacagcttctgggtgggatgtggaacaagccttaactaagcaaaggctggaagaggaacatgttacctgccttctgcaggttcttgccagttacataaatcccgtcagtagtgcggtaaatggagaagctcagtcatctcatgagactagagggcagaacagtaatgcccttccttctgtacttctcgagcttctcagtcagtcctgcctcatcccagccatgtcatcttatctacgaaatgattcagttctggacatggcaagacatgtgccactctatcgggcactgctggaattgcttcgggccattgcttcttgtgctgccatggtgcccctattgttgcccctttctacagagaacggtgaagaggaagaagaacagtcagaatgtcaaacttctgttggtacattgttagccaaaatgaagacctgtgttgatacctataccaaccgtttaagatctaaaagggaaaatgttaaaacaggagtaaaaccagatgcgtctgatcaagaaccagaaggacttactcttttggtaccagacatccaaaagactgctgagatagtttatgcagccaccaccagtttgcggcaagcaaatcaggaaaaaaaactgggtgaatactccaagaaggcggctatgaaacccaaacctttgtcagtattaaagtcacttgaagaaaaatatgtggctgttatgaagaaattacagtttgatacgtttgaaatggtttctgaagatgaagatgggaaattgggatttaaagtaaattaccactacatgtctcaggtgaaaaatgctaatgatgcgaacagtgctgccagagctcgccgccttgcccaggaagctgtgacgctttcaacctcactgcctctgtcttcatcctctagtgtgtttgtacgctgtgatgaggagcgacttgatatcatgaaggttctaataactggtccagcggacaccccttatgcaaatggctgctttgagtttgatgtgtattttcctcaagattatcccagttcaccccctcttgtgaatctagagacaactggtggtcatagcgtgcgattcaatccaaacctttataatgatggcaaggtttgtttaagcatcttaaacacgtggcatggaagaccagaagagaagtggaatcctcagacctcaagctttttgcaagtgttggtgtctgtccagtcccttatattagtagctgagccttattttaatgaaccgggatatgaacggtctagaggcactcccagtggcacacagagttctcgagaatatgatggaaacattcgacaagcaacagttaagtgggcaatgctagaacaaatcagaaacccttcaccatgttttaaagaggtaatacacaaacatttttacttgaaaagagttgagataatggcccaatgtgaggagtggattgcggatatccagcagtacagcagtgataagcgggtaggcaggactatgtctcaccatgcagcagctctcaagcgtcacactgctcagctccgcgaagagttgctgaaacttccctgccctgaaggcttggatcctgacactgacgatgccccagaggtgtgcagagccacaacaggtgctgaggagactctaatgcatgatcaggttaaacccagcagcagcaaagaactccccagtgacttccagttatgagctgcattgatgtggacttcatagacacaaaggcttcgaagcacaagccaaatatgtcaatatttgtatgtaagaaactaattatgtaataggtaatgaaactgaaactatactatgcccttaaggagatccagtttaattcaaggtgatcttttatttacctgtacaggagtgtaaacttttttgtgcttttatttttcaattgtgagaaccactgattggtatgttcaacaaatttgtgtatacaaagaaatggataaatcactgctatataagggaaactaccttaggaaagaatgtttactgaatgtttattttattttttttttttttactatagagtgaggggttgttaacaaagaatatatattggtcattcttacaactactatttaaagtcagcaacttttcactgaatttgatagattttatgtttggccatatcttcatgctcacatttgatttctgaagacctcctacatacacttcaataaaagttaaatggacatactccctcttttttgatttactggtacatttttaaaataataaatctgccataaaatgcattatatctggagacttgcacttgtatggatgaatttattacattcaacatatttaattttatgccttctaattctaagatgcagaaaaaaataaatgaacatgattttattctatgccaacatttgggcctctgaatgtatctgttatttgaatttaagtatttgaaaaggaatggtcaatttgaaagtcattctaaactgattttttttttctaaagggctccttttttcctggactatgtggttttatgactaaagtcacatgtatgtattaaacattgaggctctgtagaggagagaggatgtacctctctggtgctgttacagtacattctgtacctgccatacaggctcattttcatgcaaattcttcctagagccaaataaataaagacttaggtgaattagta

SEQ ID NO: 362844 - DNA, 2551 bp, Homo sapiens
atacaggaaacattaggtgggcataatggcgtgtgcctgtggtcccggctacctggaaggctgaagtgggagaattacctgagcctgggaagttgaggttgcaattagctgtaattgcaccactgtactccaagcctgggagacagagtaatactctgtttccagatagatggatggatggatggatggatggatggacggatggatagatattttcctatgttagctgaagaaagtgatctgaattatctattgtttcacttcctcttttcataaagatgattatgtttttgctttattgttatgtttatgttattgttatgtttatgaaatagaaattttttattctcagagcggttgtaataagataattgtgaagaagttgacaattttttggaattcacaatttgaactctagaggtgaattctttttagttttattttttaaaatatatacttaaaatgtatatgttatttatcttgaaatattaaataacagaaaaaaaactgggtgaatactccaagaaggcggctatgaaacccaaacctttgtcagtattaaagtcacttgaagaaaaatatgtggctgttatgaagaaattacagtttgatacgtttgaaatggtttctgaagatgaagatgggaaattgggatttaaagtaaattaccactacatgtctcaggtgaaaaatgctaatgatgcgaacagtgctgccagagctcgccgccttgcccaggaagctgtgacgctttcaacctcactgcctctgtcttcatcctctagtgtgtttgtacgctgtgatgaggagcgacttgatatcatgaaggttctaataactggtccagcggacaccccttatgcaaatggctgctttgagtttgatgtgtattttcctcaagattatcccagttcaccccctcttgtgaatctagagacaactggtggtcatagcgtgcgattcaatccaaacctttataatgatggcaaggtttgtttaagcatcttaaacacgtggcatggaagaccagaagagaagtggaatcctcagacctcaagctttttgcaagtgttggtgtctgtccagtcccttatattagtagctgagccttattttaatgaaccgggatatgaacggtctagaggcactcccagtggcacacagagttctcgagaatatgatggaaacattcgacaagcaacagttaagtgggcaatgctagaacaaatcagaaacccttcaccatgttttaaagaggtaatacacaaacatttttacttgaaaagagttgagataatggcccaatgtgaggagtggattgcggatatccagcagtacagcagtgataagcgggtaggcaggactatgtctcaccatgcagcagctctcaagcgtcacactgctcagctccgcgaagagttgctgaaacttccctgccctgaaggcttggatcctgacactgacgatgccccagaggtgtgcagagccacaacaggtgctgaggagactctaatgcatgatcaggttaaacccagcagcagcaaagaactccccagtgacttccagttatgagctgcattgatgtggacttcatagacacaaaggcttcgaagcacaagccaaatatgtcaatatttgtatgtaagaaactaattatgtaataggtaatgaaactgaaactatactatgcccttaaggagatccagtttaattcaaggtgatcttttatttacctgtacaggagtgtaaacttttttgtgcttttatttttcaattgtgagaaccactgattggtatgttcaacaaatttgtgtatacaaagaaatggataaatcactgctatataagggaaactaccttaggaaagaatgtttactgaatgtttattttattttttttttttttactatagagtgaggggttgttaacaaagaatatatattggtcattcttacaactactatttaaagtcagcaacttttcactgaatttgatagattttatgtttggccatatcttcatgctcacatttgatttctgaagacctcctacatacacttcaataaaagttaaatggacatactccctcttttttgatttactggtacatttttaaaataataaatctgccataaaatgcattatatctggagacttgcacttgtatggatgaatttattacattcaacatatttaattttatgccttctaattctaagatgcagaaaaaaataaatgaacatgattttattctatgccaacatttgggcctctgaatgtatctgttatttgaatttaagtatttgaaaaggaatggtcaatttgaaagtcattctaaactgattttttttttctaaagggctccttttttcctggactatgtggttttatgactaaagtcacatgtatgtattaaacattgaggctctgtagaggagagaggatgtacctctctggtgctgttacagtacattctgtacctgccatacaggctcattttcatgcaaattcttcctagagccaaataaataaagacttaggtgaattagta

SEQ ID NO: 362845 - DNA, 1333 bp, Homo sapiens
  misc_feature (7)..(7): n is a, c, g, or t
gtcatcngcaacgactctcttaatcctccaccgctacacgtaatacacaaacatttttacttgaaaagagttgagataatggcccaatgtgaggagtggattgcggatatccagcagtacagcagtgataagcgggtaggcaggactatgtctcaccatgcagcagctctcaagcgtcacactgctcagctccgcgaagagttgctgaaacttccctgccctgaaggcttggatcctgacactgacgatgccccagaggtgtgcagagccacaacaggtgctgaggagactctaatgcatgatcaggttaaacccagcagcagcaaagaactccccagtgacttccagttatgagctgcattgatgtggacttcatagacacaaaggcttcgaagcacaagccaaatatgtcaatatttgtatgtaagaaactaattatgtaataggtaatgaaactgaaactatactatgcccttaaggagatccagtttaattcaaggtgatcttttatttacctgtacaggagtgtaaacttttttgtgcttttatttttcaattgtgagaaccactgattggtatgttcaacaaatttgtgtatacaaagaaatggataaatcactgctatataagggaaactaccttaggaaagaatgtttactgaatgtttattttattttttttttttttactatagagtgaggggttgttaacaaagaatatatattggtcattcttacaactactatttaaagtcagcaacttttcactgaatttgatagattttatgtttggccatatcttcatgctcacatttgatttctgaagacctcctacatacacttcaataaaagttaaatggacatactccctcttttttgatttactggtacatttttaaaataataaatctgccataaaatgcattatatctggagacttgcacttgtatggatgaatttattacattcaacatatttaattttatgccttctaattctaagatgcagaaaaaaataaatgaacatgattttattctatgccaacatttgggcctctgaatgtatctgttatttgaatttaagtatttgaaaaggaatggtcaatttgaaagtcattctaaactgattttttttttctaaagggctccttttttcctggactatgtggttttatgactaaagtcacatgtatgtattaaacattgaggctctgtagaggagagaggatgtacctctctggtgctgttacagtacattctgtacctgccatacaggctcattttcatgcaaattcttcctagagccaaataaataaagacttaggtgaattagta

SEQ ID NO: 362846 - DNA, 1347 bp, Homo sapiens
atttagagtgtgacggtacaactgtggtaatgcacgctggcggtacagtttgagtaatacacaaacatttttacttgaaaagagttgagataatggcccaatgtgaggagtggattgcggatatccagcagtacagcagtgataagcgggtaggcaggactatgtctcaccatgcagcagctctcaagcgtcacactgctcagctccgcgaagagttgctgaaacttccctgccctgaaggcttggatcctgacactgacgatgccccagaggtgtgcagagccacaacaggtgctgaggagactctaatgcatgatcaggttaaacccagcagcagcaaagaactccccagtgacttccagttatgagctgcattgatgtggacttcatagacacaaaggcttcgaagcacaagccaaatatgtcaatatttgtatgtaagaaactaattatgtaataggtaatgaaactgaaactatactatgcccttaaggagatccagtttaattcaaggtgatcttttatttacctgtacaggagtgtaaacttttttgtgcttttatttttcaattgtgagaaccactgattggtatgttcaacaaatttgtgtatacaaagaaatggataaatcactgctatataagggaaactaccttaggaaagaatgtttactgaatgtttattttattttttttttttttactatagagtgaggggttgttaacaaagaatatatattggtcattcttacaactactatttaaagtcagcaacttttcactgaatttgatagattttatgtttggccatatcttcatgctcacatttgatttctgaagacctcctacatacacttcaataaaagttaaatggacatactccctcttttttgatttactggtacatttttaaaataataaatctgccataaaatgcattatatctggagacttgcacttgtatggatgaatttattacattcaacatatttaattttatgccttctaattctaagatgcagaaaaaaataaatgaacatgattttattctatgccaacatttgggcctctgaatgtatctgttatttgaatttaagtatttgaaaaggaatggtcaatttgaaagtcattctaaactgattttttttttctaaagggctccttttttcctggactatgtggttttatgactaaagtcacatgtatgtattaaacattgaggctctgtagaggagagaggatgtacctctctggtgctgttacagtacattctgtacctgccatacaggctcattttcatgcaaattcttcctagagccaaataaataaagacttaggtgaattagta

SEQ ID NO: 362847 - DNA, 1359 bp, Homo sapiens
  misc_feature (38)..(39): n is a, c, g, or t
  misc_feature (42)..(42): n is a, c, g, or t
taaaaataaaaaaaaataaaaaaagggagaataaaganngtntttgcaaatagttggatattttagtaatacacaaacatttttacttgaaaagagttgagataatggcccaatgtgaggagtggattgcggatatccagcagtacagcagtgataagcgggtaggcaggactatgtctcaccatgcagcagctctcaagcgtcacactgctcagctccgcgaagagttgctgaaacttccctgccctgaaggcttggatcctgacactgacgatgccccagaggtgtgcagagccacaacaggtgctgaggagactctaatgcatgatcaggttaaacccagcagcagcaaagaactccccagtgacttccagttatgagctgcattgatgtggacttcatagacacaaaggcttcgaagcacaagccaaatatgtcaatatttgtatgtaagaaactaattatgtaataggtaatgaaactgaaactatactatgcccttaaggagatccagtttaattcaaggtgatcttttatttacctgtacaggagtgtaaacttttttgtgcttttatttttcaattgtgagaaccactgattggtatgttcaacaaatttgtgtatacaaagaaatggataaatcactgctatataagggaaactaccttaggaaagaatgtttactgaatgtttattttattttttttttttttactatagagtgaggggttgttaacaaagaatatatattggtcattcttacaactactatttaaagtcagcaacttttcactgaatttgatagattttatgtttggccatatcttcatgctcacatttgatttctgaagacctcctacatacacttcaataaaagttaaatggacatactccctcttttttgatttactggtacatttttaaaataataaatctgccataaaatgcattatatctggagacttgcacttgtatggatgaatttattacattcaacatatttaattttatgccttctaattctaagatgcagaaaaaaataaatgaacatgattttattctatgccaacatttgggcctctgaatgtatctgttatttgaatttaagtatttgaaaaggaatggtcaatttgaaagtcattctaaactgattttttttttctaaagggctccttttttcctggactatgtggttttatgactaaagtcacatgtatgtattaaacattgaggctctgtagaggagagaggatgtacctctctggtgctgttacagtacattctgtacctgccatacaggctcattttcatgcaaattcttcctagagccaaataaataaagacttaggtgaattagta

SEQ ID NO: 362848 - DNA, 1331 bp, Homo sapiens
ccgggcccccccccagcgcttccccaacacctttgcgggtcaaaaccccaactttggtacttgaaaaaatccgataatggcccaatgtgaggagtggattgcggatatccagcagtacagcagtgataagcgggtaggcaggactatgtctcaccatgcagcagctctcaagcgtcacactgctcagctccgcgaagagttgctgaaacttccctgccctgaaggcttggatcctgacactgacgatgccccagaggtgtgcagagccacaacaggtgctgaggagactctaatgcatgatcaggttaaacccagcagcagcaaagaactccccagtgacttccagttatgagctgcattgatgtggacttcatagacacaaaggcttcgaagcacaagccaaatatgtcaatatttgtatgtaagaaactaattatgtaataggtaatgaaactgaaactatactatgcccttaaggagatccagtttaattcaaggtgatcttttatttacctgtacaggagtgtaaacttttttgtgcttttatttttcaattgtgagaaccactgattggtatgttcaacaaatttgtgtatacaaagaaatggataaatcactgctatataagggaaactaccttaggaaagaatgtttactgaatgtttattttattttttttttttttactatagagtgaggggttgttaacaaagaatatatattggtcattcttacaactactatttaaagtcagcaacttttcactgaatttgatagattttatgtttggccatatcttcatgctcacatttgatttctgaagacctcctacatacacttcaataaaagttaaatggacatactccctcttttttgatttactggtacatttttaaaataataaatctgccataaaatgcattatatctggagacttgcacttgtatggatgaatttattacattcaacatatttaattttatgccttctaattctaagatgcagaaaaaaataaatgaacatgattttattctatgccaacatttgggcctctgaatgtatctgttatttgaatttaagtatttgaaaaggaatggtcaatttgaaagtcattctaaactgattttttttttctaaagggctccttttttcctggactatgtggttttatgactaaagtcacatgtatgtattaaacattgaggctctgtagaggagagaggatgtacctctctggtgctgttacagtacattctgtacctgccatacaggctcattttcatgcaaattcttcctagagccaaataaataaagacttaggtgaattagta

SEQ ID NO: 362849 - DNA, 1212 bp, Homo sapiens
  misc_feature (46)..(46): n is a, c, g, or t
gagttgagctgtaagtaggaatatttgtcatcagtgtcgattcagntctcaagcgtcacactgctcagctccgcgaagagttgctgaaacttccctgccctgaaggcttggatcctgacactgacgatgccccagaggtgtgcagagccacaacaggtgctgaggagactctaatgcatgatcaggttaaacccagcagcagcaaagaactccccagtgacttccagttatgagctgcattgatgtggacttcatagacacaaaggcttcgaagcacaagccaaatatgtcaatatttgtatgtaagaaactaattatgtaataggtaatgaaactgaaactatactatgcccttaaggagatccagtttaattcaaggtgatcttttatttacctgtacaggagtgtaaacttttttgtgcttttatttttcaattgtgagaaccactgattggtatgttcaacaaatttgtgtatacaaagaaatggataaatcactgctatataagggaaactaccttaggaaagaatgtttactgaatgtttattttattttttttttttttactatagagtgaggggttgttaacaaagaatatatattggtcattcttacaactactatttaaagtcagcaacttttcactgaatttgatagattttatgtttggccatatcttcatgctcacatttgatttctgaagacctcctacatacacttcaataaaagttaaatggacatactccctcttttttgatttactggtacatttttaaaataataaatctgccataaaatgcattatatctggagacttgcacttgtatggatgaatttattacattcaacatatttaattttatgccttctaattctaagatgcagaaaaaaataaatgaacatgattttattctatgccaacatttgggcctctgaatgtatctgttatttgaatttaagtatttgaaaaggaatggtcaatttgaaagtcattctaaactgattttttttttctaaagggctccttttttcctggactatgtggttttatgactaaagtcacatgtatgtattaaacattgaggctctgtagaggagagaggatgtacctctctggtgctgttacagtacattctgtacctgccatacaggctcattttcatgcaaattcttcctagagccaaataaataaagacttaggtgaattagta

SEQ ID NO: 362850 - DNA, 11842 bp, Homo sapiens
ccgggtcccgcctccctccctgcttctccccctctcccgtcagcctccctccgagtttggcccctccgccgggcgatcgacgttccgcgtgcgtgcgggcgcctgacttcacttccggctaacgcgctcggcttgccccctggccccggatggtgactggtggtggtgctgcacctcccgggactgtcactgagccgcttcccagtgtgattgtgctgagcgcaggccggaagatggcggctgcggctgcggcggcctcgggccccggctgctcctcggcggcgggggcgggggcggccggggtctcagagtggctggtgctgcgggacggctgcatgcactgcgacgccgacgggctgcacagcctgtcctaccaccctgcgctcaacgccatcctggccgtcactagccgcgggaccatcaaagtcatcgacggcacctcgggggccacactgcaggcctccgcgctcagtgctaaaccaggtggacaggtgaaatgtcagtatatctctgctgtggataaagttatatttgtggatgattatgcagtagggtgtaggaaggaccttaatggaatcttgttgttagacactgctctgcaaactccagtttcaaagcaggatgatgtggttcagcttgaattacccgttacagaggcacagcagctcttatcagcatgtttagaaaaggtagatatttctagtacagagggttatgatttgttcatcacacagctcaaagatggtttaaaaaatacatctcatgagactgcagcaaaccacaaagttgctaagtgggccacagttacatttcatcttcctcatcatgtgttgaagtccattgccagtgccattgtaaatgaactcaagaaaataaatcaaaatgttgctgccttacctgtggcgtcctcagtgatggacagattgtcttacctcttacctagtgcacgtccagaactcggagtggggccaggccgttctgtagacagatcactgatgtatagtgaagctaacagacgggagacatttacctcatggcctcatgtaggctataggtgggcacaaccagatcccatggctcaagctggattttatcatcagcctgcctcatctggagatgatagagccatgtgttttacttgtagtgtatgcctcgtttgttgggaacctactgatgaaccttggtctgaacacgaaagacattccccaaactgcccatttgtgaaaggtgagcacacacagaatgtgccattgtcagtcactcttgcaacaagtcctgcacagtttccttgtacggatggaactgacagaatatcttgctttgggtcggggagctgccctcattttctagctgctgcaactaaacgaggaaagatctgcatatgggatgtttccaaacttatgaaggtgcacttaaagtttgaaattaatgcctatgatccagcaattgtacaacagcttattctatcaggagacccaagctcaggagttgattcaaggagaccaactttggcgtggctggaggactcctctagttgctcagatataccaaaattggaaggagatagtgatgatttactggaggattcagacagtgaagagcattccagatcagattctgtgacagggcatacatcacagaaggaagccatggaagtaagccttgatataacagcactcagcattctccaacagccagaaaaacttcagtgggagattgttgcaaatgtgcttgaagatactgttaaggatcttgaagaacttggggcaaatccttgtttaacaaactctaagagtgaaaagacaaaggaaaagcaccaggagcaacacaacattccttttccatgtttattagctggaggtttattaacatataaatctcctgctacctcacccattagtagtaattctcacaggtcactggatggtttaagcagaactcagggtgaaagtatatcagaacaagggtcaactgacaatgaatcctgcactaattcagaactaaattctcctctggtaaggaggactttaccggttttgcttctttatagcatcaaggaatctgatgagaaagcaggaaagatcttttcacagatgaacaatattatgagtaaaagtttgcatgatgatggttttactgttccacagattattgaaatggagctggatagtcaggagcagttgttattgcaggatcctcctgtgacttacattcagcaatttgcagatgcagcagccaaccttacctctccggattctgagaagtggaactctgtgtttcccaagcctgggactttggttcagtgcttgaggctgccaaagtttgcagaggaggagaatctttgtatagactcaataactccttgtgctgacggaattcatttgttggtaggactgcggacatgccctgttgaatccttgagtgcaataaatcaagtagaggccttgaataatttaaataaattaaactctgcactatgtaatagacggaaaggtgagctggaatcaaatcttgctgtagtgaatggtgcaaatattagtgtaatccaacatgaatcaccagcagatgtacagactcctttaataattcagcctgagcagaggaatgttagtggtggatatttagtgctttataaaatgaattatgccactcggatagtgactttagaagaggagccaataaaaatacaacatatcaaagatccccaggacacaattacctcgctcattttgcttccacccgatatattggataatcgagaggatgactgtgaggaacctattgaggacatgcagttaacctcaaagaatggttttgagagagaaaaaacgtctgacatttctactcttggacacctggtaataaccactcagggaggatatgtaaaaatactagatctttcaaactttgaaattttggccaaagtggagcctcccaaaaaggagggcactgaggaacaggacacatttgtttctgtgatttactgttctggcacagacaggctgtgtgcatgcaccaaagagtctcaccctgtcaacaggctggggtgcagttacgcaatcttggctcactgcaacttctgcctcccaggttcaagtgattctccggccttagcctcctgagtagctgggaccacaggtggtgagcttcattttctccaaattggaggaacctgtgatgatattgatgaagctgatatactagtggatggatctctttctaaaggaatagaaccatcttcagaaggttccaaacctttatcaaatccttcaagtcctggcatttcaggagttgatttattggtggaccagccattcacccttgaaatcttgacatccctagtggagctaacccgctttgagactttgactccaaggttttcagcgactgttcctccatgctgggtagaagttcaacaagaacagcagcaaaggaggcatcctcaacatttgcatcagcaacaccatggtgatgctgctcagcatactcgaacttggaaactacagaccgacagcaacagctgggatgaacatgtatttgaattagtactacctaaagcttgtatggttggacatgtggacttcaaattcgttttgaactcaaacatcaccaatattccacagatacaagtgacactgctgaaaaataaagctccaggattagggaaagtcaatgctcttaacattgaagtggaacaaaatgggaaaccgtccctggttgatttgaatgaagaaatgcagcacatggatgtagaggaatcccagtgtcttagattatgtccatttttggaggatcataaagaagacattctatgtgggccagtatggcttgctagtggccttgatctatcagggcatgctggaatgttgacgttaacaagccccaaacttgttaaaggtatggcaggaggaaaatatcgttcgtttttaatccatgtcaaggcagtgaatgaaagaggaacagaagagatttgtaatggtggtatgcgtcctgtagtaaggcttccatccctaaaacaccagagtaacaagggttattcacttgcttcacttttggctaaagttgcagcaggcaagagtgcaacgatgtgccatgttacagttttcagaatttcatgagaagcttcttaatactctttgcagaaaaacagatgatggccagatcacagaacatgcccagagccttgtgttggatactctctgttggttagctggagttcattcaaatggacccggaagctcaaaggaaggaaatgagaacctactttcaaaaacacgaaaatttctgtcagacatcgtacgtgtttgcttctttgaggcaggacgaagtatagcccataagtgtgcccgatttctagccttgtgcattagtaatggcaaatgtgacccatgtcaaccagcatttggacctgttctgttgaaggctttacttgataatatgtcatttttacctgcagcaacaactggtggttctgtctattggtattttgtcttactgaattatgtgaaagatgaagatctggctggatgcagtacagcttgtgcatctttgcttactgcagtgtccagacagttacaggacaggctaacaccaatggaggctttacttcagacaagatatggattatatagctcaccatttgatccagtcctctttgatttggagatgagtggctcttcttgtaaaaatgtttataacagcagcattggtgtccagtcagatgaaattgatttatcagatgtcctttcaggaaatggaaaggtcagtagttgcacagctgctgagggtagtttcacatctctcactggacttttggaagttgaacctctgcactttacttgtgtgtcaactagtgatggaaccagaatagaaagggatgatgcaagtacgtttactgtgagttccttcggggttactcctgcagtaggtggactatcatctgggacagttggggaagcctcgacagccctgagttcagcagcccaggtagctttgcagtctctctctcatgcaatggcttcagccgagcaacagctacaggtgctgcaagagaaacagcagcagcttttgaagcttcagcaacagaaagcaaagctggaagccaagttacatcagacaacagctgcagcagctgcagcagcatcagcagtaggtcctgttcacaactctgtgccttccaacccagtggctgcccctggattcttcattcatccatctgatgttattccacccactccaaaaacaacacctctttttatgactccaccactcactccacccaatgaagcagtttccgttgtgattaatgccgaacttgcacagcttttcccaggctcagtcattgatcccccagcagtcaatcttgctgcacataacaaaaattccaacaagtccagaatgaatccacttggttctggtctagcccttgcaatttctcatgcttcacattttcttcaacctccgcctcaccagtccattattatagagcgaatgcattcaggagcaagaagatttgtgaccttggattttgggaggcctatattgttgactgatgtattgattcccacttgtggagacttggcctctttgtcaattgacatttggacattaggagaagaggtggatggaaggcggttggtagtggcaactgatataagcactcattcactaattcttcatgacttaataccacctcccgtgtgcagattcatgaagatcactgttattggacgttacgggagtacaaatgccagagccaaaatcccattaggattttactatggtcatacctacatcttgccttgggaaagtgaactgaagttaatgcatgatcctctaaagggagagggagaatctgcaaaccagccagaaattgaccagcatttagcaatgatggttgctttgcaggaggatatacagtgcaggtataacttggcttgtcatcgtctggaaacccttttgcaaagtattgatcttcctcctctaaacagtgctaacaatgcacagtactttttacgaaaaccagataaggcagttgaggaagacagtagggttttttctgcttatcaagattgtattcagctacagcttcaactaaatttggctcataatgcagtgcagaggctcaaagtggcgctaggtgcaagccggaagatgttgagtgaaacatcaaatccagaagatttaattcagacatcttccacagagcagttacgtactatcatcagatatttactggacactttgctcagcctgcttcatgcttctaatggacactctgttcctgcagttttgcagagcacatttcatgcccaggcctgtgaagagctctttaaacacttgtgcatcagtggaaccccaaagatacggttacatactggtcttcttcttgttcaactgtgtggtggtgaaaggtggtggggtcaatttctttctaatgtccttcaggaattgtacaattcggaacagcttctcatctttccacaggatagggtcttcatgttactttcctgcattggtcaaagatcacttagtaatagtggagtattagaaagcttacttaatctcttggataatttattgtcacctcttcagccacagttacccatgcataggaggacagaaggagtactagatattcccatgatcagttgggttgttatgctggtgtccaggttgctggattatgtggcaactgttgaagatgaagcagcagctgcaaagaaacctttgaatggtaaagacagggagaggtttctgacaggtaatcagtggagttttattaacaataatctacacactcagagcttaaatagatcttctaaaggcagcagtagccttgatagattatattccagaaaaatcagaaagcagcttgttcatcataaacagcaacttaacctactaaaagcaaagcagaaggcattggtagaacagatggaaaaagaaaaaatacaaagtaacaaaggatcatcatataaactcctggtagaacaagcaaaactaaagcaggccacttcaaagcactttaaggatttaattcgtttacgtcggacagcagaatggtcccgttctaatttagacacagaagttacaacagcaaaagaaagtcctgagatagaaccacttccatttactctggcccatgagcgttgtatctcagtagtccagaaacttgttctgtttcttctctccatggactttacatgtcatgcagatctcttattgtttgtttgtaaggttcttgcacgcattgcaaatgccacgaggccaactattcatctgtgtgagattgtgaacgaaccccagctggaaagactgctgttacttttggttggaactgacttcaatagaggagatatatcttggggtggtgcttgggctcagtattccttaacttgcatgctacaagatattttagcaggagaattactggctccagtagccgcagaagccatggaggaaggaacagtgggtgatgatgtaggtgcgacagctggtgactctgatgactcccttcaacagtcctcagttcagttgctggaaactatagatgaacctttgacacatgacataacaggtgcacctcctctgtcctctttggaaaaagataaagaaattgaccttgagttacttcaggatctaatggaagttgacattgatcctttagatattgatttggaaaaggaccctcttgcagccaaggtttttaagccaataagcagtacatggtatgattattggggtgctgattatgggacctacaattacaacccttacattggaggtctgggaattcctgtagcaaagccaccagcaaacacggagaagaacggatcacagacagttagcgtttcagtctctcaggccctggatgctcgcctagaagttggacttgaacagcaagcagaactgatgttgaaaatgatgtctactctggaggcagattccattttacaggcattaacaaatacatctcctacattatcacagtctcccactggaacagatgattcacttctagggggtttacaagcagcaaaccaaaccagccagcttattatacagttatcatctgtcccaatgttaaatgtttgtttcaacaaacttttttccatgcttcaagtccatcatgttcagttggagtcacttctccaattgtggctcacactgagcctgaattctagttcaactggaaacaaagaaaatggagcagacatatttttatataatgctaataggatacctgttatttcattaaatcaagcatcaataactagctttctcacagtgttagcttggtatcccaatactttgctccggacatggtgccttgtgcttcatagcctaacactcatgacaaacatgcagcttaattctggttccagcagtgccattggaactcaggagagtactgctcatttgttggtttcagatccaaacctaattcatgtattagtgaaatttctttctggcaccagtccacatggaacaaatcaacacagtccacaggttggtcctacagctacacaagctatgcaagaatttcttactcgattacaagtgcatctttcttcaacatgtcctcagatattcagtgaatttttgctcaagctaattcatatactttcaactgaaaggggtgctttccagacaggccaaggacctctcgatgcccaagtgaagctcttagaattcactctggagcagaattttgaagtcgtttcagttagtactatttctgccgtgatagaatcggttacatttttagtgcaccactatatcacttgctcagacaaagtaatgtcaagaagtggatcagatagctccgtgggtgctcgagcatgctttgggggactctttgccaatcttattcgtccgggtgatgcaaaagcagtttgtggcgaaatgacaagagatcaactcatgtttgatttgttaaaacttgttaacattttagtgcagctgcctctttcaggcaatagggaatacagtgcaagagtgtctgtgaccacaaatacaacagatagtgtttcagatgaagaaaaagtctcaggaggcaaagatggcaatggaagcagtaccagtgttcaaggatcgcctgcatatgttgctgacttagtcttagccaaccaacaaattatgagccagattttgtctgctctgggcctgtgtaatagcagtgccatggcaatgataattggagcaagtggattacatctcactaaacatgaaaactttcatggtgggttggatgccatatcagttggggatggattatttaccatactgacaacccttagtaaaaaagcttctacagtccacatgatgctgcagccaattttaacatacatggcctgtggatatatgggcagacaaggctctcttgctacttgccagttatctgagccattattgtggttcattttgagagtattggatactagtgatgccttgaaagcatttcatgatatgggtggtgttcagctcatatgcaataatatggttactagtacaagggctattgtgaacactgcaagaagtatggtatcaactattatgaaatttcttgactctggtccaaataaagctgttgacagcacattgaaaacaagaatactagcttctgagcctgacaatgctgaagggattcataactttgcacccctcggtacaatcacatctagcagtcctactgcccaaccagctgaagtgctattgcaggccacacctcctcacagaagagctcgctctgctgcttggtcctacatctttcttccagaggaggcttggtgtgaccttaccattcaccttcctgcagcagtgctgcttaaggagatacatatccagcctcatcttgcatctcttgcaacctgcccttcctcagtgtctgttgaagtaagtgcagatggggtaaatatgctacctttgtccactcctgttgtcacaagtggcctcacctacataaaaattcagcttgtaaaagccgaagtagcttctgctgtctgccttagactacatcgtccacgggatgccagcacattaggcctttcacaaattaaattattggggctcactgcttttggtaccacctcttctgcaacagttaataatccattccttccatctgaagatcaggtatccaaaacaagtattggatggttacggttattacatcattgccttactcacataagtgatctagaaggaatgatggcaagtgcagctgcacctactgctaatctgctgcagacttgtgcggccttattgatgtcaccttactgtggaatgcattcacccaacatcgaggttgtgcttgtaaagataggactgcagtctactagaattggcctgaagctcatagacattctcctgagaaattgtgcagcatcaggcagtgatcctacagatttgaatagtcctttactttttggaagactaaatggactctcttctgactctacgatagatattctttaccagcttggaacaactcaggatcctggtacaaaagacagaattcaggccttgttaaaatgggttagtgattctgcaagagtggctgctatgaagagaagtggcaggatgaactacatgtgtcctaactcctcaacagtagagtatggtcttctgatgccatctccttctcatttgcactgtgtagcagccattctgtggcatagttatgagctgcttgtagaatatgacttaccagcactcctggaccaagagctctttgagttactttttaattggtccatgtctcttccctgcaatatggttttgaagaaagctgttgacagtctactttgctcaatgtgtcacgtacacccaaactatttttctttgctcatgggctggatgggaattacccctcctccagtgcaatgtcatcatagactgtccatgacagatgatagcaaaaagcaggatcttagttcatctttaacagatgactctaaaaatgcacaagcacctctcgcattaactgaatcacatttggctacccttgcttcctcttctcaatctcctgaagctattaaacaattactagactcaggtttgccttctcttcttgtgaggagtctggctagtttctgctttagccacatttctagctcagaaagcattgcccagtcaatagatatttcccaggacaaactcaggcgccatcatgtcccacaacaatgtaataagatgcctatcacagccgacctagttgctcctattcttaggtttttgacagaagttggcaatagccatattatgaaagattggcttggtggttctgaagtcaatccactatggacagcacttctgtttttattgtgtcactctgggtccacttctggaagccataatttaggtgcacaacagaccagtgcaagatcagcttctctttcttcagctgctacaacaggactgactactcaacagcgcacagcaattgagaatgcaactgttgcgttctttctacagtgcatttcatgccatcctaataatcaaaagctgatggcacaggttctttgtgaactatttcagacatctcctcaaagagggaaccttccaacatctgggaacatttcagggtttatacgaagattatttttacagttgatgctggaagatgagaaagtgacaatgtttcttcagtctccatgtccactgtacaaaggtagaattaatgctactagccacgtcatccagcatccaatgtatggagcaggccacaaattccgtactcttcatttgccagtctcaacaacattatcagatgttcttgacagagtgtcagatactccaagtatcacagctaaattaattagtgaacaaaaagatgaca

SEQ ID NO: 362851 - DNA, 12198 bp, Homo sapiens
ccgggtcccgcctccctccctgcttctccccctctcccgtcagcctccctccgagtttggcccctccgccgggcgatcgacgttccgcgtgcgtgcgggcgcctgacttcacttccggctaacgcgctcggcttgccccctggccccggatggtgactggtggtggtgctgcacctcccgggactgtcactgagccgcttcccagtgtgattgtgctgagcgcaggccggaagatggcggctgcggctgcggcggcctcgggccccggctgctcctcggcggcgggggcgggggcggccggggtctcagagtggctggtgctgcgggacggctgcatgcactgcgacgccgacgggctgcacagcctgtcctaccaccctgcgctcaacgccatcctggccgtcactagccgcgggaccatcaaagtcatcgacggcacctcgggggccacactgcaggcctccgcgctcagtgctaaaccaggtggacaggtgaaatgtcagtatatctctgctgtggataaagttatatttgtggatgattatgcagtagggtgtaggaaggaccttaatggaatcttgttgttagacactgctctgcaaactccagtttcaaagcaggatgatgtggttcagcttgaattacccgttacagaggcacagcagctcttatcagcatgtttagaaaaggtagatatttctagtacagagggttatgatttgttcatcacacagctcaaagatggtttaaaaaatacatctcatgagactgcagcaaaccacaaagttgctaagtgggccacagttacatttcatcttcctcatcatgtgttgaagtccattgccagtgccattgtaaatgaactcaagaaaataaatcaaaatgttgctgccttacctgtggcgtcctcagtgatggacagattgtcttacctcttacctagtgcacgtccagaactcggagtggggccaggccgttctgtagacagatcactgatgtatagtgaagctaacagacgggagacatttacctcatggcctcatgtaggctataggtgggcacaaccagatcccatggctcaagctggattttatcatcagcctgcctcatctggagatgatagagccatgtgttttacttgtagtgtatgcctcgtttgttgggaacctactgatgaaccttggtctgaacacgaaagacattccccaaactgcccatttgtgaaaggtgagcacacacagaatgtgccattgtcagtcactcttgcaacaagtcctgcacagtttccttgtacggatggaactgacagaatatcttgctttgggtcggggagctgccctcattttctagctgctgcaactaaacgaggaaagatctgcatatgggatgtttccaaacttatgaaggtgcacttaaagtttgaaattaatgcctatgatccagcaattgtacaacagcttattctatcaggagacccaagctcaggagttgattcaaggagaccaactttggcgtggctggaggactcctctagttgctcagatataccaaaattggaaggagatagtgatgatttactggaggattcagacagtgaagagcattccagatcagattctgtgacagggcatacatcacagaaggaagccatggaagtaagccttgatataacagcactcagcattctccaacagccagaaaaacttcagtgggagattgttgcaaatgtgcttgaagatactgttaaggatcttgaagaacttggggcaaatccttgtttaacaaactctaagagtgaaaagacaaaggaaaagcaccaggagcaacacaacattccttttccatgtttattagctggaggtttattaacatataaatctcctgctacctcacccattagtagtaattctcacaggtcactggatggtttaagcagaactcagggtgaaagtatatcagaacaagggtcaactgacaatgaatcctgcactaattcagaactaaattctcctctggtaaggaggactttaccggttttgcttctttatagcatcaaggaatctgatgagaaagcaggaaagatcttttcacagatgaacaatattatgagtaaaagtttgcatgatgatggttttactgttccacagattattgaaatggagctggatagtcaggagcagttgttattgcaggatcctcctgtgacttacattcagcaatttgcagatgcagcagccaaccttacctctccggattctgagaagtggaactctgtgtttcccaagcctgggactttggttcagtgcttgaggctgccaaagtttgcagaggaggagaatctttgtatagactcaataactccttgtgctgacggaattcatttgttggtaggactgcggacatgccctgttgaatccttgagtgcaataaatcaagtagaggccttgaataatttaaataaattaaactctgcactatgtaatagacggaaaggtgagctggaatcaaatcttgctgtagtgaatggtgcaaatattagtgtaatccaacatgaatcaccagcagatgtacagactcctttaataattcagcctgagcagaggaatgttagtggtggatatttagtgctttataaaatgaattatgccactcggatagtgactttagaagaggagccaataaaaatacaacatatcaaagatccccaggacacaattacctcgctcattttgcttccacccgatatattggataatcgagaggatgactgtgaggaacctattgaggacatgcagttaacctcaaagaatggttttgagagagaaaaaacgtctgacatttctactcttggacacctggtaataaccactcagggaggatatgtaaaaatactagatctttcaaactttgaaattttggccaaagtggagcctcccaaaaaggagggcactgaggaacaggacacatttgtttctgtgatttactgttctggcacagacaggctgtgtgcatgcaccaaagagtctcaccctgtcaacaggctggggtgcagttacgcaatcttggctcactgcaacttctgcctcccaggttcaagtgattctccggccttagcctcctgagtagctgggaccacaggtggtgagcttcattttctccaaattggaggaacctgtgatgatattgatgaagctgatatactagtggatggatctctttctaaaggaatagaaccatcttcagaaggttccaaacctttatcaaatccttcaagtcctggcatttcaggagttgatttattggtggaccagccattcacccttgaaatcttgacatccctagtggagctaacccgctttgagactttgactccaaggttttcagcgactgttcctccatgctgggtagaagttcaacaagaacagcagcaaaggaggcatcctcaacatttgcatcagcaacaccatggtgatgctgctcagcatactcgaacttggaaactacagaccgacagcaacagctgggatgaacatgtatttgaattagtactacctaaagcttgtatggttggacatgtggacttcaaattcgttttgaactcaaacatcaccaatattccacagatacaagtgacactgctgaaaaataaagctccaggattagggaaagtcaatgctcttaacattgaagtggaacaaaatgggaaaccgtccctggttgatttgaatgaagaaatgcagcacatggatgtagaggaatcccagtgtcttagattatgtccatttttggaggatcataaagaagacattctatgtgggccagtatggcttgctagtggccttgatctatcagggcatgctggaatgttgacgttaacaagccccaaacttgttaaaggtatggcaggaggaaaatatcgttcgtttttaatccatgtcaaggcagtgaatgaaagaggaacagaagagatttgtaatggtggtatgcgtcctgtagtaaggcttccatccctaaaacaccagagtaacaagggttattcacttgcttcacttttggctaaagttgcagcaggcaagagtgcaacgatgtgccatgttacagttttcagaatttcatgagaagcttcttaatactctttgcagaaaaacagatgatggccagatcacagaacatgcccagagccttgtgttggatactctctgttggttagctggagttcattcaaatggacccggaagctcaaaggaaggaaatgagaacctactttcaaaaacacgaaaatttctgtcagacatcgtacgtgtttgcttctttgaggcaggacgaagtatagcccataagtgtgcccgatttctagccttgtgcattagtaatggcaaatgtgacccatgtcaaccagcatttggacctgttctgttgaaggctttacttgataatatgtcatttttacctgcagcaacaactggtggttctgtctattggtattttgtcttactgaattatgtgaaagatgaagatctggctggatgcagtacagcttgtgcatctttgcttactgcagtgtccagacagttacaggacaggctaacaccaatggaggctttacttcagacaagatatggattatatagctcaccatttgatccagtcctctttgatttggagatgagtggctcttcttgtaaaaatgtttataacagcagcattggtgtccagtcagatgaaattgatttatcagatgtcctttcaggaaatggaaaggtcagtagttgcacagctgctgagggtagtttcacatctctcactggacttttggaagttgaacctctgcactttacttgtgtgtcaactagtgatggaaccagaatagaaagggatgatgcaagtacgtttactgtgagttccttcggggttactcctgcagtaggtggactatcatctgggacagttggggaagcctcgacagccctgagttcagcagcccaggtagctttgcagtctctctctcatgcaatggcttcagccgagcaacagctacaggtgctgcaagagaaacagcagcagcttttgaagcttcagcaacagaaagcaaagctggaagccaagttacatcagacaacagctgcagcagctgcagcagcatcagcagtaggtcctgttcacaactctgtgccttccaacccagtggctgcccctggattcttcattcatccatctgatgttattccacccactccaaaaacaacacctctttttatgactccaccactcactccacccaatgaagcagtttccgttgtgattaatgccgaacttgcacagcttttcccaggctcagtcattgatcccccagcagtcaatcttgctgcacataacaaaaattccaacaagtccagaatgaatccacttggttctggtctagcccttgcaatttctcatgcttcacattttcttcaacctccgcctcaccagtccattattatagagcgaatgcattcaggagcaagaagatttgtgaccttggattttgggaggcctatattgttgactgatgtattgattcccacttgtggagacttggcctctttgtcaattgacatttggacattaggagaagaggtggatggaaggcggttggtagtggcaactgatataagcactcattcactaattcttcatgacttaataccacctcccgtgtgcagattcatgaagatcactgttattggacgttacgggagtacaaatgccagagccaaaatcccattaggattttactatggtcatacctacatcttgccttgggaaagtgaactgaagttaatgcatgatcctctaaagggagagggagaatctgcaaaccagccagaaattgaccagcatttagcaatgatggttgctttgcaggaggatatacagtgcaggtataacttggcttgtcatcgtctggaaacccttttgcaaagtattgatcttcctcctctaaacagtgctaacaatgcacagtactttttacgaaaaccagataaggcagttgaggaagacagtagggttttttctgcttatcaagattgtattcagctacagcttcaactaaatttggctcataatgcagtgcagaggctcaaagtggcgctaggtgcaagccggaagatgttgagtgaaacatcaaatccagaagatttaattcagacatcttccacagagcagttacgtactatcatcagatatttactggacactttgctcagcctgcttcatgcttctaatggacactctgttcctgcagttttgcagagcacatttcatgcccaggcctgtgaagagctctttaaacacttgtgcatcagtggaaccccaaagatacggttacatactggtcttcttcttgttcaactgtgtggtggtgaaaggtggtggggtcaatttctttctaatgtccttcaggaattgtacaattcggaacagcttctcatctttccacaggatagggtcttcatgttactttcctgcattggtcaaagatcacttagtaatagtggagtattagaaagcttacttaatctcttggataatttattgtcacctcttcagccacagttacccatgcataggaggacagaaggagtactagatattcccatgatcagttgggttgttatgctggtgtccaggttgctggattatgtggcaactgttgaagatgaagcagcagctgcaaagaaacctttgaatggtaaagacagggagaggtttctgacaggtaatcagtggagttttattaacaataatctacacactcagagcttaaatagatcttctaaaggcagcagtagccttgatagattatattccagaaaaatcagaaagcagcttgttcatcataaacagcaacttaacctactaaaagcaaagcagaaggcattggtagaacagatggaaaaagaaaaaatacaaagtaacaaaggatcatcatataaactcctggtagaacaagcaaaactaaagcaggccacttcaaagcactttaaggatttaattcgtttacgtcggacagcagaatggtcccgttctaatttagacacagaagttacaacagcaaaagaaagtcctgagatagaaccacttccatttactctggcccatgagcgttgtatctcagtagtccagaaacttgttctgtttcttctctccatggactttacatgtcatgcagatctcttattgtttgtttgtaaggttcttgcacgcattgcaaatgccacgaggccaactattcatctgtgtgagattgtgaacgaaccccagctggaaagactgctgttacttttggttggaactgacttcaatagaggagatatatcttggggtggtgcttgggctcagtattccttaacttgcatgctacaagatattttagcaggagaattactggctccagtagccgcagaagccatggaggaaggaacagtgggtgatgatgtaggtgcgacagctggtgactctgatgactcccttcaacagtcctcagttcagttgctggaaactatagatgaacctttgacacatgacataacaggtgcacctcctctgtcctctttggaaaaagataaagaaattgaccttgagttacttcaggatctaatggaagttgacattgatcctttagatattgatttggaaaaggaccctcttgcagccaaggtttttaagccaataagcagtacatggtatgattattggggtgctgattatgggacctacaattacaacccttacattggaggtctgggaattcctgtagcaaagccaccagcaaacacggagaagaacggatcacagacagttagcgtttcagtctctcaggccctggatgctcgcctagaagttggacttgaacagcaagcagaactgatgttgaaaatgatgtctactctggaggcagattccattttacaggcattaacaaatacatctcctacattatcacagtctcccactggaacagatgattcacttctagggggtttacaagcagcaaaccaaaccagccagcttattatacagttatcatctgtcccaatgttaaatgtttgtttcaacaaacttttttccatgcttcaagtccatcatgttcagttggagtcacttctccaattgtggctcacactgagcctgaattctagttcaactggaaacaaagaaaatggagcagacatatttttatataatgctaataggatacctgttatttcattaaatcaagcatcaataactagctttctcacagtgttagcttggtatcccaatactttgctccggacatggtgccttgtgcttcatagcctaacactcatgacaaacatgcagcttaattctggttccagcagtgccattggaactcaggagagtactgctcatttgttggtttcagatccaaacctaattcatgtattagtgaaatttctttctggcaccagtccacatggaacaaatcaacacagtccacaggttggtcctacagctacacaagctatgcaagaatttcttactcgattacaagtgcatctttcttcaacatgtcctcagatattcagtgaatttttgctcaagctaattcatatactttcaactgaaaggggtgctttccagacaggccaaggacctctcgatgcccaagtgaagctcttagaattcactctggagcagaattttgaagtcgtttcagttagtactatttctgccgtgatagaatcggttacatttttagtgcaccactatatcacttgctcagacaaagtaatgtcaagaagtggatcagatagctccgtgggtgctcgagcatgctttgggggactctttgccaatcttattcgtccgggtgatgcaaaagcagtttgtggcgaaatgacaagagatcaactcatgtttgatttgttaaaacttgttaacattttagtgcagctgcctctttcaggcaatagggaatacagtgcaagagtgtctgtgaccacaaatacaacagatagtgtttcagatgaagaaaaagtctcaggaggcaaagatggcaatggaagcagtaccagtgttcaaggatcgcctgcatatgttgctgacttagtcttagccaaccaacaaattatgagccagattttgtctgctctgggcctgtgtaatagcagtgccatggcaatgataattggagcaagtggattacatctcactaaacatgaaaactttcatggtgggttggatgccatatcagttggggatggattatttaccatactgacaacccttagtaaaaaagcttctacagtccacatgatgctgcagccaattttaacatacatggcctgtggatatatgggcagacaaggctctcttgctacttgccagttatctgagccattattgtggttcattttgagagtattggatactagtgatgccttgaaagcatttcatgatatgggtggtgttcagctcatatgcaataatatggttactagtacaagggctattgtgaacactgcaagaagtatggtatcaactattatgaaatttcttgactctggtccaaataaagctgttgacagcacattgaaaacaagaatactagcttctgagcctgacaatgctgaagggattcataactttgcacccctcggtacaatcacatctagcagtcctactgcccaaccagctgaagtgctattgcaggccacacctcctcacagaagagctcgctctgctgcttggtcctacatctttcttccagaggaggcttggtgtgaccttaccattcaccttcctgcagcagtgctgcttaaggagatacatatccagcctcatcttgcatctcttgcaacctgcccttcctcagtgtctgttgaagtaagtgcagatggggtaaatatgctacctttgtccactcctgttgtcacaagtggcctcacctacataaaaattcagcttgtaaaagccgaagtagcttctgctgtctgccttagactacatcgtccacgggatgccagcacattaggcctttcacaaattaaattattggggctcactgcttttggtaccacctcttctgcaacagttaataatccattccttccatctgaagatcaggtatccaaaacaagtattggatggttacggttattacatcattgccttactcacataagtgatctagaaggaatgatggcaagtgcagctgcacctactgctaatctgctgcagacttgtgcggccttattgatgtcaccttactgtggaatgcattcacccaacatcgaggttgtgcttgtaaagataggactgcagtctactagaattggcctgaagctcatagacattctcctgagaaattgtgcagcatcaggcagtgatcctacagatttgaatagtcctttactttttggaagactaaatggactctcttctgactctacgatagatattctttaccagcttggaacaactcaggatcctggtacaaaagacagaattcaggccttgttaaaatgggttagtgattctgcaagagtggctgctatgaagagaagtggcaggatgaactacatgtgtcctaactcctcaacagtagagtatggtcttctgatgccatctccttctcatttgcactgtgtagcagccattctgtggcatagttatgagctgcttgtagaatatgacttaccagcactcctggaccaagagctctttgagttactttttaattggtccatgtctcttccctgcaatatggttttgaagaaagctgttgacagtctactttgctcaatgtgtcacgtacacccaaactatttttctttgctcatgggctggatgggaattacccctcctccagtgcaatgtcatcatagactgtccatgacagatgatagcaaaaagcaggatcttagttcatctttaacagatgactctaaaaatgcacaagcacctctcgcattaactgaatcacatttggctacccttgcttcctcttctcaatctcctgaagctattaaacaattactagactcaggtttgccttctcttcttgtgaggagtctggctagtttctgctttagccacatttctagctcagaaagcattgcccagtcaatagatatttcccaggacaaactcaggcgccatcatgtcccacaacaatgtaataagatgcctatcacagccgacctagttgctcctattcttaggtttttgacagaagttggcaatagccatattatgaaagattggcttggtggttctgaagtcaatccactatggacagcacttctgtttttattgtgtcactctgggtccacttctggaagccataatttaggtgcacaacagaccagtgcaagatcagcttctctttcttcagctgctacaacaggactgactactcaacagcgcacagcaattgagaatgcaactgttgcgttctttctacagtgcatttcatgccatcctaataatcaaaagctgatggcacaggttctttgtgaactatttcagacatctcctcaaagagggaaccttccaacatctgggaacatttcagggtttatacgaagattatttttacagttgatgctggaagatgagaaagtgacaatgtttcttcagtctccatgtccactgtacaaaggtagaattaatgctactagccacgtcatccagcatccaatgtatggagcaggccacaaattccgtactcttcatttgccagtctcaacaacattatcagatgttcttgacagagtgtcaggcaagtcagatttaagtattagtttttgtttaactttatgtttgatgtatatggaggtttattgtttttataactttattttctgcatccactttgcaaccattgatgactaggaaagttcaagacatctttatagtttgaagcataagaagccagtcaagtggacaaaatgtaaaatacttttaggcacccctaattttttggtttattgtgtcacagtgagaaatgggcagctagaaatacagacaaataattgatggcatgttctcacaataaaccatctggtcattttatactagattaattgcaggatatttggttgaatagcaagattctaattaatacacatttactaaattgaaggtggtgatcagtgatcaagacataaatggagtaggtagaat

SEQ ID NO: 362852 - DNA, 8759 bp, Homo sapiens
ccgggtcccgcctccctccctgcttctccccctctcccgtcagcctccctccgagtttggcccctccgccgggcgatcgacgttccgcgtgcgtgcgggcgcctgacttcacttccggctaacgcgctcggcttgccccctggccccggatggtgactggtggtggtgctgcacctcccgggactgtcactgagccgcttcccagtgtgattgtgctgagcgcaggccggaagatggcggctgcggctgcggcggcctcgggccccggctgctcctcggcggcgggggcgggggcggccggggtctcagagtggctggtgctgcgggacggctgcatgcactgcgacgccgacgggctgcacagcctgtcctaccaccctgcgctcaacgccatcctggccgtcactagccgcgggaccatcaaagtcatcgacggcacctcgggggccacactgcaggcctccgcgctcagtgctaaaccaggtggacaggtgaaatgtcagtatatctctgctgtggataaagttatatttgtggatgattatgcagtagggtgtaggaaggaccttaatggaatcttgttgttagacactgctctgcaaactccagtttcaaagcaggatgatgtggttcagcttgaattacccgttacagaggcacagcagctcttatcagcatgtttagaaaaggtagatatttctagtacagagggttatgatttgttcatcacacagctcaaagatggtttaaaaaatacatctcatgagactgcagcaaaccacaaagttgctaagtgggccacagttacatttcatcttcctcatcatgtgttgaagtccattgccagtgccattgtaaatgaactcaagaaaataaatcaaaatgttgctgccttacctgtggcgtcctcagtgatggacagattgtcttacctcttacctagtgcacgtccagaactcggagtggggccaggccgttctgtagacagatcactgatgtatagtgaagctaacagacgggagacatttacctcatggcctcatgtaggctataggtgggcacaaccagatcccatggctcaagctggattttatcatcagcctgcctcatctggagatgatagagccatgtgttttacttgtagtgtatgcctcgtttgttgggaacctactgatgaaccttggtctgaacacgaaagacattccccaaactgcccatttgtgaaaggtgagcacacacagaatgtgccattgtcagtcactcttgcaacaagtcctgcacagtttccttgtacggatggaactgacagaatatcttgctttgggtcggggagctgccctcattttctagctgctgcaactaaacgaggaaagatctgcatatgggatgtttccaaacttatgaaggtgcacttaaagtttgaaattaatgcctatgatccagcaattgtacaacagcttattctatcaggagacccaagctcaggagttgattcaaggagaccaactttggcgtggctggaggactcctctagttgctcagatataccaaaattggaaggagatagtgatgatttactggaggattcagacagtgaagagcattccagatcagattctgtgacagggcatacatcacagaaggaagccatggaagtaagccttgatataacagcactcagcattctccaacagccagaaaaacttcagtgggagattgttgcaaatgtgcttgaagatactgttaaggatcttgaagaacttggggcaaatccttgtttaacaaactctaagagtgaaaagacaaaggaaaagcaccaggagcaacacaacattccttttccatgtttattagctggaggtttattaacatataaatctcctgctacctcacccattagtagtaattctcacaggtcactggatggtttaagcagaactcagggtgaaagtatatcagaacaagggtcaactgacaatgaatcctgcactaattcagaactaaattctcctctggtaaggaggactttaccggttttgcttctttatagcatcaaggaatctgatgagaaagcaggaaagatcttttcacagatgaacaatattatgagtaaaagtttgcatgatgatggttttactgttccacagattattgaaatggagctggatagtcaggagcagttgttattgcaggatcctcctgtgacttacattcagcaatttgcagatgcagcagccaaccttacctctccggattctgagaagtggaactctgtgtttcccaagcctgggactttggttcagtgcttgaggctgccaaagtttgcagaggaggagaatctttgtatagactcaataactccttgtgctgacggaattcatttgttggtaggactgcggacatgccctgttgaatccttgagtgcaataaatcaagtagaggccttgaataatttaaataaattaaactctgcactatgtaatagacggaaaggtgagctggaatcaaatcttgctgtagtgaatggtgcaaatattagtgtaatccaacatgaatcaccagcagatgtacagactcctttaataattcagcctgagcagaggaatgttagtggtggatatttagtgctttataaaatgaattatgccactcggatagtgactttagaagaggagccaataaaaatacaacatatcaaagatccccaggacacaattacctcgctcattttgcttccacccgatatattggataatcgagaggatgactgtgaggaacctattgaggacatgcagttaacctcaaagaatggttttgagagagaaaaaacgtctgacatttctactcttggacacctggtaataaccactcagggaggatatgtaaaaatactagatctttcaaactttgaaattttggccaaagtggagcctcccaaaaaggagggcactgaggaacaggacacatttgtttctgtgatttactgttctggcacagacaggctgtgtgcatgcaccaaagagtctcaccctgtcaacaggctggggtgcagttacgcaatcttggctcactgcaacttctgcctcccaggttcaagtgattctccggccttagcctcctgagtagctgggaccacaggtggtgagcttcattttctccaaattggaggaacctgtgatgatattgatgaagctgatatactagtggatggatctctttctaaaggaatagaaccatcttcagaaggttccaaacctttatcaaatccttcaagtcctggcatttcaggagttgatttattggtggaccagccattcacccttgaaatcttgacatccctagtggagctaacccgctttgagactttgactccaaggttttcagcgactgttcctccatgctgggtagaagttcaacaagaacagcagcaaaggaggcatcctcaacatttgcatcagcaacaccatggtgatgctgctcagcatactcgaacttggaaactacagaccgacagcaacagctgggatgaacatgtatttgaattagtactacctaaagcttgtatggttggacatgtggacttcaaattcgttttgaactcaaacatcaccaatattccacagatacaagtgacactgctgaaaaataaagctccaggattagggaaagtcaatgctcttaacattgaagtggaacaaaatgggaaaccgtccctggttgatttgaatgaagaaatgcagcacatggatgtagaggaatcccagtgtcttagattatgtccatttttggaggatcataaagaagacattctatgtgggccagtatggcttgctagtggccttgatctatcagggcatgctggaatgttgacgttaacaagccccaaacttgttaaaggtatggcaggaggaaaatatcgttcgtttttaatccatgtcaaggcagtgaatgaaagaggaacagaagagatttgtaatggtggtatgcgtcctgtagtaaggcttccatccctaaaacaccagagtaacaagggttattcacttgcttcacttttggctaaagttgcagcaggcaagagtgcaacgatgtgccatgttacagttttcagaatttcatgagaagcttcttaatactctttgcagaaaaacagatgatggccagatcacagaacatgcccagagccttgtgttggatactctctgttggttagctggagttcattcaaatggacccggaagctcaaaggaaggaaatgagaacctactttcaaaaacacgaaaatttctgtcagacatcgtacgtgtttgcttctttgaggcaggacgaagtatagcccataagtgtgcccgatttctagccttgtgcattagtaatggcaaatgtgacccatgtcaaccagcatttggacctgttctgttgaaggctttacttgataatatgtcatttttacctgcagcaacaactggtggttctgtctattggtattttgtcttactgaattatgtgaaagatgaagatctggctggatgcagtacagcttgtgcatctttgcttactgcagtgtccagacagttacaggacaggctaacaccaatggaggctttacttcagacaagatatggattatatagctcaccatttgatccagtcctctttgatttggagatgagtggctcttcttgtaaaaatgtttataacagcagcattggtgtccagtcagatgaaattgatttatcagatgtcctttcaggaaatggaaaggtcagtagttgcacagctgctgagggtagtttcacatctctcactggacttttggaagttgaacctctgcactttacttgtgtgtcaactagtgatggaaccagaatagaaagggatgatgcaagtacgtttactgtgagttccttcggggttactcctgcagtaggtggactatcatctgggacagttggggaagcctcgacagccctgagttcagcagcccaggtagctttgcagtctctctctcatgcaatggcttcagccgagcaacagctacaggtgctgcaagagaaacagcagcagcttttgaagcttcagcaacagaaagcaaagctggaagccaagttacatcagacaacagctgcagcagctgcagcagcatcagcagtaggtcctgttcacaactctgtgccttccaacccagtggctgcccctggattcttcattcatccatctgatgttattccacccactccaaaaacaacacctctttttatgactccaccactcactccacccaatgaagcagtttccgttgtgattaatgccgaacttgcacagcttttcccaggctcagtcattgatcccccagcagtcaatcttgctgcacataacaaaaattccaacaagtccagaatgaatccacttggttctggtctagcccttgcaatttctcatgcttcacattttcttcaacctccgcctcaccagtccattattatagagcgaatgcattcaggagcaagaagatttgtgaccttggattttgggaggcctatattgttgactgatgtattgattcccacttgtggagacttggcctctttgtcaattgacatttggacattaggagaagaggtggatggaaggcggttggtagtggcaactgatataagcactcattcactaattcttcatgacttaataccacctcccgtgtgcagattcatgaagatcactgttattggacgttacgggagtacaaatgccagagccaaaatcccattaggattttactatggtcatacctacatcttgccttgggaaagtgaactgaagttaatgcatgatcctctaaagggagagggagaatctgcaaaccagccagaaattgaccagcatttagcaatgatggttgctttgcaggaggatatacagtgcaggtataacttggcttgtcatcgtctggaaacccttttgcaaagtattgatcttcctcctctaaacagtgctaacaatgcacagtactttttacgaaaaccagataaggcagttgaggaagacagtagggttttttctgcttatcaagattgtattcagctacagcttcaactaaatttggctcataatgcagtgcagaggctcaaagtggcgctaggtgcaagccggaagatgttgagtgaaacatcaaatccagaagatttaattcagacatcttccacagagcagttacgtactatcatcagatatttactggacactttgctcagcctgcttcatgcttctaatggacactctgttcctgcagttttgcagagcacatttcatgcccaggcctgtgaagagctctttaaacacttgtgcatcagtggaaccccaaagatacggttacatactggtcttcttcttgttcaactgtgtggtggtgaaaggtggtggggtcaatttctttctaatgtccttcaggaattgtacaattcggaacagcttctcatctttccacaggatagggtcttcatgttactttcctgcattggtcaaagatcacttagtaatagtggagtattagaaagcttacttaatctcttggataatttattgtcacctcttcagccacagttacccatgcataggaggacagaaggagtactagatattcccatgatcagttgggttgttatgctggtgtccaggttgctggattatgtggcaactgttgaagatgaagcagcagctgcaaagaaacctttgaatggtaaagacagggagaggtttctgacaggtaatcagtggagttttattaacaataatctacacactcagagcttaaatagatcttctaaaggcagcagtagccttgatagattatattccagaaaaatcagaaagcagcttgttcatcataaacagcaacttaacctactaaaagcaaagcagaaggcattggtagaacagatggaaaaagaaaaaatacaaagtaacaaaggatcatcatataaactcctggtagaacaagcaaaactaaagcaggccacttcaaagcactttaaggatttaattcgtttacgtcggacagcagaatggtcccgttctaatttagacacagaagttacaacagcaaaagaaagtcctgagatagaaccacttccatttactctggcccatgagcgttgtatctcagtagtccagaaacttgttctgtttcttctctccatggactttacatgtcatgcagatctcttattgtttgtttgtaaggttcttgcacgcattgcaaatgccacgaggccaactattcatctgtgtgagattgtgaacgaaccccagctggaaagactgctgttacttttggttggaactgacttcaatagaggagatatatcttggggtggtgcttgggctcagtattccttaacttgcatgctacaagatattttagcaggagaattactggctccagtagccgcagaagccatggaggaaggaacagtgggtgatgatgtaggtgcgacagctggtgactctgatgactcccttcaacagtcctcagttcagttgctggaaactatagatgaacctttgacacatgacataacaggtgcacctcctctgtcctctttggaaaaagataaagaaattgaccttgagttacttcaggatctaatggaagttgacattgatcctttagatattgatttggaaaaggaccctcttgcagccaaggtttttaagccaataagcagtacatggtatgattattggggtgctgattatgggacctacaattacaacccttacattggaggtctgggaattcctgtagcaaagccaccagcaaacacggagaagaacggatcacagacagttagcgtttcagtctctcaggccctggatgctcgcctagaagttggacttgaacagcaagcagaactgatgttgaaaatgatgtctactctggaggcagattccattttacaggcattaacaaatacatctcctacattatcacagtctcccactggaacagatgattcacttctagggggtttacaagcagcaaaccaaaccagccagcttattatacagttatcatctgtcccaatgttaaatgtttgtttcaacaaacttttttccatgcttcaagtccatcatgttcaggtatgaattcaggagaaatggtgtatttttacatattattgttagcctggtaaaagatgaaactaattgggaagttcattctaatcctgtcagggatgatttctttattatattcagttggaaaaatattagaaatactttgattaccaaagtaatcacagtttctcaatgatggaccattgataattttaatgattttaagcttcagtactttaattcctactacacatacacacagctgtgattagagattgaatcacagggcatggtggcttgagtttgtagtcctagctactcaggaggctgaggcaggaagattgcttaaggccaggagttcgagaccagcttgggcaacataacactagatcctgtctctaataaagtaaaaaaaattaaccaggtgcagtagcacatgcctacagtcccagctactcgggaggctgaggcgggaggatggcttgagcccaggagttcaagatatagcagaccttgtctcaaataaaaaaaaaaaaatgacttgaatcacctgttttaatttagaagaatctttttatgaggtaatttctaacatttaattcaggtaaattttgtttcttcaagaattttaagatgtgtttgct

SEQ ID NO: 362853 - DNA, 7530 bp, Homo sapiens
ccgggtcccgcctccctccctgcttctccccctctcccgtcagcctccctccgagtttggcccctccgccgggcgatcgacgttccgcgtgcgtgcgggcgcctgacttcacttccggctaacgcgctcggcttgccccctggccccggatggtgactggtggtggtgctgcacctcccgggactgtcactgagccgcttcccagtgtgattgtgctgagcgcaggccggaagatggcggctgcggctgcggcggcctcgggccccggctgctcctcggcggcgggggcgggggcggccggggtctcagagtggctggtgctgcgggacggctgcatgcactgcgacgccgacgggctgcacagcctgtcctaccaccctgcgctcaacgccatcctggccgtcactagccgcgggaccatcaaagtcatcgacggcacctcgggggccacactgcaggcctccgcgctcagtgctaaaccaggtggacaggtgaaatgtcagtatatctctgctgtggataaagttatatttgtggatgattatgcagtagggtgtaggaaggaccttaatggaatcttgttgttagacactgctctgcaaactccagtttcaaagcaggatgatgtggttcagcttgaattacccgttacagaggcacagcagctcttatcagcatgtttagaaaaggtagatatttctagtacagagggttatgatttgttcatcacacagctcaaagatggtttaaaaaatacatctcatgagactgcagcaaaccacaaagttgctaagtgggccacagttacatttcatcttcctcatcatgtgttgaagtccattgccagtgccattgtaaatgaactcaagaaaataaatcaaaatgttgctgccttacctgtggcgtcctcagtgatggacagattgtcttacctcttacctagtgcacgtccagaactcggagtggggccaggccgttctgtagacagatcactgatgtatagtgaagctaacagacgggagacatttacctcatggcctcatgtaggctataggtgggcacaaccagatcccatggctcaagctggattttatcatcagcctgcctcatctggagatgatagagccatgtgttttacttgtagtgtatgcctcgtttgttgggaacctactgatgaaccttggtctgaacacgaaagacattccccaaactgcccatttgtgaaaggtgagcacacacagaatgtgccattgtcagtcactcttgcaacaagtcctgcacagtttccttgtacggatggaactgacagaatatcttgctttgggtcggggagctgccctcattttctagctgctgcaactaaacgaggaaagatctgcatatgggatgtttccaaacttatgaaggtgcacttaaagtttgaaattaatgcctatgatccagcaattgtacaacagcttattctatcaggagacccaagctcaggagttgattcaaggagaccaactttggcgtggctggaggactcctctagttgctcagatataccaaaattggaaggagatagtgatgatttactggaggattcagacagtgaagagcattccagatcagattctgtgacagggcatacatcacagaaggaagccatggaagtaagccttgatataacagcactcagcattctccaacagccagaaaaacttcagtgggagattgttgcaaatgtgcttgaagatactgttaaggatcttgaagaacttggggcaaatccttgtttaacaaactctaagagtgaaaagacaaaggaaaagcaccaggagcaacacaacattccttttccatgtttattagctggaggtttattaacatataaatctcctgctacctcacccattagtagtaattctcacaggtcactggatggtttaagcagaactcagggtgaaagtatatcagaacaagggtcaactgacaatgaatcctgcactaattcagaactaaattctcctctggtaaggaggactttaccggttttgcttctttatagcatcaaggaatctgatgagaaagcaggaaagatcttttcacagatgaacaatattatgagtaaaagtttgcatgatgatggttttactgttccacagattattgaaatggagctggatagtcaggagcagttgttattgcaggatcctcctgtgacttacattcagcaatttgcagatgcagcagccaaccttacctctccggattctgagaagtggaactctgtgtttcccaagcctgggactttggttcagtgcttgaggctgccaaagtttgcagaggaggagaatctttgtatagactcaataactccttgtgctgacggaattcatttgttggtaggactgcggacatgccctgttgaatccttgagtgcaataaatcaagtagaggccttgaataatttaaataaattaaactctgcactatgtaatagacggaaaggtgagctggaatcaaatcttgctgtagtgaatggtgcaaatattagtgtaatccaacatgaatcaccagcagatgtacagactcctttaataattcagcctgagcagaggaatgttagtggtggatatttagtgctttataaaatgaattatgccactcggatagtgactttagaagaggagccaataaaaatacaacatatcaaagatccccaggacacaattacctcgctcattttgcttccacccgatatattggataatcgagaggatgactgtgaggaacctattgaggacatgcagttaacctcaaagaatggttttgagagagaaaaaacgtctgacatttctactcttggacacctggtaataaccactcagggaggatatgtaaaaatactagatctttcaaactttgaaattttggccaaagtggagcctcccaaaaaggagggcactgaggaacaggacacatttgtttctgtgatttactgttctggcacagacaggctgtgtgcatgcaccaaagagtctcaccctgtcaacaggctggggtgcagttacgcaatcttggctcactgcaacttctgcctcccaggttcaagtgattctccggccttagcctcctgagtagctgggaccacaggtggtgagcttcattttctccaaattggaggaacctgtgatgatattgatgaagctgatatactagtggatggatctctttctaaaggaatagaaccatcttcagaaggttccaaacctttatcaaatccttcaagtcctggcatttcaggagttgatttattggtggaccagccattcacccttgaaatcttgacatccctagtggagctaacccgctttgagactttgactccaaggttttcagcgactgttcctccatgctgggtagaagttcaacaagaacagcagcaaaggaggcatcctcaacatttgcatcagcaacaccatggtgatgctgctcagcatactcgaacttggaaactacagaccgacagcaacagctgggatgaacatgtatttgaattagtactacctaaagcttgtatggttggacatgtggacttcaaattcgttttgaactcaaacatcaccaatattccacagatacaagtgacactgctgaaaaataaagctccaggattagggaaagtcaatgctcttaacattgaagtggaacaaaatgggaaaccgtccctggttgatttgaatgaagaaatgcagcacatggatgtagaggaatcccagtgtcttagattatgtccatttttggaggatcataaagaagacattctatgtgggccagtatggcttgctagtggccttgatctatcagggcatgctggaatgttgacgttaacaagccccaaacttgttaaaggtatggcaggaggaaaatatcgttcgtttttaatccatgtcaaggcagtgaatgaaagaggaacagaagagatttgtaatggtggtatgcgtcctgtagtaaggcttccatccctaaaacaccagagtaacaagggttattcacttgcttcacttttggctaaagttgcagcaggcaagagtgcaacgatgtgccatgttacagttttcagaatttcatgagaagcttcttaatactctttgcagaaaaacagatgatggccagatcacagaacatgcccagagccttgtgttggatactctctgttggttagctggagttcattcaaatggacccggaagctcaaaggaaggaaatgagaacctactttcaaaaacacgaaaatttctgtcagacatcgtacgtgtttgcttctttgaggcaggacgaagtatagcccataagtgtgcccgatttctagccttgtgcattagtaatggcaaatgtgacccatgtcaaccagcatttggacctgttctgttgaaggctttacttgataatatgtcatttttacctgcagcaacaactggtggttctgtctattggtattttgtcttactgaattatgtgaaagatgaagatctggctggatgcagtacagcttgtgcatctttgcttactgcagtgtccagacagttacaggacaggctaacaccaatggaggctttacttcagacaagatatggattatatagctcaccatttgatccagtcctctttgatttggagatgagtggctcttcttgtaaaaatgtttataacagcagcattggtgtccagtcagatgaaattgatttatcagatgtcctttcaggaaatggaaaggtcagtagttgcacagctgctgagggtagtttcacatctctcactggacttttggaagttgaacctctgcactttacttgtgtgtcaactagtgatggaaccagaatagaaagggatgatgcaagtacgtttactgtgagttccttcggggttactcctgcagtaggtggactatcatctgggacagttggggaagcctcgacagccctgagttcagcagcccaggtagctttgcagtctctctctcatgcaatggcttcagccgagcaacagctacaggtgctgcaagagaaacagcagcagcttttgaagcttcagcaacagaaagcaaagctggaagccaagttacatcagacaacagctgcagcagctgcagcagcatcagcagtaggtcctgttcacaactctgtgccttccaacccagtggctgcccctggattcttcattcatccatctgatgttattccacccactccaaaaacaacacctctttttatgactccaccactcactccacccaatgaagcagtttccgttgtgattaatgccgaacttgcacagcttttcccaggctcagtcattgatcccccagcagtcaatcttgctgcacataacaaaaattccaacaagtccagaatgaatccacttggttctggtctagcccttgcaatttctcatgcttcacattttcttcaacctccgcctcaccagtccattattatagagcgaatgcattcaggagcaagaagatttgtgaccttggattttgggaggcctatattgttgactgatgtattgattcccacttgtggagacttggcctctttgtcaattgacatttggacattaggagaagaggtggatggaaggcggttggtagtggcaactgatataagcactcattcactaattcttcatgacttaataccacctcccgtgtgcagattcatgaagatcactgttattggacgttacgggagtacaaatgccagagccaaaatcccattaggattttactatggtcatacctacatcttgccttgggaaagtgaactgaagttaatgcatgatcctctaaagggagagggagaatctgcaaaccagccagaaattgaccagcatttagcaatgatggttgctttgcaggaggatatacagtgcaggtataacttggcttgtcatcgtctggaaacccttttgcaaagtattgatcttcctcctctaaacagtgctaacaatgcacagtactttttacgaaaaccagataaggcagttgaggaagacagtagggttttttctgcttatcaagattgtattcagctacagcttcaactaaatttggctcataatgcagtgcagaggctcaaagtggcgctaggtgcaagccggaagatgttgagtgaaacatcaaatccagaagatttaattcagacatcttccacagagcagttacgtactatcatcagatatttactggacactttgctcagcctgcttcatgcttctaatggacactctgttcctgcagttttgcagagcacatttcatgcccaggcctgtgaagagctctttaaacacttgtgcatcagtggaaccccaaagatacggttacatactggtcttcttcttgttcaactgtgtggtggtgaaaggtggtggggtcaatttctttctaatgtccttcaggaattgtacaattcggaacagcttctcatctttccacaggatagggtcttcatgttactttcctgcattggtcaaagatcacttagtaatagtggagtattagaaagcttacttaatctcttggataatttattgtcacctcttcagccacagttacccatgcataggaggacagaaggagtactagatattcccatgatcagttgggttgttatgctggtgtccaggttgctggattatgtggcaactgttgaagatgaagcagcagctgcaaagaaacctttgaatggtaaagacagggagaggtttctgacaggtaatcagtggagttttattaacaataatctacacactcagagcttaaatagatcttctaaaggcagcagtagccttgatagattatattccagaaaaatcagaaagcagcttgttcatcataaacagcaacttaacctactaaaagcaaagcagaaggcattggtagaacagatggaaaaagaaaaaatacaaagtaacaaaggatcatcatataaactcctggtagaacaagcaaaactaaagcaggccacttcaaaggtatgatctatacttttcaatatagttatctcagaaaagtcaaggagttatgatctttaattacgatcgagaaacttaaatatacattactctgcttaacagagaagccaacctactctggacttttttttggtggggtagtttaactgaaggaaatgtatgataaatgtggtatttaagtattattgtaatgtattaccttcattgtggattgagttccagtaaattgaagataaaggatagtggaatgtatagttttgctaatgtggcattgatagagcagtttatttccattttacaatacaaaattatacaagatgattgcaaatattattgtatcagcctcacaaataaaatgtatatgtaaagtgaaaaatgtggcattctctttacccttagtattgttattggaatattttggtggctgagtttagaattgaaacttctttgggtccagtggtgctcacaaggctcaaatgtagtatgtcttttgtaagtgaaagtgaa

SEQ ID NO: 362854 - DNA, 258 bp, Homo sapiens
caagggttattcacttgcttcacttttggctaaagttgcagcaggcaaggtatgaaactgtcattttgaacaataacaatacagttttaaacattgtggatcagatttaacacactattagaagtagtatgacctttcagtgatgttttactatacgcttggtttgtttgtattttgtctttggagtgacttaaatatatttgggaagaagaatgtttgagttaactttattatttcattttatttattttagagttt

SEQ ID NO: 362855 - DNA, 483 bp, Homo sapiens
gctccttaagaacagtttgagcagaatgttgctatgagttgtttaaactcataaaacaactaaaaaaaaaataaactaaactaaaaaaacgaaatttttttagcattttttggaaatagattcttcatatctattattattattatcatctatcttcatatctattattattcaagaattcaagagtaaaaacagatgtgtaagtattacttatggctctattgtgcctaattttattttgcctttataatgaaatatttcaatgttataatcataaacattgattttattgtgatagaaatttgtggaaacacatattaaagaagagtctttgtggataaagcaggatatcagttaacccacagtaaaaatgtcccatcatagctgttcttttcctttattctttaggtgttggtgtctgtccagtcccttatattagtagctgagccttattttaatgaaccgggatatgaacggtctaga

SEQ ID NO: 362856 - DNA, 457 bp, Homo sapiens
cctttctaaatctatgcaaaggtctgaacacgaaagacattccccaaactgcccatttgtgaaaggtgagcacacacagaatgtgccattgtcagtcactcttgcaacaagtcctgcacagtttccttgtacggatggaactgacagaatatcttgctttgggtcggggagctgccctcattttctagctgctgcaactaaacgaggaaagatctgcatatgggatgtttccaaacttatgaaggtatgtttgaattttgaagtaacaaattagtaattgaaaaaagatcagttgtaaacttaggcttttcatttgtttaggtgcacttaaagtttgaaattaatgcctatgatccagcaattgtacaacagcttattctatcaggagacccaagctcaggagttgattcaaggagaccaactttggcgtggctggaggactcctctagttgctcag

SEQ ID NO: 362857 - DNA, 551 bp, Homo sapiens
aaatacaaaaattagccggctgtgttgacgcatgcctataataccagtttttccagtatctgttactgttttcagttgccagttttgtagagtgtgaggatttttagtaaattgtattgaagtagaaatgcctatggtttggaaagtacaacatactgagagtgataacatgtcatttcaggtgttgtgggctgagctttaaaccttatcctaaaatgttactgattcttaatgcgttagttgtatttaatggagaattccttttatttgcatgttttgaagacactggttaaggagcggatttaaagaaatagtgtcttgtttttaaatttattcttttgacttagttcttcataaacattgtttttctgaaaaatattttccctttctcttttctgcatagcatcaataactagctttctcacagtgttagcttggtatcccaatactttgctccggacatggtgccttgtgcttcatagcctaacactcatgacaaacatgcagcttaattgtaagttcataaatttattcatttaaatctctgacat

SEQ ID NO: 362858 - DNA, 865 bp, Homo sapiens
ccccggatggtgactggtggtggtgctgcacctcccgggactgtcactgagccgcttcccagtgtgattgtgctgagcgcaggccggaagatggcggctgcggctgcggcggcctcgggccccggctgctcctcggcggcgggggcgggggcggccggggtctcagagtggctggtgctgcgggacggctgcatgcactgcgacgccgacgggctgcacagcctgtcctaccaccctgcgctcaacgccatcctggccgtcactagccgcgggaccatcaaagtcatcgacggcacctcgggggccacactgcaggcctccgcgctcagtggtgagtcttccgcacgccgggcgggcgcgaagccggggaaagaagccgtccagccccggggctcggcctcgcgactcggggaagcgagatggcgagagggcagggctgggggttcgggcccagccgtgaagggaggcccggaagctgatggagggggaccttaggacttggctttttcagcggctgcagttgggaggaaagaccggcgagtcagggagtggtgggaggggagttgcctttcgggcctggagcgtccggtctggcttggtcctccgcgagaggtgaggagaccttggagcttggcaccggaggaagcgaggcccgggtaggccctggagaggctgtcggtcctgcgtccggttagatgagagcgaaaggctggaagggttgaccccgggcggagaggctggtggccggaggcgaggggcggggagcgtctgagccggcaaccaagccctcccttgtgggagaggagccggcagtctgctgttctcaggtcccgcagtgcgggggacagaccgcgggctgtgcgcc

SEQ ID NO: 362859 - DNA, 503 bp, Homo sapiens
ctgtttatgaaacacaacatgctgatctttaaaaagttatgttctaccccgaagtgatttgagcgacttatattgatcatacaagtcattttgtattttcagtattggatggttacggttattacatcattgccttactcacataagtgatctagaaggaatgatggcaagtgcagctgcacctactgctaatctgctgcagacttgtgcggccttattgatgtcaccttactgtggaatgcattcacccaacatcgaggttgtgcttgtaaagataggactgcagtctactagaattggcctgaagctcatagacattctcctgagaaattgtgcagcatcaggcagtgatcctacaggtgataattaactttgatatttaaatgtttacatatctgtaaagtaacagcagttgaactgtgcgatcttcgtgcttaactctgttttgggaattattttttcttttagtttatgtttatctctcctctcttctctgatggagt

SEQ ID NO: 362860 - DNA, 367 bp, Homo sapiens
tatataatgtcagagtatactttgaactataacagaaatatttgaaatagtttcttctaaaaatatacttgtatcattaatatgatatcttttattttttaggttactttttaattggtccatgtctcttccctgcaatatggttttgaagaaagctgttgacagtctactttgctcaatgtgtcacgtacacccaaactatttttctttgctcatgggctggatgggaattacccctcctccagtgcaatgtcatcatagactgtccatgacagatgatagcaaaaagcaggatcttagttcatctttaacagatgactctaaaaatgcacaagcacctctcgcattaactgaatcacatttggct

SEQ ID NO: 362861 - DNA, 354 bp, Homo sapiens
ttcctgacctcaagtaatccacctgcctcagcctcccaaagtgctgggataacaggcgtgagccactgcgcccggctggaagcttgttttttaaagcaagcagctttattaatccttataatcctatattttaaagagatcatttaaagttaagtctttactttgaatctgatgttgaaaatgtgaatggccaagccaacacttttctttttctttaggtgagtgctccagttgtaacatctaccactcaggaaaagccgaaggatagcgatcagtttgaatgggtgaccattgaacagtcaggggagttagtttatgaagcaccagaaactgttgcggctgaacctccaccta

SEQ ID NO: 362862 - DNA, 508 bp, Homo sapiens
tttctcggtttccagatttaacttagttatatcattttaggccagccattgccagctgaaatgacacttgcccagcttttaactctcctatatgaccgaaaacttcctcagggttaccgctcaatagatctgactgttaaattgggatcaagagttataacagaccccagtctatcaaaaacagattcttataaaagactacaccctgaaaaaggtatgtgcataatactactttaaaaattacagactgtcatacaaagaggcagagatttctatagctaatgacttaattgacttgtgtttttattatatcaacataagatataatttttttatgactgaatttttgtaaatataaaaaatggccattatttcatttggaaactaagttgcattatttcttataacatcatttgttttatgagcgcatgtactttaatttctgatatttctgtgagagctatgtgaattgtcattttataataaaagtgagaaactcaacttacaa

SEQ ID NO: 362863 - DNA, 15714 bp, Homo sapiens
ccgggtcccgcctccctccctgcttctccccctctcccgtcagcctccctccgagtttggcccctccgccgggcgatcgacgttccgcgtgcgtgcgggcgcctgacttcacttccggctaacgcgctcggcttgccccctggccccggatggtgactggtggtggtgctgcacctcccgggactgtcactgagccgcttcccagtgtgattgtgctgagcgcaggccggaagatggcggctgcggctgcggcggcctcgggccccggctgctcctcggcggcgggggcgggggcggccggggtctcagagtggctggtgctgcgggacggctgcatgcactgcgacgccgacgggctgcacagcctgtcctaccaccctgcgctcaacgccatcctggccgtcactagccgcgggaccatcaaagtcatcgacggcacctcgggggccacactgcaggcctccgcgctcagtgctaaaccaggtggacaggtgaaatgtcagtatatctctgctgtggataaagttatatttgtggatgattatgcagtagggtgtaggaaggaccttaatggaatcttgttgttagacactgctctgcaaactccagtttcaaagcaggatgatgtggttcagcttgaattacccgttacagaggcacagcagctcttatcagcatgtttagaaaaggtagatatttctagtacagagggttatgatttgttcatcacacagctcaaagatggtttaaaaaatacatctcatgagactgcagcaaaccacaaagttgctaagtgggccacagttacatttcatcttcctcatcatgtgttgaagtccattgccagtgccattgtaaatgaactcaagaaaataaatcaaaatgttgctgccttacctgtggcgtcctcagtgatggacagattgtcttacctcttacctagtgcacgtccagaactcggagtggggccaggccgttctgtagacagatcactgatgtatagtgaagctaacagacgggagacatttacctcatggcctcatgtaggctataggtgggcacaaccagatcccatggctcaagctggattttatcatcagcctgcctcatctggagatgatagagccatgtgttttacttgtagtgtatgcctcgtttgttgggaacctactgatgaaccttggtctgaacacgaaagacattccccaaactgcccatttgtgaaaggtgagcacacacagaatgtgccattgtcagtcactcttgcaacaagtcctgcacagtttccttgtacggatggaactgacagaatatcttgctttgggtcggggagctgccctcattttctagctgctgcaactaaacgaggaaagatctgcatatgggatgtttccaaacttatgaaggtgcacttaaagtttgaaattaatgcctatgatccagcaattgtacaacagcttattctatcaggagacccaagctcaggagttgattcaaggagaccaactttggcgtggctggaggactcctctagttgctcagatataccaaaattggaaggagatagtgatgatttactggaggattcagacagtgaagagcattccagatcagattctgtgacagggcatacatcacagaaggaagccatggaagtaagccttgatataacagcactcagcattctccaacagccagaaaaacttcagtgggagattgttgcaaatgtgcttgaagatactgttaaggatcttgaagaacttggggcaaatccttgtttaacaaactctaagagtgaaaagacaaaggaaaagcaccaggagcaacacaacattccttttccatgtttattagctggaggtttattaacatataaatctcctgctacctcacccattagtagtaattctcacaggtcactggatggtttaagcagaactcagggtgaaagtatatcagaacaagggtcaactgacaatgaatcctgcactaattcagaactaaattctcctctggtaaggaggactttaccggttttgcttctttatagcatcaaggaatctgatgagaaagcaggaaagatcttttcacagatgaacaatattatgagtaaaagtttgcatgatgatggttttactgttccacagattattgaaatggagctggatagtcaggagcagttgttattgcaggatcctcctgtgacttacattcagcaatttgcagatgcagcagccaaccttacctctccggattctgagaagtggaactctgtgtttcccaagcctgggactttggttcagtgcttgaggctgccaaagtttgcagaggaggagaatctttgtatagactcaataactccttgtgctgacggaattcatttgttggtaggactgcggacatgccctgttgaatccttgagtgcaataaatcaagtagaggccttgaataatttaaataaattaaactctgcactatgtaatagacggaaaggtgagctggaatcaaatcttgctgtagtgaatggtgcaaatattagtgtaatccaacatgaatcaccagcagatgtacagactcctttaataattcagcctgagcagaggaatgttagtggtggatatttagtgctttataaaatgaattatgccactcggatagtgactttagaagaggagccaataaaaatacaacatatcaaagatccccaggacacaattacctcgctcattttgcttccacccgatatattggataatcgagaggatgactgtgaggaacctattgaggacatgcagttaacctcaaagaatggttttgagagagaaaaaacgtctgacatttctactcttggacacctggtaataaccactcagggaggatatgtaaaaatactagatctttcaaactttgaaattttggccaaagtggagcctcccaaaaaggagggcactgaggaacaggacacatttgtttctgtgatttactgttctggcacagacaggctgtgtgcatgcaccaaaggtggtgagcttcattttctccaaattggaggaacctgtgatgatattgatgaagctgatatactagtggatggatctctttctaaaggaatagaaccatcttcagaaggttccaaacctttatcaaatccttcaagtcctggcatttcaggagttgatttattggtggaccagccattcacccttgaaatcttgacatccctagtggagctaacccgctttgagactttgactccaaggttttcagcgactgttcctccatgctgggtagaagttcaacaagaacagcagcaaaggaggcatcctcaacatttgcatcagcaacaccatggtgatgctgctcagcatactcgaacttggaaactacagaccgacagcaacagctgggatgaacatgtatttgaattagtactacctaaagcttgtatggttggacatgtggacttcaaattcgttttgaactcaaacatcaccaatattccacagatacaagtgacactgctgaaaaataaagctccaggattagggaaagtcaatgctcttaacattgaagtggaacaaaatgggaaaccgtccctggttgatttgaatgaagaaatgcagcacatggatgtagaggaatcccagtgtcttagattatgtccatttttggaggatcataaagaagacattctatgtgggccagtatggcttgctagtggccttgatctatcagggcatgctggaatgttgacgttaacaagccccaaacttgttaaaggtatggcaggaggaaaatatcgttcgtttttaatccatgtcaaggcagtgaatgaaagaggaacagaagagatttgtaatggtggtatgcgtcctgtagtaaggcttccatccctaaaacaccagagtaacaagggttattcacttgcttcacttttggctaaagttgcagcaggcaaggaaaaatcatctaatgttaagaatgaaaatacaagtggcacccgtaaatctgaaaacctccggggctgtgatttacttcaagaggtctcagtcaccattcgaagatttaagaaaacctcaatttctaaggaaagagtgcaacgatgtgccatgttacagttttcagaatttcatgagaagcttcttaatactctttgcagaaaaacagatgatggccagatcacagaacatgcccagagccttgtgttggatactctctgttggttagctggagttcattcaaatggacccggaagctcaaaggaaggaaatgagaacctactttcaaaaacacgaaaatttctgtcagacatcgtacgtgtttgcttctttgaggcaggacgaagtatagcccataagtgtgcccgatttctagccttgtgcattagtaatggcaaatgtgacccatgtcaaccagcatttggacctgttctgttgaaggctttacttgataatatgtcatttttacctgcagcaacaactggtggttctgtctattggtattttgtcttactgaattatgtgaaagatgaagatctggctggatgcagtacagcttgtgcatctttgcttactgcagtgtccagacagttacaggacaggctaacaccaatggaggctttacttcagacaagatatggattatatagctcaccatttgatccagtcctctttgatttggagatgagtggctcttcttgtaaaaatgtttataacagcagcattggtgtccagtcagatgaaattgatttatcagatgtcctttcaggaaatggaaaggtcagtagttgcacagctgctgagggtagtttcacatctctcactggacttttggaagttgaacctctgcactttacttgtgtgtcaactagtgatggaaccagaatagaaagggatgatgcaagtacgtttactgtgagttccttcggggttactcctgcagtaggtggactatcatctgggacagttggggaagcctcgacagccctgagttcagcagcccaggtagctttgcagtctctctctcatgcaatggcttcagccgagcaacagctacaggtgctgcaagagaaacagcagcagcttttgaagcttcagcaacagaaagcaaagctggaagccaagttacatcagacaacagctgcagcagctgcagcagcatcagcagtaggtcctgttcacaactctgtgccttccaacccagtggctgcccctggattcttcattcatccatctgatgttattccacccactccaaaaacaacacctctttttatgactccaccactcactccacccaatgaagcagtttccgttgtgattaatgccgaacttgcacagcttttcccaggctcagtcattgatcccccagcagtcaatcttgctgcacataacaaaaattccaacaagtccagaatgaatccacttggttctggtctagcccttgcaatttctcatgcttcacattttcttcaacctccgcctcaccagtccattattatagagcgaatgcattcaggagcaagaagatttgtgaccttggattttgggaggcctatattgttgactgatgtattgattcccacttgtggagacttggcctctttgtcaattgacatttggacattaggagaagaggtggatggaaggcggttggtagtggcaactgatataagcactcattcactaattcttcatgacttaataccacctcccgtgtgcagattcatgaagatcactgttattggacgttacgggagtacaaatgccagagccaaaatcccattaggattttactatggtcatacctacatcttgccttgggaaagtgaactgaagttaatgcatgatcctctaaagggagagggagaatctgcaaaccagccagaaattgaccagcatttagcaatgatggttgctttgcaggaggatatacagtgcaggtataacttggcttgtcatcgtctggaaacccttttgcaaagtattgatcttcctcctctaaacagtgctaacaatgcacagtactttttacgaaaaccagataaggcagttgaggaagacagtagggttttttctgcttatcaagattgtattcagctacagcttcaactaaatttggctcataatgcagtgcagaggctcaaagtggcgctaggtgcaagccggaagatgttgagtgaaacatcaaatccagaagatttaattcagacatcttccacagagcagttacgtactatcatcagatatttactggacactttgctcagcctgcttcatgcttctaatggacactctgttcctgcagttttgcagagcacatttcatgcccaggcctgtgaagagctctttaaacacttgtgcatcagtggaaccccaaagatacggttacatactggtcttcttcttgttcaactgtgtggtggtgaaaggtggtggggtcaatttctttctaatgtccttcaggaattgtacaattcggaacagcttctcatctttccacaggatagggtcttcatgttactttcctgcattggtcaaagatcacttagtaatagtggagtattagaaagcttacttaatctcttggataatttattgtcacctcttcagccacagttacccatgcataggaggacagaaggagtactagatattcccatgatcagttgggttgttatgctggtgtccaggttgctggattatgtggcaactgttgaagatgaagcagcagctgcaaagaaacctttgaatggtaatcagtggagttttattaacaataatctacacactcagagcttaaatagatcttctaaaggcagcagtagccttgatagattatattccagaaaaatcagaaagcagcttgttcatcataaacagcaacttaacctactaaaagcaaagcagaaggcattggtagaacagatggaaaaagaaaaaatacaaagtaacaaaggatcatcatataaactcctggtagaacaagcaaaactaaagcaggccacttcaaagcactttaaggatttaattcgtttacgtcggacagcagaatggtcccgttctaatttagacacagaagttacaacagcaaaagaaagtcctgagatagaaccacttccatttactctggcccatgagcgttgtatctcagtagtccagaaacttgttctgtttcttctctccatggactttacatgtcatgcagatctcttattgtttgtttgtaaggttcttgcacgcattgcaaatgccacgaggccaactattcatctgtgtgagattgtgaacgaaccccagctggaaagactgctgttacttttggttggaactgacttcaatagaggagatatatcttggggtggtgcttgggctcagtattccttaacttgcatgctacaagatattttagcaggagaattactggctccagtagccgcagaagccatggaggaaggaacagtgggtgatgatgtaggtgcgacagctggtgactctgatgactcccttcaacagtcctcagttcagttgctggaaactatagatgaacctttgacacatgacataacaggtgcacctcctctgtcctctttggaaaaagataaagaaattgaccttgagttacttcaggatctaatggaagttgacattgatcctttagatattgatttggaaaaggaccctcttgcagccaaggtttttaagccaataagcagtacatggtatgattattggggtgctgattatgggacctacaattacaacccttacattggaggtctgggaattcctgtagcaaagccaccagcaaacacggagaagaacggatcacagacagttagcgtttcagtctctcaggccctggatgctcgcctagaagttggacttgaacagcaagcagaactgatgttgaaaatgatgtctactctggaggcagattccattttacaggcattaacaaatacatctcctacattatcacagtctcccactggaacagatgattcacttctagggggtttacaagcagcaaaccaaaccagccagcttattatacagttatcatctgtcccaatgttaaatgtttgtttcaacaaacttttttccatgcttcaagtccatcatgttcagttggagtcacttctccaattgtggctcacactgagcctgaattctagttcaactggaaacaaagaaaatggagcagacatatttttatataatgctaataggatacctgttatttcattaaatcaagcatcaataactagctttctcacagtgttagcttggtatcccaatactttgctccggacatggtgccttgtgcttcatagcctaacactcatgacaaacatgcagcttaattctggttccagcagtgccattggaactcaggagagtactgctcatttgttggtttcagatccaaacctaattcatgtattagtgaaatttctttctggcaccagtccacatggaacaaatcaacacagtccacaggttggtcctacagctacacaagctatgcaagaatttcttactcgattacaagtgcatctttcttcaacatgtcctcagatattcagtgaatttttgctcaagctaattcatatactttcaactgaaaggggtgctttccagacaggccaaggacctctcgatgcccaagtgaagctcttagaattcactctggagcagaattttgaagtcgtttcagttagtactatttctgccgtgatagaatcggttacatttttagtgcaccactatatcacttgctcagacaaagtaatgtcaagaagtggatcagatagctccgtgggtgctcgagcatgctttgggggactctttgccaatcttattcgtccgggtgatgcaaaagcagtttgtggcgaaatgacaagagatcaactcatgtttgatttgttaaaacttgttaacattttagtgcagctgcctctttcaggcaatagggaatacagtgcaagagtgtctgtgaccacaaatacaacagatagtgtttcagatgaagaaaaagtctcaggaggcaaagatggcaatggaagcagtaccagtgttcaaggatcgcctgcatatgttgctgacttagtcttagccaaccaacaaattatgagccagattttgtctgctctgggcctgtgtaatagcagtgccatggcaatgataattggagcaagtggattacatctcactaaacatgaaaactttcatggtgggttggatgccatatcagttggggatggattatttaccatactgacaacccttagtaaaaaagcttctacagtccacatgatgctgcagccaattttaacatacatggcctgtggatatatgggcagacaaggctctcttgctacttgccagttatctgagccattattgtggttcattttgagagtattggatactagtgatgccttgaaagcatttcatgatatgggtggtgttcagctcatatgcaataatatggttactagtacaagggctattgtgaacactgcaagaagtatggtatcaactattatgaaatttcttgactctggtccaaataaagctgttgacagcacattgaaaacaagaatactagcttctgagcctgacaatgctgaagggattcataactttgcacccctcggtacaatcacatctagcagtcctactgcccaaccagctgaagtgctattgcaggccacacctcctcacagaagagctcgctctgctgcttggtcctacatctttcttccagaggaggcttggtgtgaccttaccattcaccttcctgcagcagtgctgcttaaggagatacatatccagcctcatcttgcatctcttgcaacctgcccttcctcagtgtctgttgaagtaagtgcagatggggtaaatatgctacctttgtccactcctgttgtcacaagtggcctcacctacataaaaattcagcttgtaaaagccgaagtagcttctgctgtctgccttagactacatcgtccacgggatgccagcacattaggcctttcacaaattaaattattggggctcactgcttttggtaccacctcttctgcaacagttaataatccattccttccatctgaagatcaggtatccaaaacaagtattggatggttacggttattacatcattgccttactcacataagtgatctagaaggaatgatggcaagtgcagctgcacctactgctaatctgctgcagacttgtgcggccttattgatgtcaccttactgtggaatgcattcacccaacatcgaggttgtgcttgtaaagataggactgcagtctactagaattggcctgaagctcatagacattctcctgagaaattgtgcagcatcaggcagtgatcctacagatttgaatagtcctttactttttggaagactaaatggactctcttctgactctacgatagatattctttaccagcttggaacaactcaggatcctggtacaaaagacagaattcaggccttgttaaaatgggttagtgattctgcaagagtggctgctatgaagagaagtggcaggatgaactacatgtgtcctaactcctcaacagtagagtatggtcttctgatgccatctccttctcatttgcactgtgtagcagccattctgtggcatagttatgagctgcttgtagaatatgacttaccagcactcctggaccaagagctctttgagttactttttaattggtccatgtctcttccctgcaatatggttttgaagaaagctgttgacagtctactttgctcaatgtgtcacgtacacccaaactatttttctttgctcatgggctggatgggaattacccctcctccagtgcaatgtcatcatagactgtccatgacagatgatagcaaaaagcaggatcttagttcatctttaacagatgactctaaaaatgcacaagcacctctcgcattaactgaatcacatttggctacccttgcttcctcttctcaatctcctgaagctattaaacaattactagactcaggtttgccttctcttcttgtgaggagtctggctagtttctgctttagccacatttctagctcagaaagcattgcccagtcaatagatatttcccaggacaaactcaggcgccatcatgtcccacaacaatgtaataagatgcctatcacagccgacctagttgctcctattcttaggtttttgacagaagttggcaatagccatattatgaaagattggcttggtggttctgaagtcaatccactatggacagcacttctgtttttattgtgtcactctgggtccacttctggaagccataatttaggtgcacaacagaccagtgcaagatcagcttctctttcttcagctgctacaacaggactgactactcaacagcgcacagcaattgagaatgcaactgttgcgttctttctacagtgcatttcatgccatcctaataatcaaaagctgatggcacaggttctttgtgaactatttcagacatctcctcaaagagggaaccttccaacatctgggaacatttcagggtttatacgaagattatttttacagttgatgctggaagatgagaaagtgacaatgtttcttcagtctccatgtccactgtacaaaggtagaattaatgctactagccacgtcatccagcatccaatgtatggagcaggccacaaattccgtactcttcatttgccagtctcaacaacattatcagatgttcttgacagagtgtcagatactccaagtatcacagctaaattaattagtgaacaaaaagatgacaaagaaaagaaaaaccatgaagagaaagaaaaagttaaagcggaaaatggatttcaagacaattacagtgttgttgttgcctctgggctgaagtctcaatctaaacgtgctgtgtcagctacaccacctcgcccaccatccaggagggggaggacaatacctgataaaataggaagtacttcaggagcagaggctgccaacaaaataattactgtcccagtgtttcacctgtttcacaaactcttggcaggccagccattgccagctgaaatgacacttgcccagcttttaactctcctatatgaccgaaaacttcctcagggttaccgctcaatagatctgactgttaaattgggatcaagagttataacagaccccagtctatcaaaaacagattcttataaaagactacaccctgaaaaagatcatggagacttacttgctagctgtccagaagatgaggctctcactccaggtgatgaatgcatggatgggatactggatgaatctttgcttgaaacctgtccaattcagtcaccattacaagtttttgcaggaatgggtggactggctcttattgctgaaagactacccatgctatatccagaagtaattcaacaggtgagtgctccagttgtaacatctaccactcaggaaaagccgaaggatagcgatcagtttgaatgggtgaccattgaacagtcaggggagttagtttatgaagcaccagaaactgttgcggctgaacctccacctatcaagtcagcagtacagaccatgtctcccatacctgcccattctttggctgcttttggattatttcttcgtcttccgggctatgcggaagtgctactgaaagagagaaaacatgcccagtgccttcttcgattggtattgggagtgacagatgatggagaaggaagtcatattcttcaatctccatcagccaatgtgcttccaacccttcctttccacgtccttcgtagcttgtttagcactacacctttgacaactgatgatggtgtacttctaaggcggatggcattggaaattggagccttacacctcattcttgtctgtctctctgctttgagccaccattccccacgagttccaaactctagcgtgaatcaaactgagccacaggtgtcaagctctcataaccctacatcaacagaagaacaacagttatattgggccaaagggactggctttggaacaggctctacagcttctgggtgggatgtggaacaagccttaactaagcaaaggctggaagaggaacatgttacctgccttctgcaggttcttgccagttacataaatcccgtcagtagtgcggtaaatggagaagctcagtcatctcatgagactagagggcagaacagtaatgcccttccttctgtacttctcgagcttctcagtcagtcctgcctcatcccagccatgtcatcttatctacgaaatgattcagttctggacatggcaagacatgtgccactctatcgggcactgctggaattgcttcgggccattgcttcttgtgctgccatggtgcccctattgttgcccctttctacagagaacggtgaagaggaagaagaacagtcagaatgtcaaacttctgttggtacattgttagccaaaatgaagacctgtgttgatacctataccaaccgtttaagatctaaaagggaaaatgttaaaacaggagtaaaaccagatgcgtctgatcaagaaccagaaggacttactcttttggtaccagacatccaaaagactgctgagatagtttatgcagccaccaccagtttgcggcaagcaaatcaggaaaaaaaactgggtgaatactccaagaaggcggctatgaaacccaaacctttgtcagtattaaagtcacttgaagaaaaatatgtggctgttatgaagaaattacagtttgatacgtttgaaatggtttctgaagatgaagatgggaaattgggatttaaagtaaattaccactacatgtctcaggtgaaaaatgctaatgatgcgaacagtgctgccagagctcgccgccttgcccaggaagctgtgacgctttcaacctcactgcctctgtcttcatcctctagtgtgtttgtacgctgtgatgaggagcgacttgatatcatgaaggttctaataactggtccagcggacaccccttatgcaaatggctgctttgagtttgatgtgtattttcctcaagattatcccagttcaccccctcttgtgaatctagagacaactggtggtcatagcgtgcgattcaatccaaacctttataatgatggcaaggtttgtttaagcatcttaaacacgtggcatggaagaccagaagagaagtggaatcctcagacctcaagctttttgcaagtgttggtgtctgtccagtcccttatattagtagctgagccttattttaatgaaccgggatatgaacggtctagaggcactcccagtggcacacagagttctcgagaatatgatggaaacattcgacaagcaacagttaagtgggcaatgctagaacaaatcagaaacccttcaccatgttttaaagaggtaatacacaaacatttttacttgaaaagagttgagataatggcccaatgtgaggagtggattgcggatatccagcagtacagcagtgataagcgggtaggcaggactatgtctcaccatgcagcagctctcaagcgtcacactgctcagctccgcgaagagttgctgaaacttccctgccctgaaggcttggatcctgacactgacgatgccccagaggtgtgcagagccacaacaggtgctgaggagactctaatgcatgatcaggttaaacccagcagcagcaaagaactccccagtgacttccagttatgagctgcattgatgtggacttcatagacacaaaggcttcgaagcacaagccaaatatgtcaatatttgtatgtaagaaactaattatgtaataggtaatgaaactgaaactatactatgcccttaaggagatccagtttaattcaaggtgatcttttatttacctgtacaggagtgtaaacttttttgtgcttttatttttcaattgtgagaaccactgattggtatgttcaacaaatttgtgtatacaaagaaatggataaatcactgctatataagggaaactaccttaggaaagaatgtttactgaatgtttattttattttttttttttttactatagagtgaggggttgttaacaaagaatatatattggtcattcttacaactactatttaaagtcagcaacttttcactgaatttgatagattttatgtttggccatatcttcatgctcacatttgatttctgaagacctcctacatacacttcaataaaagttaaatggacatactccctcttttttgatttactggtacatttttaaaataataaatctgccataaaatgcattatatctggagacttgcacttgtatggatgaatttattacattcaacatatttaattttatgccttctaattctaagatgcagaaaaaaataaatgaacatgattttattctatgccaacatttgggcctctgaatgtatctgttatttgaatttaagtatttgaaaaggaatggtcaatttgaaagtcattctaaactgattttttttttctaaagggctccttttttcctggactatgtggttttatgactaaagtcacatgtatgtattaaacattgaggctctgtagaggagagaggatgtacctctctggtgctgttacagtacattctgtacctgccatacaggctcattttcatgcaaattcttcctagagccaaataaataaagacttaggtgaattagta

SEQ ID NO: 362864 - DNA, 15724 bp, Homo sapiens
ccgggtcccgcctccctccctgcttctccccctctcccgtcagcctccctccgagtttggcccctccgccgggcgatcgacgttccgcgtgcgtgcgggcgcctgacttcacttccggctaacgcgctcggcttgccccctggccccggatggtgactggtggtggtgctgcacctcccgggactgtcactgagccgcttcccagtgtgattgtgctgagcgcaggccggaagatggcggctgcggctgcggcggcctcgggccccggctgctcctcggcggcgggggcgggggcggccggggtctcagagtggctggtgctgcgggacggctgcatgcactgcgacgccgacgggctgcacagcctgtcctaccaccctgcgctcaacgccatcctggccgtcactagccgcgggaccatcaaagtcatcgacggcacctcgggggccacactgcaggcctccgcgctcagtgctaaaccaggtggacaggtgaaatgtcagtatatctctgctgtggataaagttatatttgtggatgattatgcagtagggtgtaggaaggaccttaatggaatcttgttgttagacactgctctgcaaactccagtttcaaagcaggatgatgtggttcagcttgaattacccgttacagaggcacagcagctcttatcagcatgtttagaaaaggtagatatttctagtacagagggttatgatttgttcatcacacagctcaaagatggtttaaaaaatacatctcatgagactgcagcaaaccacaaagttgctaagtgggccacagttacatttcatcttcctcatcatgtgttgaagtccattgccagtgccattgtaaatgaactcaagaaaataaatcaaaatgttgctgccttacctgtggcgtcctcagtgatggacagattgtcttacctcttacctagtgcacgtccagaactcggagtggggccaggccgttctgtagacagatcactgatgtatagtgaagctaacagacgggagacatttacctcatggcctcatgtaggctataggtgggcacaaccagatcccatggctcaagctggattttatcatcagcctgcctcatctggagatgatagagccatgtgttttacttgtagtgtatgcctcgtttgttgggaacctactgatgaaccttggtctgaacacgaaagacattccccaaactgcccatttgtgaaaggtgagcacacacagaatgtgccattgtcagtcactcttgcaacaagtcctgcacagtttccttgtacggatggaactgacagaatatcttgctttgggtcggggagctgccctcattttctagctgctgcaactaaacgaggaaagatctgcatatgggatgtttccaaacttatgaaggtgcacttaaagtttgaaattaatgcctatgatccagcaattgtacaacagcttattctatcaggagacccaagctcaggagttgattcaaggagaccaactttggcgtggctggaggactcctctagttgctcagatataccaaaattggaaggagatagtgatgatttactggaggattcagacagtgaagagcattccagatcagattctgtgacagggcatacatcacagaaggaagccatggaagtaagccttgatataacagcactcagcattctccaacagccagaaaaacttcagtgggagattgttgcaaatgtgcttgaagatactgttaaggatcttgaagaacttggggcaaatccttgtttaacaaactctaagagtgaaaagacaaaggaaaagcaccaggagcaacacaacattccttttccatgtttattagctggaggtttattaacatataaatctcctgctacctcacccattagtagtaattctcacaggtcactggatggtttaagcagaactcagggtgaaagtatatcagaacaagggtcaactgacaatgaatcctgcactaattcagaactaaattctcctctggtaaggaggactttaccggttttgcttctttatagcatcaaggaatctgatgagaaagcaggaaagatcttttcacagatgaacaatattatgagtaaaagtttgcatgatgatggttttactgttccacagattattgaaatggagctggatagtcaggagcagttgttattgcaggatcctcctgtgacttacattcagcaatttgcagatgcagcagccaaccttacctctccggattctgagaagtggaactctgtgtttcccaagcctgggactttggttcagtgcttgaggctgccaaagtttgcagaggaggagaatctttgtatagactcaataactccttgtgctgacggaattcatttgttggtaggactgcggacatgccctgttgaatccttgagtgcaataaatcaagtagaggccttgaataatttaaataaattaaactctgcactatgtaatagacggaaaggtgagctggaatcaaatcttgctgtagtgaatggtgcaaatattagtgtaatccaacatgaatcaccagcagatgtacagactcctttaataattcagcctgagcagaggaatgttagtggtggatatttagtgctttataaaatgaattatgccactcggatagtgactttagaagaggagccaataaaaatacaacatatcaaagatccccaggacacaattacctcgctcattttgcttccacccgatatattggataatcgagaggatgactgtgaggaacctattgaggacatgcagttaacctcaaagaatggttttgagagagaaaaaacgtctgacatttctactcttggacacctggtaataaccactcagggaggatatgtaaaaatactagatctttcaaactttgaaattttggccaaagtggagcctcccaaaaaggagggcactgaggaacaggacacatttgtttctgtgatttactgttctggcacagacaggctgtgtgcatgcaccaaagagtctcaccctgtcaacaggctggggtgcagttacgcaatcttggctcactgcaacttctgcctcccaggttcaagtgattctccggccttagcctcctgagtagctgggaccacaggtggtgagcttcattttctccaaattggaggaacctgtgatgatattgatgaagctgatatactagtggatggatctctttctaaaggaatagaaccatcttcagaaggttccaaacctttatcaaatccttcaagtcctggcatttcaggagttgatttattggtggaccagccattcacccttgaaatcttgacatccctagtggagctaacccgctttgagactttgactccaaggttttcagcgactgttcctccatgctgggtagaagttcaacaagaacagcagcaaaggaggcatcctcaacatttgcatcagcaacaccatggtgatgctgctcagcatactcgaacttggaaactacagaccgacagcaacagctgggatgaacatgtatttgaattagtactacctaaagcttgtatggttggacatgtggacttcaaattcgttttgaactcaaacatcaccaatattccacagatacaagtgacactgctgaaaaataaagctccaggattagggaaagtcaatgctcttaacattgaagtggaacaaaatgggaaaccgtccctggttgatttgaatgaagaaatgcagcacatggatgtagaggaatcccagtgtcttagattatgtccatttttggaggatcataaagaagacattctatgtgggccagtatggcttgctagtggccttgatctatcagggcatgctggaatgttgacgttaacaagccccaaacttgttaaaggtatggcaggaggaaaatatcgttcgtttttaatccatgtcaaggcagtgaatgaaagaggaacagaagagatttgtaatggtggtatgcgtcctgtagtaaggcttccatccctaaaacaccagagtaacaagggttattcacttgcttcacttttggctaaagttgcagcaggcaagagtgcaacgatgtgccatgttacagttttcagaatttcatgagaagcttcttaatactctttgcagaaaaacagatgatggccagatcacagaacatgcccagagccttgtgttggatactctctgttggttagctggagttcattcaaatggacccggaagctcaaaggaaggaaatgagaacctactttcaaaaacacgaaaatttctgtcagacatcgtacgtgtttgcttctttgaggcaggacgaagtatagcccataagtgtgcccgatttctagccttgtgcattagtaatggcaaatgtgacccatgtcaaccagcatttggacctgttctgttgaaggctttacttgataatatgtcatttttacctgcagcaacaactggtggttctgtctattggtattttgtcttactgaattatgtgaaagatgaagatctggctggatgcagtacagcttgtgcatctttgcttactgcagtgtccagacagttacaggacaggctaacaccaatggaggctttacttcagacaagatatggattatatagctcaccatttgatccagtcctctttgatttggagatgagtggctcttcttgtaaaaatgtttataacagcagcattggtgtccagtcagatgaaattgatttatcagatgtcctttcaggaaatggaaaggtcagtagttgcacagctgctgagggtagtttcacatctctcactggacttttggaagttgaacctctgcactttacttgtgtgtcaactagtgatggaaccagaatagaaagggatgatgcaagtacgtttactgtgagttccttcggggttactcctgcagtaggtggactatcatctgggacagttggggaagcctcgacagccctgagttcagcagcccaggtagctttgcagtctctctctcatgcaatggcttcagccgagcaacagctacaggtgctgcaagagaaacagcagcagcttttgaagcttcagcaacagaaagcaaagctggaagccaagttacatcagacaacagctgcagcagctgcagcagcatcagcagtaggtcctgttcacaactctgtgccttccaacccagtggctgcccctggattcttcattcatccatctgatgttattccacccactccaaaaacaacacctctttttatgactccaccactcactccacccaatgaagcagtttccgttgtgattaatgccgaacttgcacagcttttcccaggctcagtcattgatcccccagcagtcaatcttgctgcacataacaaaaattccaacaagtccagaatgaatccacttggttctggtctagcccttgcaatttctcatgcttcacattttcttcaacctccgcctcaccagtccattattatagagcgaatgcattcaggagcaagaagatttgtgaccttggattttgggaggcctatattgttgactgatgtattgattcccacttgtggagacttggcctctttgtcaattgacatttggacattaggagaagaggtggatggaaggcggttggtagtggcaactgatataagcactcattcactaattcttcatgacttaataccacctcccgtgtgcagattcatgaagatcactgttattggacgttacgggagtacaaatgccagagccaaaatcccattaggattttactatggtcatacctacatcttgccttgggaaagtgaactgaagttaatgcatgatcctctaaagggagagggagaatctgcaaaccagccagaaattgaccagcatttagcaatgatggttgctttgcaggaggatatacagtgcaggtataacttggcttgtcatcgtctggaaacccttttgcaaagtattgatcttcctcctctaaacagtgctaacaatgcacagtactttttacgaaaaccagataaggcagttgaggaagacagtagggttttttctgcttatcaagattgtattcagctacagcttcaactaaatttggctcataatgcagtgcagaggctcaaagtggcgctaggtgcaagccggaagatgttgagtgaaacatcaaatccagaagatttaattcagacatcttccacagagcagttacgtactatcatcagatatttactggacactttgctcagcctgcttcatgcttctaatggacactctgttcctgcagttttgcagagcacatttcatgcccaggcctgtgaagagctctttaaacacttgtgcatcagtggaaccccaaagatacggttacatactggtcttcttcttgttcaactgtgtggtggtgaaaggtggtggggtcaatttctttctaatgtccttcaggaattgtacaattcggaacagcttctcatctttccacaggatagggtcttcatgttactttcctgcattggtcaaagatcacttagtaatagtggagtattagaaagcttacttaatctcttggataatttattgtcacctcttcagccacagttacccatgcataggaggacagaaggagtactagatattcccatgatcagttgggttgttatgctggtgtccaggttgctggattatgtggcaactgttgaagatgaagcagcagctgcaaagaaacctttgaatggtaaagacagggagaggtttctgacaggtaatcagtggagttttattaacaataatctacacactcagagcttaaatagatcttctaaaggcagcagtagccttgatagattatattccagaaaaatcagaaagcagcttgttcatcataaacagcaacttaacctactaaaagcaaagcagaaggcattggtagaacagatggaaaaagaaaaaatacaaagtaacaaaggatcatcatataaactcctggtagaacaagcaaaactaaagcaggccacttcaaagcactttaaggatttaattcgtttacgtcggacagcagaatggtcccgttctaatttagacacagaagttacaacagcaaaagaaagtcctgagatagaaccacttccatttactctggcccatgagcgttgtatctcagtagtccagaaacttgttctgtttcttctctccatggactttacatgtcatgcagatctcttattgtttgtttgtaaggttcttgcacgcattgcaaatgccacgaggccaactattcatctgtgtgagattgtgaacgaaccccagctggaaagactgctgttacttttggttggaactgacttcaatagaggagatatatcttggggtggtgcttgggctcagtattccttaacttgcatgctacaagatattttagcaggagaattactggctccagtagccgcagaagccatggaggaaggaacagtgggtgatgatgtaggtgcgacagctggtgactctgatgactcccttcaacagtcctcagttcagttgctggaaactatagatgaacctttgacacatgacataacaggtgcacctcctctgtcctctttggaaaaagataaagaaattgaccttgagttacttcaggatctaatggaagttgacattgatcctttagatattgatttggaaaaggaccctcttgcagccaaggtttttaagccaataagcagtacatggtatgattattggggtgctgattatgggacctacaattacaacccttacattggaggtctgggaattcctgtagcaaagccaccagcaaacacggagaagaacggatcacagacagttagcgtttcagtctctcaggccctggatgctcgcctagaagttggacttgaacagcaagcagaactgatgttgaaaatgatgtctactctggaggcagattccattttacaggcattaacaaatacatctcctacattatcacagtctcccactggaacagatgattcacttctagggggtttacaagcagcaaaccaaaccagccagcttattatacagttatcatctgtcccaatgttaaatgtttgtttcaacaaacttttttccatgcttcaagtccatcatgttcagttggagtcacttctccaattgtggctcacactgagcctgaattctagttcaactggaaacaaagaaaatggagcagacatatttttatataatgctaataggatacctgttatttcattaaatcaagcatcaataactagctttctcacagtgttagcttggtatcccaatactttgctccggacatggtgccttgtgcttcatagcctaacactcatgacaaacatgcagcttaattctggttccagcagtgccattggaactcaggagagtactgctcatttgttggtttcagatccaaacctaattcatgtattagtgaaatttctttctggcaccagtccacatggaacaaatcaacacagtccacaggttggtcctacagctacacaagctatgcaagaatttcttactcgattacaagtgcatctttcttcaacatgtcctcagatattcagtgaatttttgctcaagctaattcatatactttcaactgaaaggggtgctttccagacaggccaaggacctctcgatgcccaagtgaagctcttagaattcactctggagcagaattttgaagtcgtttcagttagtactatttctgccgtgatagaatcggttacatttttagtgcaccactatatcacttgctcagacaaagtaatgtcaagaagtggatcagatagctccgtgggtgctcgagcatgctttgggggactctttgccaatcttattcgtccgggtgatgcaaaagcagtttgtggcgaaatgacaagagatcaactcatgtttgatttgttaaaacttgttaacattttagtgcagctgcctctttcaggcaatagggaatacagtgcaagagtgtctgtgaccacaaatacaacagatagtgtttcagatgaagaaaaagtctcaggaggcaaagatggcaatggaagcagtaccagtgttcaaggatcgcctgcatatgttgctgacttagtcttagccaaccaacaaattatgagccagattttgtctgctctgggcctgtgtaatagcagtgccatggcaatgataattggagcaagtggattacatctcactaaacatgaaaactttcatggtgggttggatgccatatcagttggggatggattatttaccatactgacaacccttagtaaaaaagcttctacagtccacatgatgctgcagccaattttaacatacatggcctgtggatatatgggcagacaaggctctcttgctacttgccagttatctgagccattattgtggttcattttgagagtattggatactagtgatgccttgaaagcatttcatgatatgggtggtgttcagctcatatgcaataatatggttactagtacaagggctattgtgaacactgcaagaagtatggtatcaactattatgaaatttcttgactctggtccaaataaagctgttgacagcacattgaaaacaagaatactagcttctgagcctgacaatgctgaagggattcataactttgcacccctcggtacaatcacatctagcagtcctactgcccaaccagctgaagtgctattgcaggccacacctcctcacagaagagctcgctctgctgcttggtcctacatctttcttccagaggaggcttggtgtgaccttaccattcaccttcctgcagcagtgctgcttaaggagatacatatccagcctcatcttgcatctcttgcaacctgcccttcctcagtgtctgttgaagtaagtgcagatggggtaaatatgctacctttgtccactcctgttgtcacaagtggcctcacctacataaaaattcagcttgtaaaagccgaagtagcttctgctgtctgccttagactacatcgtccacgggatgccagcacattaggcctttcacaaattaaattattggggctcactgcttttggtaccacctcttctgcaacagttaataatccattccttccatctgaagatcaggtatccaaaacaagtattggatggttacggttattacatcattgccttactcacataagtgatctagaaggaatgatggcaagtgcagctgcacctactgctaatctgctgcagacttgtgcggccttattgatgtcaccttactgtggaatgcattcacccaacatcgaggttgtgcttgtaaagataggactgcagtctactagaattggcctgaagctcatagacattctcctgagaaattgtgcagcatcaggcagtgatcctacagatttgaatagtcctttactttttggaagactaaatggactctcttctgactctacgatagatattctttaccagcttggaacaactcaggatcctggtacaaaagacagaattcaggccttgttaaaatgggttagtgattctgcaagagtggctgctatgaagagaagtggcaggatgaactacatgtgtcctaactcctcaacagtagagtatggtcttctgatgccatctccttctcatttgcactgtgtagcagccattctgtggcatagttatgagctgcttgtagaatatgacttaccagcactcctggaccaagagctctttgagttactttttaattggtccatgtctcttccctgcaatatggttttgaagaaagctgttgacagtctactttgctcaatgtgtcacgtacacccaaactatttttctttgctcatgggctggatgggaattacccctcctccagtgcaatgtcatcatagactgtccatgacagatgatagcaaaaagcaggatcttagttcatctttaacagatgactctaaaaatgcacaagcacctctcgcattaactgaatcacatttggctacccttgcttcctcttctcaatctcctgaagctattaaacaattactagactcaggtttgccttctcttcttgtgaggagtctggctagtttctgctttagccacatttctagctcagaaagcattgcccagtcaatagatatttcccaggacaaactcaggcgccatcatgtcccacaacaatgtaataagatgcctatcacagccgacctagttgctcctattcttaggtttttgacagaagttggcaatagccatattatgaaagattggcttggtggttctgaagtcaatccactatggacagcacttctgtttttattgtgtcactctgggtccacttctggaagccataatttaggtgcacaacagaccagtgcaagatcagcttctctttcttcagctgctacaacaggactgactactcaacagcgcacagcaattgagaatgcaactgttgcgttctttctacagtgcatttcatgccatcctaataatcaaaagctgatggcacaggttctttgtgaactatttcagacatctcctcaaagagggaaccttccaacatctgggaacatttcagggtttatacgaagattatttttacagttgatgctggaagatgagaaagtgacaatgtttcttcagtctccatgtccactgtacaaaggtagaattaatgctactagccacgtcatccagcatccaatgtatggagcaggccacaaattccgtactcttcatttgccagtctcaacaacattatcagatgttcttgacagagtgtcagatactccaagtatcacagctaaattaattagtgaacaaaaagatgacaaagaaaagaaaaaccatgaagagaaagaaaaagttaaagcggaaaatggatttcaagacaattacagtgttgttgttgcctctgggctgaagtctcaatctaaacgtgctgtgtcagctacaccacctcgcccaccatccaggagggggaggacaatacctgataaaataggaagtacttcaggagcagaggctgccaacaaaataattactgtcccagtgtttcacctgtttcacaaactcttggcaggccagccattgccagctgaaatgacacttgcccagcttttaactctcctatatgaccgaaaacttcctcagggttaccgctcaatagatctgactgttaaattgggatcaagagttataacagaccccagtctatcaaaaacagattcttataaaagactacaccctgaaaaagatcatggagacttacttgctagctgtccagaagatgaggctctcactccaggtgatgaatgcatggatgggatactggatgaatctttgcttgaaacctgtccaattcagtcaccattacaagtttttgcaggaatgggtggactggctcttattgctgaaagactacccatgctatatccagaagtaattcaacaggtgagtgctccagttgtaacatctaccactcaggaaaagccgaaggatagcgatcagtttgaatgggtgaccattgaacagtcaggggagttagtttatgaagcaccagaaactgttgcggctgaacctccacctatcaagtcagcagtacagaccatgtctcccatacctgcccattctttggctgcttttggattatttcttcgtcttccgggctatgcggaagtgctactgaaagagagaaaacatgcccagtgccttcttcgattggtattgggagtgacagatgatggagaaggaagtcatattcttcaatctccatcagccaatgtgcttccaacccttcctttccacgtccttcgtagcttgtttagcactacacctttgacaactgatgatggtgtacttctaaggcggatggcattggaaattggagccttacacctcattcttgtctgtctctctgctttgagccaccattccccacgagttccaaactctagcgtgaatcaaactgagccacaggtgtcaagctctcataaccctacatcaacagaagaacaacagttatattgggccaaagggactggctttggaacaggctctacagcttctgggtgggatgtggaacaagccttaactaagcaaaggctggaagaggaacatgttacctgccttctgcaggttcttgccagttacataaatcccgtcagtagtgcggtaaatggagaagctcagtcatctcatgagactagagggcagaacagtaatgcccttccttctgtacttctcgagcttctcagtcagtcctgcctcatcccagccatgtcatcttatctacgaaatgattcagttctggacatggcaagacatgtgccactctatcgggcactgctggaattgcttcgggccattgcttcttgtgctgccatggtgcccctattgttgcccctttctacagagaacggtgaagaggaagaagaacagtcagaatgtcaaacttctgttggtacattgttagccaaaatgaagacctgtgttgatacctataccaaccgtttaagatctaaaagggaaaatgttaaaacaggagtaaaaccagatgcgtctgatcaagaaccagaaggacttactcttttggtaccagacatccaaaagactgctgagatagtttatgcagccaccaccagtttgcggcaagcaaatcaggaaaaaaaactgggtgaatactccaagaaggcggctatgaaacccaaacctttgtcagtattaaagtcacttgaagaaaaatatgtggctgttatgaagaaattacagtttgatacgtttgaaatggtttctgaagatgaagatgggaaattgggatttaaagtaaattaccactacatgtctcaggtgaaaaatgctaatgatgcgaacagtgctgccagagctcgccgccttgcccaggaagctgtgacgctttcaacctcactgcctctgtcttcatcctctagtgtgtttgtacgctgtgatgaggagcgacttgatatcatgaaggttctaataactggtccagcggacaccccttatgcaaatggctgctttgagtttgatgtgtattttcctcaagattatcccagttcaccccctcttgtgaatctagagacaactggtggtcatagcgtgcgattcaatccaaacctttataatgatggcaaggtttgtttaagcatcttaaacacgtggcatggaagaccagaagagaagtggaatcctcagacctcaagctttttgcaagtgttggtgtctgtccagtcccttatattagtagctgagccttattttaatgaaccgggatatgaacggtctagaggcactcccagtggcacacagagttctcgagaatatgatggaaacattcgacaagcaacagttaagtgggcaatgctagaacaaatcagaaacccttcaccatgttttaaagaggtaatacacaaacatttttacttgaaaagagttgagataatggcccaatgtgaggagtggattgcggatatccagcagtacagcagtgataagcgggtaggcaggactatgtctcaccatgcagcagctctcaagcgtcacactgctcagctccgcgaagagttgctgaaacttccctgccctgaaggcttggatcctgacactgacgatgccccagaggtgtgcagagccacaacaggtgctgaggagactctaatgcatgatcaggttaaacccagcagcagcaaagaactccccagtgacttccagttatgagctgcattgatgtggacttcatagacacaaaggcttcgaagcacaagccaaatatgtcaatatttgtatgtaagaaactaattatgtaataggtaatgaaactgaaactatactatgcccttaaggagatccagtttaattcaaggtgatcttttatttacctgtacaggagtgtaaacttttttgtgcttttatttttcaattgtgagaaccactgattggtatgttcaacaaatttgtgtatacaaagaaatggataaatcactgctatataagggaaactaccttaggaaagaatgtttactgaatgtttattttattttttttttttttactatagagtgaggggttgttaacaaagaatatatattggtcattcttacaactactatttaaagtcagcaacttttcactgaatttgatagattttatgtttggccatatcttcatgctcacatttgatttctgaagacctcctacatacacttcaataaaagttaaatggacatactccctcttttttgatttactggtacatttttaaaataataaatctgccataaaatgcattatatctggagacttgcacttgtatggatgaatttattacattcaacatatttaattttatgccttctaattctaagatgcagaaaaaaataaatgaacatgattttattctatgccaacatttgggcctctgaatgtatctgttatttgaatttaagtatttgaaaaggaatggtcaatttgaaagtcattctaaactgattttttttttctaaagggctccttttttcctggactatgtggttttatgactaaagtcacatgtatgtattaaacattgaggctctgtagaggagagaggatgtacctctctggtgctgttacagtacattctgtacctgccatacaggctcattttcatgcaaattcttcctagagccaaataaataaagacttaggtgaattagta

SEQ ID NO: 362865 - DNA, 12276 bp, Homo sapiens
gtgtatgtgtgtgtgtagttgatgacatttttaccattaaaatgaataatattggggaaaaaacatgccaaatgtttatctcaattagtcaaagataatggttttatgctattcatatcattcctttgttggttgttttttgctgacagcgtgtgaaggtggttcaactttcttctgctcaaacagtataatttgaaagttctggcctactgtactttttgtggagttagttgttgatcttgttctatgaagatgaaaaacagtggaatttattggtgattcagttattttccccattctactccacttctctaggtatggcaggaggaaaatatcgttcgtttttaatccatgtcaaggcagtgaatgaaagaggaacagaagagatttgtaatggtggtatgcgtcctgtagtaaggcttccatccctaaaacaccagagtaacaagggttattcacttgcttcacttttggctaaagttgcagcaggcaaggaaaaatcatctaatgttaagaatgaaaatacaagtggcacccgtaaatctgaaaacctccggggctgtgatttacttcaagaggtctcagtcaccattcgaagatttaagaaaacctcaatttctaaggaaagagtgcaacgatgtgccatgttacagttttcagaatttcatgagaagcttcttaatactctttgcagaaaaacagatgatggccagatcacagaacatgcccagagccttgtgttggatactctctgttggttagctggagttcattcaaatggacccggaagctcaaaggaaggaaatgagaacctactttcaaaaacacgaaaatttctgtcagacatcgtacgtgtttgcttctttgaggcaggacgaagtatagcccataagtgtgcccgatttctagccttgtgcattagtaatggcaaatgtgacccatgtcaaccagcatttggacctgttctgttgaaggctttacttgataatatgtcatttttacctgcagcaacaactggtggttctgtctattggtattttgtcttactgaattatgtgaaagatgaagatctggctggatgcagtacagcttgtgcatctttgcttactgcagtgtccagacagttacaggacaggctaacaccaatggaggctttacttcagacaagatatggattatatagctcaccatttgatccagtcctctttgatttggagatgagtggctcttcttgtaaaaatgtttataacagcagcattggtgtccagtcagatgaaattgatttatcagatgtcctttcaggaaatggaaaggtcagtagttgcacagctgctgagggtagtttcacatctctcactggacttttggaagttgaacctctgcactttacttgtgtgtcaactagtgatggaaccagaatagaaagggatgatgcaagtacgtttactgtgagttccttcggggttactcctgcagtaggtggactatcatctgggacagttggggaagcctcgacagccctgagttcagcagcccaggtagctttgcagtctctctctcatgcaatggcttcagccgagcaacagctacaggtgctgcaagagaaacagcagcagcttttgaagcttcagcaacagaaagcaaagctggaagccaagttacatcagacaacagctgcagcagctgcagcagcatcagcagtaggtcctgttcacaactctgtgccttccaacccagtggctgcccctggattcttcattcatccatctgatgttattccacccactccaaaaacaacacctctttttatgactccaccactcactccacccaatgaagcagtttccgttgtgattaatgccgaacttgcacagcttttcccaggctcagtcattgatcccccagcagtcaatcttgctgcacataacaaaaattccaacaagtccagaatgaatccacttggttctggtctagcccttgcaatttctcatgcttcacattttcttcaacctccgcctcaccagtccattattatagagcgaatgcattcaggagcaagaagatttgtgaccttggattttgggaggcctatattgttgactgatgtattgattcccacttgtggagacttggcctctttgtcaattgacatttggacattaggagaagaggtggatggaaggcggttggtagtggcaactgatataagcactcattcactaattcttcatgacttaataccacctcccgtgtgcagattcatgaagatcactgttattggacgttacgggagtacaaatgccagagccaaaatcccattaggattttactatggtcatacctacatcttgccttgggaaagtgaactgaagttaatgcatgatcctctaaagggagagggagaatctgcaaaccagccagaaattgaccagcatttagcaatgatggttgctttgcaggaggatatacagtgcaggtataacttggcttgtcatcgtctggaaacccttttgcaaagtattgatcttcctcctctaaacagtgctaacaatgcacagtactttttacgaaaaccagataaggcagttgaggaagacagtagggttttttctgcttatcaagattgtattcagctacagcttcaactaaatttggctcataatgcagtgcagaggctcaaagtggcgctaggtgcaagccggaagatgttgagtgaaacatcaaatccagaagatttaattcagacatcttccacagagcagttacgtactatcatcagatatttactggacactttgctcagcctgcttcatgcttctaatggacactctgttcctgcagttttgcagagcacatttcatgcccaggcctgtgaagagctctttaaacacttgtgcatcagtggaaccccaaagatacggttacatactggtcttcttcttgttcaactgtgtggtggtgaaaggtggtggggtcaatttctttctaatgtccttcaggaattgtacaattcggaacagcttctcatctttccacaggatagggtcttcatgttactttcctgcattggtcaaagatcacttagtaatagtggagtattagaaagcttacttaatctcttggataatttattgtcacctcttcagccacagttacccatgcataggaggacagaaggagtactagatattcccatgatcagttgggttgttatgctggtgtccaggttgctggattatgtggcaactgttgaagatgaagcagcagctgcaaagaaacctttgaatggtaaagacagggagaggtttctgacaggtaatcagtggagttttattaacaataatctacacactcagagcttaaatagatcttctaaaggcagcagtagccttgatagattatattccagaaaaatcagaaagcagcttgttcatcataaacagcaacttaacctactaaaagcaaagcagaaggcattggtagaacagatggaaaaagaaaaaatacaaagtaacaaaggatcatcatataaactcctggtagaacaagcaaaactaaagcaggccacttcaaagcactttaaggatttaattcgtttacgtcggacagcagaatggtcccgttctaatttagacacagaagttacaacagcaaaagaaagtcctgagatagaaccacttccatttactctggcccatgagcgttgtatctcagtagtccagaaacttgttctgtttcttctctccatggactttacatgtcatgcagatctcttattgtttgtttgtaaggttcttgcacgcattgcaaatgccacgaggccaactattcatctgtgtgagattgtgaacgaaccccagctggaaagactgctgttacttttggttggaactgacttcaatagaggagatatatcttggggtggtgcttgggctcagtattccttaacttgcatgctacaagatattttagcaggagaattactggctccagtagccgcagaagccatggaggaaggaacagtgggtgatgatgtaggtgcgacagctggtgactctgatgactcccttcaacagtcctcagttcagttgctggaaactatagatgaacctttgacacatgacataacaggtgcacctcctctgtcctctttggaaaaagataaagaaattgaccttgagttacttcaggatctaatggaagttgacattgatcctttagatattgatttggaaaaggaccctcttgcagccaaggtttttaagccaataagcagtacatggtatgattattggggtgctgattatgggacctacaattacaacccttacattggaggtctgggaattcctgtagcaaagccaccagcaaacacggagaagaacggatcacagacagttagcgtttcagtctctcaggccctggatgctcgcctagaagttggacttgaacagcaagcagaactgatgttgaaaatgatgtctactctggaggcagattccattttacaggcattaacaaatacatctcctacattatcacagtctcccactggaacagatgattcacttctagggggtttacaagcagcaaaccaaaccagccagcttattatacagttatcatctgtcccaatgttaaatgtttgtttcaacaaacttttttccatgcttcaagtccatcatgttcagttggagtcacttctccaattgtggctcacactgagcctgaattctagttcaactggaaacaaagaaaatggagcagacatatttttatataatgctaataggatacctgttatttcattaaatcaagcatcaataactagctttctcacagtgttagcttggtatcccaatactttgctccggacatggtgccttgtgcttcatagcctaacactcatgacaaacatgcagcttaattctggttccagcagtgccattggaactcaggagagtactgctcatttgttggtttcagatccaaacctaattcatgtattagtgaaatttctttctggcaccagtccacatggaacaaatcaacacagtccacaggttggtcctacagctacacaagctatgcaagaatttcttactcgattacaagtgcatctttcttcaacatgtcctcagatattcagtgaatttttgctcaagctaattcatatactttcaactgaaaggggtgctttccagacaggccaaggacctctcgatgcccaagtgaagctcttagaattcactctggagcagaattttgaagtcgtttcagttagtactatttctgccgtgatagaatcggttacatttttagtgcaccactatatcacttgctcagacaaagtaatgtcaagaagtggatcagatagctccgtgggtgctcgagcatgctttgggggactctttgccaatcttattcgtccgggtgatgcaaaagcagtttgtggcgaaatgacaagagatcaactcatgtttgatttgttaaaacttgttaacattttagtgcagctgcctctttcaggcaatagggaatacagtgcaagagtgtctgtgaccacaaatacaacagatagtgtttcagatgaagaaaaagtctcaggaggcaaagatggcaatggaagcagtaccagtgttcaaggatcgcctgcatatgttgctgacttagtcttagccaaccaacaaattatgagccagattttgtctgctctgggcctgtgtaatagcagtgccatggcaatgataattggagcaagtggattacatctcactaaacatgaaaactttcatggtgggttggatgccatatcagttggggatggattatttaccatactgacaacccttagtaaaaaagcttctacagtccacatgatgctgcagccaattttaacatacatggcctgtggatatatgggcagacaaggctctcttgctacttgccagttatctgagccattattgtggttcattttgagagtattggatactagtgatgccttgaaagcatttcatgatatgggtggtgttcagctcatatgcaataatatggttactagtacaagggctattgtgaacactgcaagaagtatggtatcaactattatgaaatttcttgactctggtccaaataaagctgttgacagcacattgaaaacaagaatactagcttctgagcctgacaatgctgaagggattcataactttgcacccctcggtacaatcacatctagcagtcctactgcccaaccagctgaagtgctattgcaggccacacctcctcacagaagagctcgctctgctgcttggtcctacatctttcttccagaggaggcttggtgtgaccttaccattcaccttcctgcagcagtgctgcttaaggagatacatatccagcctcatcttgcatctcttgcaacctgcccttcctcagtgtctgttgaagtaagtgcagatggggtaaatatgctacctttgtccactcctgttgtcacaagtggcctcacctacataaaaattcagcttgtaaaagccgaagtagcttctgctgtctgccttagactacatcgtccacgggatgccagcacattaggcctttcacaaattaaattattggggctcactgcttttggtaccacctcttctgcaacagttaataatccattccttccatctgaagatcaggtatccaaaacaagtattggatggttacggttattacatcattgccttactcacataagtgatctagaaggaatgatggcaagtgcagctgcacctactgctaatctgctgcagacttgtgcggccttattgatgtcaccttactgtggaatgcattcacccaacatcgaggttgtgcttgtaaagataggactgcagtctactagaattggcctgaagctcatagacattctcctgagaaattgtgcagcatcaggcagtgatcctacagatttgaatagtcctttactttttggaagactaaatggactctcttctgactctacgatagatattctttaccagcttggaacaactcaggatcctggtacaaaagacagaattcaggccttgttaaaatgggttagtgattctgcaagagtggctgctatgaagagaagtggcaggatgaactacatgtgtcctaactcctcaacagtagagtatggtcttctgatgccatctccttctcatttgcactgtgtagcagccattctgtggcatagttatgagctgcttgtagaatatgacttaccagcactcctggaccaagagctctttgagttactttttaattggtccatgtctcttccctgcaatatggttttgaagaaagctgttgacagtctactttgctcaatgtgtcacgtacacccaaactatttttctttgctcatgggctggatgggaattacccctcctccagtgcaatgtcatcatagactgtccatgacagatgatagcaaaaagcaggatcttagttcatctttaacagatgactctaaaaatgcacaagcacctctcgcattaactgaatcacatttggctacccttgcttcctcttctcaatctcctgaagctattaaacaattactagactcaggtttgccttctcttcttgtgaggagtctggctagtttctgctttagccacatttctagctcagaaagcattgcccagtcaatagatatttcccaggacaaactcaggcgccatcatgtcccacaacaatgtaataagatgcctatcacagccgacctagttgctcctattcttaggtttttgacagaagttggcaatagccatattatgaaagattggcttggtggttctgaagtcaatccactatggacagcacttctgtttttattgtgtcactctgggtccacttctggaagccataatttaggtgcacaacagaccagtgcaagatcagcttctctttcttcagctgctacaacaggactgactactcaacagcgcacagcaattgagaatgcaactgttgcgttctttctacagtgcatttcatgccatcctaataatcaaaagctgatggcacaggttctttgtgaactatttcagacatctcctcaaagagggaaccttccaacatctgggaacatttcagggtttatacgaagattatttttacagttgatgctggaagatgagaaagtgacaatgtttcttcagtctccatgtccactgtacaaaggtagaattaatgctactagccacgtcatccagcatccaatgtatggagcaggccacaaattccgtactcttcatttgccagtctcaacaacattatcagatgttcttgacagagtgtcagatactccaagtatcacagctaaattaattagtgaacaaaaagatgacaaagaaaagaaaaaccatgaagagaaagaaaaagttaaagcggaaaatggatttcaagacaattacagtgttgttgttgcctctgggctgaagtctcaatctaaacgtgctgtgtcagctacaccacctcgcccaccatccaggagggggaggacaatacctgataaaataggaagtacttcaggagcagaggctgccaacaaaataattactgtcccagtgtttcacctgtttcacaaactcttggcaggccagccattgccagctgaaatgacacttgcccagcttttaactctcctatatgaccgaaaacttcctcagggttaccgctcaatagatctgactgttaaattgggatcaagagttataacagaccccagtctatcaaaaacagattcttataaaagactacaccctgaaaaagatcatggagacttacttgctagctgtccagaagatgaggctctcactccaggtgatgaatgcatggatgggatactggatgaatctttgcttgaaacctgtccaattcagtcaccattacaagtttttgcaggaatgggtggactggctcttattgctgaaagactacccatgctatatccagaagtaattcaacaggtgagtgctccagttgtaacatctaccactcaggaaaagccgaaggatagcgatcagtttgaatgggtgaccattgaacagtcaggggagttagtttatgaagcaccagaaactgttgcggctgaacctccacctatcaagtcagcagtacagaccatgtctcccatacctgcccattctttggctgcttttggattatttcttcgtcttccgggctatgcggaagtgctactgaaagagagaaaacatgcccagtgccttcttcgattggtattgggagtgacagatgatggagaaggaagtcatattcttcaatctccatcagccaatgtgcttccaacccttcctttccacgtccttcgtagcttgtttagcactacacctttgacaactgatgatggtgtacttctaaggcggatggcattggaaattggagccttacacctcattcttgtctgtctctctgctttgagccaccattccccacgagttccaaactctagcgtgaatcaaactgagccacaggtgtcaagctctcataaccctacatcaacagaagaacaacagttatattgggccaaagggactggctttggaacaggctctacagcttctgggtgggatgtggaacaagccttaactaagcaaaggctggaagaggaacatgttacctgccttctgcaggttcttgccagttacataaatcccgtcagtagtgcggtaaatggagaagctcagtcatctcatgagactagagggcagaacagtaatgcccttccttctgtacttctcgagcttctcagtcagtcctgcctcatcccagccatgtcatcttatctacgaaatgattcagttctggacatggcaagacatgtgccactctatcgggcactgctggaattgcttcgggccattgcttcttgtgctgccatggtgcccctattgttgcccctttctacagagaacggtgaagaggaagaagaacagtcagaatgtcaaacttctgttggtacattgttagccaaaatgaagacctgtgttgatacctataccaaccgtttaagatctaaaagggaaaatgttaaaacaggagtaaaaccagatgcgtctgatcaagaaccagaaggacttactcttttggtaccagacatccaaaagactgctgagatagtttatgcagccaccaccagtttgcggcaagcaaatcaggaaaaaaaactgggtgaatactccaagaaggcggctatgaaacccaaacctttgtcagtattaaagtcacttgaagaaaaatatgtggctgttatgaagaaattacagtttgatacgtttgaaatggtttctgaagatgaagatgggaaattgggatttaaagtaaattaccactacatgtctcaggtgaaaaatgctaatgatgcgaacagtgctgccagagctcgccgccttgcccaggaagctgtgacgctttcaacctcactgcctctgtcttcatcctctagtgtgtttgtacgctgtgatgaggagcgacttgatatcatgaaggttctaataactggtccagcggacaccccttatgcaaatggctgctttgagtttgatgtgtattttcctcaagattatcccagttcaccccctcttgtgaatctagagacaactggtggtcatagcgtgcgattcaatccaaacctttataatgatggcaaggtttgtttaagcatcttaaacacgtggcatggaagaccagaagagaagtggaatcctcagacctcaagctttttgcaagtgttggtgtctgtccagtcccttatattagtagctgagccttattttaatgaaccgggatatgaacggtctagaggcactcccagtggcacacagagttctcgagaatatgatggaaacattcgacaagcaacagttaagtgggcaatgctagaacaaatcagaaacccttcaccatgttttaaagaggtaatacacaaacatttttacttgaaaagagttgagataatggcccaatgtgaggagtggattgcggatatccagcagtacagcagtgataagcgggtaggcaggactatgtctcaccatgcagcagctctcaagcgtcacactgctcagctccgcgaagagttgctgaaacttccctgccctgaaggcttggatcctgacactgacgatgccccagaggtgtgcagagccacaacaggtgctgaggagactctaatgcatgatcaggttaaacccagcagcagcaaagaactccccagtgacttccagttatgagctgcattgatgtggacttcatagacacaaaggcttcgaagcacaagccaaatatgtcaatatttgtatgtaagaaactaattatgtaataggtaatgaaactgaaactatactatgcccttaaggagatccagtttaattcaaggtgatcttttatttacctgtacaggagtgtaaacttttttgtgcttttatttttcaattgtgagaaccactgattggtatgttcaacaaatttgtgtatacaaagaaatggataaatcactgctatataagggaaactaccttaggaaagaatgtttactgaatgtttattttattttttttttttttactatagagtgaggggttgttaacaaagaatatatattggtcattcttacaactactatttaaagtcagcaacttttcactgaatttgatagattttatgtttggccatatcttcatgctcacatttgatttctgaagacctcctacatacacttcaataaaagttaaatggacatactccctcttttttgatttactggtacatttttaaaataataaatctgccataaaatgcattatatctggagacttgcacttgtatggatgaatttattacattcaacatatttaattttatgccttctaattctaagatgcagaaaaaaataaatgaacatgattttattctatgccaacatttgggcctctgaatgtatctgttatttgaatttaagtatttgaaaaggaatggtcaatttgaaagtcattctaaactgattttttttttctaaagggctccttttttcctggactatgtggttttatgactaaagtcacatgtatgtattaaacattgaggctctgtagaggagagaggatgtacctctctggtgctgttacagtacattctgtacctgccatacaggctcattttcatgcaaattcttcctagagccaaataaataaagacttaggtgaattagta

SEQ ID NO: 362866 - DNA, 8400 bp, Homo sapiens
tagaggatccgtgcactgtagatcgcagaggagatatatcttggggtggtgcttgggctcagtattccttaacttgcatgctacaagatattttagcaggagaattactggctccagtagccgcagaagccatggaggaaggaacagtgggtgatgatgtaggtgcgacagctggtgactctgatgactcccttcaacagtcctcagttcagttgctggaaactatagatgaacctttgacacatgacataacaggtgcacctcctctgtcctctttggaaaaagataaagaaattgaccttgagttacttcaggatctaatggaagttgacattgatcctttagatattgatttggaaaaggaccctcttgcagccaaggtttttaagccaataagcagtacatggtatgattattggggtgctgattatgggacctacaattacaacccttacattggaggtctgggaattcctgtagcaaagccaccagcaaacacggagaagaacggatcacagacagttagcgtttcagtctctcaggccctggatgctcgcctagaagttggacttgaacagcaagcagaactgatgttgaaaatgatgtctactctggaggcagattccattttacaggcattaacaaatacatctcctacattatcacagtctcccactggaacagatgattcacttctagggggtttacaagcagcaaaccaaaccagccagcttattatacagttatcatctgtcccaatgttaaatgtttgtttcaacaaacttttttccatgcttcaagtccatcatgttcagttggagtcacttctccaattgtggctcacactgagcctgaattctagttcaactggaaacaaagaaaatggagcagacatatttttatataatgctaataggatacctgttatttcattaaatcaagcatcaataactagctttctcacagtgttagcttggtatcccaatactttgctccggacatggtgccttgtgcttcatagcctaacactcatgacaaacatgcagcttaattctggttccagcagtgccattggaactcaggagagtactgctcatttgttggtttcagatccaaacctaattcatgtattagtgaaatttctttctggcaccagtccacatggaacaaatcaacacagtccacaggttggtcctacagctacacaagctatgcaagaatttcttactcgattacaagtgcatctttcttcaacatgtcctcagatattcagtgaatttttgctcaagctaattcatatactttcaactgaaaggggtgctttccagacaggccaaggacctctcgatgcccaagtgaagctcttagaattcactctggagcagaattttgaagtcgtttcagttagtactatttctgccgtgatagaatcggttacatttttagtgcaccactatatcacttgctcagacaaagtaatgtcaagaagtggatcagatagctccgtgggtgctcgagcatgctttgggggactctttgccaatcttattcgtccgggtgatgcaaaagcagtttgtggcgaaatgacaagagatcaactcatgtttgatttgttaaaacttgttaacattttagtgcagctgcctctttcaggcaatagggaatacagtgcaagagtgtctgtgaccacaaatacaacagatagtgtttcagatgaagaaaaagtctcaggaggcaaagatggcaatggaagcagtaccagtgttcaaggatcgcctgcatatgttgctgacttagtcttagccaaccaacaaattatgagccagattttgtctgctctgggcctgtgtaatagcagtgccatggcaatgataattggagcaagtggattacatctcactaaacatgaaaactttcatggtgggttggatgccatatcagttggggatggattatttaccatactgacaacccttagtaaaaaagcttctacagtccacatgatgctgcagccaattttaacatacatggcctgtggatatatgggcagacaaggctctcttgctacttgccagttatctgagccattattgtggttcattttgagagtattggatactagtgatgccttgaaagcatttcatgatatgggtggtgttcagctcatatgcaataatatggttactagtacaagggctattgtgaacactgcaagaagtatggtatcaactattatgaaatttcttgactctggtccaaataaagctgttgacagcacattgaaaacaagaatactagcttctgagcctgacaatgctgaagggattcataactttgcacccctcggtacaatcacatctagcagtcctactgcccaaccagctgaagtgctattgcaggccacacctcctcacagaagagctcgctctgctgcttggtcctacatctttcttccagaggaggcttggtgtgaccttaccattcaccttcctgcagcagtgctgcttaaggagatacatatccagcctcatcttgcatctcttgcaacctgcccttcctcagtgtctgttgaagtaagtgcagatggggtaaatatgctacctttgtccactcctgttgtcacaagtggcctcacctacataaaaattcagcttgtaaaagccgaagtagcttctgctgtctgccttagactacatcgtccacgggatgccagcacattaggcctttcacaaattaaattattggggctcactgcttttggtaccacctcttctgcaacagttaataatccattccttccatctgaagatcaggtatccaaaacaagtattggatggttacggttattacatcattgccttactcacataagtgatctagaaggaatgatggcaagtgcagctgcacctactgctaatctgctgcagacttgtgcggccttattgatgtcaccttactgtggaatgcattcacccaacatcgaggttgtgcttgtaaagataggactgcagtctactagaattggcctgaagctcatagacattctcctgagaaattgtgcagcatcaggcagtgatcctacagatttgaatagtcctttactttttggaagactaaatggactctcttctgactctacgatagatattctttaccagcttggaacaactcaggatcctggtacaaaagacagaattcaggccttgttaaaatgggttagtgattctgcaagagtggctgctatgaagagaagtggcaggatgaactacatgtgtcctaactcctcaacagtagagtatggtcttctgatgccatctccttctcatttgcactgtgtagcagccattctgtggcatagttatgagctgcttgtagaatatgacttaccagcactcctggaccaagagctctttgagttactttttaattggtccatgtctcttccctgcaatatggttttgaagaaagctgttgacagtctactttgctcaatgtgtcacgtacacccaaactatttttctttgctcatgggctggatgggaattacccctcctccagtgcaatgtcatcatagactgtccatgacagatgatagcaaaaagcaggatcttagttcatctttaacagatgactctaaaaatgcacaagcacctctcgcattaactgaatcacatttggctacccttgcttcctcttctcaatctcctgaagctattaaacaattactagactcaggtttgccttctcttcttgtgaggagtctggctagtttctgctttagccacatttctagctcagaaagcattgcccagtcaatagatatttcccaggacaaactcaggcgccatcatgtcccacaacaatgtaataagatgcctatcacagccgacctagttgctcctattcttaggtttttgacagaagttggcaatagccatattatgaaagattggcttggtggttctgaagtcaatccactatggacagcacttctgtttttattgtgtcactctgggtccacttctggaagccataatttaggtgcacaacagaccagtgcaagatcagcttctctttcttcagctgctacaacaggactgactactcaacagcgcacagcaattgagaatgcaactgttgcgttctttctacagtgcatttcatgccatcctaataatcaaaagctgatggcacaggttctttgtgaactatttcagacatctcctcaaagagggaaccttccaacatctgggaacatttcagggtttatacgaagattatttttacagttgatgctggaagatgagaaagtgacaatgtttcttcagtctccatgtccactgtacaaaggtagaattaatgctactagccacgtcatccagcatccaatgtatggagcaggccacaaattccgtactcttcatttgccagtctcaacaacattatcagatgttcttgacagagtgtcagatactccaagtatcacagctaaattaattagtgaacaaaaagatgacaaagaaaagaaaaaccatgaagagaaagaaaaagttaaagcggaaaatggatttcaagacaattacagtgttgttgttgcctctgggctgaagtctcaatctaaacgtgctgtgtcagctacaccacctcgcccaccatccaggagggggaggacaatacctgataaaataggaagtacttcaggagcagaggctgccaacaaaataattactgtcccagtgtttcacctgtttcacaaactcttggcaggccagccattgccagctgaaatgacacttgcccagcttttaactctcctatatgaccgaaaacttcctcagggttaccgctcaatagatctgactgttaaattgggatcaagagttataacagaccccagtctatcaaaaacagattcttataaaagactacaccctgaaaaagatcatggagacttacttgctagctgtccagaagatgaggctctcactccaggtgatgaatgcatggatgggatactggatgaatctttgcttgaaacctgtccaattcagtcaccattacaagtttttgcaggaatgggtggactggctcttattgctgaaagactacccatgctatatccagaagtaattcaacaggtgagtgctccagttgtaacatctaccactcaggaaaagccgaaggatagcgatcagtttgaatgggtgaccattgaacagtcaggggagttagtttatgaagcaccagaaactgttgcggctgaacctccacctatcaagtcagcagtacagaccatgtctcccatacctgcccattctttggctgcttttggattatttcttcgtcttccgggctatgcggaagtgctactgaaagagagaaaacatgcccagtgccttcttcgattggtattgggagtgacagatgatggagaaggaagtcatattcttcaatctccatcagccaatgtgcttccaacccttcctttccacgtccttcgtagcttgtttagcactacacctttgacaactgatgatggtgtacttctaaggcggatggcattggaaattggagccttacacctcattcttgtctgtctctctgctttgagccaccattccccacgagttccaaactctagcgtgaatcaaactgagccacaggtgtcaagctctcataaccctacatcaacagaagaacaacagttatattgggccaaagggactggctttggaacaggctctacagcttctgggtgggatgtggaacaagccttaactaagcaaaggctggaagaggaacatgttacctgccttctgcaggttcttgccagttacataaatcccgtcagtagtgcggtaaatggagaagctcagtcatctcatgagactagagggcagaacagtaatgcccttccttctgtacttctcgagcttctcagtcagtcctgcctcatcccagccatgtcatcttatctacgaaatgattcagttctggacatggcaagacatgtgccactctatcgggcactgctggaattgcttcgggccattgcttcttgtgctgccatggtgcccctattgttgcccctttctacagagaacggtgaagaggaagaagaacagtcagaatgtcaaacttctgttggtacattgttagccaaaatgaagacctgtgttgatacctataccaaccgtttaagatctaaaagggaaaatgttaaaacaggagtaaaaccagatgcgtctgatcaagaaccagaaggacttactcttttggtaccagacatccaaaagactgctgagatagtttatgcagccaccaccagtttgcggcaagcaaatcaggaaaaaaaactgggtgaatactccaagaaggcggctatgaaacccaaacctttgtcagtattaaagtcacttgaagaaaaatatgtggctgttatgaagaaattacagtttgatacgtttgaaatggtttctgaagatgaagatgggaaattgggatttaaagtaaattaccactacatgtctcaggtgaaaaatgctaatgatgcgaacagtgctgccagagctcgccgccttgcccaggaagctgtgacgctttcaacctcactgcctctgtcttcatcctctagtgtgtttgtacgctgtgatgaggagcgacttgatatcatgaaggttctaataactggtccagcggacaccccttatgcaaatggctgctttgagtttgatgtgtattttcctcaagattatcccagttcaccccctcttgtgaatctagagacaactggtggtcatagcgtgcgattcaatccaaacctttataatgatggcaaggtttgtttaagcatcttaaacacgtggcatggaagaccagaagagaagtggaatcctcagacctcaagctttttgcaagtgttggtgtctgtccagtcccttatattagtagctgagccttattttaatgaaccgggatatgaacggtctagaggcactcccagtggcacacagagttctcgagaatatgatggaaacattcgacaagcaacagttaagtgggcaatgctagaacaaatcagaaacccttcaccatgttttaaagaggtaatacacaaacatttttacttgaaaagagttgagataatggcccaatgtgaggagtggattgcggatatccagcagtacagcagtgataagcgggtaggcaggactatgtctcaccatgcagcagctctcaagcgtcacactgctcagctccgcgaagagttgctgaaacttccctgccctgaaggcttggatcctgacactgacgatgccccagaggtgtgcagagccacaacaggtgctgaggagactctaatgcatgatcaggttaaacccagcagcagcaaagaactccccagtgacttccagttatgagctgcattgatgtggacttcatagacacaaaggcttcgaagcacaagccaaatatgtcaatatttgtatgtaagaaactaattatgtaataggtaatgaaactgaaactatactatgcccttaaggagatccagtttaattcaaggtgatcttttatttacctgtacaggagtgtaaacttttttgtgcttttatttttcaattgtgagaaccactgattggtatgttcaacaaatttgtgtatacaaagaaatggataaatcactgctatataagggaaactaccttaggaaagaatgtttactgaatgtttattttattttttttttttttactatagagtgaggggttgttaacaaagaatatatattggtcattcttacaactactatttaaagtcagcaacttttcactgaatttgatagattttatgtttggccatatcttcatgctcacatttgatttctgaagacctcctacatacacttcaataaaagttaaatggacatactccctcttttttgatttactggtacatttttaaaataataaatctgccataaaatgcattatatctggagacttgcacttgtatggatgaatttattacattcaacatatttaattttatgccttctaattctaagatgcagaaaaaaataaatgaacatgattttattctatgccaacatttgggcctctgaatgtatctgttatttgaatttaagtatttgaaaaggaatggtcaatttgaaagtcattctaaactgattttttttttctaaagggctccttttttcctggactatgtggttttatgactaaagtcacatgtatgtattaaacattgaggctctgtagaggagagaggatgtacctctctggtgctgttacagtacattctgtacctgccatacaggctcattttcatgcaaattcttcctagagccaaataaataaagacttaggtgaattagta

SEQ ID NO: 362867 - DNA, 2545 bp, Homo sapiens
ttacaggcctgaaccagcgtgcccagccgggtcagctgtggaccttggtaagatccaggtaaaagctacattcctgtggacctacttttatattgtacatttgctcattttgtgctttttcttcttctccttatagttctggacatggcaagacatgtgccactctatcgggcactgctggaattgcttcgggccattgcttcttgtgctgccatggtgcccctattgttgcccctttctacagagaacggtgaagaggaagaagaacagtcagaatgtcaaacttctgttggtacattgttagccaaaatgaagacctgtgttgatacctataccaaccgtttaagatctaaaagggaaaatgttaaaacaggagtaaaaccagatgcgtctgatcaagaaccagaaggacttactcttttggtaccagacatccaaaagactgctgagatagtttatgcagccaccaccagtttgcggcaagcaaatcaggaaaaaaaactgggtgaatactccaagaaggcggctatgaaacccaaacctttgtcagtattaaagtcacttgaagaaaaatatgtggctgttatgaagaaattacagtttgatacgtttgaaatggtttctgaagatgaagatgggaaattgggatttaaagtaaattaccactacatgtctcaggtgaaaaatgctaatgatgcgaacagtgctgccagagctcgccgccttgcccaggaagctgtgacgctttcaacctcactgcctctgtcttcatcctctagtgtgtttgtacgctgtgatgaggagcgacttgatatcatgaaggttctaataactggtccagcggacaccccttatgcaaatggctgctttgagtttgatgtgtattttcctcaagattatcccagttcaccccctcttgtgaatctagagacaactggtggtcatagcgtgcgattcaatccaaacctttataatgatggcaaggtttgtttaagcatcttaaacacgtggcatggaagaccagaagagaagtggaatcctcagacctcaagctttttgcaagtgttggtgtctgtccagtcccttatattagtagctgagccttattttaatgaaccgggatatgaacggtctagaggcactcccagtggcacacagagttctcgagaatatgatggaaacattcgacaagcaacagttaagtgggcaatgctagaacaaatcagaaacccttcaccatgttttaaagaggtaatacacaaacatttttacttgaaaagagttgagataatggcccaatgtgaggagtggattgcggatatccagcagtacagcagtgataagcgggtaggcaggactatgtctcaccatgcagcagctctcaagcgtcacactgctcagctccgcgaagagttgctgaaacttccctgccctgaaggcttggatcctgacactgacgatgccccagaggtgtgcagagccacaacaggtgctgaggagactctaatgcatgatcaggttaaacccagcagcagcaaagaactccccagtgacttccagttatgagctgcattgatgtggacttcatagacacaaaggcttcgaagcacaagccaaatatgtcaatatttgtatgtaagaaactaattatgtaataggtaatgaaactgaaactatactatgcccttaaggagatccagtttaattcaaggtgatcttttatttacctgtacaggagtgtaaacttttttgtgcttttatttttcaattgtgagaaccactgattggtatgttcaacaaatttgtgtatacaaagaaatggataaatcactgctatataagggaaactaccttaggaaagaatgtttactgaatgtttattttattttttttttttttactatagagtgaggggttgttaacaaagaatatatattggtcattcttacaactactatttaaagtcagcaacttttcactgaatttgatagattttatgtttggccatatcttcatgctcacatttgatttctgaagacctcctacatacacttcaataaaagttaaatggacatactccctcttttttgatttactggtacatttttaaaataataaatctgccataaaatgcattatatctggagacttgcacttgtatggatgaatttattacattcaacatatttaattttatgccttctaattctaagatgcagaaaaaaataaatgaacatgattttattctatgccaacatttgggcctctgaatgtatctgttatttgaatttaagtatttgaaaaggaatggtcaatttgaaagtcattctaaactgattttttttttctaaagggctccttttttcctggactatgtggttttatgactaaagtcacatgtatgtattaaacattgaggctctgtagaggagagaggatgtacctctctggtgctgttacagtacattctgtacctgccatacaggctcattttcatgcaaattcttcctagagccaaataaataaagacttaggtgaattagta

SEQ ID NO: 362868 - DNA, 1650 bp, Homo sapiens
ggatagcattttgtttttacttctcgttatgacagtttgtttttaagcactcttttttcaattctgtttatgcttttttcgttcgtcaggtttgtttaagcatcttaaacacgtggcatggaagaccagaagagaagtggaatcctcagacctcaagctttttgcaagtgttggtgtctgtccagtcccttatattagtagctgagccttattttaatgaaccgggatatgaacggtctagaggcactcccagtggcacacagagttctcgagaatatgatggaaacattcgacaagcaacagttaagtgggcaatgctagaacaaatcagaaacccttcaccatgttttaaagaggtaatacacaaacatttttacttgaaaagagttgagataatggcccaatgtgaggagtggattgcggatatccagcagtacagcagtgataagcgggtaggcaggactatgtctcaccatgcagcagctctcaagcgtcacactgctcagctccgcgaagagttgctgaaacttccctgccctgaaggcttggatcctgacactgacgatgccccagaggtgtgcagagccacaacaggtgctgaggagactctaatgcatgatcaggttaaacccagcagcagcaaagaactccccagtgacttccagttatgagctgcattgatgtggacttcatagacacaaaggcttcgaagcacaagccaaatatgtcaatatttgtatgtaagaaactaattatgtaataggtaatgaaactgaaactatactatgcccttaaggagatccagtttaattcaaggtgatcttttatttacctgtacaggagtgtaaacttttttgtgcttttatttttcaattgtgagaaccactgattggtatgttcaacaaatttgtgtatacaaagaaatggataaatcactgctatataagggaaactaccttaggaaagaatgtttactgaatgtttattttattttttttttttttactatagagtgaggggttgttaacaaagaatatatattggtcattcttacaactactatttaaagtcagcaacttttcactgaatttgatagattttatgtttggccatatcttcatgctcacatttgatttctgaagacctcctacatacacttcaataaaagttaaatggacatactccctcttttttgatttactggtacatttttaaaataataaatctgccataaaatgcattatatctggagacttgcacttgtatggatgaatttattacattcaacatatttaattttatgccttctaattctaagatgcagaaaaaaataaatgaacatgattttattctatgccaacatttgggcctctgaatgtatctgttatttgaatttaagtatttgaaaaggaatggtcaatttgaaagtcattctaaactgattttttttttctaaagggctccttttttcctggactatgtggttttatgactaaagtcacatgtatgtattaaacattgaggctctgtagaggagagaggatgtacctctctggtgctgttacagtacattctgtacctgccatacaggctcattttcatgcaaattcttcctagagccaaataaataaagacttaggtgaattagta

SEQ ID NO: 362869 - DNA, 14687 bp, Homo sapiens
ccgggtcccgcctccctccctgcttctccccctctcccgtcagcctccctccgagtttggcccctccgccgggcgatcgacgttccgcgtgcgtgcgggcgcctgacttcacttccggctaacgcgctcggcttgccccctggccccggatggtgactggtggtggtgctgcacctcccgggactgtcactgagccgcttcccagtgtgattgtgctgagcgcaggccggaagatggcggctgcggctgcggcggcctcgggccccggctgctcctcggcggcgggggcgggggcggccggggtctcagagtggctggtgctgcgggacggctgcatgcactgcgacgccgacgggctgcacagcctgtcctaccaccctgcgctcaacgccatcctggccgtcactagccgcgggaccatcaaagtcatcgacggcacctcgggggccacactgcaggcctccgcgctcagtgctaaaccaggtggacaggtgaaatgtcagtatatctctgctgtggataaagttatatttgtggatgattatgcagtagggtgtaggaaggaccttaatggaatcttgttgttagacactgctctgcaaactccagtttcaaagcaggatgatgtggttcagcttgaattacccgttacagaggcacagcagctcttatcagcatgtttagaaaaggtagatatttctagtacagagggttatgatttgttcatcacacagctcaaagatggtttaaaaaatacatctcatgagactgcagcaaaccacaaagttgctaagtgggccacagttacatttcatcttcctcatcatgtgttgaagtccattgccagtgccattgtaaatgaactcaagaaaataaatcaaaatgttgctgccttacctgtggcgtcctcagtgatggacagattgtcttacctcttacctagtgcacgtccagaactcggagtggggccaggccgttctgtagacagatcactgatgtatagtgaagctaacagacgggagacatttacctcatggcctcatgtaggctataggtgggcacaaccagatcccatggctcaagctggattttatcatcagcctgcctcatctggagatgatagagccatgtgttttacttgtagtgtatgcctcgtttgttgggaacctactgatgaaccttggtctgaacacgaaagacattccccaaactgcccatttgtgaaaggtgagcacacacagaatgtgccattgtcagtcactcttgcaacaagtcctgcacagtttccttgtacggatggaactgacagaatatcttgctttgggtcggggagctgccctcattttctagctgctgcaactaaacgaggaaagatctgcatatgggatgtttccaaacttatgaaggtgcacttaaagtttgaaattaatgcctatgatccagcaattgtacaacagcttattctatcaggagacccaagctcaggagttgattcaaggagaccaactttggcgtggctggaggactcctctagttgctcagatataccaaaattggaaggagatagtgatgatttactggaggattcagacagtgaagagcattccagatcagattctgtgacagggcatacatcacagaaggaagccatggaagtaagccttgatataacagcactcagcattctccaacagccagaaaaacttcagtgggagattgttgcaaatgtgcttgaagatactgttaaggatcttgaagaacttggggcaaatccttgtttaacaaactctaagagtgaaaagacaaaggaaaagcaccaggagcaacacaacattccttttccatgtttattagctggaggtttattaacatataaatctcctgctacctcacccattagtagtaattctcacaggtcactggatggtttaagcagaactcagggtgaaagtatatcagaacaagggtcaactgacaatgaatcctgcactaattcagaactaaattctcctctggtaaggaggactttaccggttttgcttctttatagcatcaaggaatctgatgagaaagcaggaaagatcttttcacagatgaacaatattatgagtaaaagtttgcatgatgatggttttactgttccacagattattgaaatggagctggatagtcaggagcagttgttattgcaggatcctcctgtgacttacattcagcaatttgcagatgcagcagccaaccttacctctccggattctgagaagtggaactctgtgtttcccaagcctgggactttggttcagtgcttgaggctgccaaagtttgcagaggaggagaatctttgtatagactcaataactccttgtgctgacggaattcatttgttggtaggactgcggacatgccctgttgaatccttgagtgcaataaatcaagtagaggccttgaataatttaaataaattaaactctgcactatgtaatagacggaaaggtgagctggaatcaaatcttgctgtagtgaatggtgcaaatattagtgtaatccaacatgaatcaccagcagatgtacagactcctttaataattcagcctgagcagaggaatgttagtggtggatatttagtgctttataaaatgaattatgccactcggatagtgactttagaagaggagccaataaaaatacaacatatcaaagatccccaggacacaattacctcgctcattttgcttccacccgatatattggataatcgagaggatgactgtgaggaacctattgaggacatgcagttaacctcaaagaatggttttgagagagaaaaaacgtctgacatttctactcttggacacctggtaataaccactcagggaggatatgtaaaaatactagatctttcaaactttgaaattttggccaaagtggagcctcccaaaaaggagggcactgaggaacaggacacatttgtttctgtgatttactgttctggcacagacaggctgtgtgcatgcaccaaagagtctcaccctgtcaacaggctggggtgcagttacgcaatcttggctcactgcaacttctgcctcccaggttcaagtgattctccggccttagcctcctgagtagctgggaccacaggtggtgagcttcattttctccaaattggaggaacctgtgatgatattgatgaagctgatatactagtggatggatctctttctaaaggaatagaaccatcttcagaaggttccaaacctttatcaaatccttcaagtcctggcatttcaggagttgatttattggtggaccagccattcacccttgaaatcttgacatccctagtggagctaacccgctttgagactttgactccaaggttttcagcgactgttcctccatgctgggtagaagttcaacaagaacagcagcaaaggaggcatcctcaacatttgcatcagcaacaccatggtgatgctgctcagcatactcgaacttggaaactacagaccgacagcaacagctgggatgaacatgtatttgaattagtactacctaaagcttgtatggttggacatgtggacttcaaattcgttttgaactcaaacatcaccaatattccacagatacaagtgacactgctgaaaaataaagctccaggattagggaaagtcaatgctcttaacattgaagtggaacaaaatgggaaaccgtccctggttgatttgaatgaagaaatgcagcacatggatgtagaggaatcccagtgtcttagattatgtccatttttggaggatcataaagaagacattctatgtgggccagtatggcttgctagtggccttgatctatcagggcatgctggaatgttgacgttaacaagccccaaacttgttaaaggtatggcaggaggaaaatatcgttcgtttttaatccatgtcaaggcagtgaatgaaagaggaacagaagagatttgtaatggtggtatgcgtcctgtagtaaggcttccatccctaaaacaccagagtaacaagggttattcacttgcttcacttttggctaaagttgcagcaggcaagagtgcaacgatgtgccatgttacagttttcagaatttcatgagaagcttcttaatactctttgcagaaaaacagatgatggccagatcacagaacatgcccagagccttgtgttggatactctctgttggttagctggagttcattcaaatggacccggaagctcaaaggaaggaaatgagaacctactttcaaaaacacgaaaatttctgtcagacatcgtacgtgtttgcttctttgaggcaggacgaagtatagcccataagtgtgcccgatttctagccttgtgcattagtaatggcaaatgtgacccatgtcaaccagcatttggacctgttctgttgaaggctttacttgataatatgtcatttttacctgcagcaacaactggtggttctgtctattggtattttgtcttactgaattatgtgaaagatgaagatctggctggatgcagtacagcttgtgcatctttgcttactgcagtgtccagacagttacaggacaggctaacaccaatggaggctttacttcagacaagatatggattatatagctcaccatttgatccagtcctctttgatttggagatgagtggctcttcttgtaaaaatgtttataacagcagcattggtgtccagtcagatgaaattgatttatcagatgtcctttcaggaaatggaaaggtcagtagttgcacagctgctgagggtagtttcacatctctcactggacttttggaagttgaacctctgcactttacttgtgtgtcaactagtgatggaaccagaatagaaagggatgatgcaagtacgtttactgtgagttccttcggggttactcctgcagtaggtggactatcatctgggacagttggggaagcctcgacagccctgagttcagcagcccaggtagctttgcagtctctctctcatgcaatggcttcagccgagcaacagctacaggtgctgcaagagaaacagcagcagcttttgaagcttcagcaacagaaagcaaagctggaagccaagttacatcagacaacagctgcagcagctgcagcagcatcagcagtaggtcctgttcacaactctgtgccttccaacccagtggctgcccctggattcttcattcatccatctgatgttattccacccactccaaaaacaacacctctttttatgactccaccactcactccacccaatgaagcagtttccgttgtgattaatgccgaacttgcacagcttttcccaggctcagtcattgatcccccagcagtcaatcttgctgcacataacaaaaattccaacaagtccagaatgaatccacttggttctggtctagcccttgcaatttctcatgcttcacattttcttcaacctccgcctcaccagtccattattatagagcgaatgcattcaggagcaagaagatttgtgaccttggattttgggaggcctatattgttgactgatgtattgattcccacttgtggagacttggcctctttgtcaattgacatttggacattaggagaagaggtggatggaaggcggttggtagtggcaactgatataagcactcattcactaattcttcatgacttaataccacctcccgtgtgcagattcatgaagatcactgttattggacgttacgggagtacaaatgccagagccaaaatcccattaggattttactatggtcatacctacatcttgccttgggaaagtgaactgaagttaatgcatgatcctctaaagggagagggagaatctgcaaaccagccagaaattgaccagcatttagcaatgatggttgctttgcaggaggatatacagtgcaggtataacttggcttgtcatcgtctggaaacccttttgcaaagtattgatcttcctcctctaaacagtgctaacaatgcacagtactttttacgaaaaccagataaggcagttgaggaagacagtagggttttttctgcttatcaagattgtattcagctacagcttcaactaaatttggctcataatgcagtgcagaggctcaaagtggcgctaggtgcaagccggaagatgttgagtgaaacatcaaatccagaagatttaattcagacatcttccacagagcagttacgtactatcatcagatatttactggacactttgctcagcctgcttcatgcttctaatggacactctgttcctgcagttttgcagagcacatttcatgcccaggcctgtgaagagctctttaaacacttgtgcatcagtggaaccccaaagatacggttacatactggtcttcttcttgttcaactgtgtggtggtgaaaggtggtggggtcaatttctttctaatgtccttcaggaattgtacaattcggaacagcttctcatctttccacaggatagggtcttcatgttactttcctgcattggtcaaagatcacttagtaatagtggagtattagaaagcttacttaatctcttggataatttattgtcacctcttcagccacagttacccatgcataggaggacagaaggagtactagatattcccatgatcagttgggttgttatgctggtgtccaggttgctggattatgtggcaactgttgaagatgaagcagcagctgcaaagaaacctttgaatggtaaagacagggagaggtttctgacaggtaatcagtggagttttattaacaataatctacacactcagagcttaaatagatcttctaaaggcagcagtagccttgatagattatattccagaaaaatcagaaagcagcttgttcatcataaacagcaacttaacctactaaaagcaaagcagaaggcattggtagaacagatggaaaaagaaaaaatacaaagtaacaaaggatcatcatataaactcctggtagaacaagcaaaactaaagcaggccacttcaaagcactttaaggatttaattcgtttacgtcggacagcagaatggtcccgttctaatttagacacagaagttacaacagcaaaagaaagtcctgagatagaaccacttccatttactctggcccatgagcgttgtatctcagtagtccagaaacttgttctgtttcttctctccatggactttacatgtcatgcagatctcttattgtttgtttgtaaggttcttgcacgcattgcaaatgccacgaggccaactattcatctgtgtgagattgtgaacgaaccccagctggaaagactgctgttacttttggttggaactgacttcaatagaggagatatatcttggggtggtgcttgggctcagtattccttaacttgcatgctacaagatattttagcaggagaattactggctccagtagccgcagaagccatggaggaaggaacagtgggtgatgatgtaggtgcgacagctggtgactctgatgactcccttcaacagtcctcagttcagttgctggaaactatagatgaacctttgacacatgacataacaggtgcacctcctctgtcctctttggaaaaagataaagaaattgaccttgagttacttcaggatctaatggaagttgacattgatcctttagatattgatttggaaaaggaccctcttgcagccaaggtttttaagccaataagcagtacatggtatgattattggggtgctgattatgggacctacaattacaacccttacattggaggtctgggaattcctgtagcaaagccaccagcaaacacggagaagaacggatcacagacagttagcgtttcagtctctcaggccctggatgctcgcctagaagttggacttgaacagcaagcagaactgatgttgaaaatgatgtctactctggaggcagattccattttacaggcattaacaaatacatctcctacattatcacagtctcccactggaacagatgattcacttctagggggtttacaagcagcaaaccaaaccagccagcttattatacagttatcatctgtcccaatgttaaatgtttgtttcaacaaacttttttccatgcttcaagtccatcatgttcagttggagtcacttctccaattgtggctcacactgagcctgaattctagttcaactggaaacaaagaaaatggagcagacatatttttatataatgctaataggatacctgttatttcattaaatcaagcatcaataactagctttctcacagtgttagcttggtatcccaatactttgctccggacatggtgccttgtgcttcatagcctaacactcatgacaaacatgcagcttaattctggttccagcagtgccattggaactcaggagagtactgctcatttgttggtttcagatccaaacctaattcatgtattagtgaaatttctttctggcaccagtccacatggaacaaatcaacacagtccacaggttggtcctacagctacacaagctatgcaagaatttcttactcgattacaagtgcatctttcttcaacatgtcctcagatattcagtgaatttttgctcaagctaattcatatactttcaactgaaaggggtgctttccagacaggccaaggacctctcgatgcccaagtgaagctcttagaattcactctggagcagaattttgaagtcgtttcagttagtactatttctgccgtgatagaatcggttacatttttagtgcaccactatatcacttgctcagacaaagtaatgtcaagaagtggatcagatagctccgtgggtgctcgagcatgctttgggggactctttgccaatcttattcgtccgggtgatgcaaaagcagtttgtggcgaaatgacaagagatcaactcatgtttgatttgttaaaacttgttaacattttagtgcagctgcctctttcaggcaatagggaatacagtgcaagagtgtctgtgaccacaaatacaacagatagtgtttcagatgaagaaaaagtctcaggaggcaaagatggcaatggaagcagtaccagtgttcaaggatcgcctgcatatgttgctgacttagtcttagccaaccaacaaattatgagccagattttgtctgctctgggcctgtgtaatagcagtgccatggcaatgataattggagcaagtggattacatctcactaaacatgaaaactttcatggtgggttggatgccatatcagttggggatggattatttaccatactgacaacccttagtaaaaaagcttctacagtccacatgatgctgcagccaattttaacatacatggcctgtggatatatgggcagacaaggctctcttgctacttgccagttatctgagccattattgtggttcattttgagagtattggatactagtgatgccttgaaagcatttcatgatatgggtggtgttcagctcatatgcaataatatggttactagtacaagggctattgtgaacactgcaagaagtatggtatcaactattatgaaatttcttgactctggtccaaataaagctgttgacagcacattgaaaacaagaatactagcttctgagcctgacaatgctgaagggattcataactttgcacccctcggtacaatcacatctagcagtcctactgcccaaccagctgaagtgctattgcaggccacacctcctcacagaagagctcgctctgctgcttggtcctacatctttcttccagaggaggcttggtgtgaccttaccattcaccttcctgcagcagtgctgcttaaggagatacatatccagcctcatcttgcatctcttgcaacctgcccttcctcagtgtctgttgaagtaagtgcagatggggtaaatatgctacctttgtccactcctgttgtcacaagtggcctcacctacataaaaattcagcttgtaaaagccgaagtagcttctgctgtctgccttagactacatcgtccacgggatgccagcacattaggcctttcacaaattaaattattggggctcactgcttttggtaccacctcttctgcaacagttaataatccattccttccatctgaagatcaggtatccaaaacaagtattggatggttacggttattacatcattgccttactcacataagtgatctagaaggaatgatggcaagtgcagctgcacctactgctaatctgctgcagacttgtgcggccttattgatgtcaccttactgtggaatgcattcacccaacatcgaggttgtgcttgtaaagataggactgcagtctactagaattggcctgaagctcatagacattctcctgagaaattgtgcagcatcaggcagtgatcctacagatttgaatagtcctttactttttggaagactaaatggactctcttctgactctacgatagatattctttaccagcttggaacaactcaggatcctggtacaaaagacagaattcaggccttgttaaaatgggttagtgattctgcaagagtggctgctatgaagagaagtggcaggatgaactacatgtgtcctaactcctcaacagtagagtatggtcttctgatgccatctccttctcatttgcactgtgtagcagccattctgtggcatagttatgagctgcttgtagaatatgacttaccagcactcctggaccaagagctctttgagttactttttaattggtccatgtctcttccctgcaatatggttttgaagaaagctgttgacagtctactttgctcaatgtgtcacgtacacccaaactatttttctttgctcatgggctggatgggaattacccctcctccagtgcaatgtcatcatagactgtccatgacagatgatagcaaaaagcaggatcttagttcatctttaacagatgactctaaaaatgcacaagcacctctcgcattaactgaatcacatttggctacccttgcttcctcttctcaatctcctgaagctattaaacaattactagactcaggtttgccttctcttcttgtgaggagtctggctagtttctgctttagccacatttctagctcagaaagcattgcccagtcaatagatatttcccaggacaaactcaggcgccatcatgtcccacaacaatgtaataagatgcctatcacagccgacctagttgctcctattcttaggtttttgacagaagttggcaatagccatattatgaaagattggcttggtggttctgaagtcaatccactatggacagcacttctgtttttattgtgtcactctgggtccacttctggaagccataatttaggtgcacaacagaccagtgcaagatcagcttctctttcttcagctgctacaacaggactgactactcaacagcgcacagcaattgagaatgcaactgttgcgttctttctacagtgcatttcatgccatcctaataatcaaaagctgatggcacaggttctttgtgaactatttcagacatctcctcaaagagggaaccttccaacatctgggaacatttcagggtttatacgaagattatttttacagttgatgctggaagatgagaaagtgacaatgtttcttcagtctccatgtccactgtacaaaggtagaattaatgctactagccacgtcatccagcatccaatgtatggagcaggccacaaattccgtactcttcatttgccagtctcaacaacattatcagatgttcttgacagagtgtcagatactccaagtatcacagctaaattaattagtgaacaaaaagatgacaaagaaaagaaaaaccatgaagagaaagaaaaagttaaagcggaaaatggatttcaagacaattacagtgttgttgttgcctctgggctgaagtctcaatctaaacgtgctgtgtcagctacaccacctcgcccaccatccaggagggggaggacaatacctgataaaataggaagtacttcaggagcagaggctgccaacaaaataattactgtcccagtgtttcacctgtttcacaaactcttggcaggccagccattgccagctgaaatgacacttgcccagcttttaactctcctatatgaccgaaaacttcctcagggttaccgctcaatagatctgactgttaaattgggatcaagagttataacagaccccagtctatcaaaaacagattcttataaaagactacaccctgaaaaagatcatggagacttacttgctagctgtccagaagatgaggctctcactccaggtgatgaatgcatggatgggatactggatgaatctttgcttgaaacctgtccaattcagtcaccattacaagtttttgcaggaatgggtggactggctcttattgctgaaagactacccatgctatatccagaagtaattcaacaggtgagtgctccagttgtaacatctaccactcaggaaaagccgaaggatagcgatcagtttgaatgggtgaccattgaacagtcaggggagttagtttatgaagcaccagaaactgttgcggctgaacctccacctatcaagtcagcagtacagaccatgtctcccatacctgcccattctttggctgcttttggattatttcttcgtcttccgggctatgcggaagtgctactgaaagagagaaaacatgcccagtgccttcttcgattggtattgggagtgacagatgatggagaaggaagtcatattcttcaatctccatcagccaatgtgcttccaacccttcctttccacgtccttcgtagcttgtttagcactacacctttgacaactgatgatggtgtacttctaaggcggatggcattggaaattggagccttacacctcattcttgtctgtctctctgctttgagccaccattccccacgagttccaaactctagcgtgaatcaaactgagccacaggtgtcaagctctcataaccctacatcaacagaagaacaacagttatattgggccaaagggactggctttggaacaggctctacagcttctgggtgggatgtggaacaagccttaactaagcaaaggctggaagaggaacatgttacctgccttctgcaggttcttgccagttacataaatcccgtcagtagtgcggtaaatggagaagctcagtcatctcatgagactagagggcagaacagtaatgcccttccttctgtacttctcgagcttctcagtcagtcctgcctcatcccagccatgtcatcttatctacgaaatgattcagttctggacatggcaagacatgtgccactctatcgggcactgctggaattgcttcgggccattgcttcttgtgctgccatggtgcccctattgttgcccctttctacagagaacggtgaagaggaagaagaacagtcagaatgtcaaacttctgttggtacattgttagccaaaatgaagacctgtgttgatacctataccaaccgtttaagatctaaaagggaaaatgttaaaacaggagtaaaaccagatgcgtctgatcaagaaccagaaggacttactcttttggtaccagacatccaaaagactgctgagatagtttatgcagccaccaccagtttgcggcaagcaaatcaggaaaaaaaactgggtgaatactccaagaaggcggctatgaaacccaaacctttgtcagtattaaagtcacttgaagaaaaatatgtggctgttatgaagaaattacagtttgatacgtttgaaatggtttctgaagatgaagatgggaaattgggatttaaagtaaattaccactacatgtctcaggtgaaaaatgctaatgatgcgaacagtgctgccagagctcgccgccttgcccaggaagctgtgacgctttcaacctcactgcctctgtcttcatcctctagtgtgtttgtacgctgtgatgaggagcgacttgatatcatgaaggttctaataactggtccagcggacaccccttatgcaaatggctgctttgagtttgatgtgtattttcctcaagattatcccagttcaccccctcttgtgaatctagagacaactggtggtcatagcgtgcgattcaatccaaacctttataatgatggcaaggtttgtttaagcatcttaaacacgtggcatggaagaccagaagagaagtggaatcctcagacctcaagctttttgcaagtgttggtgtctgtccagtcccttatattagtagctgagccttattttaatgaaccgggatatgaacggtctagaggcactcccagtggcacacagagttctcgagaatatgatggaaacattcgacaagcaacagttaagtgggcaatgctagaacaaatcagaaacccttcaccatgttttaaagaggtaatacacaaacatttttacttgaaaagagttgagataatggcccaatgtgaggagtggattgcggatatccagcagtacagcagtgataagcgggtaggcaggactatgtctcaccatgcagcagctctcaagccttcacctgtaatctcccgatagttgtctaatacccaacatgtgttgtggaacttattgtttatcagtttactcacctctgctaaatattcccatacttcacctttatcttctgttgttct

SEQ ID NO: 362870 - DNA, 13924 bp, Homo sapiens
ccgggtcccgcctccctccctgcttctccccctctcccgtcagcctccctccgagtttggcccctccgccgggcgatcgacgttccgcgtgcgtgcgggcgcctgacttcacttccggctaacgcgctcggcttgccccctggccccggatggtgactggtggtggtgctgcacctcccgggactgtcactgagccgcttcccagtgtgattgtgctgagcgcaggccggaagatggcggctgcggctgcggcggcctcgggccccggctgctcctcggcggcgggggcgggggcggccggggtctcagagtggctggtgctgcgggacggctgcatgcactgcgacgccgacgggctgcacagcctgtcctaccaccctgcgctcaacgccatcctggccgtcactagccgcgggaccatcaaagtcatcgacggcacctcgggggccacactgcaggcctccgcgctcagtgctaaaccaggtggacaggtgaaatgtcagtatatctctgctgtggataaagttatatttgtggatgattatgcagtagggtgtaggaaggaccttaatggaatcttgttgttagacactgctctgcaaactccagtttcaaagcaggatgatgtggttcagcttgaattacccgttacagaggcacagcagctcttatcagcatgtttagaaaaggtagatatttctagtacagagggttatgatttgttcatcacacagctcaaagatggtttaaaaaatacatctcatgagactgcagcaaaccacaaagttgctaagtgggccacagttacatttcatcttcctcatcatgtgttgaagtccattgccagtgccattgtaaatgaactcaagaaaataaatcaaaatgttgctgccttacctgtggcgtcctcagtgatggacagattgtcttacctcttacctagtgcacgtccagaactcggagtggggccaggccgttctgtagacagatcactgatgtatagtgaagctaacagacgggagacatttacctcatggcctcatgtaggctataggtgggcacaaccagatcccatggctcaagctggattttatcatcagcctgcctcatctggagatgatagagccatgtgttttacttgtagtgtatgcctcgtttgttgggaacctactgatgaaccttggtctgaacacgaaagacattccccaaactgcccatttgtgaaaggtgagcacacacagaatgtgccattgtcagtcactcttgcaacaagtcctgcacagtttccttgtacggatggaactgacagaatatcttgctttgggtcggggagctgccctcattttctagctgctgcaactaaacgaggaaagatctgcatatgggatgtttccaaacttatgaaggtgcacttaaagtttgaaattaatgcctatgatccagcaattgtacaacagcttattctatcaggagacccaagctcaggagttgattcaaggagaccaactttggcgtggctggaggactcctctagttgctcagatataccaaaattggaaggagatagtgatgatttactggaggattcagacagtgaagagcattccagatcagattctgtgacagggcatacatcacagaaggaagccatggaagtaagccttgatataacagcactcagcattctccaacagccagaaaaacttcagtgggagattgttgcaaatgtgcttgaagatactgttaaggatcttgaagaacttggggcaaatccttgtttaacaaactctaagagtgaaaagacaaaggaaaagcaccaggagcaacacaacattccttttccatgtttattagctggaggtttattaacatataaatctcctgctacctcacccattagtagtaattctcacaggtcactggatggtttaagcagaactcagggtgaaagtatatcagaacaagggtcaactgacaatgaatcctgcactaattcagaactaaattctcctctggtaaggaggactttaccggttttgcttctttatagcatcaaggaatctgatgagaaagcaggaaagatcttttcacagatgaacaatattatgagtaaaagtttgcatgatgatggttttactgttccacagattattgaaatggagctggatagtcaggagcagttgttattgcaggatcctcctgtgacttacattcagcaatttgcagatgcagcagccaaccttacctctccggattctgagaagtggaactctgtgtttcccaagcctgggactttggttcagtgcttgaggctgccaaagtttgcagaggaggagaatctttgtatagactcaataactccttgtgctgacggaattcatttgttggtaggactgcggacatgccctgttgaatccttgagtgcaataaatcaagtagaggccttgaataatttaaataaattaaactctgcactatgtaatagacggaaaggtgagctggaatcaaatcttgctgtagtgaatggtgcaaatattagtgtaatccaacatgaatcaccagcagatgtacagactcctttaataattcagcctgagcagaggaatgttagtggtggatatttagtgctttataaaatgaattatgccactcggatagtgactttagaagaggagccaataaaaatacaacatatcaaagatccccaggacacaattacctcgctcattttgcttccacccgatatattggataatcgagaggatgactgtgaggaacctattgaggacatgcagttaacctcaaagaatggttttgagagagaaaaaacgtctgacatttctactcttggacacctggtaataaccactcagggaggatatgtaaaaatactagatctttcaaactttgaaattttggccaaagtggagcctcccaaaaaggagggcactgaggaacaggacacatttgtttctgtgatttactgttctggcacagacaggctgtgtgcatgcaccaaagagtctcaccctgtcaacaggctggggtgcagttacgcaatcttggctcactgcaacttctgcctcccaggttcaagtgattctccggccttagcctcctgagtagctgggaccacaggtggtgagcttcattttctccaaattggaggaacctgtgatgatattgatgaagctgatatactagtggatggatctctttctaaaggaatagaaccatcttcagaaggttccaaacctttatcaaatccttcaagtcctggcatttcaggagttgatttattggtggaccagccattcacccttgaaatcttgacatccctagtggagctaacccgctttgagactttgactccaaggttttcagcgactgttcctccatgctgggtagaagttcaacaagaacagcagcaaaggaggcatcctcaacatttgcatcagcaacaccatggtgatgctgctcagcatactcgaacttggaaactacagaccgacagcaacagctgggatgaacatgtatttgaattagtactacctaaagcttgtatggttggacatgtggacttcaaattcgttttgaactcaaacatcaccaatattccacagatacaagtgacactgctgaaaaataaagctccaggattagggaaagtcaatgctcttaacattgaagtggaacaaaatgggaaaccgtccctggttgatttgaatgaagaaatgcagcacatggatgtagaggaatcccagtgtcttagattatgtccatttttggaggatcataaagaagacattctatgtgggccagtatggcttgctagtggccttgatctatcagggcatgctggaatgttgacgttaacaagccccaaacttgttaaaggtatggcaggaggaaaatatcgttcgtttttaatccatgtcaaggcagtgaatgaaagaggaacagaagagatttgtaatggtggtatgcgtcctgtagtaaggcttccatccctaaaacaccagagtaacaagggttattcacttgcttcacttttggctaaagttgcagcaggcaagagtgcaacgatgtgccatgttacagttttcagaatttcatgagaagcttcttaatactctttgcagaaaaacagatgatggccagatcacagaacatgcccagagccttgtgttggatactctctgttggttagctggagttcattcaaatggacccggaagctcaaaggaaggaaatgagaacctactttcaaaaacacgaaaatttctgtcagacatcgtacgtgtttgcttctttgaggcaggacgaagtatagcccataagtgtgcccgatttctagccttgtgcattagtaatggcaaatgtgacccatgtcaaccagcatttggacctgttctgttgaaggctttacttgataatatgtcatttttacctgcagcaacaactggtggttctgtctattggtattttgtcttactgaattatgtgaaagatgaagatctggctggatgcagtacagcttgtgcatctttgcttactgcagtgtccagacagttacaggacaggctaacaccaatggaggctttacttcagacaagatatggattatatagctcaccatttgatccagtcctctttgatttggagatgagtggctcttcttgtaaaaatgtttataacagcagcattggtgtccagtcagatgaaattgatttatcagatgtcctttcaggaaatggaaaggtcagtagttgcacagctgctgagggtagtttcacatctctcactggacttttggaagttgaacctctgcactttacttgtgtgtcaactagtgatggaaccagaatagaaagggatgatgcaagtacgtttactgtgagttccttcggggttactcctgcagtaggtggactatcatctgggacagttggggaagcctcgacagccctgagttcagcagcccaggtagctttgcagtctctctctcatgcaatggcttcagccgagcaacagctacaggtgctgcaagagaaacagcagcagcttttgaagcttcagcaacagaaagcaaagctggaagccaagttacatcagacaacagctgcagcagctgcagcagcatcagcagtaggtcctgttcacaactctgtgccttccaacccagtggctgcccctggattcttcattcatccatctgatgttattccacccactccaaaaacaacacctctttttatgactccaccactcactccacccaatgaagcagtttccgttgtgattaatgccgaacttgcacagcttttcccaggctcagtcattgatcccccagcagtcaatcttgctgcacataacaaaaattccaacaagtccagaatgaatccacttggttctggtctagcccttgcaatttctcatgcttcacattttcttcaacctccgcctcaccagtccattattatagagcgaatgcattcaggagcaagaagatttgtgaccttggattttgggaggcctatattgttgactgatgtattgattcccacttgtggagacttggcctctttgtcaattgacatttggacattaggagaagaggtggatggaaggcggttggtagtggcaactgatataagcactcattcactaattcttcatgacttaataccacctcccgtgtgcagattcatgaagatcactgttattggacgttacgggagtacaaatgccagagccaaaatcccattaggattttactatggtcatacctacatcttgccttgggaaagtgaactgaagttaatgcatgatcctctaaagggagagggagaatctgcaaaccagccagaaattgaccagcatttagcaatgatggttgctttgcaggaggatatacagtgcaggtataacttggcttgtcatcgtctggaaacccttttgcaaagtattgatcttcctcctctaaacagtgctaacaatgcacagtactttttacgaaaaccagataaggcagttgaggaagacagtagggttttttctgcttatcaagattgtattcagctacagcttcaactaaatttggctcataatgcagtgcagaggctcaaagtggcgctaggtgcaagccggaagatgttgagtgaaacatcaaatccagaagatttaattcagacatcttccacagagcagttacgtactatcatcagatatttactggacactttgctcagcctgcttcatgcttctaatggacactctgttcctgcagttttgcagagcacatttcatgcccaggcctgtgaagagctctttaaacacttgtgcatcagtggaaccccaaagatacggttacatactggtcttcttcttgttcaactgtgtggtggtgaaaggtggtggggtcaatttctttctaatgtccttcaggaattgtacaattcggaacagcttctcatctttccacaggatagggtcttcatgttactttcctgcattggtcaaagatcacttagtaatagtggagtattagaaagcttacttaatctcttggataatttattgtcacctcttcagccacagttacccatgcataggaggacagaaggagtactagatattcccatgatcagttgggttgttatgctggtgtccaggttgctggattatgtggcaactgttgaagatgaagcagcagctgcaaagaaacctttgaatggtaaagacagggagaggtttctgacaggtaatcagtggagttttattaacaataatctacacactcagagcttaaatagatcttctaaaggcagcagtagccttgatagattatattccagaaaaatcagaaagcagcttgttcatcataaacagcaacttaacctactaaaagcaaagcagaaggcattggtagaacagatggaaaaagaaaaaatacaaagtaacaaaggatcatcatataaactcctggtagaacaagcaaaactaaagcaggccacttcaaagcactttaaggatttaattcgtttacgtcggacagcagaatggtcccgttctaatttagacacagaagttacaacagcaaaagaaagtcctgagatagaaccacttccatttactctggcccatgagcgttgtatctcagtagtccagaaacttgttctgtttcttctctccatggactttacatgtcatgcagatctcttattgtttgtttgtaaggttcttgcacgcattgcaaatgccacgaggccaactattcatctgtgtgagattgtgaacgaaccccagctggaaagactgctgttacttttggttggaactgacttcaatagaggagatatatcttggggtggtgcttgggctcagtattccttaacttgcatgctacaagatattttagcaggagaattactggctccagtagccgcagaagccatggaggaaggaacagtgggtgatgatgtaggtgcgacagctggtgactctgatgactcccttcaacagtcctcagttcagttgctggaaactatagatgaacctttgacacatgacataacaggtgcacctcctctgtcctctttggaaaaagataaagaaattgaccttgagttacttcaggatctaatggaagttgacattgatcctttagatattgatttggaaaaggaccctcttgcagccaaggtttttaagccaataagcagtacatggtatgattattggggtgctgattatgggacctacaattacaacccttacattggaggtctgggaattcctgtagcaaagccaccagcaaacacggagaagaacggatcacagacagttagcgtttcagtctctcaggccctggatgctcgcctagaagttggacttgaacagcaagcagaactgatgttgaaaatgatgtctactctggaggcagattccattttacaggcattaacaaatacatctcctacattatcacagtctcccactggaacagatgattcacttctagggggtttacaagcagcaaaccaaaccagccagcttattatacagttatcatctgtcccaatgttaaatgtttgtttcaacaaacttttttccatgcttcaagtccatcatgttcagttggagtcacttctccaattgtggctcacactgagcctgaattctagttcaactggaaacaaagaaaatggagcagacatatttttatataatgctaataggatacctgttatttcattaaatcaagcatcaataactagctttctcacagtgttagcttggtatcccaatactttgctccggacatggtgccttgtgcttcatagcctaacactcatgacaaacatgcagcttaattctggttccagcagtgccattggaactcaggagagtactgctcatttgttggtttcagatccaaacctaattcatgtattagtgaaatttctttctggcaccagtccacatggaacaaatcaacacagtccacaggttggtcctacagctacacaagctatgcaagaatttcttactcgattacaagtgcatctttcttcaacatgtcctcagatattcagtgaatttttgctcaagctaattcatatactttcaactgaaaggggtgctttccagacaggccaaggacctctcgatgcccaagtgaagctcttagaattcactctggagcagaattttgaagtcgtttcagttagtactatttctgccgtgatagaatcggttacatttttagtgcaccactatatcacttgctcagacaaagtaatgtcaagaagtggatcagatagctccgtgggtgctcgagcatgctttgggggactctttgccaatcttattcgtccgggtgatgcaaaagcagtttgtggcgaaatgacaagagatcaactcatgtttgatttgttaaaacttgttaacattttagtgcagctgcctctttcaggcaatagggaatacagtgcaagagtgtctgtgaccacaaatacaacagatagtgtttcagatgaagaaaaagtctcaggaggcaaagatggcaatggaagcagtaccagtgttcaaggatcgcctgcatatgttgctgacttagtcttagccaaccaacaaattatgagccagattttgtctgctctgggcctgtgtaatagcagtgccatggcaatgataattggagcaagtggattacatctcactaaacatgaaaactttcatggtgggttggatgccatatcagttggggatggattatttaccatactgacaacccttagtaaaaaagcttctacagtccacatgatgctgcagccaattttaacatacatggcctgtggatatatgggcagacaaggctctcttgctacttgccagttatctgagccattattgtggttcattttgagagtattggatactagtgatgccttgaaagcatttcatgatatgggtggtgttcagctcatatgcaataatatggttactagtacaagggctattgtgaacactgcaagaagtatggtatcaactattatgaaatttcttgactctggtccaaataaagctgttgacagcacattgaaaacaagaatactagcttctgagcctgacaatgctgaagggattcataactttgcacccctcggtacaatcacatctagcagtcctactgcccaaccagctgaagtgctattgcaggccacacctcctcacagaagagctcgctctgctgcttggtcctacatctttcttccagaggaggcttggtgtgaccttaccattcaccttcctgcagcagtgctgcttaaggagatacatatccagcctcatcttgcatctcttgcaacctgcccttcctcagtgtctgttgaagtaagtgcagatggggtaaatatgctacctttgtccactcctgttgtcacaagtggcctcacctacataaaaattcagcttgtaaaagccgaagtagcttctgctgtctgccttagactacatcgtccacgggatgccagcacattaggcctttcacaaattaaattattggggctcactgcttttggtaccacctcttctgcaacagttaataatccattccttccatctgaagatcaggtatccaaaacaagtattggatggttacggttattacatcattgccttactcacataagtgatctagaaggaatgatggcaagtgcagctgcacctactgctaatctgctgcagacttgtgcggccttattgatgtcaccttactgtggaatgcattcacccaacatcgaggttgtgcttgtaaagataggactgcagtctactagaattggcctgaagctcatagacattctcctgagaaattgtgcagcatcaggcagtgatcctacagatttgaatagtcctttactttttggaagactaaatggactctcttctgactctacgatagatattctttaccagcttggaacaactcaggatcctggtacaaaagacagaattcaggccttgttaaaatgggttagtgattctgcaagagtggctgctatgaagagaagtggcaggatgaactacatgtgtcctaactcctcaacagtagagtatggtcttctgatgccatctccttctcatttgcactgtgtagcagccattctgtggcatagttatgagctgcttgtagaatatgacttaccagcactcctggaccaagagctctttgagttactttttaattggtccatgtctcttccctgcaatatggttttgaagaaagctgttgacagtctactttgctcaatgtgtcacgtacacccaaactatttttctttgctcatgggctggatgggaattacccctcctccagtgcaatgtcatcatagactgtccatgacagatgatagcaaaaagcaggatcttagttcatctttaacagatgactctaaaaatgcacaagcacctctcgcattaactgaatcacatttggctacccttgcttcctcttctcaatctcctgaagctattaaacaattactagactcaggtttgccttctcttcttgtgaggagtctggctagtttctgctttagccacatttctagctcagaaagcattgcccagtcaatagatatttcccaggacaaactcaggcgccatcatgtcccacaacaatgtaataagatgcctatcacagccgacctagttgctcctattcttaggtttttgacagaagttggcaatagccatattatgaaagattggcttggtggttctgaagtcaatccactatggacagcacttctgtttttattgtgtcactctgggtccacttctggaagccataatttaggtgcacaacagaccagtgcaagatcagcttctctttcttcagctgctacaacaggactgactactcaacagcgcacagcaattgagaatgcaactgttgcgttctttctacagtgcatttcatgccatcctaataatcaaaagctgatggcacaggttctttgtgaactatttcagacatctcctcaaagagggaaccttccaacatctgggaacatttcagggtttatacgaagattatttttacagttgatgctggaagatgagaaagtgacaatgtttcttcagtctccatgtccactgtacaaaggtagaattaatgctactagccacgtcatccagcatccaatgtatggagcaggccacaaattccgtactcttcatttgccagtctcaacaacattatcagatgttcttgacagagtgtcagatactccaagtatcacagctaaattaattagtgaacaaaaagatgacaaagaaaagaaaaaccatgaagagaaagaaaaagttaaagcggaaaatggatttcaagacaattacagtgttgttgttgcctctgggctgaagtctcaatctaaacgtgctgtgtcagctacaccacctcgcccaccatccaggagggggaggacaatacctgataaaataggaagtacttcaggagcagaggctgccaacaaaataattactgtcccagtgtttcacctgtttcacaaactcttggcaggccagccattgccagctgaaatgacacttgcccagcttttaactctcctatatgaccgaaaacttcctcagggttaccgctcaatagatctgactgttaaattgggatcaagagttataacagaccccagtctatcaaaaacagattcttataaaagactacaccctgaaaaagatcatggagacttacttgctagctgtccagaagatgaggctctcactccaggtgatgaatgcatggatgggatactggatgaatctttgcttgaaacctgtccaattcagtcaccattacaagtttttgcaggaatgggtggactggctcttattgctgaaagactacccatgctatatccagaagtaattcaacaggtgagtgctccagttgtaacatctaccactcaggaaaagccgaaggatagcgatcagtttgaatgggtgaccattgaacagtcaggggagttagtttatgaagcaccagaaactgttgcggctgaacctccacctatcaagtcagcagtacagaccatgtctcccatacctgcccattctttggctgcttttggattatttcttcgtcttccgggctatgcggaagtgctactgaaagagagaaaacatgcccagtgccttcttcgattggtattgggagtgacagatgatggagaaggaagtcatattcttcaatctccatcagccaatgtgcttccaacccttcctttccacgtccttcgtagcttgtttagcactacacctttgacaactgatgatggtgtacttctaaggcggatggcattggaaattggagccttacacctcattcttgtctgtctctctgctttgagccaccattccccacgagttccaaactctagcgtgaatcaaactgagccacaggtgtcaagctctcataaccctacatcaacagaagaacaacagttatattgggccaaagggactggctttggaacaggctctacagcttctgggtgggatgtggaacaagccttaactaagcaaaggctggaagaggaacatgttacctgccttctgcaggttcttgccagttacataaatcccgtcagtagtgcggtaaatggagaagctcagtcatctcatgagactagagggcagaacagtaatgcccttccttctgtacttctcgagcttctcagtcagtcctgcctcatcccagccatgtcatcttatctacgaaatgattcagttctggacatggcaagacatgtgccactctatcgggcactgctggaattgcttcgggccattgcttcttgtgctgccatggtgcccctattgttgcccctttctacagagaacggtgaagaggaagaagaacagtcagaatgtcaaacttctgttggtacattgttagccaaaatgaagacctgtgttgatacctataccaaccgtttaagatctaaaagggaaaatgttaaaacaggagtaaaaccagatgcgtctgatcaagaaccagaaggacttactcttttggtaccagacatccaaaagactgctgagatagtttatgcagccaccaccagtttgcggcaagcaaatcagggtacaaaacttttcctattatgccacttttcatttgatgtaaagatgtttcatttacttactgaaacctgcctttgtgtttttgctttatgttaatgattttaaagcaagttcatttacctaaaaattttgttctctgttagattttgttctttatctgatttcaatcatgtatagtctaatttttaaacatttctactatatatgattgctaaatttagtaggctgagaacatacattataaatatttctt

SEQ ID NO: 362871 - DNA, 13535 bp, Homo sapiens
ccgggtcccgcctccctccctgcttctccccctctcccgtcagcctccctccgagtttggcccctccgccgggcgatcgacgttccgcgtgcgtgcgggcgcctgacttcacttccggctaacgcgctcggcttgccccctggccccggatggtgactggtggtggtgctgcacctcccgggactgtcactgagccgcttcccagtgtgattgtgctgagcgcaggccggaagatggcggctgcggctgcggcggcctcgggccccggctgctcctcggcggcgggggcgggggcggccggggtctcagagtggctggtgctgcgggacggctgcatgcactgcgacgccgacgggctgcacagcctgtcctaccaccctgcgctcaacgccatcctggccgtcactagccgcgggaccatcaaagtcatcgacggcacctcgggggccacactgcaggcctccgcgctcagtgctaaaccaggtggacaggtgaaatgtcagtatatctctgctgtggataaagttatatttgtggatgattatgcagtagggtgtaggaaggaccttaatggaatcttgttgttagacactgctctgcaaactccagtttcaaagcaggatgatgtggttcagcttgaattacccgttacagaggcacagcagctcttatcagcatgtttagaaaaggtagatatttctagtacagagggttatgatttgttcatcacacagctcaaagatggtttaaaaaatacatctcatgagactgcagcaaaccacaaagttgctaagtgggccacagttacatttcatcttcctcatcatgtgttgaagtccattgccagtgccattgtaaatgaactcaagaaaataaatcaaaatgttgctgccttacctgtggcgtcctcagtgatggacagattgtcttacctcttacctagtgcacgtccagaactcggagtggggccaggccgttctgtagacagatcactgatgtatagtgaagctaacagacgggagacatttacctcatggcctcatgtaggctataggtgggcacaaccagatcccatggctcaagctggattttatcatcagcctgcctcatctggagatgatagagccatgtgttttacttgtagtgtatgcctcgtttgttgggaacctactgatgaaccttggtctgaacacgaaagacattccccaaactgcccatttgtgaaaggtgagcacacacagaatgtgccattgtcagtcactcttgcaacaagtcctgcacagtttccttgtacggatggaactgacagaatatcttgctttgggtcggggagctgccctcattttctagctgctgcaactaaacgaggaaagatctgcatatgggatgtttccaaacttatgaaggtgcacttaaagtttgaaattaatgcctatgatccagcaattgtacaacagcttattctatcaggagacccaagctcaggagttgattcaaggagaccaactttggcgtggctggaggactcctctagttgctcagatataccaaaattggaaggagatagtgatgatttactggaggattcagacagtgaagagcattccagatcagattctgtgacagggcatacatcacagaaggaagccatggaagtaagccttgatataacagcactcagcattctccaacagccagaaaaacttcagtgggagattgttgcaaatgtgcttgaagatactgttaaggatcttgaagaacttggggcaaatccttgtttaacaaactctaagagtgaaaagacaaaggaaaagcaccaggagcaacacaacattccttttccatgtttattagctggaggtttattaacatataaatctcctgctacctcacccattagtagtaattctcacaggtcactggatggtttaagcagaactcagggtgaaagtatatcagaacaagggtcaactgacaatgaatcctgcactaattcagaactaaattctcctctggtaaggaggactttaccggttttgcttctttatagcatcaaggaatctgatgagaaagcaggaaagatcttttcacagatgaacaatattatgagtaaaagtttgcatgatgatggttttactgttccacagattattgaaatggagctggatagtcaggagcagttgttattgcaggatcctcctgtgacttacattcagcaatttgcagatgcagcagccaaccttacctctccggattctgagaagtggaactctgtgtttcccaagcctgggactttggttcagtgcttgaggctgccaaagtttgcagaggaggagaatctttgtatagactcaataactccttgtgctgacggaattcatttgttggtaggactgcggacatgccctgttgaatccttgagtgcaataaatcaagtagaggccttgaataatttaaataaattaaactctgcactatgtaatagacggaaaggtgagctggaatcaaatcttgctgtagtgaatggtgcaaatattagtgtaatccaacatgaatcaccagcagatgtacagactcctttaataattcagcctgagcagaggaatgttagtggtggatatttagtgctttataaaatgaattatgccactcggatagtgactttagaagaggagccaataaaaatacaacatatcaaagatccccaggacacaattacctcgctcattttgcttccacccgatatattggataatcgagaggatgactgtgaggaacctattgaggacatgcagttaacctcaaagaatggttttgagagagaaaaaacgtctgacatttctactcttggacacctggtaataaccactcagggaggatatgtaaaaatactagatctttcaaactttgaaattttggccaaagtggagcctcccaaaaaggagggcactgaggaacaggacacatttgtttctgtgatttactgttctggcacagacaggctgtgtgcatgcaccaaagagtctcaccctgtcaacaggctggggtgcagttacgcaatcttggctcactgcaacttctgcctcccaggttcaagtgattctccggccttagcctcctgagtagctgggaccacaggtggtgagcttcattttctccaaattggaggaacctgtgatgatattgatgaagctgatatactagtggatggatctctttctaaaggaatagaaccatcttcagaaggttccaaacctttatcaaatccttcaagtcctggcatttcaggagttgatttattggtggaccagccattcacccttgaaatcttgacatccctagtggagctaacccgctttgagactttgactccaaggttttcagcgactgttcctccatgctgggtagaagttcaacaagaacagcagcaaaggaggcatcctcaacatttgcatcagcaacaccatggtgatgctgctcagcatactcgaacttggaaactacagaccgacagcaacagctgggatgaacatgtatttgaattagtactacctaaagcttgtatggttggacatgtggacttcaaattcgttttgaactcaaacatcaccaatattccacagatacaagtgacactgctgaaaaataaagctccaggattagggaaagtcaatgctcttaacattgaagtggaacaaaatgggaaaccgtccctggttgatttgaatgaagaaatgcagcacatggatgtagaggaatcccagtgtcttagattatgtccatttttggaggatcataaagaagacattctatgtgggccagtatggcttgctagtggccttgatctatcagggcatgctggaatgttgacgttaacaagccccaaacttgttaaaggtatggcaggaggaaaatatcgttcgtttttaatccatgtcaaggcagtgaatgaaagaggaacagaagagatttgtaatggtggtatgcgtcctgtagtaaggcttccatccctaaaacaccagagtaacaagggttattcacttgcttcacttttggctaaagttgcagcaggcaagagtgcaacgatgtgccatgttacagttttcagaatttcatgagaagcttcttaatactctttgcagaaaaacagatgatggccagatcacagaacatgcccagagccttgtgttggatactctctgttggttagctggagttcattcaaatggacccggaagctcaaaggaaggaaatgagaacctactttcaaaaacacgaaaatttctgtcagacatcgtacgtgtttgcttctttgaggcaggacgaagtatagcccataagtgtgcccgatttctagccttgtgcattagtaatggcaaatgtgacccatgtcaaccagcatttggacctgttctgttgaaggctttacttgataatatgtcatttttacctgcagcaacaactggtggttctgtctattggtattttgtcttactgaattatgtgaaagatgaagatctggctggatgcagtacagcttgtgcatctttgcttactgcagtgtccagacagttacaggacaggctaacaccaatggaggctttacttcagacaagatatggattatatagctcaccatttgatccagtcctctttgatttggagatgagtggctcttcttgtaaaaatgtttataacagcagcattggtgtccagtcagatgaaattgatttatcagatgtcctttcaggaaatggaaaggtcagtagttgcacagctgctgagggtagtttcacatctctcactggacttttggaagttgaacctctgcactttacttgtgtgtcaactagtgatggaaccagaatagaaagggatgatgcaagtacgtttactgtgagttccttcggggttactcctgcagtaggtggactatcatctgggacagttggggaagcctcgacagccctgagttcagcagcccaggtagctttgcagtctctctctcatgcaatggcttcagccgagcaacagctacaggtgctgcaagagaaacagcagcagcttttgaagcttcagcaacagaaagcaaagctggaagccaagttacatcagacaacagctgcagcagctgcagcagcatcagcagtaggtcctgttcacaactctgtgccttccaacccagtggctgcccctggattcttcattcatccatctgatgttattccacccactccaaaaacaacacctctttttatgactccaccactcactccacccaatgaagcagtttccgttgtgattaatgccgaacttgcacagcttttcccaggctcagtcattgatcccccagcagtcaatcttgctgcacataacaaaaattccaacaagtccagaatgaatccacttggttctggtctagcccttgcaatttctcatgcttcacattttcttcaacctccgcctcaccagtccattattatagagcgaatgcattcaggagcaagaagatttgtgaccttggattttgggaggcctatattgttgactgatgtattgattcccacttgtggagacttggcctctttgtcaattgacatttggacattaggagaagaggtggatggaaggcggttggtagtggcaactgatataagcactcattcactaattcttcatgacttaataccacctcccgtgtgcagattcatgaagatcactgttattggacgttacgggagtacaaatgccagagccaaaatcccattaggattttactatggtcatacctacatcttgccttgggaaagtgaactgaagttaatgcatgatcctctaaagggagagggagaatctgcaaaccagccagaaattgaccagcatttagcaatgatggttgctttgcaggaggatatacagtgcaggtataacttggcttgtcatcgtctggaaacccttttgcaaagtattgatcttcctcctctaaacagtgctaacaatgcacagtactttttacgaaaaccagataaggcagttgaggaagacagtagggttttttctgcttatcaagattgtattcagctacagcttcaactaaatttggctcataatgcagtgcagaggctcaaagtggcgctaggtgcaagccggaagatgttgagtgaaacatcaaatccagaagatttaattcagacatcttccacagagcagttacgtactatcatcagatatttactggacactttgctcagcctgcttcatgcttctaatggacactctgttcctgcagttttgcagagcacatttcatgcccaggcctgtgaagagctctttaaacacttgtgcatcagtggaaccccaaagatacggttacatactggtcttcttcttgttcaactgtgtggtggtgaaaggtggtggggtcaatttctttctaatgtccttcaggaattgtacaattcggaacagcttctcatctttccacaggatagggtcttcatgttactttcctgcattggtcaaagatcacttagtaatagtggagtattagaaagcttacttaatctcttggataatttattgtcacctcttcagccacagttacccatgcataggaggacagaaggagtactagatattcccatgatcagttgggttgttatgctggtgtccaggttgctggattatgtggcaactgttgaagatgaagcagcagctgcaaagaaacctttgaatggtaaagacagggagaggtttctgacaggtaatcagtggagttttattaacaataatctacacactcagagcttaaatagatcttctaaaggcagcagtagccttgatagattatattccagaaaaatcagaaagcagcttgttcatcataaacagcaacttaacctactaaaagcaaagcagaaggcattggtagaacagatggaaaaagaaaaaatacaaagtaacaaaggatcatcatataaactcctggtagaacaagcaaaactaaagcaggccacttcaaagcactttaaggatttaattcgtttacgtcggacagcagaatggtcccgttctaatttagacacagaagttacaacagcaaaagaaagtcctgagatagaaccacttccatttactctggcccatgagcgttgtatctcagtagtccagaaacttgttctgtttcttctctccatggactttacatgtcatgcagatctcttattgtttgtttgtaaggttcttgcacgcattgcaaatgccacgaggccaactattcatctgtgtgagattgtgaacgaaccccagctggaaagactgctgttacttttggttggaactgacttcaatagaggagatatatcttggggtggtgcttgggctcagtattccttaacttgcatgctacaagatattttagcaggagaattactggctccagtagccgcagaagccatggaggaaggaacagtgggtgatgatgtaggtgcgacagctggtgactctgatgactcccttcaacagtcctcagttcagttgctggaaactatagatgaacctttgacacatgacataacaggtgcacctcctctgtcctctttggaaaaagataaagaaattgaccttgagttacttcaggatctaatggaagttgacattgatcctttagatattgatttggaaaaggaccctcttgcagccaaggtttttaagccaataagcagtacatggtatgattattggggtgctgattatgggacctacaattacaacccttacattggaggtctgggaattcctgtagcaaagccaccagcaaacacggagaagaacggatcacagacagttagcgtttcagtctctcaggccctggatgctcgcctagaagttggacttgaacagcaagcagaactgatgttgaaaatgatgtctactctggaggcagattccattttacaggcattaacaaatacatctcctacattatcacagtctcccactggaacagatgattcacttctagggggtttacaagcagcaaaccaaaccagccagcttattatacagttatcatctgtcccaatgttaaatgtttgtttcaacaaacttttttccatgcttcaagtccatcatgttcagttggagtcacttctccaattgtggctcacactgagcctgaattctagttcaactggaaacaaagaaaatggagcagacatatttttatataatgctaataggatacctgttatttcattaaatcaagcatcaataactagctttctcacagtgttagcttggtatcccaatactttgctccggacatggtgccttgtgcttcatagcctaacactcatgacaaacatgcagcttaattctggttccagcagtgccattggaactcaggagagtactgctcatttgttggtttcagatccaaacctaattcatgtattagtgaaatttctttctggcaccagtccacatggaacaaatcaacacagtccacaggttggtcctacagctacacaagctatgcaagaatttcttactcgattacaagtgcatctttcttcaacatgtcctcagatattcagtgaatttttgctcaagctaattcatatactttcaactgaaaggggtgctttccagacaggccaaggacctctcgatgcccaagtgaagctcttagaattcactctggagcagaattttgaagtcgtttcagttagtactatttctgccgtgatagaatcggttacatttttagtgcaccactatatcacttgctcagacaaagtaatgtcaagaagtggatcagatagctccgtgggtgctcgagcatgctttgggggactctttgccaatcttattcgtccgggtgatgcaaaagcagtttgtggcgaaatgacaagagatcaactcatgtttgatttgttaaaacttgttaacattttagtgcagctgcctctttcaggcaatagggaatacagtgcaagagtgtctgtgaccacaaatacaacagatagtgtttcagatgaagaaaaagtctcaggaggcaaagatggcaatggaagcagtaccagtgttcaaggatcgcctgcatatgttgctgacttagtcttagccaaccaacaaattatgagccagattttgtctgctctgggcctgtgtaatagcagtgccatggcaatgataattggagcaagtggattacatctcactaaacatgaaaactttcatggtgggttggatgccatatcagttggggatggattatttaccatactgacaacccttagtaaaaaagcttctacagtccacatgatgctgcagccaattttaacatacatggcctgtggatatatgggcagacaaggctctcttgctacttgccagttatctgagccattattgtggttcattttgagagtattggatactagtgatgccttgaaagcatttcatgatatgggtggtgttcagctcatatgcaataatatggttactagtacaagggctattgtgaacactgcaagaagtatggtatcaactattatgaaatttcttgactctggtccaaataaagctgttgacagcacattgaaaacaagaatactagcttctgagcctgacaatgctgaagggattcataactttgcacccctcggtacaatcacatctagcagtcctactgcccaaccagctgaagtgctattgcaggccacacctcctcacagaagagctcgctctgctgcttggtcctacatctttcttccagaggaggcttggtgtgaccttaccattcaccttcctgcagcagtgctgcttaaggagatacatatccagcctcatcttgcatctcttgcaacctgcccttcctcagtgtctgttgaagtaagtgcagatggggtaaatatgctacctttgtccactcctgttgtcacaagtggcctcacctacataaaaattcagcttgtaaaagccgaagtagcttctgctgtctgccttagactacatcgtccacgggatgccagcacattaggcctttcacaaattaaattattggggctcactgcttttggtaccacctcttctgcaacagttaataatccattccttccatctgaagatcaggtatccaaaacaagtattggatggttacggttattacatcattgccttactcacataagtgatctagaaggaatgatggcaagtgcagctgcacctactgctaatctgctgcagacttgtgcggccttattgatgtcaccttactgtggaatgcattcacccaacatcgaggttgtgcttgtaaagataggactgcagtctactagaattggcctgaagctcatagacattctcctgagaaattgtgcagcatcaggcagtgatcctacagatttgaatagtcctttactttttggaagactaaatggactctcttctgactctacgatagatattctttaccagcttggaacaactcaggatcctggtacaaaagacagaattcaggccttgttaaaatgggttagtgattctgcaagagtggctgctatgaagagaagtggcaggatgaactacatgtgtcctaactcctcaacagtagagtatggtcttctgatgccatctccttctcatttgcactgtgtagcagccattctgtggcatagttatgagctgcttgtagaatatgacttaccagcactcctggaccaagagctctttgagttactttttaattggtccatgtctcttccctgcaatatggttttgaagaaagctgttgacagtctactttgctcaatgtgtcacgtacacccaaactatttttctttgctcatgggctggatgggaattacccctcctccagtgcaatgtcatcatagactgtccatgacagatgatagcaaaaagcaggatcttagttcatctttaacagatgactctaaaaatgcacaagcacctctcgcattaactgaatcacatttggctacccttgcttcctcttctcaatctcctgaagctattaaacaattactagactcaggtttgccttctcttcttgtgaggagtctggctagtttctgctttagccacatttctagctcagaaagcattgcccagtcaatagatatttcccaggacaaactcaggcgccatcatgtcccacaacaatgtaataagatgcctatcacagccgacctagttgctcctattcttaggtttttgacagaagttggcaatagccatattatgaaagattggcttggtggttctgaagtcaatccactatggacagcacttctgtttttattgtgtcactctgggtccacttctggaagccataatttaggtgcacaacagaccagtgcaagatcagcttctctttcttcagctgctacaacaggactgactactcaacagcgcacagcaattgagaatgcaactgttgcgttctttctacagtgcatttcatgccatcctaataatcaaaagctgatggcacaggttctttgtgaactatttcagacatctcctcaaagagggaaccttccaacatctgggaacatttcagggtttatacgaagattatttttacagttgatgctggaagatgagaaagtgacaatgtttcttcagtctccatgtccactgtacaaaggtagaattaatgctactagccacgtcatccagcatccaatgtatggagcaggccacaaattccgtactcttcatttgccagtctcaacaacattatcagatgttcttgacagagtgtcagatactccaagtatcacagctaaattaattagtgaacaaaaagatgacaaagaaaagaaaaaccatgaagagaaagaaaaagttaaagcggaaaatggatttcaagacaattacagtgttgttgttgcctctgggctgaagtctcaatctaaacgtgctgtgtcagctacaccacctcgcccaccatccaggagggggaggacaatacctgataaaataggaagtacttcaggagcagaggctgccaacaaaataattactgtcccagtgtttcacctgtttcacaaactcttggcaggccagccattgccagctgaaatgacacttgcccagcttttaactctcctatatgaccgaaaacttcctcagggttaccgctcaatagatctgactgttaaattgggatcaagagttataacagaccccagtctatcaaaaacagattcttataaaagactacaccctgaaaaagatcatggagacttacttgctagctgtccagaagatgaggctctcactccaggtgatgaatgcatggatgggatactggatgaatctttgcttgaaacctgtccaattcagtcaccattacaagtttttgcaggaatgggtggactggctcttattgctgaaagactacccatgctatatccagaagtaattcaacaggtgagtgctccagttgtaacatctaccactcaggaaaagccgaaggatagcgatcagtttgaatgggtgaccattgaacagtcaggggagttagtttatgaagcaccagaaactgttgcggctgaacctccacctatcaagtcagcagtacagaccatgtctcccatacctgcccattctttggctgcttttggattatttcttcgtcttccgggctatgcggaagtgctactgaaagagagaaaacatgcccagtgccttcttcgattggtattgggagtgacagatgatggagaaggaagtcatattcttcaatctccatcagccaatgtgcttccaacccttcctttccacgtccttcgtagcttgtttagcactacacctttgacaactgatgatggtgtacttctaaggcggatggcattggaaattggagccttacacctcattcttgtctgtctctctgctttgagccaccattccccacgagttccaaactctagcgtgaatcaaactgagccacaggtgtcaagctctcataaccctacatcaacagaagaacaacagttatattgggccaaagggactggctttggaacaggctctacagcttctgggtgggatgtggaacaagccttaactaagcaaaggctggaagaggaacatgttacctgccttctgcaggttcttgccagttacataaatcccgtcagtagtgcggtaaatggagaagctcagtcatctcatgagactagagggcagaacagtaatgcccttccttctgtacttctcgagcttctcagtcagtcctgcctcatcccagccatgtcatcttatctacgaaatgattcaggtaaataatccctgtaaatgtgtctgtggatgaataattttgtttgcttattttatcattgtctaatagtaagtttcagttgaaatagttgatggatttatttcctaaaaagtattctggaaatatttagttggtttttggtgcccttaatttgatactttgtcatcacttaccatagaacacagaataataaaagtttcattattcctttgtctttatc

SEQ ID NO: 362872 - DNA, 9310 bp, Homo sapiens
ccgggtcccgcctccctccctgcttctccccctctcccgtcagcctccctccgagtttggcccctccgccgggcgatcgacgttccgcgtgcgtgcgggcgcctgacttcacttccggctaacgcgctcggcttgccccctggccccggatggtgactggtggtggtgctgcacctcccgggactgtcactgagccgcttcccagtgtgattgtgctgagcgcaggccggaagatggcggctgcggctgcggcggcctcgggccccggctgctcctcggcggcgggggcgggggcggccggggtctcagagtggctggtgctgcgggacggctgcatgcactgcgacgccgacgggctgcacagcctgtcctaccaccctgcgctcaacgccatcctggccgtcactagccgcgggaccatcaaagtcatcgacggcacctcgggggccacactgcaggcctccgcgctcagtgctaaaccaggtggacaggtgaaatgtcagtatatctctgctgtggataaagttatatttgtggatgattatgcagtagggtgtaggaaggaccttaatggaatcttgttgttagacactgctctgcaaactccagtttcaaagcaggatgatgtggttcagcttgaattacccgttacagaggcacagcagctcttatcagcatgtttagaaaaggtagatatttctagtacagagggttatgatttgttcatcacacagctcaaagatggtttaaaaaatacatctcatgagactgcagcaaaccacaaagttgctaagtgggccacagttacatttcatcttcctcatcatgtgttgaagtccattgccagtgccattgtaaatgaactcaagaaaataaatcaaaatgttgctgccttacctgtggcgtcctcagtgatggacagattgtcttacctcttacctagtgcacgtccagaactcggagtggggccaggccgttctgtagacagatcactgatgtatagtgaagctaacagacgggagacatttacctcatggcctcatgtaggctataggtgggcacaaccagatcccatggctcaagctggattttatcatcagcctgcctcatctggagatgatagagccatgtgttttacttgtagtgtatgcctcgtttgttgggaacctactgatgaaccttggtctgaacacgaaagacattccccaaactgcccatttgtgaaaggtgagcacacacagaatgtgccattgtcagtcactcttgcaacaagtcctgcacagtttccttgtacggatggaactgacagaatatcttgctttgggtcggggagctgccctcattttctagctgctgcaactaaacgaggaaagatctgcatatgggatgtttccaaacttatgaaggtgcacttaaagtttgaaattaatgcctatgatccagcaattgtacaacagcttattctatcaggagacccaagctcaggagttgattcaaggagaccaactttggcgtggctggaggactcctctagttgctcagatataccaaaattggaaggagatagtgatgatttactggaggattcagacagtgaagagcattccagatcagattctgtgacagggcatacatcacagaaggaagccatggaagtaagccttgatataacagcactcagcattctccaacagccagaaaaacttcagtgggagattgttgcaaatgtgcttgaagatactgttaaggatcttgaagaacttggggcaaatccttgtttaacaaactctaagagtgaaaagacaaaggaaaagcaccaggagcaacacaacattccttttccatgtttattagctggaggtttattaacatataaatctcctgctacctcacccattagtagtaattctcacaggtcactggatggtttaagcagaactcagggtgaaagtatatcagaacaagggtcaactgacaatgaatcctgcactaattcagaactaaattctcctctggtaaggaggactttaccggttttgcttctttatagcatcaaggaatctgatgagaaagcaggaaagatcttttcacagatgaacaatattatgagtaaaagtttgcatgatgatggttttactgttccacagattattgaaatggagctggatagtcaggagcagttgttattgcaggatcctcctgtgacttacattcagcaatttgcagatgcagcagccaaccttacctctccggattctgagaagtggaactctgtgtttcccaagcctgggactttggttcagtgcttgaggctgccaaagtttgcagaggaggagaatctttgtatagactcaataactccttgtgctgacggaattcatttgttggtaggactgcggacatgccctgttgaatccttgagtgcaataaatcaagtagaggccttgaataatttaaataaattaaactctgcactatgtaatagacggaaaggtgagctggaatcaaatcttgctgtagtgaatggtgcaaatattagtgtaatccaacatgaatcaccagcagatgtacagactcctttaataattcagcctgagcagaggaatgttagtggtggatatttagtgctttataaaatgaattatgccactcggatagtgactttagaagaggagccaataaaaatacaacatatcaaagatccccaggacacaattacctcgctcattttgcttccacccgatatattggataatcgagaggatgactgtgaggaacctattgaggacatgcagttaacctcaaagaatggttttgagagagaaaaaacgtctgacatttctactcttggacacctggtaataaccactcagggaggatatgtaaaaatactagatctttcaaactttgaaattttggccaaagtggagcctcccaaaaaggagggcactgaggaacaggacacatttgtttctgtgatttactgttctggcacagacaggctgtgtgcatgcaccaaagagtctcaccctgtcaacaggctggggtgcagttacgcaatcttggctcactgcaacttctgcctcccaggttcaagtgattctccggccttagcctcctgagtagctgggaccacaggtggtgagcttcattttctccaaattggaggaacctgtgatgatattgatgaagctgatatactagtggatggatctctttctaaaggaatagaaccatcttcagaaggttccaaacctttatcaaatccttcaagtcctggcatttcaggagttgatttattggtggaccagccattcacccttgaaatcttgacatccctagtggagctaacccgctttgagactttgactccaaggttttcagcgactgttcctccatgctgggtagaagttcaacaagaacagcagcaaaggaggcatcctcaacatttgcatcagcaacaccatggtgatgctgctcagcatactcgaacttggaaactacagaccgacagcaacagctgggatgaacatgtatttgaattagtactacctaaagcttgtatggttggacatgtggacttcaaattcgttttgaactcaaacatcaccaatattccacagatacaagtgacactgctgaaaaataaagctccaggattagggaaagtcaatgctcttaacattgaagtggaacaaaatgggaaaccgtccctggttgatttgaatgaagaaatgcagcacatggatgtagaggaatcccagtgtcttagattatgtccatttttggaggatcataaagaagacattctatgtgggccagtatggcttgctagtggccttgatctatcagggcatgctggaatgttgacgttaacaagccccaaacttgttaaaggtatggcaggaggaaaatatcgttcgtttttaatccatgtcaaggcagtgaatgaaagaggaacagaagagatttgtaatggtggtatgcgtcctgtagtaaggcttccatccctaaaacaccagagtaacaagggttattcacttgcttcacttttggctaaagttgcagcaggcaagagtgcaacgatgtgccatgttacagttttcagaatttcatgagaagcttcttaatactctttgcagaaaaacagatgatggccagatcacagaacatgcccagagccttgtgttggatactctctgttggttagctggagttcattcaaatggacccggaagctcaaaggaaggaaatgagaacctactttcaaaaacacgaaaatttctgtcagacatcgtacgtgtttgcttctttgaggcaggacgaagtatagcccataagtgtgcccgatttctagccttgtgcattagtaatggcaaatgtgacccatgtcaaccagcatttggacctgttctgttgaaggctttacttgataatatgtcatttttacctgcagcaacaactggtggttctgtctattggtattttgtcttactgaattatgtgaaagatgaagatctggctggatgcagtacagcttgtgcatctttgcttactgcagtgtccagacagttacaggacaggctaacaccaatggaggctttacttcagacaagatatggattatatagctcaccatttgatccagtcctctttgatttggagatgagtggctcttcttgtaaaaatgtttataacagcagcattggtgtccagtcagatgaaattgatttatcagatgtcctttcaggaaatggaaaggtcagtagttgcacagctgctgagggtagtttcacatctctcactggacttttggaagttgaacctctgcactttacttgtgtgtcaactagtgatggaaccagaatagaaagggatgatgcaagtacgtttactgtgagttccttcggggttactcctgcagtaggtggactatcatctgggacagttggggaagcctcgacagccctgagttcagcagcccaggtagctttgcagtctctctctcatgcaatggcttcagccgagcaacagctacaggtgctgcaagagaaacagcagcagcttttgaagcttcagcaacagaaagcaaagctggaagccaagttacatcagacaacagctgcagcagctgcagcagcatcagcagtaggtcctgttcacaactctgtgccttccaacccagtggctgcccctggattcttcattcatccatctgatgttattccacccactccaaaaacaacacctctttttatgactccaccactcactccacccaatgaagcagtttccgttgtgattaatgccgaacttgcacagcttttcccaggctcagtcattgatcccccagcagtcaatcttgctgcacataacaaaaattccaacaagtccagaatgaatccacttggttctggtctagcccttgcaatttctcatgcttcacattttcttcaacctccgcctcaccagtccattattatagagcgaatgcattcaggagcaagaagatttgtgaccttggattttgggaggcctatattgttgactgatgtattgattcccacttgtggagacttggcctctttgtcaattgacatttggacattaggagaagaggtggatggaaggcggttggtagtggcaactgatataagcactcattcactaattcttcatgacttaataccacctcccgtgtgcagattcatgaagatcactgttattggacgttacgggagtacaaatgccagagccaaaatcccattaggattttactatggtcatacctacatcttgccttgggaaagtgaactgaagttaatgcatgatcctctaaagggagagggagaatctgcaaaccagccagaaattgaccagcatttagcaatgatggttgctttgcaggaggatatacagtgcaggtataacttggcttgtcatcgtctggaaacccttttgcaaagtattgatcttcctcctctaaacagtgctaacaatgcacagtactttttacgaaaaccagataaggcagttgaggaagacagtagggttttttctgcttatcaagattgtattcagctacagcttcaactaaatttggctcataatgcagtgcagaggctcaaagtggcgctaggtgcaagccggaagatgttgagtgaaacatcaaatccagaagatttaattcagacatcttccacagagcagttacgtactatcatcagatatttactggacactttgctcagcctgcttcatgcttctaatggacactctgttcctgcagttttgcagagcacatttcatgcccaggcctgtgaagagctctttaaacacttgtgcatcagtggaaccccaaagatacggttacatactggtcttcttcttgttcaactgtgtggtggtgaaaggtggtggggtcaatttctttctaatgtccttcaggaattgtacaattcggaacagcttctcatctttccacaggatagggtcttcatgttactttcctgcattggtcaaagatcacttagtaatagtggagtattagaaagcttacttaatctcttggataatttattgtcacctcttcagccacagttacccatgcataggaggacagaaggagtactagatattcccatgatcagttgggttgttatgctggtgtccaggttgctggattatgtggcaactgttgaagatgaagcagcagctgcaaagaaacctttgaatggtaaagacagggagaggtttctgacaggtaatcagtggagttttattaacaataatctacacactcagagcttaaatagatcttctaaaggcagcagtagccttgatagattatattccagaaaaatcagaaagcagcttgttcatcataaacagcaacttaacctactaaaagcaaagcagaaggcattggtagaacagatggaaaaagaaaaaatacaaagtaacaaaggatcatcatataaactcctggtagaacaagcaaaactaaagcaggccacttcaaagcactttaaggatttaattcgtttacgtcggacagcagaatggtcccgttctaatttagacacagaagttacaacagcaaaagaaagtcctgagatagaaccacttccatttactctggcccatgagcgttgtatctcagtagtccagaaacttgttctgtttcttctctccatggactttacatgtcatgcagatctcttattgtttgtttgtaaggttcttgcacgcattgcaaatgccacgaggccaactattcatctgtgtgagattgtgaacgaaccccagctggaaagactgctgttacttttggttggaactgacttcaatagaggagatatatcttggggtggtgcttgggctcagtattccttaacttgcatgctacaagatattttagcaggagaattactggctccagtagccgcagaagccatggaggaaggaacagtgggtgatgatgtaggtgcgacagctggtgactctgatgactcccttcaacagtcctcagttcagttgctggaaactatagatgaacctttgacacatgacataacaggtgcacctcctctgtcctctttggaaaaagataaagaaattgaccttgagttacttcaggatctaatggaagttgacattgatcctttagatattgatttggaaaaggaccctcttgcagccaaggtttttaagccaataagcagtacatggtatgattattggggtgctgattatgggacctacaattacaacccttacattggaggtctgggaattcctgtagcaaagccaccagcaaacacggagaagaacggatcacagacagttagcgtttcagtctctcaggccctggatgctcgcctagaagttggacttgaacagcaagcagaactgatgttgaaaatgatgtctactctggaggcagattccattttacaggcattaacaaatacatctcctacattatcacagtctcccactggaacagatgattcacttctagggggtttacaagcagcaaaccaaaccagccagcttattatacagttatcatctgtcccaatgttaaatgtttgtttcaacaaacttttttccatgcttcaagtccatcatgttcagttggagtcacttctccaattgtggctcacactgagcctgaattctagttcaactggaaacaaagaaaatggagcagacatatttttatataatgctaataggatacctgttatttcattaaatcaagcatcaataactagctttctcacagtgttagcttggtatcccaatactttgctccggacatggtgccttgtgcttcatagcctaacactcatgacaaacatgcagcttaattctggttccagcagtgccattggaactcaggagagtactgctcatttgttggtttcagatccaaacctaattcatgtattagtgaaatttctttctggcaccagtccacatggaacaaatcaacacagtccacaggttggtcctacagctacacaagctatgcaagaatttcttactcgattacaagtgcatctttcttcaacatgtcctcagatattcagtgaatttttgctcaagctaattcatatactttcaactgaaaggggtgctttccagacaggccaaggacctctcgatgcccaagtgaagctcttagaattcactctggagcagaattttgaagtcgtttcagttagtactatttctgccgtgatagaatcggttacatttttagtgcaccactatatcacttgctcagacaaagtaatgtcaagaagtggatcagatagctccgtgggtgctcgagcatgctttgggggactctttgccaatcttattcgtccgggtgatgcaaaagcagtttgtggcgaaatgacaagagatcaactcatgtttgatttgttaaaacttgttaacattttagtgcagctgcctctttcaggcaatagggaatacagtgcaagagtgtctgtgaccacaaatacaacagatagtgtttcagatgaagaaaaagtctcaggaggcaaagatggcaatggaagcagtaccagtgttcaaggatcgcctgcatatgttgctgacttagtcttagccaaccaacaaattatgagccagattttgtctgctctgggcctgtgtaatagcagtgccatggcaatgataattggtatgtattgagaatattaatcttaccattgtctctgatactataactggtttttttttaagcaatatatggattcattttctttttactttatagtgtaaaactgct

SEQ ID NO: 362873 - DNA, 7396 bp, Homo sapiens
ccgggtcccgcctccctccctgcttctccccctctcccgtcagcctccctccgagtttggcccctccgccgggcgatcgacgttccgcgtgcgtgcgggcgcctgacttcacttccggctaacgcgctcggcttgccccctggccccggatggtgactggtggtggtgctgcacctcccgggactgtcactgagccgcttcccagtgtgattgtgctgagcgcaggccggaagatggcggctgcggctgcggcggcctcgggccccggctgctcctcggcggcgggggcgggggcggccggggtctcagagtggctggtgctgcgggacggctgcatgcactgcgacgccgacgggctgcacagcctgtcctaccaccctgcgctcaacgccatcctggccgtcactagccgcgggaccatcaaagtcatcgacggcacctcgggggccacactgcaggcctccgcgctcagtgctaaaccaggtggacaggtgaaatgtcagtatatctctgctgtggataaagttatatttgtggatgattatgcagtagggtgtaggaaggaccttaatggaatcttgttgttagacactgctctgcaaactccagtttcaaagcaggatgatgtggttcagcttgaattacccgttacagaggcacagcagctcttatcagcatgtttagaaaaggtagatatttctagtacagagggttatgatttgttcatcacacagctcaaagatggtttaaaaaatacatctcatgagactgcagcaaaccacaaagttgctaagtgggccacagttacatttcatcttcctcatcatgtgttgaagtccattgccagtgccattgtaaatgaactcaagaaaataaatcaaaatgttgctgccttacctgtggcgtcctcagtgatggacagattgtcttacctcttacctagtgcacgtccagaactcggagtggggccaggccgttctgtagacagatcactgatgtatagtgaagctaacagacgggagacatttacctcatggcctcatgtaggctataggtgggcacaaccagatcccatggctcaagctggattttatcatcagcctgcctcatctggagatgatagagccatgtgttttacttgtagtgtatgcctcgtttgttgggaacctactgatgaaccttggtctgaacacgaaagacattccccaaactgcccatttgtgaaaggtgagcacacacagaatgtgccattgtcagtcactcttgcaacaagtcctgcacagtttccttgtacggatggaactgacagaatatcttgctttgggtcggggagctgccctcattttctagctgctgcaactaaacgaggaaagatctgcatatgggatgtttccaaacttatgaaggtgcacttaaagtttgaaattaatgcctatgatccagcaattgtacaacagcttattctatcaggagacccaagctcaggagttgattcaaggagaccaactttggcgtggctggaggactcctctagttgctcagatataccaaaattggaaggagatagtgatgatttactggaggattcagacagtgaagagcattccagatcagattctgtgacagggcatacatcacagaaggaagccatggaagtaagccttgatataacagcactcagcattctccaacagccagaaaaacttcagtgggagattgttgcaaatgtgcttgaagatactgttaaggatcttgaagaacttggggcaaatccttgtttaacaaactctaagagtgaaaagacaaaggaaaagcaccaggagcaacacaacattccttttccatgtttattagctggaggtttattaacatataaatctcctgctacctcacccattagtagtaattctcacaggtcactggatggtttaagcagaactcagggtgaaagtatatcagaacaagggtcaactgacaatgaatcctgcactaattcagaactaaattctcctctggtaaggaggactttaccggttttgcttctttatagcatcaaggaatctgatgagaaagcaggaaagatcttttcacagatgaacaatattatgagtaaaagtttgcatgatgatggttttactgttccacagattattgaaatggagctggatagtcaggagcagttgttattgcaggatcctcctgtgacttacattcagcaatttgcagatgcagcagccaaccttacctctccggattctgagaagtggaactctgtgtttcccaagcctgggactttggttcagtgcttgaggctgccaaagtttgcagaggaggagaatctttgtatagactcaataactccttgtgctgacggaattcatttgttggtaggactgcggacatgccctgttgaatccttgagtgcaataaatcaagtagaggccttgaataatttaaataaattaaactctgcactatgtaatagacggaaaggtgagctggaatcaaatcttgctgtagtgaatggtgcaaatattagtgtaatccaacatgaatcaccagcagatgtacagactcctttaataattcagcctgagcagaggaatgttagtggtggatatttagtgctttataaaatgaattatgccactcggatagtgactttagaagaggagccaataaaaatacaacatatcaaagatccccaggacacaattacctcgctcattttgcttccacccgatatattggataatcgagaggatgactgtgaggaacctattgaggacatgcagttaacctcaaagaatggttttgagagagaaaaaacgtctgacatttctactcttggacacctggtaataaccactcagggaggatatgtaaaaatactagatctttcaaactttgaaattttggccaaagtggagcctcccaaaaaggagggcactgaggaacaggacacatttgtttctgtgatttactgttctggcacagacaggctgtgtgcatgcaccaaagagtctcaccctgtcaacaggctggggtgcagttacgcaatcttggctcactgcaacttctgcctcccaggttcaagtgattctccggccttagcctcctgagtagctgggaccacaggtggtgagcttcattttctccaaattggaggaacctgtgatgatattgatgaagctgatatactagtggatggatctctttctaaaggaatagaaccatcttcagaaggttccaaacctttatcaaatccttcaagtcctggcatttcaggagttgatttattggtggaccagccattcacccttgaaatcttgacatccctagtggagctaacccgctttgagactttgactccaaggttttcagcgactgttcctccatgctgggtagaagttcaacaagaacagcagcaaaggaggcatcctcaacatttgcatcagcaacaccatggtgatgctgctcagcatactcgaacttggaaactacagaccgacagcaacagctgggatgaacatgtatttgaattagtactacctaaagcttgtatggttggacatgtggacttcaaattcgttttgaactcaaacatcaccaatattccacagatacaagtgacactgctgaaaaataaagctccaggattagggaaagtcaatgctcttaacattgaagtggaacaaaatgggaaaccgtccctggttgatttgaatgaagaaatgcagcacatggatgtagaggaatcccagtgtcttagattatgtccatttttggaggatcataaagaagacattctatgtgggccagtatggcttgctagtggccttgatctatcagggcatgctggaatgttgacgttaacaagccccaaacttgttaaaggtatggcaggaggaaaatatcgttcgtttttaatccatgtcaaggcagtgaatgaaagaggaacagaagagatttgtaatggtggtatgcgtcctgtagtaaggcttccatccctaaaacaccagagtaacaagggttattcacttgcttcacttttggctaaagttgcagcaggcaagagtgcaacgatgtgccatgttacagttttcagaatttcatgagaagcttcttaatactctttgcagaaaaacagatgatggccagatcacagaacatgcccagagccttgtgttggatactctctgttggttagctggagttcattcaaatggacccggaagctcaaaggaaggaaatgagaacctactttcaaaaacacgaaaatttctgtcagacatcgtacgtgtttgcttctttgaggcaggacgaagtatagcccataagtgtgcccgatttctagccttgtgcattagtaatggcaaatgtgacccatgtcaaccagcatttggacctgttctgttgaaggctttacttgataatatgtcatttttacctgcagcaacaactggtggttctgtctattggtattttgtcttactgaattatgtgaaagatgaagatctggctggatgcagtacagcttgtgcatctttgcttactgcagtgtccagacagttacaggacaggctaacaccaatggaggctttacttcagacaagatatggattatatagctcaccatttgatccagtcctctttgatttggagatgagtggctcttcttgtaaaaatgtttataacagcagcattggtgtccagtcagatgaaattgatttatcagatgtcctttcaggaaatggaaaggtcagtagttgcacagctgctgagggtagtttcacatctctcactggacttttggaagttgaacctctgcactttacttgtgtgtcaactagtgatggaaccagaatagaaagggatgatgcaagtacgtttactgtgagttccttcggggttactcctgcagtaggtggactatcatctgggacagttggggaagcctcgacagccctgagttcagcagcccaggtagctttgcagtctctctctcatgcaatggcttcagccgagcaacagctacaggtgctgcaagagaaacagcagcagcttttgaagcttcagcaacagaaagcaaagctggaagccaagttacatcagacaacagctgcagcagctgcagcagcatcagcagtaggtcctgttcacaactctgtgccttccaacccagtggctgcccctggattcttcattcatccatctgatgttattccacccactccaaaaacaacacctctttttatgactccaccactcactccacccaatgaagcagtttccgttgtgattaatgccgaacttgcacagcttttcccaggctcagtcattgatcccccagcagtcaatcttgctgcacataacaaaaattccaacaagtccagaatgaatccacttggttctggtctagcccttgcaatttctcatgcttcacattttcttcaacctccgcctcaccagtccattattatagagcgaatgcattcaggagcaagaagatttgtgaccttggattttgggaggcctatattgttgactgatgtattgattcccacttgtggagacttggcctctttgtcaattgacatttggacattaggagaagaggtggatggaaggcggttggtagtggcaactgatataagcactcattcactaattcttcatgacttaataccacctcccgtgtgcagattcatgaagatcactgttattggacgttacgggagtacaaatgccagagccaaaatcccattaggattttactatggtcatacctacatcttgccttgggaaagtgaactgaagttaatgcatgatcctctaaagggagagggagaatctgcaaaccagccagaaattgaccagcatttagcaatgatggttgctttgcaggaggatatacagtgcaggtataacttggcttgtcatcgtctggaaacccttttgcaaagtattgatcttcctcctctaaacagtgctaacaatgcacagtactttttacgaaaaccagataaggcagttgaggaagacagtagggttttttctgcttatcaagattgtattcagctacagcttcaactaaatttggctcataatgcagtgcagaggctcaaagtggcgctaggtgcaagccggaagatgttgagtgaaacatcaaatccagaagatttaattcagacatcttccacagagcagttacgtactatcatcagatatttactggacactttgctcagcctgcttcatgcttctaatggacactctgttcctgcagttttgcagagcacatttcatgcccaggcctgtgaagagctctttaaacacttgtgcatcagtggaaccccaaagatacggttacatactggtcttcttcttgttcaactgtgtggtggtgaaaggtggtggggtcaatttctttctaatgtccttcaggaattgtacaattcggaacagcttctcatctttccacaggatagggtcttcatgttactttcctgcattggtcaaagatcacttagtaatagtggagtattagaaagcttacttaatctcttggataatttattgtcacctcttcagccacagttacccatgcataggaggacagaaggagtactagatattcccatgatcagttgggttgttatgctggtgtccaggttgctggattatgtggcaactgttgaagatgaagcagcagctgcaaagaaacctttgaatggtaaagacagggagaggtttctgacaggtaatcagtggagttttattaacaataatctacacactcagagcttaaatagatcttctaaaggcagcagtagccttgatagattatattccagaaaaatcagaaagcagcttgttcatcataaacagcaacttaacctactaaaagcaaagcagaaggcattggtagaacagatggaaaaagaaaaaatacaaagtaacaaaggatcatcatataaactcctggtagaacaagcaaaactaaagcaggccacttcaaagcactttaaggatttaattcgtttacgtcggacagcagaatggtcccgttctaatttagacacagaagttacaacagcaaaagaaagtcctgagatagaaccacttccatttactctggcccatgagcgttgtatctcagtagtccagaaacttgttctgtttcttctctccatggactttacatgtcatgcagatctcttattgtttgtttgtaaggtatgtaaactataagtgtagacttacagggttggccgggcgcagtggctcatgcctgtaatcccagcactttgggagactgaggtgggtggattatctgagtctaggagttccagactagtgtgggcaatgtggcaaaaccccgtctctacaaaaa

SEQ ID NO: 362874 - DNA, 4198 bp, Homo sapiens
ccgggtcccgcctccctccctgcttctccccctctcccgtcagcctccctccgagtttggcccctccgccgggcgatcgacgttccgcgtgcgtgcgggcgcctgacttcacttccggctaacgcgctcggcttgccccctggccccggatggtgactggtggtggtgctgcacctcccgggactgtcactgagccgcttcccagtgtgattgtgctgagcgcaggccggaagatggcggctgcggctgcggcggcctcgggccccggctgctcctcggcggcgggggcgggggcggccggggtctcagagtggctggtgctgcgggacggctgcatgcactgcgacgccgacgggctgcacagcctgtcctaccaccctgcgctcaacgccatcctggccgtcactagccgcgggaccatcaaagtcatcgacggcacctcgggggccacactgcaggcctccgcgctcagtgctaaaccaggtggacaggtgaaatgtcagtatatctctgctgtggataaagttatatttgtggatgattatgcagtagggtgtaggaaggaccttaatggaatcttgttgttagacactgctctgcaaactccagtttcaaagcaggatgatgtggttcagcttgaattacccgttacagaggcacagcagctcttatcagcatgtttagaaaaggtagatatttctagtacagagggttatgatttgttcatcacacagctcaaagatggtttaaaaaatacatctcatgagactgcagcaaaccacaaagttgctaagtgggccacagttacatttcatcttcctcatcatgtgttgaagtccattgccagtgccattgtaaatgaactcaagaaaataaatcaaaatgttgctgccttacctgtggcgtcctcagtgatggacagattgtcttacctcttacctagtgcacgtccagaactcggagtggggccaggccgttctgtagacagatcactgatgtatagtgaagctaacagacgggagacatttacctcatggcctcatgtaggctataggtgggcacaaccagatcccatggctcaagctggattttatcatcagcctgcctcatctggagatgatagagccatgtgttttacttgtagtgtatgcctcgtttgttgggaacctactgatgaaccttggtctgaacacgaaagacattccccaaactgcccatttgtgaaaggtgagcacacacagaatgtgccattgtcagtcactcttgcaacaagtcctgcacagtttccttgtacggatggaactgacagaatatcttgctttgggtcggggagctgccctcattttctagctgctgcaactaaacgaggaaagatctgcatatgggatgtttccaaacttatgaaggtgcacttaaagtttgaaattaatgcctatgatccagcaattgtacaacagcttattctatcaggagacccaagctcaggagttgattcaaggagaccaactttggcgtggctggaggactcctctagttgctcagatataccaaaattggaaggagatagtgatgatttactggaggattcagacagtgaagagcattccagatcagattctgtgacagggcatacatcacagaaggaagccatggaagtaagccttgatataacagcactcagcattctccaacagccagaaaaacttcagtgggagattgttgcaaatgtgcttgaagatactgttaaggatcttgaagaacttggggcaaatccttgtttaacaaactctaagagtgaaaagacaaaggaaaagcaccaggagcaacacaacattccttttccatgtttattagctggaggtttattaacatataaatctcctgctacctcacccattagtagtaattctcacaggtcactggatggtttaagcagaactcagggtgaaagtatatcagaacaagggtcaactgacaatgaatcctgcactaattcagaactaaattctcctctggtaaggaggactttaccggttttgcttctttatagcatcaaggaatctgatgagaaagcaggaaagatcttttcacagatgaacaatattatgagtaaaagtttgcatgatgatggttttactgttccacagattattgaaatggagctggatagtcaggagcagttgttattgcaggatcctcctgtgacttacattcagcaatttgcagatgcagcagccaaccttacctctccggattctgagaagtggaactctgtgtttcccaagcctgggactttggttcagtgcttgaggctgccaaagtttgcagaggaggagaatctttgtatagactcaataactccttgtgctgacggaattcatttgttggtaggactgcggacatgccctgttgaatccttgagtgcaataaatcaagtagaggccttgaataatttaaataaattaaactctgcactatgtaatagacggaaaggtgagctggaatcaaatcttgctgtagtgaatggtgcaaatattagtgtaatccaacatgaatcaccagcagatgtacagactcctttaataattcagcctgagcagaggaatgttagtggtggatatttagtgctttataaaatgaattatgccactcggatagtgactttagaagaggagccaataaaaatacaacatatcaaagatccccaggacacaattacctcgctcattttgcttccacccgatatattggataatcgagaggatgactgtgaggaacctattgaggacatgcagttaacctcaaagaatggttttgagagagaaaaaacgtctgacatttctactcttggacacctggtaataaccactcagggaggatatgtaaaaatactagatctttcaaactttgaaattttggccaaagtggagcctcccaaaaaggagggcactgaggaacaggacacatttgtttctgtgatttactgttctggcacagacaggctgtgtgcatgcaccaaagagtctcaccctgtcaacaggctggggtgcagttacgcaatcttggctcactgcaacttctgcctcccaggttcaagtgattctccggccttagcctcctgagtagctgggaccacaggtggtgagcttcattttctccaaattggaggaacctgtgatgatattgatgaagctgatatactagtggatggatctctttctaaaggaatagaaccatcttcagaaggttccaaacctttatcaaatccttcaagtcctggcatttcaggagttgatttattggtggaccagccattcacccttgaaatcttgacatccctagtggagctaacccgctttgagactttgactccaaggttttcagcgactgttcctccatgctgggtagaagttcaacaagaacagcagcaaaggaggcatcctcaacatttgcatcagcaacaccatggtgatgctgctcagcatactcgaacttggaaactacagaccgacagcaacagctgggatgaacatgtatttgaattagtactacctaaagcttgtatggttggacatgtggacttcaaattcgttttgaactcaaacatcaccaatattccacagatacaagtgacactgctgaaaaataaagctccaggattagggaaagtcaatggtaagaatgtatcaaaatttatctttgaagattttattttgtggttgatttctgaaaactaattttcaccttggctaagtttcgtgtccctttctgtcccttgttgccatttgcctgctttactttttgtgattttatttaaaaaagtaattcagagaacatttcagaacttttcagtaacccagtaatgttcagaattgcataaacttgaatcatataattatacttttttggaagtgagattagttcctttgtaaattagtttgacttttagcattactagctttatgtatttcttttcctaggagaagacttaattgtgaatagaactgttatggaagttacttttaaggttattagtgaagccagcctttcatgtaatgctaaaaatacactcatttttatctttcttacaagttcagaatttgttgcattgagttattaaagtagattatacacatttagcatggttagaaactagatgttactactgagtgttttctccttaataagttagtttaag

SEQ ID NO: 362875 - DNA, 777 bp, Homo sapiens
cttggtgcaggcatctggagagggctgcctcccccaggcctcccgcagtgcatgtccgtctgctctggggagggaattggctgatatcccaatctgtctaggggacaccatcacctggggcatcagagttctcatgcccagctggtgctgtgcctggggactagaagggctggtgctgcgtggggtcaagaggtttacctgataaaccggtaagggatgccctcttcccccagtagacttgggaggtgcctcactcccagggtgcctccgtcactctgtcagggatgctgttgtgcaggcttcagtcagcaggctctcatcggggcagcctctcctttgggcagaggctgataggaccaaagaggtttctagaggacttgtggctggaccaagcctctgtcctgtccctggaggaacccaggcctggggtgttgtggtccccagctgagtggagactgtgcctgtgctgagcttgggtagaggaggacaagaactaggccaggcgcggtggctcacacctgtaatcccagcactttgggaagccgaggagggtggatcatgaggtcaggagatcgagaccagtctggccaactttgagaaaccctgtctccattaaaaacacaaaaaaattagctgggcatggtggcacgcccctgtagtcacagctactcaggaggctgaggcaggagaatcacttgaacccaggaggcagaggttgtagtgagccaagatcgtgccacttcactccagccaggtgacagagcgagactctgtctc

SEQ ID NO: 362876 - DNA, 4233 bp, Homo sapiens
attcgagaatgggacatggaatgaggcgacggccccagcaagccccagcagccccagccccagccccaggcccagcagcagcagcagcagcccctgctctcccgccgcccggagaggctctgcagccatgaagccaaccgtcccgaggcaccgccggtaagcagggagcctccgcggagctcccgccgccgctcccccttggcgccaaaggcacccggtcccggagcagccacgcgcggcccgtgagcctcgccaccagcgggggctcagaggaggaggacaaagacggcggggtgctgttccacgtcaacaagagcggcttccccatcgacagccacacctgggagcgcatgtggatgcacgtggccaaggtgcaccctaaggggggagaaatggtgggcgccatcaggaacgccgccttcttggcaaagccttcaataccccaggtcccaaactacaggctgtcgatgacgatcccagactggctccaggcgatccagaattacatgaagaccctacaatataatcacacagggacccagttctttgaaattaggaaaatgagaccgctgagtgggttaatggaaacagcaaaagaaatgacccgagagtccttgcctatcaaatgccttgaagctgtcatcctgggcatctacttaaccaatgggcagccttccattgagcggttccccatcagctttaaaacctacttctcaggaaactactttcaccacgttgtgctggggatttactgcaatggccgctatggctcattgggcatgagccgcagggctgagctgatggacaagccattgacttttcggactctgagtgacctcatctttgactttgaggactcttacaagaaatacctgcacacagtcaagaaggtcaagattgggctgtacgtcccccatgagcctcatagcttccagcccattgagtggaagcagctggtcctcaacgtctcaaagatgctgagggctgacataaggaaggagctggagaaatatgccagggacatgagaatgaagatcctgaaacctgcaagtgcccactctccgacccaagtgagaagccggggaaaatccctgtcccccagaaggagacaggcaagccccccgaggaggctcggccggcgagagaagtcgcctgcactgcctgaaaagaaggtggctgatctgagcactctgaatgaagtgggctatcaaatccgaatttagccaagccataccggccagcaagagggtttctgtggtgcttctctctgcactttacccagcatcttcaggaggaactgcaactatttattaagaacttgtgaattttatttttaaggattcacctggaaatagaatctgagtgggtggtaaccattagctttaaaaaattcactaaaaggcaccatgaaaaggctgaagtaataagccccactggggttggactatgtccctcactcaagatcttaaggataaccgtaactgaagttttatatttttccatttacctactttcttttacttgctttgaacattatgcctcaccaatagtaaatgttcatgaaataatctcttgaacttttggtatagtaaggtaactctaacagtattactgtctttttcagcaataacagaaagcaaaaatgggtgggttttttttaagcagttattacctcagcattttgacatcagatatgcaaacttaatggcgttttgtttttttatattctatttgtattctttccccagtatttcccatggggatctccacaagtttggagttttttcctggtgcacacacgtgaggagatttaaggtactatatgcaagtgttttactaaaaagcactgaaattcttctggcaatacaagaaccattttcaggatcttggagttacttccttcttaatctttcttaaagcattcactgatgtttttgttttttcaaaatgaaacaaaaatatcacattgagaagctagtctatgttctgtcactaacatttaaactttgcagactctaacaaaaagcacaagaggtcacgtactattatacaaatttagcggtactggatttacctctgacattaacacactcaggcagagaccaggagtgatcagcaggtcttcagaaccaaaaaacctttctgttcacatttcatctgatttttaaactgaggcaggctttgattcttctgaaggatgccaagaatcaaactaagggaggactcactgttaaagatgtgttctgatgtcttatattaagaccaaatgtgacatgatgtgattatcttccagtactttgcttttaggtaccatttcatgacattttaggaatgagtattggaaaatataaagaattagaaaagcagcactttttttttaatggaaaagtcttcggtccagtgttacaccttatagtgtaattcagtccctaagcacagaatgaatgtctggcctgcatatggtagttacagtgtaacctctggctgcagaccacacaggacaaccctaacagcctagtcttgtatggtgtaaatatcaagagtacagcttcaatttcatttgctttatcttagcaacaatgccaactcaggagagcagacggccgatttcagtgaagtctggtagtcaacagatgttatttcagtctcagtgcatctcctctggctttctttgactgaaggtgtttataggaaggaagttaaaaaaaaaaaaagctcattgagattctttaccaattctttacaagatttctgggggtgacagggaaagcaaaaggacttcaaagcaaaagggtgcacaagagcttacttcaccctgaaaatcagtattattaatgaaaagtactgttttcttaaagaagtcgaatgtcctttagatgaacaagaccaagtatacatctccattagattaaaatgtagcacagggttaaaaattatcagtttaatctctttaagaacagtattatcagagtttaaaatgagttagctctgtttatctacacacagcaaacccattcgcagcctcttggccacatgtattcagatgtttgaaatagtgaatcatttcattttcattctaaaacaatactgacttagccatataccttctgtttgtcaatctgaaacttgcttacatctaataagtagacctcttataacactgcaaccattctaagagttggaatttatttttgccaagtattaagtactgttacatctaaaatacagaatgtcaaatggttgcatagcttgtttcccacaacaaggaggaaaagaacaggaatacaaactctgtaatatgctgataaagaagccttagaactgccaactggcttgatggttcaattagtaagctaatttctcccacacccgctccttgatttttagactaattttcccaaagcaaggtttagtcacacaaacttgaaagtacatttaaaatgttcttagttgtcatcctacttttattgcctatggaatatgctaatttctaaaaaaaatacgggagaggcaccaaacccctaaattctagtgcaataatttaaaaaacaaaaaacaaaacaaaacaaaaaacatgttatatgcacccccctcccaaagctgattttaagactggctagaattcaaaatataaaaaataaaactatgaagtgatttgaaatcggttttaaaaagttgttagtgcaagagaaattttatgtttaagccatcatggcaatatatgcaaagtttaaatgaatgacagaaatcttgattttagactgtatgttgtgctgttttgagtacactttatttcggaaagtgatatttagtattttctatacactctgaaatcatgagcatttcactttttctaagtcaattatttcataaggattttattaatagatattggtaaatagaactttggaaatcttaattcagaattcttactatacctgagtcttttgtaagctatagttttatgtacaaccttgtacagtttttttgacatacaattcagaactttgtttattctcttggactttgttctggccaatacattttttttaaatctttaagaagaactgtgattgttttagtgggtatttttctaattaaatgaaaacttgtataatggtattttagagaatgccagtaagtgcatgtttcaagttaatgtttttctcatcacttgtatgtttctaacacagcatgggactttaataaaaccatcctggaaacttaaagatt

SEQ ID NO: 362877 - DNA, 434 bp, Homo sapiens
atataatcacacagggacccagttctttgaaattaggaaaatgagaccgctgagtgggtaagtggtgcatgatctatgggccagatgacctctctcctacattcgagctgccagcttcctctcccaacctctattcccgtagcccatggctcaggtatcctagtctgtaaggggtggaggcggagggtgccccagggccaggttggaggtgggactgaggactgagcaactctgacagtggagctcagtggtgaattctagcttccagggtggaggaggcttgtaaactctgcctctcgaggcttcatttatttgttctattgtaatgcccccgtgctggggcattgggagggtgctatggagtactggcactaactccaggaattaactcttgtgctttggtgccttcctgcaaggtgacttctcccttttcc

SEQ ID NO: 362878 - DNA, 4282 bp, Homo sapiens
attcgagaatgggacatggaatgaggcgacggccccagcaagccccagcagccccagccccagccccaggcccagcagcagcagcagcagcccctgctctcccgccgcccggagaggctctgcagccatgaagccaaccgtcccgaggcaccgccggtaagcagggagcctccgcggagctcccgccgccgctcccccttggcgccaaaggcacccggtcccggagcagccacgcgcggcccgtgagcctcgccaccagcgggggctcagaggaggaggacaaagacggcggggtgctgttccacgtcaacaagagcggcttccccatcgacagccacacctgggagcgcatgtggatgcacgtggccaaggtgcaccctaaggggggagaaatggtgggcgccatcaggaacgccgccttcttggcaaagccttcaataccccaggtcccaaactacaggctgtcgatgacgatcccagactggctccaggcgatccagaattacatgaagaccctacagtatccttccaaccaaggtctgagcacacccagccaggggacaggcatggtgatcgcaagcctggtggcaaatctgtccccagctggtcatcaaaagctctctaaggttaatggaaacagcaaaagaaatgacccgagagtccttgcctatcaaatgccttgaagctgtcatcctgggcatctacttaaccaatgggcagccttccattgagcggttccccatcagctttaaaacctacttctcaggaaactactttcaccacgttgtgctggggatttactgcaatggccgctatggctcattgggcatgagccgcagggctgagctgatggacaagccattgacttttcggactctgagtgacctcatctttgactttgaggactcttacaagaaatacctgcacacagtcaagaaggtcaagattgggctgtacgtcccccatgagcctcatagcttccagcccattgagtggaagcagctggtcctcaacgtctcaaagatgctgagggctgacataaggaaggagctggagaaatatgccagggacatgagaatgaagatcctgaaacctgcaagtgcccactctccgacccaagtgagaagccggggaaaatccctgtcccccagaaggagacaggcaagccccccgaggaggctcggccggcgagagaagtcgcctgcactgcctgaaaagaaggtggctgatctgagcactctgaatgaagtgggctatcaaatccgaatttagccaagccataccggccagcaagagggtttctgtggtgcttctctctgcactttacccagcatcttcaggaggaactgcaactatttattaagaacttgtgaattttatttttaaggattcacctggaaatagaatctgagtgggtggtaaccattagctttaaaaaattcactaaaaggcaccatgaaaaggctgaagtaataagccccactggggttggactatgtccctcactcaagatcttaaggataaccgtaactgaagttttatatttttccatttacctactttcttttacttgctttgaacattatgcctcaccaatagtaaatgttcatgaaataatctcttgaacttttggtatagtaaggtaactctaacagtattactgtctttttcagcaataacagaaagcaaaaatgggtgggttttttttaagcagttattacctcagcattttgacatcagatatgcaaacttaatggcgttttgtttttttatattctatttgtattctttccccagtatttcccatggggatctccacaagtttggagttttttcctggtgcacacacgtgaggagatttaaggtactatatgcaagtgttttactaaaaagcactgaaattcttctggcaatacaagaaccattttcaggatcttggagttacttccttcttaatctttcttaaagcattcactgatgtttttgttttttcaaaatgaaacaaaaatatcacattgagaagctagtctatgttctgtcactaacatttaaactttgcagactctaacaaaaagcacaagaggtcacgtactattatacaaatttagcggtactggatttacctctgacattaacacactcaggcagagaccaggagtgatcagcaggtcttcagaaccaaaaaacctttctgttcacatttcatctgatttttaaactgaggcaggctttgattcttctgaaggatgccaagaatcaaactaagggaggactcactgttaaagatgtgttctgatgtcttatattaagaccaaatgtgacatgatgtgattatcttccagtactttgcttttaggtaccatttcatgacattttaggaatgagtattggaaaatataaagaattagaaaagcagcactttttttttaatggaaaagtcttcggtccagtgttacaccttatagtgtaattcagtccctaagcacagaatgaatgtctggcctgcatatggtagttacagtgtaacctctggctgcagaccacacaggacaaccctaacagcctagtcttgtatggtgtaaatatcaagagtacagcttcaatttcatttgctttatcttagcaacaatgccaactcaggagagcagacggccgatttcagtgaagtctggtagtcaacagatgttatttcagtctcagtgcatctcctctggctttctttgactgaaggtgtttataggaaggaagttaaaaaaaaaaaaagctcattgagattctttaccaattctttacaagatttctgggggtgacagggaaagcaaaaggacttcaaagcaaaagggtgcacaagagcttacttcaccctgaaaatcagtattattaatgaaaagtactgttttcttaaagaagtcgaatgtcctttagatgaacaagaccaagtatacatctccattagattaaaatgtagcacagggttaaaaattatcagtttaatctctttaagaacagtattatcagagtttaaaatgagttagctctgtttatctacacacagcaaacccattcgcagcctcttggccacatgtattcagatgtttgaaatagtgaatcatttcattttcattctaaaacaatactgacttagccatataccttctgtttgtcaatctgaaacttgcttacatctaataagtagacctcttataacactgcaaccattctaagagttggaatttatttttgccaagtattaagtactgttacatctaaaatacagaatgtcaaatggttgcatagcttgtttcccacaacaaggaggaaaagaacaggaatacaaactctgtaatatgctgataaagaagccttagaactgccaactggcttgatggttcaattagtaagctaatttctcccacacccgctccttgatttttagactaattttcccaaagcaaggtttagtcacacaaacttgaaagtacatttaaaatgttcttagttgtcatcctacttttattgcctatggaatatgctaatttctaaaaaaaatacgggagaggcaccaaacccctaaattctagtgcaataatttaaaaaacaaaaaacaaaacaaaacaaaaaacatgttatatgcacccccctcccaaagctgattttaagactggctagaattcaaaatataaaaaataaaactatgaagtgatttgaaatcggttttaaaaagttgttagtgcaagagaaattttatgtttaagccatcatggcaatatatgcaaagtttaaatgaatgacagaaatcttgattttagactgtatgttgtgctgttttgagtacactttatttcggaaagtgatatttagtattttctatacactctgaaatcatgagcatttcactttttctaagtcaattatttcataaggattttattaatagatattggtaaatagaactttggaaatcttaattcagaattcttactatacctgagtcttttgtaagctatagttttatgtacaaccttgtacagtttttttgacatacaattcagaactttgtttattctcttggactttgttctggccaatacattttttttaaatctttaagaagaactgtgattgttttagtgggtatttttctaattaaatgaaaacttgtataatggtattttagagaatgccagtaagtgcatgtttcaagttaatgtttttctcatcacttgtatgtttctaacacagcatgggactttaataaaaccatcctggaaacttaaagatt

SEQ ID NO: 362879 - DNA, 3998 bp, Homo sapiens
attcgagaatgggacatggaatgaggcgacggccccagcaagccccagcagccccagccccagccccaggcccagcagcagcagcagcagcccctgctctcccgccgcccggagaggctctgcagccatgaagccaaccgtcccgagccttcaataccccaggtcccaaactacaggctgtcgatgacgatcccagactggctccaggcgatccagaattacatgaagaccctacagtatccttccaaccaaggtctgagcacacccagccaggggacaggcatggtgatcgcaagcctggtggcaaatctgtccccagctggtcatcaaaagctctctaaggttaatggaaacagcaaaagaaatgacccgagagtccttgcctatcaaatgccttgaagctgtcatcctgggcatctacttaaccaatgggcagccttccattgagcggttccccatcagctttaaaacctacttctcaggaaactactttcaccacgttgtgctggggatttactgcaatggccgctatggctcattgggcatgagccgcagggctgagctgatggacaagccattgacttttcggactctgagtgacctcatctttgactttgaggactcttacaagaaatacctgcacacagtcaagaaggtcaagattgggctgtacgtcccccatgagcctcatagcttccagcccattgagtggaagcagctggtcctcaacgtctcaaagatgctgagggctgacataaggaaggagctggagaaatatgccagggacatgagaatgaagatcctgaaacctgcaagtgcccactctccgacccaagtgagaagccggggaaaatccctgtcccccagaaggagacaggcaagccccccgaggaggctcggccggcgagagaagtcgcctgcactgcctgaaaagaaggtggctgatctgagcactctgaatgaagtgggctatcaaatccgaatttagccaagccataccggccagcaagagggtttctgtggtgcttctctctgcactttacccagcatcttcaggaggaactgcaactatttattaagaacttgtgaattttatttttaaggattcacctggaaatagaatctgagtgggtggtaaccattagctttaaaaaattcactaaaaggcaccatgaaaaggctgaagtaataagccccactggggttggactatgtccctcactcaagatcttaaggataaccgtaactgaagttttatatttttccatttacctactttcttttacttgctttgaacattatgcctcaccaatagtaaatgttcatgaaataatctcttgaacttttggtatagtaaggtaactctaacagtattactgtctttttcagcaataacagaaagcaaaaatgggtgggttttttttaagcagttattacctcagcattttgacatcagatatgcaaacttaatggcgttttgtttttttatattctatttgtattctttccccagtatttcccatggggatctccacaagtttggagttttttcctggtgcacacacgtgaggagatttaaggtactatatgcaagtgttttactaaaaagcactgaaattcttctggcaatacaagaaccattttcaggatcttggagttacttccttcttaatctttcttaaagcattcactgatgtttttgttttttcaaaatgaaacaaaaatatcacattgagaagctagtctatgttctgtcactaacatttaaactttgcagactctaacaaaaagcacaagaggtcacgtactattatacaaatttagcggtactggatttacctctgacattaacacactcaggcagagaccaggagtgatcagcaggtcttcagaaccaaaaaacctttctgttcacatttcatctgatttttaaactgaggcaggctttgattcttctgaaggatgccaagaatcaaactaagggaggactcactgttaaagatgtgttctgatgtcttatattaagaccaaatgtgacatgatgtgattatcttccagtactttgcttttaggtaccatttcatgacattttaggaatgagtattggaaaatataaagaattagaaaagcagcactttttttttaatggaaaagtcttcggtccagtgttacaccttatagtgtaattcagtccctaagcacagaatgaatgtctggcctgcatatggtagttacagtgtaacctctggctgcagaccacacaggacaaccctaacagcctagtcttgtatggtgtaaatatcaagagtacagcttcaatttcatttgctttatcttagcaacaatgccaactcaggagagcagacggccgatttcagtgaagtctggtagtcaacagatgttatttcagtctcagtgcatctcctctggctttctttgactgaaggtgtttataggaaggaagttaaaaaaaaaaaaagctcattgagattctttaccaattctttacaagatttctgggggtgacagggaaagcaaaaggacttcaaagcaaaagggtgcacaagagcttacttcaccctgaaaatcagtattattaatgaaaagtactgttttcttaaagaagtcgaatgtcctttagatgaacaagaccaagtatacatctccattagattaaaatgtagcacagggttaaaaattatcagtttaatctctttaagaacagtattatcagagtttaaaatgagttagctctgtttatctacacacagcaaacccattcgcagcctcttggccacatgtattcagatgtttgaaatagtgaatcatttcattttcattctaaaacaatactgacttagccatataccttctgtttgtcaatctgaaacttgcttacatctaataagtagacctcttataacactgcaaccattctaagagttggaatttatttttgccaagtattaagtactgttacatctaaaatacagaatgtcaaatggttgcatagcttgtttcccacaacaaggaggaaaagaacaggaatacaaactctgtaatatgctgataaagaagccttagaactgccaactggcttgatggttcaattagtaagctaatttctcccacacccgctccttgatttttagactaattttcccaaagcaaggtttagtcacacaaacttgaaagtacatttaaaatgttcttagttgtcatcctacttttattgcctatggaatatgctaatttctaaaaaaaatacgggagaggcaccaaacccctaaattctagtgcaataatttaaaaaacaaaaaacaaaacaaaacaaaaaacatgttatatgcacccccctcccaaagctgattttaagactggctagaattcaaaatataaaaaataaaactatgaagtgatttgaaatcggttttaaaaagttgttagtgcaagagaaattttatgtttaagccatcatggcaatatatgcaaagtttaaatgaatgacagaaatcttgattttagactgtatgttgtgctgttttgagtacactttatttcggaaagtgatatttagtattttctatacactctgaaatcatgagcatttcactttttctaagtcaattatttcataaggattttattaatagatattggtaaatagaactttggaaatcttaattcagaattcttactatacctgagtcttttgtaagctatagttttatgtacaaccttgtacagtttttttgacatacaattcagaactttgtttattctcttggactttgttctggccaatacattttttttaaatctttaagaagaactgtgattgttttagtgggtatttttctaattaaatgaaaacttgtataatggtattttagagaatgccagtaagtgcatgtttcaagttaatgtttttctcatcacttgtatgtttctaacacagcatgggactttaataaaaccatcctggaaacttaaagatt

SEQ ID NO: 362880 - DNA, 879 bp, Homo sapiens
accggcgctctatcctcgcgtctgctcccagctccgggctcccggggctgaggtggagccgcgggacgccggcagggttgtggcgcagcagtctccttcctgcgcgcgcgcctgaagtcggcgtgggcgtttgaggaagctgggatacagcatttaatgaaaaatttatgcttaagaagtaaaaatggcaggcttcctagataattttcgttggccagaatgtgaatgtattgactggagtgagagaagaaatgctgtggcatctgttgtcgcaggtatattgttttttacaggctggtggataatgattgatgcagctgtggtgtatcctaagccagaacagttgaaccatgcctttcacacatgtggtgtattttccacattggctttcttcatgataaatgctgtatccaatgctcaggtgagaggtgatagctatgaaagcggctgtttaggaagaacaggtgctcgagtttggcttttcattggtttcatgttgatgtttgggtcacttattgcttccatgtggattctttttggtgcatatgttacccaaaatactgatgtttatccgggactagctgtgttttttcaaaatgcacttatattttttagcactctgatctacaaatttggaagaaccgaagagctatggacctgagatcacttcttaagtcacattttccttttgttatattctgtttgtagataggttttttatctctcagtacacattgccaaatggagtagattgtacattaaatgttttgtttctttacatttttatgttctgagttttgaaatagttttatgaaatttctttatttttcattgcatagactgttaatatgtatataatacaagactatatgaattgga

SEQ ID NO: 362881 - DNA, 671 bp, Homo sapiens
  misc_feature (29)..(29): n is a, c, g, or t
  misc_feature (35)..(35): n is a, c, g, or t
  misc_feature (41)..(41): n is a, c, g, or t
ggcccggtggcgccctgacccggggcccngaaaangcaaangtatattgggaccgggcctaggctggagtgcagtggtgcaaccacagctcactgcaccttcaaatgctggagctcaagcaatcctcttacctccgcttcccaagcagctgggaccacagatgtatcctccactcctcgctggccaccatcctgctgcccaacagaagaagctcttctgtctccgatttcctgaacggtctaagggagccagtgggctaggcccatgctttggttcaaagcgtttggagaacatcttcttgctccttttccggaaacgagataatggacacagagtcccagacgtcatcctttggaccaggaagaaacaggctcctgccagcaccgacagcaacgaaaatgttcccacggagatcaggatgacttgctgaagctcagtggaggctaaaaagaggacacgaaagtgaacagaatgatcttcctacgcacaacacaaacgtcagttaatgttccatccatgctgcttaaagagcattcctgtcctagtaaaatgggcaagtccctctaccccccaccctcacctggtatgcttacattaatagctaaagtcaatcctgtaatgaaataaagcaagtggtagctgtctggtagcctccactactgcaaatctca

SEQ ID NO: 362882 - DNA, 658 bp, Homo sapiens
accggcgctctatcctcgcgtctgctcccagctccgggctcccggggctgaggtggagccgcgggacgccggcagggttgtggcgcagcagtctccttcctgcgcgcgcgcctgaagtcggcgtgggcgtttgaggaagctgggatacagcatttaatgaaaaatttatgcttaagaagtaaaaatggcaggcttcctagataattttcgttggccagaatgtgaatgtattgactggagtgagagaagaaatgctgtggcatctgttgtcgcaggtatattgttttttacaggctggtcttagactcctgacctcagttgatccacctgcctcagcctctgcattcagtttattcacatatttttggtaactcccatggcagctcctaggatttcagcggtctgtgggccagaaagcaggcaccagggctgacctcaaggccgtatcagagggccaagcagagttcttttggatacctgcttttcatcccacagggccttagagtcagaggtaaggtagcaacagagctagaatggggcaatgcactcttaccctccttctcaacttttatttaagctgtgctaaatgttttcttcaagggaaccagatttagttctttacagaattttccagtgaaataaaacatgttgtaataaa

SEQ ID NO: 362883 - DNA, 3276 bp, Homo sapiens
accggcgctctatcctcgcgtctgctcccagctccgggctcccggggctgaggtggagccgcgggacgccggcagggttgtggcgcagcagtctccttcctgcgcgcgcgcctgaagtcggcgtgggcgtttgaggaagctgggatacagcatttaatgaaaaatttatgcttaagaagtaaaaatggcaggcttcctagataattttcgttggccagaatgtgaatgtattgactggagtgagagaagaaatgctgtggcatctgttgtcgcaggtatattgttttttacaggctggtggataatgattgatgcagctgtggtgtatcctaagccagaacagttgaaccatgcctttcacacatgtggtgtattttccacattggctttcttcatgataaatgctgtatccaatgctcaggtgagaggtgatagctatgaaagcggctgtttaggaagaacaggtgctcgagtttggcttttcattggtttcatgttgatgtttgggtcacttattgcttccatgtggattctttttggtgcatatgttacccaaaatactgatgtttatccgggactagctgtgttttttcaaaatgcacttatattttttagcactctgatctacaaatttggaagaaccgaagagctatggacctgagatcacttcttaagtcacattttccttttgttatattctgtttgtagataggttttttatctctcagtacacattgccaaatggagtagattgtacattaaatgttttgtttctttacatttttatgttctgagttttgaaatagttttatgaaatttctttatttttcattgcatagactgttaatatgtatataatacaagactatatgaattggataatgagtatcagttttttattcctgagatttagaacttgatctactccctgagccagggttacatcatcttgtcattttagaagtaaccactcttgtctctctggctgggcacggtggctcatgcctgtaatcccagcactttgggaggccgaggcgggccgattgcttgaggtcaagtgtttgagaccagcctggccaacatggcgaaaccccatctactaaaaatacaaaaattagccaggcatggtggtgggtgcctgtaatcccaactacctaggaggctgaggcaggagaatcgcttgaacccggggggcagaggttgtagtgagctgagtttgcgccactgcactctagcctgggggagaaagtgaaactccctctcaaaaaaaagaaggaccactctcagtatctgatttctgaagatgtacaaaaaaatatagcttcatatatctagaatgagcactgagccataaaaggttttcagcaagttgtaacttattttggcctaaaaatgaggtttttttggtaaagaaaaaatatttgttcttatgtattgaagaagtgtacttttatataatgattttttaaatgcccaaaggactagtttgaaagcttcttttaaaaagaattcctctaatatgactttatgtgagaagggataatacatgatcaaataaactcagttttttatggttactgtaaaaagactgtgtaaggcagctcagcaccatgcttctcgtaaaagcagcttcaaatatccactggggttatcttttgacaacttgccattatctgatgttacacaattcaatagcaagcaagtttgagacaatcgcagtttaaaagcatgaaccatttaacaaaaagtggaataattaaagataaagcacttcttcccaaagggaattatcacctagtgaaaaattatgcatttcatctactcagttaccgactgcaagtctctcctcgctctagctctcaagctttgggtgaatattcctgtgaaatatatcttcaacttgaaagttcatactccaatcaaaaactccttttactgagtttgcagtactgtatttgcactgtttgtattcctctgggcccttattgctacttttgctttcctttgttacacagattttgtgttgcactttttctccagaggggtgttgtagagccttggttgtatgaataataccagtggtagtgtccacgggtctaatgtaagcccatttggcatcactcctctcctctctcttgagaggatttcttgtgcacagagtatgaagcagttgtggagcgctgtgcctttgtcaagataccatcttgtttgatgacttctttctttgctgttttttcttcaaaatgttagtaagctctgtcatgcttctagcaaattgtaagactaattatttgtttccacctcataacctgttgcaataaatattacttctcatacagtttaatattgttgtttgttggagaaaatgaaccataaaaattgatttgctgttcagttttcaattattcaagtacacccaattaaagatgcagttatgtttataaaataagaagaaatagacttgttggctgtttttttctatttctgactctgccatgaattttttttttttttttaaagacaatatctcactctgttgcctaggctggagtgcagtggtgcaaccacagctcactgcaccttcaaatgctggagctcaagcaatcctcttacctccgcttcccaagcagctgggaccacagatggagttttgctcttgtcacccaggctggagtgtagtggtgcaatctcagctcactgcaacctctgtctcccaggttcaaatggttctcgtgcctcagcctcccgagtagctggggttacagatgtatcctccactcctcgctggccaccatcctgctgcccaacagaagaagctcttctgtctccgatttcctgaacggtctaagggagccagtgggctaggcccatgctttggttcaaagcgtttggagaacatcttcttgctccttttccggaaacgagataatggacacagagtcccagacgtcatcctttggaccaggaagaaacaggctcctgccagcaccgacagcaacgaaaatgttcccacggagatcaggatgacttgctgaagctcagtggaggctaaaaagaggacacgaaagtgaacagaatgatcttcctacgcacaacacaaacgtcagttaatgttccatccatgctgcttaaagagcattcctgtcctagtaaaatgggcaagtccctctaccccccaccctcacctggtatgcttacattaatagctaaagtcaatcctgtaatgaaataaagcaagtggtagctgtctggtagcctccactactgcaaatctca

SEQ ID NO: 362884 - DNA, 3166 bp, Homo sapiens
accggcgctctatcctcgcgtctgctcccagctccgggctcccggggctgaggtggagccgcgggacgccggcagggttgtggcgcagcagtctccttcctgcgcgcgcgcctgaagtcggcgtgggcgtttgaggaagctgggatacagcatttaatgaaaaatttatgcttaagaagtaaaaatggcaggcttcctagataattttcgttggccagaatgtgaatgtattgactggagtgagagaagaaatgctgtggcatctgttgtcgcaggtatattgttttttacaggctggtggataatgattgatgcagctgtggtgtatcctaagccagaacagttgaaccatgcctttcacacatgtggtgtattttccacattggctttcttcatgataaatgctgtatccaatgctcaggtgagaggtgatagctatgaaagcggctgtttaggaagaacaggtgctcgagtttggcttttcattggtttcatgttgatgtttgggtcacttattgcttccatgtggattctttttggtgcatatgttacccaaaatactgatgtttatccgggactagctgtgttttttcaaaatgcacttatattttttagcactctgatctacaaatttggaagaaccgaagagctatggacctgagatcacttcttaagtcacattttccttttgttatattctgtttgtagataggttttttatctctcagtacacattgccaaatggagtagattgtacattaaatgttttgtttctttacatttttatgttctgagttttgaaatagttttatgaaatttctttatttttcattgcatagactgttaatatgtatataatacaagactatatgaattggataatgagtatcagttttttattcctgagatttagaacttgatctactccctgagccagggttacatcatcttgtcattttagaagtaaccactcttgtctctctggctgggcacggtggctcatgcctgtaatcccagcactttgggaggccgaggcgggccgattgcttgaggtcaagtgtttgagaccagcctggccaacatggcgaaaccccatctactaaaaatacaaaaattagccaggcatggtggtgggtgcctgtaatcccaactacctaggaggctgaggcaggagaatcgcttgaacccggggggcagaggttgtagtgagctgagtttgcgccactgcactctagcctgggggagaaagtgaaactccctctcaaaaaaaagaaggaccactctcagtatctgatttctgaagatgtacaaaaaaatatagcttcatatatctagaatgagcactgagccataaaaggttttcagcaagttgtaacttattttggcctaaaaatgaggtttttttggtaaagaaaaaatatttgttcttatgtattgaagaagtgtacttttatataatgattttttaaatgcccaaaggactagtttgaaagcttcttttaaaaagaattcctctaatatgactttatgtgagaagggataatacatgatcaaataaactcagttttttatggttactgtaaaaagactgtgtaaggcagctcagcaccatgcttctcgtaaaagcagcttcaaatatccactggggttatcttttgacaacttgccattatctgatgttacacaattcaatagcaagcaagtttgagacaatcgcagtttaaaagcatgaaccatttaacaaaaagtggaataattaaagataaagcacttcttcccaaagggaattatcacctagtgaaaaattatgcatttcatctactcagttaccgactgcaagtctctcctcgctctagctctcaagctttgggtgaatattcctgtgaaatatatcttcaacttgaaagttcatactccaatcaaaaactccttttactgagtttgcagtactgtatttgcactgtttgtattcctctgggcccttattgctacttttgctttcctttgttacacagattttgtgttgcactttttctccagaggggtgttgtagagccttggttgtatgaataataccagtggtagtgtccacgggtctaatgtaagcccatttggcatcactcctctcctctctcttgagaggatttcttgtgcacagagtatgaagcagttgtggagcgctgtgcctttgtcaagataccatcttgtttgatgacttctttctttgctgttttttcttcaaaatgttagtaagctctgtcatgcttctagcaaattgtaagactaattatttgtttccacctcataacctgttgcaataaatattacttctcatacagtttaatattgttgtttgttggagaaaatgaaccataaaaattgatttgctgttcagttttcaattattcaagtacacccaattaaagatgcagttatgtttataaaataagaagaaatagacttgttggctgtttttttctatttctgactctgccatgaattttttttttttttttaaagacaatatctcactctgttgcctaggctggagtgcagtggtgcaaccacagctcactgcaccttcaaatgctggagctcaagcaatcctcttacctccgcttcccaagcagctgggaccacagatggagttttgctcttgtcacccaggctggagtgtagtggtgcaatctcagctcactgcaacctctgtctcccaggttcaaatggttctcgtgcctcagcctcccgagtagctggggttacagatgtatcctccactcctcgctggccaccatcctgctgcccaacagaagaagctcttctgtctccgatttcctgaacggtctaaggaccaggaagaaacaggctcctgccagcaccgacagcaacgaaaatgttcccacggagatcaggatgacttgctgaagctcagtggaggctaaaaagaggacacgaaagtgaacagaatgatcttcctacgcacaacacaaacgtcagttaatgttccatccatgctgcttaaagagcattcctgtcctagtaaaatgggcaagtccctctaccccccaccctcacctggtatgcttacattaatagctaaagtcaatcctgtaatgaaataaagcaagtggtagctgtctggtagcctccactactgcaaatctca

SEQ ID NO: 362885 - DNA, 3153 bp, Homo sapiens
accggcgctctatcctcgcgtctgctcccagctccgggctcccggggctgaggtggagccgcgggacgccggcagggttgtggcgcagcagtctccttcctgcgcgcgcgcctgaagtcggcgtgggcgtttgaggaagctgggatacagcatttaatgaaaaatttatgcttaagaagtaaaaatggcaggcttcctagataattttcgttggccagaatgtgaatgtattgactggagtgagagaagaaatgctgtggcatctgttgtcgcaggtatattgttttttacaggctggtggataatgattgatgcagctgtggtgtatcctaagccagaacagttgaaccatgcctttcacacatgtggtgtattttccacattggctttcttcatgataaatgctgtatccaatgctcaggtgagaggtgatagctatgaaagcggctgtttaggaagaacaggtgctcgagtttggcttttcattggtttcatgttgatgtttgggtcacttattgcttccatgtggattctttttggtgcatatgttacccaaaatactgatgtttatccgggactagctgtgttttttcaaaatgcacttatattttttagcactctgatctacaaatttggaagaaccgaagagctatggacctgagatcacttcttaagtcacattttccttttgttatattctgtttgtagataggttttttatctctcagtacacattgccaaatggagtagattgtacattaaatgttttgtttctttacatttttatgttctgagttttgaaatagttttatgaaatttctttatttttcattgcatagactgttaatatgtatataatacaagactatatgaattggataatgagtatcagttttttattcctgagatttagaacttgatctactccctgagccagggttacatcatcttgtcattttagaagtaaccactcttgtctctctggctgggcacggtggctcatgcctgtaatcccagcactttgggaggccgaggcgggccgattgcttgaggtcaagtgtttgagaccagcctggccaacatggcgaaaccccatctactaaaaatacaaaaattagccaggcatggtggtgggtgcctgtaatcccaactacctaggaggctgaggcaggagaatcgcttgaacccggggggcagaggttgtagtgagctgagtttgcgccactgcactctagcctgggggagaaagtgaaactccctctcaaaaaaaagaaggaccactctcagtatctgatttctgaagatgtacaaaaaaatatagcttcatatatctagaatgagcactgagccataaaaggttttcagcaagttgtaacttattttggcctaaaaatgaggtttttttggtaaagaaaaaatatttgttcttatgtattgaagaagtgtacttttatataatgattttttaaatgcccaaaggactagtttgaaagcttcttttaaaaagaattcctctaatatgactttatgtgagaagggataatacatgatcaaataaactcagttttttatggttactgtaaaaagactgtgtaaggcagctcagcaccatgcttctcgtaaaagcagcttcaaatatccactggggttatcttttgacaacttgccattatctgatgttacacaattcaatagcaagcaagtttgagacaatcgcagtttaaaagcatgaaccatttaacaaaaagtggaataattaaagataaagcacttcttcccaaagggaattatcacctagtgaaaaattatgcatttcatctactcagttaccgactgcaagtctctcctcgctctagctctcaagctttgggtgaatattcctgtgaaatatatcttcaacttgaaagttcatactccaatcaaaaactccttttactgagtttgcagtactgtatttgcactgtttgtattcctctgggcccttattgctacttttgctttcctttgttacacagattttgtgttgcactttttctccagaggggtgttgtagagccttggttgtatgaataataccagtggtagtgtccacgggtctaatgtaagcccatttggcatcactcctctcctctctcttgagaggatttcttgtgcacagagtatgaagcagttgtggagcgctgtgcctttgtcaagataccatcttgtttgatgacttctttctttgctgttttttcttcaaaatgttagtaagctctgtcatgcttctagcaaattgtaagactaattatttgtttccacctcataacctgttgcaataaatattacttctcatacagtttaatattgttgtttgttggagaaaatgaaccataaaaattgatttgctgttcagttttcaattattcaagtacacccaattaaagatgcagttatgtttataaaataagaagaaatagacttgttggctgtttttttctatttctgactctgccatgaattttttttttttttttaaagacaatatctcactctgttgcctaggctggagtgcagtggtgcaaccacagctcactgcaccttcaaatgctggagctcaagcaatcctcttacctccgcttcccaagcagctgggaccacagatgtatcctccactcctcgctggccaccatcctgctgcccaacagaagaagctcttctgtctccgatttcctgaacggtctaagggagccagtgggctaggcccatgctttggttcaaagcgtttggagaacatcttcttgctccttttccggaaacgagataatggacacagagtcccagacgtcatcctttggaccaggaagaaacaggctcctgccagcaccgacagcaacgaaaatgttcccacggagatcaggatgacttgctgaagctcagtggaggctaaaaagaggacacgaaagtgaacagaatgatcttcctacgcacaacacaaacgtcagttaatgttccatccatgctgcttaaagagcattcctgtcctagtaaaatgggcaagtccctctaccccccaccctcacctggtatgcttacattaatagctaaagtcaatcctgtaatgaaataaagcaagtggtagctgtctggtagcctccactactgcaaatctca

SEQ ID NO: 362886 - DNA, 2322 bp, Homo sapiens
agtggtagtgtccacgggtctaatgtaagcccatttggcatcactcctctcctctctcgagaggatttcttgtgcacagagtatgaagcagttgtggagcgctgtgcctttgtcaagataccatcttgtttgatgatttctttctttgctgttttttcttcaaaatgctggagtgcagtggtgcaaccacagctcactgcaccttcaaatgctggagctcaagcaatcctcttacctccgctttccaagcagctgggaccacagatggagttttgctctagcctgggggagaaagtgaaactccctctcaaaaaaaagaaggaccactctcagtatctgatttctgaagatgtacaaaaaaatatagcttcatatatctagaatgagcactgagccataaaaggttttcagcaagttgtaacttattttggcctaaaaatgaggtttttttggtaaagaaaaaatatttgttcttatgtattgaagaagtgtacttttatataatgattttttaaatgcccaaaggactagtttgaaagcttcttttaaaaagaattcctctaatatgactttatgtgagaagggataatacatgatcaaataaactcagttttttatggttactgtaaaaagactgtgtaaggcagctcagcaccatgcttctcgtaaaagcagcttcaaatatccactggggttatcttttgacaacttgccattatctgatgttacacaattcaatagcaagcaagtttgagacaatcgcagtttaaaagcatgaaccatttaacaaaaagtggaataattaaagataaagcacttcttcccaaagggaattatcacctagtgaaaaattatgcatttcatctactcagttaccgactgcaagtctctcctcgctctagctctcaagctttgggtgaatattcctgtgaaatatatcttcaacttgaaagttcatactccaatcaaaaactccttttactgagtttgcagtactgtatttgcactgtttgtattcctctgggcccttattgctacttttgctttcctttgttacacagattttgtgttgcactttttctccagaggggtgttgtagagccttggttgtatgaataataccagtggtagtgtccacgggtctaatgtaagcccatttggcatcactcctctcctctctcttgagaggatttcttgtgcacagagtatgaagcagttgtggagcgctgtgcctttgtcaagataccatcttgtttgatgacttctttctttgctgttttttcttcaaaatgttagtaagctctgtcatgcttctagcaaattgtaagactaattatttgtttccacctcataacctgttgcaataaatattacttctcatacagtttaatattgttgtttgttggagaaaatgaaccataaaaattgatttgctgttcagttttcaattattcaagtacacccaattaaagatgcagttatgtttataaaataagaagaaatagacttgttggctgtttttttctatttctgactctgccatgaattttttttttttttttaaagacaatatctcactctgttgcctaggctggagtgcagtggtgcaaccacagctcactgcaccttcaaatgctggagctcaagcaatcctcttacctccgcttcccaagcagctgggaccacagatggagttttgctcttgtcacccaggctggagtgtagtggtgcaatctcagctcactgcaacctctgtctcccaggttcaaatggttctcgtgcctcagcctcccgagtagctggggttacagatgtatcctccactcctcgctggccaccatcctgctgcccaacagaagaagctcttctgtctccgatttcctgaacggtctaagggagccagtgggctaggcccatgctttggttcaaagcgtttggagaacatcttcttgctccttttccggaaacgagataatggacacagagtcccagacgtcatcctttggaccaggaagaaacaggctcctgccagcaccgacagcaacgaaaatgttcccacggagatcaggatgacttgctgaagctcagtggaggctaaaaagaggacacgaaagtgaacagaatgatcttcctacgcacaacacaaacgtcagttaatgttccatccatgctgcttaaagagcattcctgtcctagtaaaatgggcaagtccctctaccccccaccctcacctggtatgcttacattaatagctaaagtcaatcctgtaatgaaataaagcaagtggtagctgtctggtagcctccactactgcaaatctca

SEQ ID NO: 362887 - DNA, 788 bp, Homo sapiens
accggcgctctatcctcgcgtctgctcccagctccgggctcccggggctgaggtggagccgcgggacgccggcagggttgtggcgcagcagtctccttcctgcgcgcgcgcctgaagtcggcgtgggcgtttgaggaagctgggatacagcatttaatgaaaaatttatgcttaagaagtaaaaatggcaggcttcctagataattttcgttggccagaatgtgaatgtattgactggagtgagagaagaaatgctgtggcatctgttgtcgcaggtatattgttttttacaggctggtggataatgattgatgcagctgtggtgtatcctaagccagaacagttgaaccatgcctttcacacatgtggtgtattttccacattggctttcttcatgataaatgctgtatccaatgctcaggtgagaggtgatagctatgaaagcggctgtttaggaagaacaggtaaagatactttgagctgttaatgggtgttgacaaaacagaaatttgtcaccagaaaaaaagcctctcttgtgagtctttattcaagactggtaatgattatatagaatattttttatttgctttaaaacaaagttttagtgttattcaaatccttaagaaagtaagttattgctagaagttactgtttttgtcatgttacactgcccatgatatagataaaaaatgttgctattcaaatggatcttggactccagtgctaatgatggatttattattatcccaattgttgaccaataatgttacttacaagatggctgacta

SEQ ID NO: 362888 - DNA, 569 bp, Homo sapiens
atcttagtgcataagggtgcatgtgcacaatgtgcaggtagttacatatgtatacatgtgccatgcctaggctggagtgcagtggtgcaaccacagctcactgcaccttcaaatgctggagctcaagcaatcctcttacctccgcttcccaagcagctgggaccacagatgtatcctccactcctcgctggccaccatcctgctgcccaacagaagaagctcttctgtctccgatttcctgaacggtctaaggaccaggaagaaacaggctcctgccagcaccgacagcaacgaaaatgttcccacggagatcaggatgacttgctgaagctcagtggaggctaaaaagaggacacgaaagtgaacagaatgatcttcctacgcacaacacaaacgtcagttaatgttccatccatgctgcttaaagagcattcctgtcctagtaaaatgggcaagtccctctaccccccaccctcacctggtatgcttacattaatagctaaagtcaatcctgtaatgaaataaagcaagtggtagctgtctggtagcctccactactgcaaatctca

SEQ ID NO: 362889 - DNA, 591 bp, Homo sapiens
accggcgctctatcctcgcgtctgctcccagctccgggctcccggggctgaggtggagccgcgggacgccggcagggttgtggcgcagcagtctccttcctgcgcgcgcgcctgaagtcggcgtgggcgtttgaggaagctgggatacagcatttaatgaaaaatttatgcttaagaagtaaaaatggcaggcttcctagataattttcgttggccagaatgtgaatgtattgactggagtgagagaagaaatgctgtggcatctgttgtcgcaggtatattgttttttacaggctggtggataatgattgatgcagctgtggtgtatcctaagccagaacagttgaaccatgcctttcacacatgtggtgtattttccacattggctttcttcatgataaatgctgtatccaatgctcaggtgagaggtgatagctatgaaagcggctgtttaggaagaacaggtgctcgagtttggcttttcattggtttcatgttgatgtttgggtcacttattgcttccatgtggattctttttggtgcatatgttacccaaatgttggccataggaggcaaaggagcaagttactg

SEQ ID NO: 362890 - DNA, 2337 bp, Homo sapiens
accggcgctctatcctcgcgtctgctcccagctccgggctcccggggctgaggtggagccgcgggacgccggcagggttgtggcgcagcagtctccttcctgcgcgcgcgcctgaagtcggcgtgggcgtttgaggaagctgggatacagcatttaatgaaaaatttatgcttaagaagtaaaaatggcaggcttcctagataattttcgttggccagaatgtgaatgtattgactggagtgagagaagaaatgctgtggcatctgttgtcgcaggtatattgttttttacaggctggtggataatgattgatgcagctgtggtgtatcctaagccagaacagttgaaccatgcctttcacacatgtggtgtattttccacattggctttcttcatgataaatgctgtatccaatgctcaggtgagaggtgatagctatgaaagcggctgtttaggaagaacaggtgctcgagtttggcttttcattggtttcatgttgatgtttgggtcacttattgcttccatgtggattctttttggtgcatatgttacccaaaatactgatgtttatccgggactagctgtgttttttcaaaatgcacttatattttttagcactctgatctacaaatttggaagaaccgaagagctatggacctgagatcacttcttaagtcacattttccttttgttatattctgtttgtagataggttttttatctctcagtacacattgccaaatggagtagattgtacattaaatgttttgtttctttacatttttatgttctgagttttgaaatagttttatgaaatttctttatttttcattgcatagactgttaatatgtatataatacaagactatatgaattggataatgagtatcagttttttattcctgagatttagaacttgatctactccctgagccagggttacatcatcttgtcattttagaagtaaccactcttgtctctctggctgggcacggtggctcatgcctgtaatcccagcactttgggaggccgaggcgggccgattgcttgaggtcaagtgtttgagaccagcctggccaacatggcgaaaccccatctactaaaaatacaaaaattagccaggcatggtggtgggtgcctgtaatcccaactacctaggaggctgaggcaggagaatcgcttgaacccggggggcagaggttgtagtgagctgagtttgcgccactgcactctagcctgggggagaaagtgaaactccctctcaaaaaaaagaaggaccactctcagtatctgatttctgaagatgtacaaaaaaatatagcttcatatatctagaatgagcactgagccataaaaggttttcagcaagttgtaacttattttggcctaaaaatgaggtttttttggtaaagaaaaaatatttgttcttatgtattgaagaagtgtacttttatataatgattttttaaatgcccaaaggactagtttgaaagcttcttttaaaaagaattcctctaatatgactttatgtgagaagggataatacatgatcaaataaactcagttttttatggttactgtaaaaagactgtgtaaggcagctcagcaccatgcttctcgtaaaagcagcttcaaatatccactggggttatcttttgacaacttgccattatctgatgttacacaattcaatagcaagcaagtttgagacaatcgcagtttaaaagcatgaaccatttaacaaaaagtggaataattaaagataaagcacttcttcccaaagggaattatcacctagtgaaaaattatgcatttcatctactcagttaccgactgcaagtctctcctcgctctagctctcaagctttgggtgaatattcctgtgaaatatatcttcaacttgaaagttcatactccaatcaaaaactccttttactgagtttgcagtactgtatttgcactgtttgtattcctctgggcccttattgctacttttgctttcctttgttacacagattttgtgttgcactttttctccagaggggtgttgtagagccttggttgtatgaataataccagtggtagtgtccacgggtctaatgtaagcccatttggcatcactcctctcctctctcttgagaggatttcttgtgcacagagtatgaagcagttgtggagcgctgtgcctttgtcaagataccatcttgtttgatgacttctttctttgctgttttttcttcaaaatgttagtaagctctgtcatgcttctagcaaattgtaagactaattatttgtttccacctcataacctgttgcaataaatattacttctcatac

SEQ ID NO: 362891 - DNA, 3043 bp, Homo sapiens
accggcgctctatcctcgcgtctgctcccagctccgggctcccggggctgaggtggagccgcgggacgccggcagggttgtggcgcagcagtctccttcctgcgcgcgcgcctgaagtcggcgtgggcgtttgaggaagctgggatacagcatttaatgaaaaatttatgcttaagaagtaaaaatggcaggcttcctagataattttcgttggccagaatgtgaatgtattgactggagtgagagaagaaatgctgtggcatctgttgtcgcaggtatattgttttttacaggctggtggataatgattgatgcagctgtggtgtatcctaagccagaacagttgaaccatgcctttcacacatgtggtgtattttccacattggctttcttcatgataaatgctgtatccaatgctcaggtgagaggtgatagctatgaaagcggctgtttaggaagaacaggtgctcgagtttggcttttcattggtttcatgttgatgtttgggtcacttattgcttccatgtggattctttttggtgcatatgttacccaaaatactgatgtttatccgggactagctgtgttttttcaaaatgcacttatattttttagcactctgatctacaaatttggaagaaccgaagagctatggacctgagatcacttcttaagtcacattttccttttgttatattctgtttgtagataggttttttatctctcagtacacattgccaaatggagtagattgtacattaaatgttttgtttctttacatttttatgttctgagttttgaaatagttttatgaaatttctttatttttcattgcatagactgttaatatgtatataatacaagactatatgaattggataatgagtatcagttttttattcctgagatttagaacttgatctactccctgagccagggttacatcatcttgtcattttagaagtaaccactcttgtctctctggctgggcacggtggctcatgcctgtaatcccagcactttgggaggccgaggcgggccgattgcttgaggtcaagtgtttgagaccagcctggccaacatggcgaaaccccatctactaaaaatacaaaaattagccaggcatggtggtgggtgcctgtaatcccaactacctaggaggctgaggcaggagaatcgcttgaacccggggggcagaggttgtagtgagctgagtttgcgccactgcactctagcctgggggagaaagtgaaactccctctcaaaaaaaagaaggaccactctcagtatctgatttctgaagatgtacaaaaaaatatagcttcatatatctagaatgagcactgagccataaaaggttttcagcaagttgtaacttattttggcctaaaaatgaggtttttttggtaaagaaaaaatatttgttcttatgtattgaagaagtgtacttttatataatgattttttaaatgcccaaaggactagtttgaaagcttcttttaaaaagaattcctctaatatgactttatgtgagaagggataatacatgatcaaataaactcagttttttatggttactgtaaaaagactgtgtaaggcagctcagcaccatgcttctcgtaaaagcagcttcaaatatccactggggttatcttttgacaacttgccattatctgatgttacacaattcaatagcaagcaagtttgagacaatcgcagtttaaaagcatgaaccatttaacaaaaagtggaataattaaagataaagcacttcttcccaaagggaattatcacctagtgaaaaattatgcatttcatctactcagttaccgactgcaagtctctcctcgctctagctctcaagctttgggtgaatattcctgtgaaatatatcttcaacttgaaagttcatactccaatcaaaaactccttttactgagtttgcagtactgtatttgcactgtttgtattcctctgggcccttattgctacttttgctttcctttgttacacagattttgtgttgcactttttctccagaggggtgttgtagagccttggttgtatgaataataccagtggtagtgtccacgggtctaatgtaagcccatttggcatcactcctctcctctctcttgagaggatttcttgtgcacagagtatgaagcagttgtggagcgctgtgcctttgtcaagataccatcttgtttgatgacttctttctttgctgttttttcttcaaaatgttagtaagctctgtcatgcttctagcaaattgtaagactaattatttgtttccacctcataacctgttgcaataaatattacttctcatacagtttaatattgttgtttgttggagaaaatgaaccataaaaattgatttgctgttcagttttcaattattcaagtacacccaattaaagatgcagttatgtttataaaataagaagaaatagacttgttggctgtttttttctatttctgactctgccatgaattttttttttttttttaaagacaatatctcactctgttgcctaggctggagtgcagtggtgcaaccacagctcactgcaccttcaaatgctggagctcaagcaatcctcttacctccgcttcccaagcagctgggaccacagatgtatcctccactcctcgctggccaccatcctgctgcccaacagaagaagctcttctgtctccgatttcctgaacggtctaaggaccaggaagaaacaggctcctgccagcaccgacagcaacgaaaatgttcccacggagatcaggatgacttgctgaagctcagtggaggctaaaaagaggacacgaaagtgaacagaatgatcttcctacgcacaacacaaacgtcagttaatgttccatccatgctgcttaaagagcattcctgtcctagtaaaatgggcaagtccctctaccccccaccctcacctggtatgcttacattaatagctaaagtcaatcctgtaatgaaataaagcaagtggtagctgtctggtagcctccactactgcaaatctca

SEQ ID NO: 362892 - DNA, 821 bp, Homo sapiens
accggcgctctatcctcgcgtctgctcccagctccgggctcccggggctgaggtggagccgcgggacgccggcagggttgtggcgcagcagtctccttcctgcgcgcgcgcctgaagtcggcgtgggcgtttgaggaagctgggatacagcatttaatgaaaaatttatgcttaagaagtaaaaatggcaggcttcctagataattttcgttggccagaatgtgaatgtattgactggagtgagagaagaaatgctgtggcatctgttgtcgcaggtatattgttttttacaggctggtggataatgattgatgcagctgtggtgtatcctaagccagaacagttgaaccatgcctttcacacatgtggtgtattttccacattggctttcttcatgataaatgctgtatccaatgctcaggtgagaggtgatagctatgaaagcggctgtttaggaagaacaggtgctcgagtttggcttttcattggtttcatgttgatgtttgggtcacttattgcttccatgtggattctttttggtgcatatgttacccaaacactctgatctacaaatttggaagaaccgaagagctatggacctgagatcacttcttaagtcacattttccttttgttatattctgtttgtagataggttttttatctctcagtacacattgccaaatggagtagattgtacattaaatgttttgtttctttacatttttatgttctgagttttgaaatagttttatgaaatttctttatttttcattgcatagactgttaatatgtatataatacaagactatatgaattgga

SEQ ID NO: 362893 - DNA, 474 bp, Homo sapiens
gctggagtgcagtggcgcgatctcggctcaccgcaacctctgcctcccgggttcaagtgattttcctgactcagcctcccaagtagctgggattacaggcgcgtgccaccatgcccagctaattttttatatttttagtagatatggggtttcaccgtgttagccaggatggtcttgatctcctgaccttgtgatctgcccgccctggcctcccaaagtgctgggattacaggcatgagccaccgcaccaggcatgtggacctttcaatagtcaagttttgtttttcatgcacacttagaaagtaagcaggaaaatatgtttaattggcactgttctgccagatggatataatggctagaccatagaatctaagagaagtaaagataaaagttattatgtgggtgacaaaataatctgtacaccaaaccctcatgacatgcaatttacctatatagcaaacctaaacatgtata

SEQ ID NO: 362894 - DNA, 3292 bp, Homo sapiens
gtgagctccgtcagccgctcctccaccgtgttctccagggacgtgaagtcccgctcccgggcgtccttcaccacatggatcccagcccgcggcccgagccgccgccgcgcccgccatgccctcggccaaacaaaggggctccaagggcggccacggcgccgcgagcccctcggagaagggtgcccacccgtcggccgcgcgtcctctcgccgctccgacgccagcagcgcccgcgtgccgctcgcccagtcccgggggagcccctgcaagtttcccgggccgcgcgccgcgctcgctcgcctcccagcccgcggcccgagccgccgccgcgcccgccatgccctcggccaaacaaaggggctccaagggcggccacggcgccgcgagcccctcggagaagggtgcccacccgtcgggcggcgcggatgacgtggcgaagaagccgccgccggcgccgcagcagccgccgccgccgcccgcgccgcacccgcagcagcacccgcagcagcacccgcagaaccaggcgcacggcaagggcggccaccgcggcggcggcggcggcggcggcaagtcctcctcctcctcctccgcctccgccgccgctgccgccgccgccgcctcgtcctcggcgtcctgctcgcgcaggctcggcagggcgctcaactttctcttctacctcgccctggtggcggcggccgctttctcgggctggtgcgtccaccacgtcctggaggaggtccagcaggtccggcgcaccaccaggacttctcccggcagagggaggagctgggccagggcttgcagggcgtcgagcagaaggtgcagtctttgcaagccacatttggaacttttgagtccatcttgagaagctcccaacataaacaagacctcacagagaaagctgtgaagcaaggggagagtgaggtcagccggatcagcgaagtgctgcagaaactccagaatgagattctcaaagacctctcggatgggatccatgtggtgaaggacgcccgggagcgggacttcacgtccctggagaacacggtggaggagcggctgacggagctcaccaaatccatcaacgacaacatcgccatcttcacagaagtccagaagaggagccagaaggagatcaatgacatgaaggcaaaggttgcctccctggaagaatctgaggggaacaagcaggatttgaaagccttaaaggaagctgtgaaggagatacagacctcagccaagtccagagagtgggacatggaggccctgagaagtacccttcagactatggagtctgacatctacaccgaggtccgcgagctggtgagcctcaagcaggagcagcaggctttcaaggaggcggccgacacggagcggctcgccctgcaggccctcacggagaagcttctcaggtctgaggagtccgtctcccgcctcccggaggagatccggagactggaggaagagctccgccagctgaagtccgattcccacgggccgaaggaggacggaggcttcagacactcggaagcctttgaggcactccagcaaaagagtcagggactggactccaggctccagcacgtggaggatggggtgctctccatgcaggtggcttctgcgcgccagaccgagagcctggagtccctcctgtccaagagccaggagcacgagcagcgcctggccgccctgcaggggcgcctggaaggcctcgggtcctcagaggcagaccaggatggcctggccagcacggtgaggagcctgggcgagacccagctggtgctctacggtgacgtggaggagctgaagaggagtgtgggcgagctccccagcaccgtggaatcactccagaaggtgcaggagcaggtgcacacgctgctcagtcaggaccaagcccaggccgcccgtctgcctcctcaggacttcctggacagactttcttctctagacaacctgaaagcctcagtcagccaagtggaggcggacttgaaaatgctcaggactgctgtggacagtttggttgcatactcggtcaaaatagaaaccaacgagaacaatctggaatcagccaagggtttactagatgacctgaggaatgatctggataggttgtttgtgaaagtggagaagattcacgaaaaggtctaaatgaattgcgtgtgcagggcgcggatttaaagtccaatttctcatgaccaaaaaatgtgtggttttttcccatgtgtcccctaccccccaatttcttgtcccctcttaaagagcagttgtcaccacctgaacaccaaggcattgtattttcatgcccagttaacttatttacaatatttaagttctctgcttctgcatttggttggtttcctgaagcgcagcccctgtgaataacaggtggcttttcatggatgtctctagtcagagaaaaatgataaaggcttaaattgaggattaacagaagcagattaacctcagaaatcctgtctggctggcagatttcaagtaaaaaaaaaaaaaaggtgggttggggggacccttttctttctagttgtctttaaggaaaattaattttactttttttttgttctggccgaaatttttatgagatatctctcacttgtcttccactttgaaccggttaaagctcatagctgtcagctctgaatgaggaggggagaagcccctgggtctttctttgaaaggaatccgctgcttgagggctgcctccctcatggtgtgcgtgtcgtttctcttcctgacgcatcttgtgatatcagaggtaactatgcaaagcatccaggcggttctgaatgtgaagcactacacccagcagagtcccgggtgccctctgtccccactgccggcccatgttctctctccggaggtcaccaaggaatgcacaggtttcgactaccagaaaggggagtccttgggttctttcaaaaaattcgtgaggagagctgtctacagtggaatagggggtctccctggggaatgcaggccaagtccttttattttaacatgatgtccatgaagaggtttgccgtctgggcagccctgtcggcaaggagcgtgcatactgcgtttgtgtaattgtttgctgtatctcccttccctctgagctgtattgttctttaatggctgtcttgcccttccaaaaaaaattgaaaaaaaaaaaaaaaaaaaaacccgaaaagtaaaaaaaaaaaaaaaaagttttgtttagtttactgtgaaatgaactgtatggcttatttacagtatttttaattcttaataaacacttgagctttgttatgacttt

SEQ ID NO: 362895 - DNA, 3008 bp, Homo sapiens
gtgagctccgtcagccgctcctccaccgtgttctccagggacgtgaagtcccgctcccgggcgtccttcaccacatggatcccagcccgcggcccgagccgccgccgcgcccgccatgccctcggccaaacaaaggggctccaagggcggccacggcgccgcgagcccctcggagaagggtgcccacccgtcggccgcgcgtcctctcgccgctccgacgccagcagcgcccgcgtgccgctcgcccagtcccgggggagcccctgcaagtttcccgggccgcgcgccgcgctcgctcgcctcccagcccgcggcccgagccgccgccgcccgcctcgtcctcggcgtcctgctcgcgcaggctcggcagggcgctcaactttctcttctacctcgccctggtggcggcggccgctttctcgggctggtgcgtccaccacgtcctggaggaggtccagcaggtccggcgcaccaccaggacttctcccggcagagggaggagctgggccagggcttgcagggcgtcgagcagaaggtgcagtctttgcaagccacatttggaacttttgagtccatcttgagaagctcccaacataaacaagacctcacagagaaagctgtgaagcaaggggagagtgaggtcagccggatcagcgaagtgctgcagaaactccagaatgagattctcaaagacctctcggatgggatccatgtggtgaaggacgcccgggagcgggacttcacgtccctggagaacacggtggaggagcggctgacggagctcaccaaatccatcaacgacaacatcgccatcttcacagaagtccagaagaggagccagaaggagatcaatgacatgaaggcaaaggttgcctccctggaagaatctgaggggaacaagcaggatttgaaagccttaaaggaagctgtgaaggagatacagacctcagccaagtccagagagtgggacatggaggccctgagaagtacccttcagactatggagtctgacatctacaccgaggtccgcgagctggtgagcctcaagcaggagcagcaggctttcaaggaggcggccgacacggagcggctcgccctgcaggccctcacggagaagcttctcaggtctgaggagtccgtctcccgcctcccggaggagatccggagactggaggaagagctccgccagctgaagtccgattcccacgggccgaaggaggacggaggcttcagacactcggaagcctttgaggcactccagcaaaagagtcagggactggactccaggctccagcacgtggaggatggggtgctctccatgcaggtggcttctgcgcgccagaccgagagcctggagtccctcctgtccaagagccaggagcacgagcagcgcctggccgccctgcaggggcgcctggaaggcctcgggtcctcagaggcagaccaggatggcctggccagcacggtgaggagcctgggcgagacccagctggtgctctacggtgacgtggaggagctgaagaggagtgtgggcgagctccccagcaccgtggaatcactccagaaggtgcaggagcaggtgcacacgctgctcagtcaggaccaagcccaggccgcccgtctgcctcctcaggacttcctggacagactttcttctctagacaacctgaaagcctcagtcagccaagtggaggcggacttgaaaatgctcaggactgctgtggacagtttggttgcatactcggtcaaaatagaaaccaacgagaacaatctggaatcagccaagggtttactagatgacctgaggaatgatctggataggttgtttgtgaaagtggagaagattcacgaaaaggtctaaatgaattgcgtgtgcagggcgcggatttaaagtccaatttctcatgaccaaaaaatgtgtggttttttcccatgtgtcccctaccccccaatttcttgtcccctcttaaagagcagttgtcaccacctgaacaccaaggcattgtattttcatgcccagttaacttatttacaatatttaagttctctgcttctgcatttggttggtttcctgaagcgcagcccctgtgaataacaggtggcttttcatggatgtctctagtcagagaaaaatgataaaggcttaaattgaggattaacagaagcagattaacctcagaaatcctgtctggctggcagatttcaagtaaaaaaaaaaaaaaggtgggttggggggacccttttctttctagttgtctttaaggaaaattaattttactttttttttgttctggccgaaatttttatgagatatctctcacttgtcttccactttgaaccggttaaagctcatagctgtcagctctgaatgaggaggggagaagcccctgggtctttctttgaaaggaatccgctgcttgagggctgcctccctcatggtgtgcgtgtcgtttctcttcctgacgcatcttgtgatatcagaggtaactatgcaaagcatccaggcggttctgaatgtgaagcactacacccagcagagtcccgggtgccctctgtccccactgccggcccatgttctctctccggaggtcaccaaggaatgcacaggtttcgactaccagaaaggggagtccttgggttctttcaaaaaattcgtgaggagagctgtctacagtggaatagggggtctccctggggaatgcaggccaagtccttttattttaacatgatgtccatgaagaggtttgccgtctgggcagccctgtcggcaaggagcgtgcatactgcgtttgtgtaattgtttgctgtatctcccttccctctgagctgtattgttctttaatggctgtcttgcccttccaaaaaaaattgaaaaaaaaaaaaaaaaaaaaacccgaaaagtaaaaaaaaaaaaaaaaagttttgtttagtttactgtgaaatgaactgtatggcttatttacagtatttttaattcttaataaacacttgagctttgttatgacttt

SEQ ID NO: 362896 - DNA, 2938 bp, Homo sapiens
gtgagctccgtcagccgctcctccaccgtgttctccagggacgtgaagtcccgctcccgggcgtccttcaccacatggatcccagcccgcggcccgagccgccgccgcgcccgccatgccctcggccaaacaaaggggctccaagggcggccacggcgccgcgagcccctcggagaagggtgcccacccgtcggccgcgcgtcctctcgccgctccgacgccagcagcgcccgcgtgccgctcgcccagtcccgggggagcccctgcaagtttcccgggccgcgcgccgcgctcgctcgcctcccagccccgcctcgtcctcggcgtcctgctcgcgcaggctcggcagggcgctcaactttctcttctacctcgccctggtggcggcggccgctttctcgggctggtgcgtccaccacgtcctggaggaggtccagcaggtccggcgcaccaccaggacttctcccggcagagggaggagctgggccagggcttgcagggcgtcgagcagaaggtgcagtctttgcaagccacatttggaacttttgagtccatcttgagaagctcccaacataaacaagacctcacagagaaagctgtgaagcaaggggagagtgaggtcagccggatcagcgaagtgctgcagaaactccagaatgagattctcaaagacctctcggatgggatccatgtggtgaaggacgcccgggagcgggacttcacgtccctggagaacacggtggaggagcggctgacggagctcaccaaatccatcaacgacaacatcgccatcttcacagaagtccagaagaggagccagaaggagatcaatgacatgaaggcaaaggttgcctccctggaagaatctgaggggaacaagcaggatttgaaagccttaaaggaagctgtgaaggagatacagacctcagccaagtccagagagtgggacatggaggccctgagaagtacccttcagactatggagtctgacatctacaccgaggtccgcgagctggtgagcctcaagcaggagcagcaggctttcaaggaggcggccgacacggagcggctcgccctgcaggccctcacggagaagcttctcaggtctgaggagtccgtctcccgcctcccggaggagatccggagactggaggaagagctccgccagctgaagtccgattcccacgggccgaaggaggacggaggcttcagacactcggaagcctttgaggcactccagcaatctccatgcaggtggcttctgcgcgccagaccgagagcctggagtccctcctgtccaagagccaggagcacgagcagcgcctggccgccctgcaggggcgcctggaaggcctcgggtcctcagaggcagaccaggatggcctggccagcacggtgaggagcctgggcgagacccagctggtgctctacggtgacgtggaggagctgaagaggagtgtgggcgagctccccagcaccgtggaatcactccagaaggtgcaggagcaggtgcacacgctgctcagtcaggaccaagcccaggccgcccgtctgcctcctcaggacttcctggacagactttcttctctagacaacctgaaagcctcagtcagccaagtggaggcggacttgaaaatgctcaggactgctgtggacagtttggttgcatactcggtcaaaatagaaaccaacgagaacaatctggaatcagccaagggtttactagatgacctgaggaatgatctggataggttgtttgtgaaagtggagaagattcacgaaaaggtctaaatgaattgcgtgtgcagggcgcggatttaaagtccaatttctcatgaccaaaaaatgtgtggttttttcccatgtgtcccctaccccccaatttcttgtcccctcttaaagagcagttgtcaccacctgaacaccaaggcattgtattttcatgcccagttaacttatttacaatatttaagttctctgcttctgcatttggttggtttcctgaagcgcagcccctgtgaataacaggtggcttttcatggatgtctctagtcagagaaaaatgataaaggcttaaattgaggattaacagaagcagattaacctcagaaatcctgtctggctggcagatttcaagtaaaaaaaaaaaaaaggtgggttggggggacccttttctttctagttgtctttaaggaaaattaattttactttttttttgttctggccgaaatttttatgagatatctctcacttgtcttccactttgaaccggttaaagctcatagctgtcagctctgaatgaggaggggagaagcccctgggtctttctttgaaaggaatccgctgcttgagggctgcctccctcatggtgtgcgtgtcgtttctcttcctgacgcatcttgtgatatcagaggtaactatgcaaagcatccaggcggttctgaatgtgaagcactacacccagcagagtcccgggtgccctctgtccccactgccggcccatgttctctctccggaggtcaccaaggaatgcacaggtttcgactaccagaaaggggagtccttgggttctttcaaaaaattcgtgaggagagctgtctacagtggaatagggggtctccctggggaatgcaggccaagtccttttattttaacatgatgtccatgaagaggtttgccgtctgggcagccctgtcggcaaggagcgtgcatactgcgtttgtgtaattgtttgctgtatctcccttccctctgagctgtattgttctttaatggctgtcttgcccttccaaaaaaaattgaaaaaaaaaaaaaaaaaaaaacccgaaaagtaaaaaaaaaaaaaaaaagttttgtttagtttactgtgaaatgaactgtatggcttatttacagtatttttaattcttaataaacacttgagctttgttatgacttt

SEQ ID NO: 362897 - DNA, 2894 bp, Homo sapiens
gtgagctccgtcagccgctcctccaccgtgttctccagggacgtgaagtcccgctcccgggcgtccttcaccacatggatcccagcccgcggcccgagccgccgccgcgcccgccatgccctcggccaaacaaaggggctccaagggcggccacggcgccgcgagcccctcggagaagggtgcccacccgtcggccgcgcgtcctctcgccgctccgacgccagcagcgcccgcgtgccgctcgcccagtcccgggggagcccctgcaagtttcccgggccgcgcgccgcgctcgctcgcctcccagccccgcctcgtcctcggcgtcctgctcgcgcaggctcggcagggcgctcaactttctcttctacctcgccctggtggcggcggccgctttctcgggctggtgcgtccaccacgtcctggaggaggtccagcaggtccggcgcaccaccaggacttctcccggcagagggaggagctgggccagggcttgcagggcgtcgagcagaaggtgcagtctttgcaagccacatttggaacttttgagtccatcttgagaagctcccaacataaacaagacctcacagagaaagctgtgaagcaaggggagagtgaggtcagccggatcagcgaagtgctgcagaaactccagaatgagattctcaaagacctctcggatgggatccatgtggtgaaggacgcccgggagcgggacttcacgtccctggagaacacggtggaggagcggctgacggagctcaccaaatccatcaacgacaacatcgccatcttcacagaagtccagaagaggagccagaaggagatcaatgacatgaaggcaaaggttgcctccctggaagaatctgaggggaacaagcaggatttgaaagccttaaaggaagctgtgaaggagatacagacctcagccaagtccagagagtgggacatggaggccctgagaagtacccttcagactatggagtctgacatctacaccgaggtccgcgagctggtgagcctcaagcaggagcagcaggctttcaaggaggcggccgacacggagcggctcgccctgcaggccctcacggagaagcttctcaggtctgaggagtccgtctcccgcctcccggaggagatccggagactggaggaagagctccgccagctgaagtccgattcccacgggccgaaggaggacggaggcttcagacactcggaagcctttgaggcactccagcaatccctcctgtccaagagccaggagcacgagcagcgcctggccgccctgcaggggcgcctggaaggcctcgggtcctcagaggcagaccaggatggcctggccagcacggtgaggagcctgggcgagacccagctggtgctctacggtgacgtggaggagctgaagaggagtgtgggcgagctccccagcaccgtggaatcactccagaaggtgcaggagcaggtgcacacgctgctcagtcaggaccaagcccaggccgcccgtctgcctcctcaggacttcctggacagactttcttctctagacaacctgaaagcctcagtcagccaagtggaggcggacttgaaaatgctcaggactgctgtggacagtttggttgcatactcggtcaaaatagaaaccaacgagaacaatctggaatcagccaagggtttactagatgacctgaggaatgatctggataggttgtttgtgaaagtggagaagattcacgaaaaggtctaaatgaattgcgtgtgcagggcgcggatttaaagtccaatttctcatgaccaaaaaatgtgtggttttttcccatgtgtcccctaccccccaatttcttgtcccctcttaaagagcagttgtcaccacctgaacaccaaggcattgtattttcatgcccagttaacttatttacaatatttaagttctctgcttctgcatttggttggtttcctgaagcgcagcccctgtgaataacaggtggcttttcatggatgtctctagtcagagaaaaatgataaaggcttaaattgaggattaacagaagcagattaacctcagaaatcctgtctggctggcagatttcaagtaaaaaaaaaaaaaaggtgggttggggggacccttttctttctagttgtctttaaggaaaattaattttactttttttttgttctggccgaaatttttatgagatatctctcacttgtcttccactttgaaccggttaaagctcatagctgtcagctctgaatgaggaggggagaagcccctgggtctttctttgaaaggaatccgctgcttgagggctgcctccctcatggtgtgcgtgtcgtttctcttcctgacgcatcttgtgatatcagaggtaactatgcaaagcatccaggcggttctgaatgtgaagcactacacccagcagagtcccgggtgccctctgtccccactgccggcccatgttctctctccggaggtcaccaaggaatgcacaggtttcgactaccagaaaggggagtccttgggttctttcaaaaaattcgtgaggagagctgtctacagtggaatagggggtctccctggggaatgcaggccaagtccttttattttaacatgatgtccatgaagaggtttgccgtctgggcagccctgtcggcaaggagcgtgcatactgcgtttgtgtaattgtttgctgtatctcccttccctctgagctgtattgttctttaatggctgtcttgcccttccaaaaaaaattgaaaaaaaaaaaaaaaaaaaaacccgaaaagtaaaaaaaaaaaaaaaaagttttgtttagtttactgtgaaatgaactgtatggcttatttacagtatttttaattcttaataaacacttgagctttgttatgacttt

SEQ ID NO: 362898 - DNA, 2926 bp, Homo sapiens
gtgagctccgtcagccgctcctccaccgtgttctccagggacgtgaagtcccgctcccgggcgtccttcaccacatggatcccagcccgcggcccgagccgccgccgcgcccgccatgccctcggccaaacaaaggggctccaagggcggccacggcgccgcgagcccctcggagaagggtgcccacccgtcggccgcgcgtcctctcgccgctccgacgccagcagcgcccgcgtgccgctcgcccagtcccgggggagcccctgcaagtttcccgggccgcgcgccgcgctcgctcgcctcccagccccgcctcgtcctcggcgtcctgctcgcgcaggctcggcagggcgctcaactttctcttctacctcgccctggtggcggcggccgctttctcgggctggtgcgtccaccacgtcctggaggaggtccagcaggtccggcgcaccaccaggacttctcccggcagagggaggagctgggccagggcttgcagggcgtcgagcagaaggtgcagtctttgcaagccacatttggaacttttgagtccatcttgagaagctcccaacataaacaagacctcacagagaaagctgtgaagcaaggggagagtgaggtcagccggatcagcgaagtgctgcagaaactccagaatgagattctcaaagacctctcggatgggatccatgtggtgaaggacgcccgggagcgggacttcacgtccctggagaacacggtggaggagcggctgacggagctcaccaaatccatcaacgacaacatcgccatcttcacagaagtccagaagaggagccagaaggagatcaatgacatgaaggcaaaggttgcctccctggaagaatctgaggggaacaagcaggatttgaaagccttaaaggaagctgtgaaggagatacagacctcagccaagtccagagagtgggacatggaggccctgagaagtacccttcagactatggagtctgacatctacaccgaggtccgcgagctggtgagcctcaagcaggagcagcaggctttcaaggaggcggccgacacggagcggctcgccctgcaggccctcacggagaagcttctcaggtctgaggagtccgtctcccgcctcccggaggagatccggagactggaggaagagctccgccagctgaagtccgattcccacgggccgaaggaggacggaggcttcagacactcggaagcctttgaggcactccagcaaaagagtcagggactggactccaggctccagcacgtggaggatggggtgctctccatgcaggtggcttctgcgcgccagaccgagagcctggagtccctcctgtccaagagccaggagcacgagcagcgcctggccgccctgcaggggcgcctggaaggcctcgggtcctcagaggcagaccaggatggcctggccagcacggtgaggagcctgggcgagacccagctggtgctctacggtgacgtggaggagctgaagaggagtgtgggcgagctccccagcaccgtggaatcactccagaaggtgcaggagcaggtgcacacgctgctcagtcaggaccaagcccaggccgcccgtctgcctcctcaggacttcctggacagactttcttctctagacaacctgaaagcctcagtcagccaagtggaggcggacttgaaaatgctcaggactgctgtggacagtttggttgcatactcggtcaaaatagaaaccaacgagaacaatctggaatcagccaagggtttactagatgacctgaggaatgatctggataggttgtttgtgaaagtggagaagattcacgaaaaggtctaaatgaattgcgtgtgcagggcgcggatttaaagtccaatttctcatgaccaaacagttgtcaccacctgaacaccaaggcattgtattttcatgcccagttaacttatttacaatatttaagttctctgcttctgcatttggttggtttcctgaagcgcagcccctgtgaataacaggtggcttttcatggatgtctctagtcagagaaaaatgataaaggcttaaattgaggattaacagaagcagattaacctcagaaatcctgtctggctggcagatttcaagtaaaaaaaaaaaaaaggtgggttggggggacccttttctttctagttgtctttaaggaaaattaattttactttttttttgttctggccgaaatttttatgagatatctctcacttgtcttccactttgaaccggttaaagctcatagctgtcagctctgaatgaggaggggagaagcccctgggtctttctttgaaaggaatccgctgcttgagggctgcctccctcatggtgtgcgtgtcgtttctcttcctgacgcatcttgtgatatcagaggtaactatgcaaagcatccaggcggttctgaatgtgaagcactacacccagcagagtcccgggtgccctctgtccccactgccggcccatgttctctctccggaggtcaccaaggaatgcacaggtttcgactaccagaaaggggagtccttgggttctttcaaaaaattcgtgaggagagctgtctacagtggaatagggggtctccctggggaatgcaggccaagtccttttattttaacatgatgtccatgaagaggtttgccgtctgggcagccctgtcggcaaggagcgtgcatactgcgtttgtgtaattgtttgctgtatctcccttccctctgagctgtattgttctttaatggctgtcttgcccttccaaaaaaaattgaaaaaaaaaaaaaaaaaaaaacccgaaaagtaaaaaaaaaaaaaaaaagttttgtttagtttactgtgaaatgaactgtatggcttatttacagtatttttaattcttaataaacacttgagctttgttatgacttt

SEQ ID NO: 362899 - DNA, 1857 bp, Homo sapiens
tgactcttttgctggagtgcctcaaaggcttccgagtgtctgaagcctccgtcctccttcggcccgtgggaatcggcttcagacactcggaagcctttgaggcactccagcaaaagagtcagggactggactccaggctccagcacgtggaggatggggtgctctccatgcaggtggcttctgcgcgccagaccgagagcctggagtccctcctgtccaagagccaggagcacgagcagcgcctggccgccctgcaggggcgcctggaaggcctcgggtcctcagaggcagaccaggatggcctggccagcacggtgaggagcctgggcgagacccagctggtgctctacggtgacgtggaggagctgaagaggagtgtgggcgagctccccagcaccgtggaatcactccagaaggtgcaggagcaggtgcacacgctgctcagtcaggaccaagcccaggccgcccgtctgcctcctcaggacttcctggacagactttcttctctagacaacctgaaagcctcagtcagccaagtggaggcggacttgaaaatgctcaggactgctgtggacagtttggttgcatactcggtcaaaatagaaaccaacgagaacaatctggaatcagccaagggtttactagatgacctgaggaatgatctggataggttgtttgtgaaagtggagaagattcacgaaaaggtctaaatgaattgcgtgtgcagggcgcggatttaaagtccaatttctcatgaccaaaaaatgtgtggttttttcccatgtgtcccctaccccccaatttcttgtcccctcttaaagagcagttgtcaccacctgaacaccaaggcattgtattttcatgcccagttaacttatttacaatatttaagttctctgcttctgcatttggttggtttcctgaagcgcagcccctgtgaataacaggtggcttttcatggatgtctctagtcagagaaaaatgataaaggcttaaattgaggattaacagaagcagattaacctcagaaatcctgtctggctggcagatttcaagtaaaaaaaaaaaaaaggtgggttggggggacccttttctttctagttgtctttaaggaaaattaattttactttttttttgttctggccgaaatttttatgagatatctctcacttgtcttccactttgaaccggttaaagctcatagctgtcagctctgaatgaggaggggagaagcccctgggtctttctttgaaaggaatccgctgcttgagggctgcctccctcatggtgtgcgtgtcgtttctcttcctgacgcatcttgtgatatcagaggtaactatgcaaagcatccaggcggttctgaatgtgaagcactacacccagcagagtcccgggtgccctctgtccccactgccggcccatgttctctctccggaggtcaccaaggaatgcacaggtttcgactaccagaaaggggagtccttgggttctttcaaaaaattcgtgaggagagctgtctacagtggaatagggggtctccctggggaatgcaggccaagtccttttattttaacatgatgtccatgaagaggtttgccgtctgggcagccctgtcggcaaggagcgtgcatactgcgtttgtgtaattgtttgctgtatctcccttccctctgagctgtattgttctttaatggctgtcttgcccttccaaaaaaaattgaaaaaaaaaaaaaaaaaaaaacccgaaaagtaaaaaaaaaaaaaaaaagttttgtttagtttactgtgaaatgaactgtatggcttatttacagtatttttaattcttaataaacacttgagctttgttatgacttt

SEQ ID NO: 362900 - DNA, 3314 bp, Homo sapiens
gtgagctccgtcagccgctcctccaccgtgttctccagggacgtgaagtcccgctcccgggcgtccttcaccacatggatcccagcccgcggcccgagccgccgccgcgcccgccatgccctcggccaaacaaaggggctccaagggcggccacggcgccgcgagcccctcggagaagggtgcccacccgtcggccgcgcgtcctctcgccgctccgacgccagcagcgcccgcgtgccgctcgcccagtcccgggggagcccctgcaagtttcccgggccgcgcgccgcgctcgctcgcctcccagccccgcctcgtcctcggcgtcctgctcgcgcaggctcggcagggcgctcaactttctcttctacctcgccctggtggcggcggccgctttctcgggctggtgcgtccaccacgtcctggaggaggtccagcaggtccggcgcaccaccaggacttctcccggcagagggaggagctgggccagggcttgcagggcgtcgagcagaaggtgcagtctttgcaagccacatttggaacttttgagtccatcttgagaagctcccaacataaacaagacctcacagagaaagctgtgaagcaaggggagagtgaggtcagccggatcagcgaagtgctgcagaaactccagaatgagattctcaaagacctctcggatgggatccatgtggtgaaggacgcccgggagcgggacttcacgtccctggagaacacggtggaggagcggctgacggagctcaccaaatccatcaacgacaacatcgccatcttcacagaagtccagaagaggagccagaaggagatcaatgacatgaaggcaaaggttgcctccctggaagaatctgaggggaacaagcaggatttgaaagccttaaaggaagctgtgaaggagatacagacctcagccaagtccagagagtgggacatggaggccctgagaagtacccttcagactatggagtctgacatctacaccgaggtccgcgagctggtgagcctcaagcaggagcagcaggctttcaaggaggcggccgacacggagcggctcgccctgcaggccctcacggagaagcttctcaggtctgaggagtccgtctcccgcctcccggaggagatccggagactggaggaagagctccgccagctgaagtccgattcccacgggccgaaggaggacggaggcttcagacactcggaagcctttgaggcactccagcaaaagagtcagggactggactccaggctccagcacgtggaggatggggtgctctccatgcaggtggcttctgcgcgccagaccgagagcctggagtccctcctgtccaagagccaggagcacgagcagcgcctggccgccctgcaggggcgcctggaaggcctcgggtcctcagaggcagaccaggatggcctggccagcacggtgaggagcctgggcgagacccagctggtgctctacggtgacgtggaggagctgaagaggagtgtgggcgagctccccagcaccgtggaatcactccagaaggtgcaggagcaggtgcacacgctgctcagtcaggaccaagcccaggccgcccgtctgcctcctcaggacttcctggacagactttcttctctagacaacctgaaagcctcagtcagccaagtggaggcggacttgaaaatgctcaggactgctgtggacagtttggttgcatactcggtcaaaatagaaaccaacgagaacaatctggaatcagccaagggtttactagatgacctgaggaatgatctggataggttgtttgtgaaagtggagaagattcacgaaaaggtctaaatgaattgcgtgtgcagggcgcggatttaaagtccaatttctcatgaccaaaaaatgtgtggttttttcccatgtgtcccctaccccccaatttcttgtcccctcttaaagagcagttgtcaccacctgaacaccaaggcattgtattttcatgcccagttaacttatttacaatatttaagttctctgcttctgcatttggttggtttcctgaagcgcagcccctgtgaataacaggtggcttttcatggatgtctctagtcagagaaaaatgataaaggcttaaattgaggattaacagaagcagattaacctcagaaatcctgtctggctggcagatttcaagtaaaaaaaaaaaaaaggtgggttggggggacccttttctttctagttgtctttaaggaaaattaattttactttttttttgttctggccgaaatttttatgagatatctctcacttgtcttccactttgaaccggttaaagctcatagctgtcagctctgaatgaggaggggagaagcccctgggtctttctttgaaaggaatccgctgcttgagggctgcctccctcatggtgtgcgtgtcgtttctcttcctgacgcatcttgtgatatcagaggtaactatgcaaagcatccaggcggttctgaatgtgaagcactacacccagcagagtcccgggtgccctctgtccccactgccggcccatgttctctctccggaggtcaccaaggaatgcacaggtttcgactaccagaaaggggagtccttgggttctttcaaaaaattcgtgaggagagctgtctacagtggaatagggggtctccctggggaatgcaggccaagtccttttattttaacatgatgtccatgaagaggtttgccgtctgggcagccctgtcggcaaggagcgtgcatactgcgtttgtgtaattgtttgctgtatctcccttccctctgagctgtattgttctttaatggctgtcttgcccctcgtgccgaattcggcacgaggagagaactagtctcgagtttttttttttttttccttttaaatgaagaaaagctttgcttaagggttgcatacttttattggagtaaatctgaatgatcctactcctttggagtaaaactagtgcttaccagtttccaattgtatttagcttttggttggaatttgaaaaaaaaagaaacaaagaaaaagaaaacctaaataaaataggtgaaagttccctgactattcaggtgaatacacaaaaaatattaattatatattattattaattaattttatttatatattatattattctattctattatctatactttttatttttttttatttttctcttttctcttatactctttaaatataaaatatatcttctggtggggcctctcttccacatttccctttttggggcggtttcaaattatatgtgcccctttttaacaaactttgtctggg

SEQ ID NO: 362901 - DNA, 2861 bp, Homo sapiens
  misc_feature (2847)..(2847): n is a, c, g, or t
gtgagctccgtcagccgctcctccaccgtgttctccagggacgtgaagtcccgctcccgggcgtccttcaccacatggatcccagcccgcggcccgagccgccgccgcgcccgccatgccctcggccaaacaaaggggctccaagggcggccacggcgccgcgagcccctcggagaagggtgcccacccgtcggccgcgcgtcctctcgccgctccgacgccagcagcgcccgcgtgccgctcgcccagtcccgggggagcccctgcaagtttcccgggccgcgcgccgcgctcgctcgcctcccagccccgcctcgtcctcggcgtcctgctcgcgcaggctcggcagggcgctcaactttctcttctacctcgccctggtggcggcggccgctttctcgggctggtgcgtccaccacgtcctggaggaggtccagcaggtccggcgcaccaccaggacttctcccggcagagggaggagctgggccagggcttgcagggcgtcgagcagaaggtgcagtctttgcaagccacatttggaacttttgagtccatcttgagaagctcccaacataaacaagacctcacagagaaagctgtgaagcaaggggagagtgaggtcagccggatcagcgaagtgctgcagaaactccagaatgagattctcaaagacctctcggatgggatccatgtggtgaaggacgcccgggagcgggacttcacgtccctggagaacacggtggaggagcggctgacggagctcaccaaatccatcaacgacaacatcgccatcttcacagaagtccagaagaggagccagaaggagatcaatgacatgaaggcaaaggttgcctccctggaagaatctgaggggaacaagcaggatttgaaagccttaaaggaagctgtgaaggagatacagacctcagccaagtccagagagtgggacatggaggccctgagaagtacccttcagactatggagtctgacatctacaccgaggtccgcgagctggtgagcctcaagcaggagcagcaggctttcaaggaggcggccgacacggagcggctcgccctgcaggccctcacggagaagcttctcaggtctgaggagtccgtctcccgcctcccggaggagatccggagactggaggaagagctccgccagctgaagtccgattcccacgggccgaaggaggacggaggcttcagacactcggaagcctttgaggcactccagcaaaagagtcagggactggactccaggctccagcacgtggaggatggggtgctctccatgcaggtggcttctgcgcgccagaccgagagcctggagtccctcctgtccaagagccaggagcacgagcagcgcctggccgccctgcaggggcgcctggaaggcctcgggtcctcagaggcagaccaggatggcctggccagcacggtgaggagcctgggcgagacccagctggtgctctacggtgacgtggaggagctgaagaggagtgtgggcgagctccccagcaccgtggaatcactccagaaggtgcaggagcaggtgcacacgctgctcagtcaggaccaagcccaggccgcccgtctgcctcctcaggacttcctggacagactttcttctctagacaacctgaaagcctcagtcagccaagtggaggcggacttgaaaatgctcaggactgctgtggacagtttggttgcatactcggtcaaaatagaaaccaacgagaacaatctggaatcagccaagggtttactagatgacctgaggaatgatctggataggttgtttgtgaaagtggagaagattcacgaaaaggtctaaatgaattgcgtgtgcagggcgcggatttaaagtccaatttctcatgaccaaaaaatgtgtggttttttcccatgtgtcccctaccccccaatttcttgtcccctcttaaagagcagttgtcaccacctgaacaccaaggcattgtattttcatgcccagttaacttatttacaatatttaagttctctgcttctgcatttggttggtttcctgaagcgcagcccctgtgaataacaggtggcttttcatggatgtctctagtcagagaaaaatgataaaggcttaaattgaggattaacagaagcagattaacctcagaaatcctgtctggctggcagatttcaagtaaaaaaaaaaaaaaggtgggttggggggacccttttctttctagttgtctttaaggaaaattaattttactttttttttgttctggccgaaatttttatgagatatctctcacttgtcttccactttgaaccggttaaagctcatagctgtcagctctgaatgaggaggggagaagcccctgggtctttctttgaaaggaatccgctgcttgagggctgcctccctcatggtgtgcgtgtcgtttctcttcctgacgcatcttgtgatatcagaggtaactatgcaaagcatccaggcggttctgaatgtgaagcactacacccagcagagtcccgggtgccctctgtccccactgccggcccatgttctctctccggaggtcaccaaggaatgcacaggtttcgactaccagaaaggggagtccttgggttctttcaaaaaattcgtgaggagagctgtctacagtggaatagggggtctccctggggaatgcaggccaagtccttttattttaacatgatgtccatgaagaggtttgccgtctgggcagccctgtcggcaaggagcgtgcatactgcgtttgtgtaattgtttgctgtatctcccttccctctgagctgtattgttctttaatggctgtcttgcccgggctagtcggnaggatcctctagag

SEQ ID NO: 362902 - DNA, 1736 bp, Homo sapiens
  misc_feature (3)..(3): n is a, c, g, or t
tanaagaagtcaaggaacacctatctaaacagtagtggtgagtccactctatcaagccaacccaaaatggtgccactctcattatatggaacttctgctttttgccaactaatcagaaataggaaagtgcacaccagtatgcacaatgacctaattgctcatatggaattcaaacagcagtcatgctgtcccccactgtaaaagatctagttctccaattaatcacaatctgttacgatgagtgaggaggtttgaggtgttggggatacccaacaccgtggaatcactccagaaggtgcaggagcaggtgcacacgctgctcagtcaggaccaagcccaggccgcccgtctgcctcctcaggacttcctggacagactttcttctctagacaacctgaaagcctcagtcagccaagtggaggcggacttgaaaatgctcaggactgctgtggacagtttggttgcatactcggtcaaaatagaaaccaacgagaacaatctggaatcagccaagggtttactagatgacctgaggaatgatctggataggttgtttgtgaaagtggagaagattcacgaaaaggtctaaatgaattgcgtgtgcagggcgcggatttaaagtccaatttctcatgaccaaaaaatgtgtggttttttcccatgtgtcccctaccccccaatttcttgtcccctcttaaagagcagttgtcaccacctgaacaccaaggcattgtattttcatgcccagttaacttatttacaatatttaagttctctgcttctgcatttggttggtttcctgaagcgcagcccctgtgaataacaggtggcttttcatggatgtctctagtcagagaaaaatgataaaggcttaaattgaggattaacagaagcagattaacctcagaaatcctgtctggctggcagatttcaagtaaaaaaaaaaaaaaggtgggttggggggacccttttctttctagttgtctttaaggaaaattaattttactttttttttgttctggccgaaatttttatgagatatctctcacttgtcttccactttgaaccggttaaagctcatagctgtcagctctgaatgaggaggggagaagcccctgggtctttctttgaaaggaatccgctgcttgagggctgcctccctcatggtgtgcgtgtcgtttctcttcctgacgcatcttgtgatatcagaggtaactatgcaaagcatccaggcggttctgaatgtgaagcactacacccagcagagtcccgggtgccctctgtccccactgccggcccatgttctctctccggaggtcaccaaggaatgcacaggtttcgactaccagaaaggggagtccttgggttctttcaaaaaattcgtgaggagagctgtctacagtggaatagggggtctccctggggaatgcaggccaagtccttttattttaacatgatgtccatgaagaggtttgccgtctgggcagccctgtcggcaaggagcgtgcatactgcgtttgtgtaattgtttgctgtatctcccttccctctgagctgtattgttctttaatggctgtcttgcccttccaaaaaaaattgaaaaaaaaaaaaaaaaaaaaacccgaaaagtaaaaaaaaaaaaaaaaagttttgtttagtttactgtgaaatgaactgtatggcttatttacagtatttttaattcttaataaacacttgagctttgttatgacttt

SEQ ID NO: 362903 - DNA, 2859 bp, Homo sapiens
gtgagctccgtcagccgctcctccaccgtgttctccagggacgtgaagtcccgctcccgggcgtccttcaccacatggatcccagcccgcggcccgagccgccgccgcgcccgccatgccctcggccaaacaaaggggctccaagggcggccacggcgccgcgagcccctcggagaagggtgcccacccgtcggccgcgcgtcctctcgccgctccgacgccagcagcgcccgcgtgccgctcgcccagtcccgggggagcccctgcaagtttcccgggccgcgcgccgcgctcgctcgcctcccagccccgcctcgtcctcggcgtcctgctcgcgcaggctcggcagggcgctcaactttctcttctacctcgccctggtggcggcggccgctttctcgggctggtgcgtccaccacgtcctggaggaggtccagcaggtccggcgcaccaccaggacttctcccggcagagggaggagctgggccagggcttgcagggcgtcgagcagaaggtgcagtctttgcaagccacatttggaacttttgagtccatcttgagaagctcccaacataaacaagacctcacagagaaagctgtgaagcaaggggagagtgaggtcagccggatcagcgaagtgctgcagaaactccagaatgagattctcaaagacctctcggatgggatccatgtggtgaaggacgcccgggagcgggacttcacgtccctggagaacacggtggaggagcggctgacggagctcaccaaatccatcaacgacaacatcgccatcttcacagaagtccagaagaggagccagaaggagatcaatgacatgaaggcaaaggttgcctccctggaagaatctgaggggaacaagcaggatttgaaagccttaaaggaagctgtgaaggagatacagacctcagccaagtccagagagtgggacatggaggccctgagaagtacccttcagactatggagtctgacatctacaccgaggtccgcgagctggtgagcctcaagcaggagcagcaggctttcaaggaggcggccgacacggagcggctcgccctgcaggccctcacggagaagcttctcaggtctgaggagtccgtctcccgcctcccggaggagatccggagactggaggaagagctccgccagctgaagtccgattcccacgggccgaaggaggacggaggcttcagacactcggaagcctttgaggcactccagcaaaagagtcagggactggactccaggctccagcacgtggaggatggggtgctctccatgcaggtggcttctgcgcgccagaccgagagcctggagtccctcctgtccaagagccaggagcacgagcagcgcctggccgccctgcaggggcgcctggaaggcctcgggtcctcagaggcagaccaggatggcctggccagcacggtgaggagcctgggcgagacccagctggtgctctacggtgacgtggaggagctgaagaggagtgtgggcgagctccccagcaccgtggaatcactccagaaggtgcaggagcaggtgcacacgctgctcagtcaggaccaagcccaggccgcccgtctgcctcctcaggacttcctggacagactttcttctctagacaacctgaaagcctcagtcagccaagtggaggcggacttgaaaatgctcaggactgctgtggacagtttggttgcatactcggtcaaaatagaaaccaacgagaacaatctggaatcagccaagggtttactagatgacctgaggaatgatctggataggttgtttgtgaaagtggagaagattcacgaaaaggtctaaatgaattgcgtgtgcagggcgcggatttaaagtccaatttctcatgaccaaaaaatgtgtggttttttcccatgtgtcccctaccccccaatttcttgtcccctcttaaagagcagttgtcaccacctgaacaccaaggcattgtattttcatgcccagttaacttatttacaatatttaagttctctgcttctgcatttggttggtttcctgaagcgcagcccctgtgaataacaggtggcttttcatggatgtctctagtcagagaaaaatgataaaggcttaaattgaggattaacagaagcagattaacctcagaaatcctgtctggctggcagatttcaagtaaaaaaaaaaaaaaggtgggttggggggacccttttctttctagttgtctttaaggaaaattaattttactttttttttgttctggccgaaatttttatgagatatctctcacttgtcttccactttgaaccggttaaagctcatagctgtcagctctgaatgaggaggggagaagcccctgggtctttctttgaaaggaatccgctgcttgagggctgcctccctcatggtgtgcgtgtcgtttctcttcctgacgcatcttgtgatatcagaggtaactatgcaaagcatccaggcggttctgaatgtgaagcactacacccagcagagtcccgggtgccctctgtccccactgccggcccatgttctctctccggaggtcaccaaggaatgcacaggtttcgactaccagaaaggggagtccttgggttctttcaaacgcaatcgagaggagaggcgatctccagaggaaacgggcggtatccatgggggcatgccgggactaagatcctagtatctgtcgagcactgaagtacaattgttgacgacaggccatagggtatgaggccctgttgggcctaggtgaggtgactaactgtcgtatgatgtaattgatctgaaaggagatcctcctgccctgtccggaattcctcggtatcgttatctacctc

SEQ ID NO: 362904 - DNA, 1128 bp, Homo sapiens
tctctctctctgtctctctctctctctctctctaaatgtgtggttttttcccatgtgtcccctaccccccaatttcttgtcccctcttaaagagcagttgtcaccacctgaacaccaaggcattgtattttcatgcccagttaacttatttacaatatttaagttctctgcttctgcatttggttggtttcctgaagcgcagcccctgtgaataacaggtggcttttcatggatgtctctagtcagagaaaaatgataaaggcttaaattgaggattaacagaagcagattaacctcagaaatcctgtctggctggcagatttcaagtaaaaaaaaaaaaaaggtgggttggggggacccttttctttctagttgtctttaaggaaaattaattttactttttttttgttctggccgaaatttttatgagatatctctcacttgtcttccactttgaaccggttaaagctcatagctgtcagctctgaatgaggaggggagaagcccctgggtctttctttgaaaggaatccgctgcttgagggctgcctccctcatggtgtgcgtgtcgtttctcttcctgacgcatcttgtgatatcagaggtaactatgcaaagcatccaggcggttctgaatgtgaagcactacacccagcagagtcccgggtgccctctgtccccactgccggcccatgttctctctccggaggtcaccaaggaatgcacaggtttcgactaccagaaaggggagtccttgggttctttcaaaaaattcgtgaggagagctgtctacagtggaatagggggtctccctggggaatgcaggccaagtccttttattttaacatgatgtccatgaagaggtttgccgtctgggcagccctgtcggcaaggagcgtgcatactgcgtttgtgtaattgtttgctgtatctcccttccctctgagctgtattgttctttaatggctgtcttgcccttccaaaaaaaattgaaaaaaaaaaaaaaaaaaaaacccgaaaagtaaaaaaaaaaaaaaaaagttttgtttagtttactgtgaaatgaactgtatggcttatttacagtatttttaattcttaataaacacttgagctttgttatgacttt

SEQ ID NO: 362905 - DNA, 2987 bp, Homo sapiens
gtgagctccgtcagccgctcctccaccgtgttctccagggacgtgaagtcccgctcccgggcgtccttcaccacatggatcccagcccgcggcccgagccgccgccgcgcccgccatgccctcggccaaacaaaggggctccaagggcggccacggcgccgcgagcccctcggagaagggtgcccacccgtcggccgcgcgtcctctcgccgctccgacgccagcagcgcccgcgtgccgctcgcccagtcccgggggagcccctgcaagtttcccgggccgcgcgccgcgctcgctcgcctcccagccccgcctcgtcctcggcgtcctgctcgcgcaggctcggcagggcgctcaactttctcttctacctcgccctggtggcggcggccgctttctcgggctggtgcgtccaccacgtcctggaggaggtccagcaggtccggcgcaccaccaggacttctcccggcagagggaggagctgggccagggcttgcagggcgtcgagcagaaggtgcagtctttgcaagccacatttggaacttttgagtccatcttgagaagctcccaacataaacaagacctcacagagaaagctgtgaagcaaggggagagtgaggtcagccggatcagcgaagtgctgcagaaactccagaatgagattctcaaagacctctcggatgggatccatgtggtgaaggacgcccgggagcgggacttcacgtccctggagaacacggtggaggagcggctgacggagctcaccaaatccatcaacgacaacatcgccatcttcacagaagtccagaagaggagccagaaggagatcaatgacatgaaggcaaaggttgcctccctggaagaatctgaggggaacaagcaggatttgaaagccttaaaggaagctgtgaaggagatacagacctcagccaagtccagagagtgggacatggaggccctgagaagtacccttcagactatggagtctgacatctacaccgaggtccgcgagctggtgagcctcaagcaggagcagcaggctttcaaggaggcggccgacacggagcggctcgccctgcaggccctcacggagaagcttctcaggtctgaggagtccgtctcccgcctcccggaggagatccggagactggaggaagagctccgccagctgaagtccgattcccacgggccgaaggaggacggaggcttcagacactcggaagcctttgaggcactccagcaaaagagtcagggactggactccaggctccagcacgtggaggatggggtgctctccatgcaggtggcttctgcgcgccagaccgagagcctggagtccctcctgtccaagagccaggagcacgagcagcgcctggccgccctgcaggggcgcctggaaggcctcgggtcctcagaggcagaccaggatggcctggccagcacggtgaggagcctgggcgagacccagctggtgctctacggtgacgtggaggagctgaagaggagtgtgggcgagctccccagcaccgtggaatcactccagaaggtgcaggagcaggtgcacacgctgctcagtcaggaccaagcccaggccgcccgtctgcctcctcaggacttcctggacagactttcttctctagacaacctgaaagcctcagtcagccaagtggaggcggacttgaaaatgctcaggactgctgtggacagtttggttgcatactcggtcaaaatagaaaccaacgagaacaatctggaatcagccaagggtttactagatgacctgaggaatgatctggataggttgtttgtgaaagtggagaagattcacgaaaaggtctaaatgaattgcgtgtgcagggcgcggatttaaagtccaatttctcatgaccaaaaaatgtgtggttttttcccatgtgtcccctaccccccaatttcttgtcccctcttaaagagcagttgtcaccacctgaacaccaaggcattgtattttcatgcccagttaacttatttacaatatttaagttctctgcttctgcatttggttggtttcctgaagcgcagcccctgtgaataacaggtggcttttcatggatgtctctagtcagagaaaaatgataaaggcttaaattgaggattaacagaagcagattaacctcagaaatcctgtctggctggcagatttcaagtaaaaaaaaaaaaaaggtgggttggggggacccttttctttctagttgtctttaaggaaaattaattttactttttttttgttctggccgaaatttttatgagatatctctcacttgtcttccactttgaaccggttaaagctcatagctgtcagctctgaatgaggaggggagaagcccctgggtctttctttgaaaggaatccgctgcttgagggctgcctccctcatggtgtgcgtgtcgtttctcttcctgacgcatcttgtgatatcagaggtaactatgcaaagcatccaggcggttctgaatgtgaagcactacacccagcagagtcccgggtgccctctgtccccactgccggcccatgttctctctccggaggtcaccaaggaatgcacaggtttcgactaccagaaaggggagtccttgggttctttcaaaaaattcgtgaggagagctgtctacagtggaatagggggtctccctggggaatgcaggccaagtccttttattttaacatgatgtccatgaagaggtttgccgtctgggcagccctgtcggcaaggagcgtgcatactgcgtttgtgtaattgtttgctgtatctcccttccctctgagctgtattgttctttaatggctgtcttgcccttccaaaaaaaattgaaaaaaaaaaaaaaaaaaaaacccgaaaagtaaaaaaaaaaaaaaaaagttttgtttagtttactgtgaaatgaactgtatggcttatttacagtatttttaattcttaataaacacttgagctttgttatgacttt

SEQ ID NO: 362906 - DNA, 2833 bp, Homo sapiens
gggccgcgggccggcgtgcgtggcaagctctcccggctcggctcgctcggcctcccttaccgggaggcggggtcggcgccgcggcggcggaggcaggccccctcctcccgcctcctcggcccggcctccttccccggccgcgcgtcctctcgccgccgcctcgtcctcggcgtcctgctcgcgcaggctcggcagggcgctcaactttctcttctacctcgccctggtggcggcggccgctttctcgggctggtgcgtccaccacgtcctggaggaggtccagcaggtccggcgcaccaccaggacttctcccggcagagggaggagctgggccagggcttgcagggcgtcgagcagaaggtgcagtctttgcaagccacatttggaacttttgagtccatcttgagaagctcccaacataaacaagacctcacagagaaagctgtgaagcaaggggagagtgaggtcagccggatcagcgaagtgctgcagaaactccagaatgagattctcaaagacctctcggatgggatccatgtggtgaaggacgcccgggagcgggacttcacgtccctggagaacacggtggaggagcggctgacggagctcaccaaatccatcaacgacaacatcgccatcttcacagaagtccagaagaggagccagaaggagatcaatgacatgaaggcaaaggttgcctccctggaagaatctgaggggaacaagcaggatttgaaagccttaaaggaagctgtgaaggagatacagacctcagccaagtccagagagtgggacatggaggccctgagaagtacccttcagactatggagtctgacatctacaccgaggtccgcgagctggtgagcctcaagcaggagcagcaggctttcaaggaggcggccgacacggagcggctcgccctgcaggccctcacggagaagcttctcaggtctgaggagtccgtctcccgcctcccggaggagatccggagactggaggaagagctccgccagctgaagtccgattcccacgggccgaaggaggacggaggcttcagacactcggaagcctttgaggcactccagcaaaagagtcagggactggactccaggctccagcacgtggaggatggggtgctctccatgcaggtggcttctgcgcgccagaccgagagcctggagtccctcctgtccaagagccaggagcacgagcagcgcctggccgccctgcaggggcgcctggaaggcctcgggtcctcagaggcagaccaggatggcctggccagcacggtgaggagcctgggcgagacccagctggtgctctacggtgacgtggaggagctgaagaggagtgtgggcgagctccccagcaccgtggaatcactccagaaggtgcaggagcaggtgcacacgctgctcagtcaggaccaagcccaggccgcccgtctgcctcctcaggacttcctggacagactttcttctctagacaacctgaaagcctcagtcagccaagtggaggcggacttgaaaatgctcaggactgctgtggacagtttggttgcatactcggtcaaaatagaaaccaacgagaacaatctggaatcagccaagggtttactagatgacctgaggaatgatctggataggttgtttgtgaaagtggagaagattcacgaaaaggtctaaatgaattgcgtgtgcagggcgcggatttaaagtccaatttctcatgaccaaaaaatgtgtggttttttcccatgtgtcccctaccccccaatttcttgtcccctcttaaagagcagttgtcaccacctgaacaccaaggcattgtattttcatgcccagttaacttatttacaatatttaagttctctgcttctgcatttggttggtttcctgaagcgcagcccctgtgaataacaggtggcttttcatggatgtctctagtcagagaaaaatgataaaggcttaaattgaggattaacagaagcagattaacctcagaaatcctgtctggctggcagatttcaagtaaaaaaaaaaaaaaggtgggttggggggacccttttctttctagttgtctttaaggaaaattaattttactttttttttgttctggccgaaatttttatgagatatctctcacttgtcttccactttgaaccggttaaagctcatagctgtcagctctgaatgaggaggggagaagcccctgggtctttctttgaaaggaatccgctgcttgagggctgcctccctcatggtgtgcgtgtcgtttctcttcctgacgcatcttgtgatatcagaggtaactatgcaaagcatccaggcggttctgaatgtgaagcactacacccagcagagtcccgggtgccctctgtccccactgccggcccatgttctctctccggaggtcaccaaggaatgcacaggtttcgactaccagaaaggggagtccttgggttctttcaaaaaattcgtgaggagagctgtctacagtggaatagggggtctccctggggaatgcaggccaagtccttttattttaacatgatgtccatgaagaggtttgccgtctgggcagccctgtcggcaaggagcgtgcatactgcgtttgtgtaattgtttgctgtatctcccttccctctgagctgtattgttctttaatggctgtcttgcccttccaaaaaaaattgaaaaaaaaaaaaaaaaaaaaacccgaaaagtaaaaaaaaaaaaaaaaagttttgtttagtttactgtgaaatgaactgtatggcttatttacagtatttttaattcttaataaacacttgagctttgttatgacttt

SEQ ID NO: 362907 - DNA, 2852 bp, Homo sapiens
tgctggtctgttttgttttaatacctgtgcttccccctctggggccctcaacctctcacaaaatggcattgaagctgcttccacacatgactgggtatcttcggccctgggcctcttcaaatcaggcaacttccactggctgtcagggtgatgcatgaaatccctagagaagagaggaaaaggaccacggcagggagcctcctcaagtgggaaccactgagattaactcattatccgttggcagagagggcttctcactctattgcccaggctgatgtgcagtagccattcactggtgagatcatcacgcgctacagcatcaaactcctggcctcaagtgatccccctgcctcagcctccgaagtagctgggattacaggtgcagtctttgcaagccacatttggaacttttgagtccatcttgagaagctcccaacataaacaagacctcacagagaaagctgtgaagcaaggggagagtgaggtcagccggatcagcgaagtgctgcagaaactccagaatgagattctcaaagacctctcggatgggatccatgtggtgaaggacgcccgggagcgggacttcacgtccctggagaacacggtggaggagcggctgacggagctcaccaaatccatcaacgacaacatcgccatcttcacagaagtccagaagaggagccagaaggagatcaatgacatgaaggcaaaggttgcctccctggaagaatctgaggggaacaagcaggatttgaaagccttaaaggaagctgtgaaggagatacagacctcagccaagtccagagagtgggacatggaggccctgagaagtacccttcagactatggagtctgacatctacaccgaggtccgcgagctggtgagcctcaagcaggagcagcaggctttcaaggaggcggccgacacggagcggctcgccctgcaggccctcacggagaagcttctcaggtctgaggagtccgtctcccgcctcccggaggagatccggagactggaggaagagctccgccagctgaagtccgattcccacgggccgaaggaggacggaggcttcagacactcggaagcctttgaggcactccagcaaaagagtcagggactggactccaggctccagcacgtggaggatggggtgctctccatgcaggtggcttctgcgcgccagaccgagagcctggagtccctcctgtccaagagccaggagcacgagcagcgcctggccgccctgcaggggcgcctggaaggcctcgggtcctcagaggcagaccaggatggcctggccagcacggtgaggagcctgggcgagacccagctggtgctctacggtgacgtggaggagctgaagaggagtgtgggcgagctccccagcaccgtggaatcactccagaaggtgcaggagcaggtgcacacgctgctcagtcaggaccaagcccaggccgcccgtctgcctcctcaggacttcctggacagactttcttctctagacaacctgaaagcctcagtcagccaagtggaggcggacttgaaaatgctcaggactgctgtggacagtttggttgcatactcggtcaaaatagaaaccaacgagaacaatctggaatcagccaagggtttactagatgacctgaggaatgatctggataggttgtttgtgaaagtggagaagattcacgaaaaggtctaaatgaattgcgtgtgcagggcgcggatttaaagtccaatttctcatgaccaaaaaatgtgtggttttttcccatgtgtcccctaccccccaatttcttgtcccctcttaaagagcagttgtcaccacctgaacaccaaggcattgtattttcatgcccagttaacttatttacaatatttaagttctctgcttctgcatttggttggtttcctgaagcgcagcccctgtgaataacaggtggcttttcatggatgtctctagtcagagaaaaatgataaaggcttaaattgaggattaacagaagcagattaacctcagaaatcctgtctggctggcagatttcaagtaaaaaaaaaaaaaaggtgggttggggggacccttttctttctagttgtctttaaggaaaattaattttactttttttttgttctggccgaaatttttatgagatatctctcacttgtcttccactttgaaccggttaaagctcatagctgtcagctctgaatgaggaggggagaagcccctgggtctttctttgaaaggaatccgctgcttgagggctgcctccctcatggtgtgcgtgtcgtttctcttcctgacgcatcttgtgatatcagaggtaactatgcaaagcatccaggcggttctgaatgtgaagcactacacccagcagagtcccgggtgccctctgtccccactgccggcccatgttctctctccggaggtcaccaaggaatgcacaggtttcgactaccagaaaggggagtccttgggttctttcaaaaaattcgtgaggagagctgtctacagtggaatagggggtctccctggggaatgcaggccaagtccttttattttaacatgatgtccatgaagaggtttgccgtctgggcagccctgtcggcaaggagcgtgcatactgcgtttgtgtaattgtttgctgtatctcccttccctctgagctgtattgttctttaatggctgtcttgcccttccaaaaaaaattgaaaaaaaaaaaaaaaaaaaaacccgaaaagtaaaaaaaaaaaaaaaaagttttgtttagtttactgtgaaatgaactgtatggcttatttacagtatttttaattcttaataaacacttgagctttgttatgacttt

SEQ ID NO: 362908 - DNA, 1956 bp, Homo sapiens
tacccacgcacacgcaattcatttagaccttttcgtgaatcttctccactttcacaaacaacctatccagatggtctgaggagtccgtctcccgcctcccggaggagatccggagactggaggaagagctccgccagctgaagtccgattcccacgggccgaaggaggacggaggcttcagacactcggaagcctttgaggcactccagcaaaagagtcagggactggactccaggctccagcacgtggaggatggggtgctctccatgcaggtggcttctgcgcgccagaccgagagcctggagtccctcctgtccaagagccaggagcacgagcagcgcctggccgccctgcaggggcgcctggaaggcctcgggtcctcagaggcagaccaggatggcctggccagcacggtgaggagcctgggcgagacccagctggtgctctacggtgacgtggaggagctgaagaggagtgtgggcgagctccccagcaccgtggaatcactccagaaggtgcaggagcaggtgcacacgctgctcagtcaggaccaagcccaggccgcccgtctgcctcctcaggacttcctggacagactttcttctctagacaacctgaaagcctcagtcagccaagtggaggcggacttgaaaatgctcaggactgctgtggacagtttggttgcatactcggtcaaaatagaaaccaacgagaacaatctggaatcagccaagggtttactagatgacctgaggaatgatctggataggttgtttgtgaaagtggagaagattcacgaaaaggtctaaatgaattgcgtgtgcagggcgcggatttaaagtccaatttctcatgaccaaaaaatgtgtggttttttcccatgtgtcccctaccccccaatttcttgtcccctcttaaagagcagttgtcaccacctgaacaccaaggcattgtattttcatgcccagttaacttatttacaatatttaagttctctgcttctgcatttggttggtttcctgaagcgcagcccctgtgaataacaggtggcttttcatggatgtctctagtcagagaaaaatgataaaggcttaaattgaggattaacagaagcagattaacctcagaaatcctgtctggctggcagatttcaagtaaaaaaaaaaaaaaggtgggttggggggacccttttctttctagttgtctttaaggaaaattaattttactttttttttgttctggccgaaatttttatgagatatctctcacttgtcttccactttgaaccggttaaagctcatagctgtcagctctgaatgaggaggggagaagcccctgggtctttctttgaaaggaatccgctgcttgagggctgcctccctcatggtgtgcgtgtcgtttctcttcctgacgcatcttgtgatatcagaggtaactatgcaaagcatccaggcggttctgaatgtgaagcactacacccagcagagtcccgggtgccctctgtccccactgccggcccatgttctctctccggaggtcaccaaggaatgcacaggtttcgactaccagaaaggggagtccttgggttctttcaaaaaattcgtgaggagagctgtctacagtggaatagggggtctccctggggaatgcaggccaagtccttttattttaacatgatgtccatgaagaggtttgccgtctgggcagccctgtcggcaaggagcgtgcatactgcgtttgtgtaattgtttgctgtatctcccttccctctgagctgtattgttctttaatggctgtcttgcccttccaaaaaaaattgaaaaaaaaaaaaaaaaaaaaacccgaaaagtaaaaaaaaaaaaaaaaagttttgtttagtttactgtgaaatgaactgtatggcttatttacagtatttttaattcttaataaacacttgagctttgttatgacttt

SEQ ID NO: 362909 - DNA, 2299 bp, Homo sapiens
gggccgcgggccggcgtgcgtggcaagctctcccggctcggctcgctcggcctcccttaccgggaggcggggtcggcgccgcggcggcggaggcaggccccctcctcccgcctcctcggcccggcctccttccccggccgcgcgtcctctcgccgccgcctcgtcctcggcgtcctgctcgcgcaggctcggcagggcgctcaactttctcttctacctcgccctggtggcggcggccgctttctcgggctggtgcgtccaccacgtcctggaggaggtccagcaggtccggcgcaccaccaggacttctcccggcagagggaggagctgggccagggcttgcagggcgtcgagcagaaggtgcagtctttgcaagccacatttggaacttttgagtccatcttgagaagctcccaacataaacaagacctcacagagaaagctgtgaagcaaggggagagtgaggtcagccggatcagcgaagtgctgcagaaactccagaatgagattctcaaagacctctcggatgggatccatgtggtgaaggacgcccgggagcgggacttcacgtccctggagaacacggtggaggagcggctgacggagctcaccaaatccatcaacgacaacatcgccatcttcacagaatccctcctgtccaagagccaggagcacgagcagcgcctggccgccctgcaggggcgcctggaaggcctcgggtcctcagaggcagaccaggatggcctggccagcacggtgaggagcctgggcgagacccagctggtgctctacggtgacgtggaggagctgaagaggagtgtgggcgagctccccagcaccgtggaatcactccagaaggtgcaggagcaggtgcacacgctgctcagtcaggaccaagcccaggccgcccgtctgcctcctcaggacttcctggacagactttcttctctagacaacctgaaagcctcagtcagccaagtggaggcggacttgaaaatgctcaggactgctgtggacagtttggttgcatactcggtcaaaatagaaaccaacgagaacaatctggaatcagccaagggtttactagatgacctgaggaatgatctggataggttgtttgtgaaagtggagaagattcacgaaaaggtctaaatgaattgcgtgtgcagggcgcggatttaaagtccaatttctcatgaccaaaaaatgtgtggttttttcccatgtgtcccctaccccccaatttcttgtcccctcttaaagagcagttgtcaccacctgaacaccaaggcattgtattttcatgcccagttaacttatttacaatatttaagttctctgcttctgcatttggttggtttcctgaagcgcagcccctgtgaataacaggtggcttttcatggatgtctctagtcagagaaaaatgataaaggcttaaattgaggattaacagaagcagattaacctcagaaatcctgtctggctggcagatttcaagtaaaaaaaaaaaaaaggtgggttggggggacccttttctttctagttgtctttaaggaaaattaattttactttttttttgttctggccgaaatttttatgagatatctctcacttgtcttccactttgaaccggttaaagctcatagctgtcagctctgaatgaggaggggagaagcccctgggtctttctttgaaaggaatccgctgcttgagggctgcctccctcatggtgtgcgtgtcgtttctcttcctgacgcatcttgtgatatcagaggtaactatgcaaagcatccaggcggttctgaatgtgaagcactacacccagcagagtcccgggtgccctctgtccccactgccggcccatgttctctctccggaggtcaccaaggaatgcacaggtttcgactaccagaaaggggagtccttgggttctttcaaaaaattcgtgaggagagctgtctacagtggaatagggggtctccctggggaatgcaggccaagtccttttattttaacatgatgtccatgaagaggtttgccgtctgggcagccctgtcggcaaggagcgtgcatactgcgtttgtgtaattgtttgctgtatctcccttccctctgagctgtattgttctttaatggctgtcttgcccttccaaaaaaaattgaaaaaaaaaaaaaaaaaaaaacccgaaaagtaaaaaaaaaaaaaaaaagttttgtttagtttactgtgaaatgaactgtatggcttatttacagtatttttaattcttaataaacacttgagctttgttatgacttt

SEQ ID NO: 362910 - DNA, 2942 bp, Homo sapiens
gtgagctccgtcagccgctcctccaccgtgttctccagggacgtgaagtcccgctcccgggcgtccttcaccacatggatcccagcccgcggcccgagccgccgccgcgcccgccatgccctcggccaaacaaaggggctccaagggcggccacggcgccgcgagcccctcggagaagggtgcccacccgtcggccgcgcgtcctctcgccgctccgacgccagcagcgcccgcgtgccgctcgcccagtcccgggggagcccctgcaagtttcccgggccgcgcgccgcgctcgctcgcctcccagccccgcctcgtcctcggcgtcctgctcgcgcaggctcggcagggcgctcaactttctcttctacctcgccctggtggcggcggccgctttctcgggctggtgcgtccaccacgtcctggaggaggtccagcaggtccggcgcaccaccaggacttctcccggcagagggaggagctgggccagggcttgcagggcgtcgagcagaaggtgcagtctttgcaagccacatttggaacttttgagtccatcttgagaagctcccaacataaacaagacctcacagagaaagctgtgaagcaaggggagagtgaggtcagccggatcagcgaagtgctgcagaaactccagaatgagattctcaaagacctctcggatgggatccatgtggtgaaggacgcccgggagcgggacttcacgtccctggagaacacggtggaggagcggctgacggagctcaccaaatccatcaacgacaacatcgccatcttcacagaagtccagaagaggagccagaaggagatcaatgacatgaaggcaaaggttgcctccctggaagaatctgaggggaacaagcaggatttgaaagccttaaaggaagctgtgaaggagatacagacctcagccaagtccagagagtgggacatggaggccctgagaagtacccttcagactatggagtctgacatctacaccgaggtccgcgagctggtgagcctcaagcaggagcagcaggctttcaaggaggcggccgacacggagcggctcgccctgcaggccctcacggagaagcttctcaggtctgaggagtccgtctcccgcctcccggaggagatccggagactggaggaagagctccgccagctgaagtccgattcccacgggccgaaggaggacggaggcttcagacactcggaagcctttgaggcactccagcaaaagagtcagggactggactccaggctccagcacgtggaggatggggtgctctccatgcaggtggcttctgcgcgccagaccgagagcctggagtccctcctgtccaagagccaggagcacgagcagcgcctggccgccctgcaggggcgcctggaaggcctcgggtcctcagaggcagaccaggatggcctggccagcacggtgaggagcctgggcgagacccagctggtgctctacggtgacgtggaggagctgaagaggagtgtgggcgagctccccagcaccgtggaatcactccagaaggtgcaggagcaggtgcacacgctgctcagtcaggaccaagcccaggccgcccgtctgcctcctcaggacttcctggacagactttcttctctagacaacctgaaagcctcagtcagccaagtggaggcggacttgaaaatgctcaggactgctgtggacagtttggttgcatactcggtcaaaatagaaaccaacgagaacaatctggaatcagccaagggtttactagatgacctgaggaatgatctggataggttgtttgtgaaagtggagaagattcacgaaaaggtctaaatgaattgcgtgtgcagggcgcggatttaaagtccaatttctcatgaccaaaaaatgtgtggttttttcccatgtgtcccctaccccccaatttcttgtcccctcttaaagagcagttgtcaccacctgaacaccaaggcattgtattttcatgcccagttaacttatttacaatatttaagttctctgcttctgcatttggttggtttcctgaagcgcagcccctgtgaataacaggtggcttttcatggatgtctctagtcagagaaaaatgataaaggcttaaattgaggattaacagaagcagattaacctcagaaatcctgtctggctggcagatttcaagtaaaaaaaaaaaaaaggtgggttggggggacccttttctttctagttgtctttaaggaaaattaattttactttttttttgttctggccgaaatttttatgagatatctctcacttgtcttccactttgaaccggttaaagctcatagctgtcagctctgaatgaggaggggagaagcccctgggtctttctttgaaaggaatccgctgcttgagggctgcctccctcatggtgtgcgtgtcgtttctcttcctgacgcatcttgtgatatcagaggtaactatgcaaagcatccaggcggttctgaatgtgaagcactacacccagcagagtcccgggtgccctctgtccccactgccggcccatgttctctctccggaggtcaccaaggaatgcacaggtttcgactaccagaaaggggagtccttgggttctttcaaaaaattcgtgaggagagctgtctacagtggaatagggggtctccctggggaatgcaggccaagtccttttattttaacatgatgtccatgaagaggtttgccgtctgggcagccctgtcggcaaggagcgtgcatactgcgtttgtgtaattgtttgctgtatctcccttccctctgagctgaatgttgtgctggagaattacccacttctttgtaatagtattcgaggaaagtgccacacgctagaggaggtctggtcttgttggattgaactgcttcactactcttggatcttgaactacctggttacgctctt

SEQ ID NO: 362911 - DNA, 2933 bp, Homo sapiens
gtgagctccgtcagccgctcctccaccgtgttctccagggacgtgaagtcccgctcccgggcgtccttcaccacatggatcccagcccgcggcccgagccgccgccgcgcccgccatgccctcggccaaacaaaggggctccaagggcggccacggcgccgcgagcccctcggagaagggtgcccacccgtcggccgcgcgtcctctcgccgctccgacgccagcagcgcccgcgtgccgctcgcccagtcccgggggagcccctgcaagtttcccgggccgcgcgccgcgctcgctcgcctcccagccccgcctcgtcctcggcgtcctgctcgcgcaggctcggcagggcgctcaactttctcttctacctcgccctggtggcggcggccgctttctcgggctggtgcgtccaccacgtcctggaggaggtccagcaggtccggcgcaccaccaggacttctcccggcagagggaggagctgggccagggcttgcagggcgtcgagcagaaggtgcagtctttgcaagccacatttggaacttttgagtccatcttgagaagctcccaacataaacaagacctcacagagaaagctgtgaagcaaggggagagtgaggtcagccggatcagcgaagtgctgcagaaactccagaatgagattctcaaagacctctcggatgggatccatgtggtgaaggacgcccgggagcgggacttcacgtccctggagaacacggtggaggagcggctgacggagctcaccaaatccatcaacgacaacatcgccatcttcacagaagtccagaagaggagccagaaggagatcaatgacatgaaggcaaaggttgcctccctggaagaatctgaggggaacaagcaggatttgaaagccttaaaggaagctgtgaaggagatacagacctcagccaagtccagagagtgggacatggaggccctgagaagtacccttcagactatggagtctgacatctacaccgaggtccgcgagctggtgagcctcaagcaggagcagcaggctttcaaggaggcggccgacacggagcggctcgccctgcaggccctcacggagaagcttctcaggtctgaggagtccgtctcccgcctcccggaggagatccggagactggaggaagagctccgccagctgaagtccgattcccacgggccgaaggaggacggaggcttcagacactcggaagcctttgaggcactccagcaaaagagtcagggactggactccaggctccagcacgtggaggatggggtgctctccatgcaggtggcttctgcgcgccagaccgagagcctggagtccctcctgtccaagagccaggagcacgagcagcgcctggccgccctgcaggggcgcctggaaggcctcgggtcctcagaggcagaccaggatggcctggccagcacggtgaggagcctgggcgagacccagctggtgctctacggtgacgtggaggagctgaagaggagtgtgggcgagctccccagcaccgtggaatcactccagaaggtgcaggagcaggtgcacacgctgctcagtcaggaccaagcccaggccgcccgtctgcctcctcaggacttcctggacagactttcttctctagacaacctgaaagcctcagtcagccaagtggaggcggacttgaaaatgctcaggactgctgtggacagtttggttgcatactcggtcaaaatagaaaccaacgagaacaatctggaatcagccaagggtttactagatgacctgaggaatgatctggataggttgtttgtgaaagtggagaagattcacgaaaaggtctaaatgaattgcgtgtgcagggcgcggatttaaagtccaatttctcatgaccaaaaaatgtgtggttttttcccatgtgtcccctaccccccaatttcttgtcccctcttaaagagcagttgtcaccacctgaacaccaaggcattgtattttcatgcccagttaacttatttacaatatttaagttctctgcttctgcatttggttggtttcctgaagcgcagcccctgtgaataacaggtggcttttcatggatgtctctagtcagagaaaaatgataaaggcttaaattgaggattaacagaagcagattaacctcagaaatcctgtctggctggcagatttcaagtaaaaaaaaaaaaaaggtgggttggggggacccttttctttctagttgtctttaaggaaaattaattttactttttttttgttctggccgaaatttttatgagatatctctcacttgtcttccactttgaaccggttaaagctcatagctgtcagctctgaatgaggaggggagaagcccctgggtctttctttgaaaggaatccgctgcttgagggctgcctccctcatggtgtgcgtgtcgtttctcttcctgacgcatcttgtgatatcagaggtaactatgcaaagcatccaggcggttctgaatgtgaagcactacacccagcagagtcccgggtgccctctgtccccactgccggcccatgttctctctccggaggtcaccaaggaatgcacaggtttcgactaccagaaaggggagtccttgggttctttcaacaggccaagtccttttattttaacatgatgtccatgaagaggtttgccgtctgggcagccctgtcggcaaggagcgtgcatactgcgtttgtgtaattgtttgctgtatctcccttccctctgagctgtattgttctttaatggctgtcttgcccttccaaaaaaaattgaaaaaaaaaaaaaaaaaaaaacccgaaaagtaaaaaaaaaaaaaaaaagttttgtttagtttactgtgaaatgaactgtatggcttatttacagtatttttaattcttaataaacacttgagctttgttatgacttt

SEQ ID NO: 362912 - DNA, 2543 bp, Homo sapiens
gtgagctccgtcagccgctcctccaccgtgttctccagggacgtgaagtcccgctcccgggcgtccttcaccacatggatcccagcccgcggcccgagccgccgccgcgcccgccatgccctcggccaaacaaaggggctccaagggcggccacggcgccgcgagcccctcggagaagggtgcccacccgtcggccgcgcgtcctctcgccgctccgacgccagcagcgcccgcgtgccgctcgcccagtcccgggggagcccctgcaagtttcccgggccgcgcgccgcgctcgctcgcctcccagccccgcctcgtcctcggcgtcctgctcgcgcaggctcggcagggcgctcaactttctcttctacctcgccctggtggcggcggccgctttctcgggctggtgcgtccaccacgtcctggaggaggtccagcaggtccggcgcaccaccaggacttctcccggcagagggaggagctgggccagggcttgcagggcgtcgagcagaaggtgcagtctttgcaagccacatttggaacttttgagtccatcttgagaagctcccaacataaacaagacctcacagagaaagctgtgaagcaaggggagagtgaggtcagccggatcagcgaagtgctgcagaaactccagaatgagattctcaaagacctctcggatgggatccatgtggtgaaggacgcccgggagcgggacttcacgtccctggagaacacggtggaggagcggctgacggagctcaccaaatccatcaacgacaacatcgccatcttcacagaagtccagaagaggagccagaaggagatcaatgacatgaaggcaaaggttgcctccctggaagaatctgaggggaacaagcaggatttgaaagccttaaaggaagctgtgaaggagatacagacctcagccaagtccagagagtgggacatggaggccctgagaagtacccttcagactatggagtctgacatctacaccgaggtccgcgagctggtgagcctcaagcaggagcagcaggctttcaaggaggcggccgacacggagcggctcgccctgcaggccctcacggagaagcttctcaggtctgaggagtccgtctcccgcctcccggaggagatccggagactggaggaagagctccgccagctgaagtccgattcccacgggccgaaggaggacggaggcttcagacactcggaagcctttgaggcactccagcaaaagagtcagggactggactccaggctccagcacgtggaggatggggtgctctccatgcaggtggcttctgcgcgccagaccgagagcctggagtccctcctgtccaagagccaggagcacgagcagcgcctggccgccctgcaggggcgcctggaaggcctcgggtcctcagaggcagaccaggatggcctggccagcacggtgaggagcctgggcgagacccagctggtgctctacggtgacgtggaggagctgaagaggagtgtgggcgagctccccagcaccgtggaatcactccagaaggtgcaggagcaggtgcacacgctgctcagtcaggaccaagcccaggccgcccgtctgcctcctcaggacttcctggacagactttcttctctagacaacctgaaagcctcagtcagccaagtggaggcggacttgaaaatgctcaggactgctgtggacagtttggttgcatactcggtcaaaatagaaaccaacgagaacaatctggaatcagccaagggtttactagatgacctgaggaatgatctggataggttgtttgtgaaagtggagaagattcacgaaaaggtctaaatgaattgcgtgtgcagggcgcggatttaaagtccaatttctcatgaccaaaaaatgtgtggttttttcccatgtgtcccctaccccccaatttcttgtcccctcttaaagagcagttgtcaccacctgaacaccaaggcattgtattttcatgcccagttaacttatttacaatatttaagttctctgcttctgcatttggttggtttcctgaagcgcagcccctgtgaataacaggtggcttttcatggatgtctctagtcagagaaaaatgataaaggcttaaattgaggattaacagaagcagattaacctcagaaatcctgtctggctggcagatttcaagtaaaaaaaaaaaaaaggtgggttggggggacccttttctttctagttgtctttaaggaaaattaattttactttttttttgttctggccgaaatttttatgagatatctctcacttgtcttccactttgaaccggttaaagctcatagctgtcagctctgaatgaggaggggagaagcccctgggtctttctttgaaaggaatccgctgcttgagggctgcctccctcatggtgtgcgtgtcgtttctcttcctgacgcatcttgtgatatcagaggtaactatgcaaagcatccaggcggttctgaatgtgaagcactacacccagcaaagaccccaaaaggggaaccgagctcga

SEQ ID NO: 362913 - DNA, 164 bp, Homo sapiens
agccaaacacctgggtgttcagccaggtcccccaggcagcagcgtggaggaacctttggcaggtccagccagcctcatgtccctatctatctctgccacctctgctcctctgtcgttctatagaaccagatctcttcccactcactttctcttgggcaaacctt

SEQ ID NO: 362914 - DNA, 411 bp, Homo sapiens
gacttcagaagtaaaattatataatcatattgaaacaggcaaataaaacacaattcgttaaaattttttttttttccaatgagatcacatggacatagggaggggaacaacacacactggggcttgtcagggaatgggaggcaaggggagggagagcattaggacaaatacctaatgcatgcggggcttaaaacctagatgatgggttgataggtacagcaaaccaccatgacaaaccaccacatgacatgtataacctatgtaacaaacctgcacattctgcacatgtatcagaacttaagtaaaataaataaatatatattaaaaatttctcttttttttttttttttttgagatggagtctcactctgtcgcccaggttggagtgcaatctcagctcactacaatgtc

SEQ ID NO: 362915 - DNA, 518 bp, Homo sapiens
agctcgtaccatccttcctcattacgatcctccctctctcacgatatcacttgcgtccacctctcagcagttttcccaactgcgcggttgctgagcagcgctaggggaaaggagggtgacagaggtggggtgatgaggactgctggacccgcaaggttctggcgatgcagggccatcctcccatcctccctctgatttccaggttgtgaattgctgcaggatatcatgaactacattgtacccattcttgtgctgcccagggttaacggtaaggaactttgaagaaaccattcattttcagtcatgggggaagagggtggggttgattacccacagccacctgttacctggccccaggtatgagggctgggcagtggtgatgtcaagtgaacttcaaatggcatctgacccagaaatgaatgcaacaaaaaggaactcacatgagttgacttactacacatgggttgattcattattgcgtgagtttgtccttacaaaacccccgtgagatgaaggat

SEQ ID NO: 362916 - DNA, 984 bp, Homo sapiens
caacctcaaggccttgaggttttggcagctctggaggatgagagagaacatggccaggggcccttgcaacgcgccgagatgggcgtccctgatggtgctggtcgccataggcaccgccgtgacagcggccgtcaaccctggcgtcgtggtcaggatctcccagaagggcctggactacgccagccagcaggggacggccgctctgcagaaggagctgaagaggatcaagattcctgactactcagacagctttaagatcaagcatcttgggaaggggcattatagcttctacagcatggacatccgtgaattccagcttcccagttcccagataagcatggtgcccaatgtgggccttaagttctccatcagcaacgccaatatcaagatcagcgggaaatggaaggcacaaaagagattcttaaaaatgagcggcaattttgacctgagcatagaaggcatgtccatttcggctgatctgaagctgggcagtaaccccacgtcaggcaagcccaccatcacctgctccagctgcagcagccacatcaacagtgtccacgtgcacatctcaaagagcaaagtggggtggctgatccaactcttccacaaaaaaattgagtctgcgcttcgaaacaagatgaacagccaggtaggaggggctcagagccccatcagcaaacagaggagaagggcccttagtaaccacacacctcccccttctacggacactctgctgtcactccagaccccttggtagtccttatggccctttgaaaccacaaccccagctctaaaatccagtcatgtatgttttgctgaagagtccaccaagagaccaagagacaatcacttcccacactcccagcaaactttccctcatgccaagcttgggccacctctgcttttccccagccttcctccctgctgagaaaatgccattctctttctgcctccctctcttcccatagccctgctagcctccct

SEQ ID NO: 362917 - DNA, 371 bp, Homo sapiens
gggattacaggcgtgagccactgcgcccggcctatttccccacctttcgtgtaaggtgctactgaacatgacagcttcttgtcatgacaggaaactcagcatcatgtgtatatccatttagagactctgaatatttgcaaagagacaaatttgcccactctgaacactcagattcagaaatgatctaaacacgaggaaacattattcattggaaaagtgcatggtgtgtattttagggattatgagcttctttcaagggctaaggctgcagagatatttcctccaggaatcgtgtttcaattgtaaccaagaaatttccatttgtgcttcatgaaaaaaaacttctggtttttttcatgtgaaaactgtgt

SEQ ID NO: 362918 - DNA, 516 bp, Homo sapiens
gcatccacctcctctcaaaaccctcccagcatctgtgaggtcactaggattctctctgttctacaaatgacaaaaagtgctcagagaagtgcaaggacttgtccaaggtcatccagagtttggttcaagcctaggtctctctgtgcccttgaccctgtgtcttagcgactcatctcagggctgttggaagaagagacttccagcgatgctgccgtgggagccagctcatggtccattttctttctctctagtaatgaccaaaatagattctgtggctggaatcaactatggtctggtggcacctccagcaaccacggctgagaccctggatgtacagatgaagttatttgtttgcttcaaaacacattcaatgtgaaaaagaaactttagaaactgcagaggaatgcagaaataaatataggaaagaaggaaaaaaaagagagagagagagagaattacccgagtctacaacctagagataagcatcatcaataaataagtgtagatccctccaac

SEQ ID NO: 362919 - DNA, 2041 bp, Homo sapiens
tggctcaagaagagggcctaagtggaagggacagggagccaggaagaaagcccagagaagctcccacatcttcagtgaaggaggaagagcttgcaaagaagtctggggaaaagcctgtaggggataggaagaaagcggaaggccttggtcacaggactctagaaggagtgtttctagaagggaatgggcaaccacaccaggagctacccagtagtcaagaaatgcaaggactgaagagactgctggattactgagggaaaggtcattcgagagcaacatcaggagagggagggaaggagcttgtctgaccaccagccccagccccaatctcttagtgaggagaagcctgtggtttaaatcctatattctagctatctattgcttgaaaacaaacaactcaaaatttggtatcataaaacaaccaccattgttaacattcatggattctgtgcatcaggaaaaaggcatgacagggatggctaagctctctgctccatgaggtctgaggcctcacctcagaagactcaaaagttccatgttagaattacctggagagttcctctctcccatctctggtgcctgggctaggaagacttgaaggctcagctctgctgggactattgacccaagccacttccatggtctctccacagggcttgggcttctcgtagcattgagtgggttctgcacagccttttatgacctcacctctgaagttacacaaaggtcaggtgtattgttgtgttctgttgcttagaagcaagtcggcaagcccagattctagtggcaagttcacagactccatctcttggtgggggtgtggcaaagccacattacagaagagcaaatggaatggaaaatgtctgcgagaaagtgaccaattctgtatcctccaagctgcaaccttatttccagactctgccagtaatgaccaaaatagattctgtggctggaatcaactatggtctggtggcacctccagcaaccacggctgagaccctggatgtacagatgaagggggagttttacagtgagaaccaccacaatccacctccctttgctccaccagtgatggagtttcccgctgcccatgaccgcatggtatacctgggcctctcagactacttcttcaacacagccgggcttgtataccaagaggctggggtcttgaagatgacccttagagatgacatgattccaaaggagtccaaatttcgactgacaaccaagttctttggaaccttcctacctgaggtggccaagaagtttcccaacatgaagatacagatccatgtctcagcctccaccccgccacacctgtctgtgcagcccaccggccttaccttctaccctgccgtggatgtccaggcctttgccgtcctccccaactcctccctggcttccctcttcctgattggcatgcacacaactggttccatggaggtcagcgccgagtccaacaggcttgttggagagctcaagctggataggctgctcctggaactgaagcactcaaatattggccccttcccggtgaattgctgcaggatatcatgaactacattgtacccattcttgtgctgcccagggttaacgagaaactacagaaaggcttccctctcccgacgccggccagagtccagctctacaacgtagtgcttcagcctcaccagaacttcctgctgttcggtgcagacgttgtctataaatgaaggcaccaggggtgccgggggctgtcagccgcacctgttcctgatgggctgtggggcaccggctgcctttccccagggaatcctctccagatcttaaccaagagccccttgcaaacttcttcgactcagattcagaaatgatctaaacacgaggaaacattattcattggaaaagtgcatggtgtgtattttagggattatgagcttctttcaagggctaaggctgcagagatatttcctccaggaatcgtgtttcaattgtaaccaagaaatttccatttgtgcttcatgaaaaaaaacttctggtttttttcatgtgaaaactgtgt

SEQ ID NO: 362920 - DNA, 1640 bp, Homo sapiens
caacctcaaggccttgaggttttggcagctctggaggatgagagagaacatggccaggggcccttgcaacgcgccgagatgggcgtccctgatggtgctggtcgccataggcaccgccgtgacagcggccgtcaaccctggcgtcgtggtcaggatctcccagaagggcctggactacgccagccagcaggggacggccgctctgcagaaggagctgaagaggatcaagattcctgactactcagacagctttaagatcaagcatcttgggaaggggcattatagcttctacagcatggacatccgtgaattccagcttcccagttcccagataagcatggtgcccaatgtgggccttaagttctccatcagcaacgccaatatcaagatcagcgggaaatggaaggcacaaaagagattcttaaaaatgagcggcaattttgacctgagcatagaaggcatgtccatttcggctgatctgaagctgggcagtaaccccacgtcaggcaagcccaccatcacctgctccagctgcagcagccacatcaacagtgtccacgtgcacatctcaaagagcaaagtggggtggctgatccaactcttccacaaaaaaattgagtctgcgcttcgaaacaagatgaacagccaggtctgcgagaaagtgaccaattctgtatcctccaagctgcaaccttatttccagactctgccagtaatgaccaaaatagattctgtggctggaatcaactatggtctggtggcacctccagcaaccacggctgagaccctggatgtacagatgaagggggagttttacagtgagaaccaccacaatccacctccctttgctccaccagtgatggagtttcccgctgcccatgaccgcatggtatacctgggcctctcagactacttcttcaacacagccgggcttgtataccaagaggctggggtcttgaagatgacccttagagatgacatgattccaaaggagtccaaatttcgactgacaaccaagttctttggaaccttcctacctgaggtggccaagaagtttcccaacatgaagatacagatccatgtctcagcctccaccccgccacacctgtctgtgcagcccaccggccttaccttctaccctgccgtggatgtccaggcctttgccgtcctccccaactcctccctggcttccctcttcctgattggcatgcacacaactggttccatggaggtcagcgccgagtccaacaggcttgttggagagctcaagctggataggctgctcctggaactgaagcactcaaatattggccccttcccggtgagtctgaggcccttggtggcttcttcctccttctgacctggcggcggggagggggacatgtcataggctcgaggcattatttaagaggctactggctcatttgcatttaatttggttgtgaattaatagttcaaggagcttcgtgggcagagggacctgagccagaatccctgctccatacttactaactgtgaggccttgggcaagtcacttcccttttctgaactccagaccttccccacctgagtgagtgtagtatggtttaaatgggattaaacatgcacaactctgtctcaggaatcactagtgaattcgc

SEQ ID NO: 362921 - DNA, 1930 bp, Homo sapiens
tggctcaagaagagggcctaagtggaagggacagggagccaggaagaaagcccagagaagctcccacatcttcagtgaaggaggaagagcttgcaaagaagtctggggaaaagcctgtaggggataggaagaaagcggaaggccttggtcacaggactctagaaggagtgtttctagaagggaatgggcaaccacaccaggagctacccagtagtcaagaaatgcaaggactgaagagactgctggattactgagggaaaggtcattcgagagcaacatcaggagagggagggaaggagcttgtctgaccaccagccccagccccaatctcttagtgaggagaagcctgtggtttaaatcctatattctagctatctattgcttgaaaacaaacaactcaaaatttggtatcataaaacaaccaccattgttaacattcatggattctgtgcatcaggaaaaaggcatgacagggatggctaagctctctgctccatgaggtctgaggcctcacctcagaagactcaaaagttccatgttagaattacctggagagttcctctctcccatctctggtgcctgggctaggaagacttgaaggctcagctctgctgggactattgacccaagccacttccatggtctctccacagggcttgggcttctcgtagcattgagtgggttctgcacagccttttatgacctcacctctgaagttacacaaaggtcaggtgtattgttgtgttctgttgcttagaagcaagtcggcaagcccagattctagtggcaagttcacagactccatctcttggtgggggtgtggcaaagccacattacagaagagcaaatggaatggaaaatgtctgcgagaaagtgaccaattctgtatcctccaagctgcaaccttatttccagactctgccagtaatgaccaaaatagattctgtggctggaatcaactatggtctggtggcacctccagcaaccacggctgagaccctggatgtacagatgaagggggagttttacagtgagaaccaccacaatccacctccctttgctccaccagtgatggagtttcccgctgcccatgaccgcatggtatacctgggcctctcagactacttcttcaacacagccgggcttgtataccaagaggctggggtcttgaagatgacccttagagatgacatgattccaaaggagtccaaatttcgactgacaaccaagttctttggaaccttcctacctgaggtggccaagaagtttcccaacatgaagatacagatccatgtctcagcctccaccccgccacacctgtctgtgcagcccaccggccttaccttctaccctgccgtggatgtccaggcctttgccgtcctccccaactcctccctggcttccctcttcctgattggcatggtgaattgctgcaggatatcatgaactacattgtacccattcttgtgctgcccagggttaacgagaaactacagaaaggcttccctctcccgacgccggccagagtccagctctacaacgtagtgcttcagcctcaccagaacttcctgctgttcggtgcagacgttgtctataaatgaaggcaccaggggtgccgggggctgtcagccgcacctgttcctgatgggctgtggggcaccggctgcctttccccagggaatcctctccagatcttaaccaagagccccttgcaaacttcttcgactcagattcagaaatgatctaaacacgaggaaacattattcattggaaaagtgcatggtgtgtattttagggattatgagcttctttcaagggctaaggctgcagagatatttcctccaggaatcgtgtttcaattgtaaccaagaaatttccatttgtgcttcatgaaaaaaaacttctggtttttttcatgtgaaaactgtgt

SEQ ID NO: 362922 - DNA, 1019 bp, Homo sapiens
caacctcaaggccttgaggttttggcagctctggaggatgagagagaacatggccaggggcccttgcaacgcgccgagatgggcgtccctgatggtgctggtcgccataggcaccgccgtgacagcggccgtcaaccctggcgtcgtggtcaggatctcccagaagggcctggactacgccagccagcaggggacggccgctctgcagaaggagctgaagaggatcaagattcctgactactcagacagctttaagatcaagcatcttgggaaggggcattatagcttctacagcatggacatccgtgaattccagcttcccagttcccagataagcatggtgcccaatgtgggccttaagttctccatcagcaacgccaatatcaagatcagcgggaaatggaaggcacaaaagagattcttaaaaatgagcggcaattttgacctgagcatagaaggcatgtccatttcggctgatctgaagctgggcagtaaccccacgtcaggcaagcccaccatcacctgctccagctgcagcagccacatcaacagtgtccacgtgcacatctcaaagagcaaagtggggtggctgatccaactcttccacaaaaaaattgagtctgcgcttcgaaacaagatgaacagccaggtctgcgagaaagtgaccaattctgtatcctccaagctgcaaccttatttccagactctgccagtaatgaccaaaatagattctgtggctggaatcaactatggtctggtggcacctccagcaaccacggctgagaccctggatgtacagatgaagggggagttttacagtgagaaccaccacaatccacctccctttgctccaccagtgatggagtttcccgctgcccatgaccgcatggtatacctgggcctctcagactacttcttcaacacagccgggcttgtataccaagaggctggggtcttgaagatgacccttagagatgacatgattccaaaggcgtcccggttcaagcgtcccagttggt

SEQ ID NO: 362923 - DNA, 1212 bp, Homo sapiens
tggctcaagaagagggcctaagtggaagggacagggagccaggaagaaagcccagagaagctcccacatcttcagtgaaggaggaagagcttgcaaagaagtctggggaaaagcctgtaggggataggaagaaagcggaaggccttggtcacaggactctagaaggagtgtttctagaagggaatgggcaaccacaccaggagctacccagtagtcaagaaatgcaaggactgaagagactgctggattactgagggaaaggtcattcgagagcaacatcaggagagggagggaaggagcttgtctgaccaccagccccagccccaatctcttagtgaggagaagcctgtggtttaaatcctatattctagctatctattgcttgaaaacaaacaactcaaaatttggtatcataaaacaaccaccattgttaacattcatggattctgtgcatcaggaaaaaggcatgacagggatggctaagctctctgctccatgaggtctgaggcctcacctcagaagactcaaaagttccatgttagaattacctggagagttcctctctcccatctctggtgcctgggctaggaagacttgaaggctcagctctgctgggactattgacccaagccacttccatggtctctccacagggcttgggcttctcgtagcattgagtgggttctgcacagccttttatgacctcacctctgaagttacacaaaggtcaggtgtattgttgtgttctgttgcttagaagcaagtcggcaagcccagattctagtggcaagttcacagactccatctcttggtgggggtgtggcaaagccacattacagaagagcaaatggaatggaaaatgtaatttgccatgttccgttttacagatgaagaaatagaggtctagataaatggaacaacttcctcagtgtcaaagtcagtgtgtggcccaagtcagattttctcaggctagtgtttgttccattgtgagtcatgggctaggggacagggggattggggtggagtggcaaaggcaggtagggaatggcttctctggccatacataccaaacatgagggtgcccacctagacttaagcagaaacactgcccatgctcccagaagcccaggtaagggaaggctggccattgactacctcgtatttgtttattacctcattccacaaaggatctgagacagcaaaatcaaacag

SEQ ID NO: 362924 - DNA, 419 bp, Homo sapiens
tgcagaatttgtgggtcagtgctctgttgtcacataggggctggccactgtctgtgtgtgcagtcagcctctcaccccgatacagaactcaccccctctgctccgtctgtaacagcatcctccgagatccttttctcatctcttgctacagattccaaaggagtccaaatttcgactgacaaccaagttctttggaaccttcctacctgaggtatggaagaccttgctttcctttagtgagccccgggggttctgggaggacagggctttgctgagtggatgatgagagccctccacccaacataacacacacaagatccagaaacaacccagcatgaaagggtggaaatagcttcatccacagaacagagaaaagctccaagcgcccagttgaccaggtgtgggagtagatgctggca

SEQ ID NO: 362925 - DNA, 422 bp, Homo sapiens
tccagcttcccagttcccagataagcatggtgcccaatgtgggccttaagttctccatcagcaacgccaatatcaagatcagcgggaaatggaaggcacaaaagagattcttgtgcgtttccatgcttgcggtttgttgggtgtgctcttggtgatatttggacgggattagagagtcagcgtctctggaatgcccaatttttgccttgcctattaccacctatagccacagcgttcctcaggaaattcttcacatgagaagattcaacataacccttgattaatagctgagaatttatccacatctcagtgcaggatactggcgaggctgagttggtgtatgtggcttagggtggaaatctaagtggaacctttaatttatcccgtttatcagttagctattgctgtgtaacaaaccatcc

SEQ ID NO: 362926 - DNA, 391 bp, Homo sapiens
ggagggggacatgtcataggctcgaggcattatttaagaggctactggctcatttgcatttaatttggttgtgaattaatagttcaaggagcttcgtgggcagagggacctgagccagaatccctgctccatacttactaactgtgaggccttgggcaagtcacttcccttttctgaactccagaccttccccacctgagtgagtgtagtatggtttaaatgggattaaacatgcacaactctggtagagaaaatctgctcaacaaatgtttgttggatgaacaaatgaattactttattgagcacctattatgtgccaagtactcttccaagtatggggtaggctgatgcatcagacagggaagtgatgccttctcagagccttacatgg

SEQ ID NO: 362927 - DNA, 416 bp, Homo sapiens
atgctgccctgctgagccgttgtgaagctgacccttcttggtttggaggccttgcaatcaggtgcctgggtcagggcacttcaccctgggttgttgttttggcagcacacaactggttccatggaggtcagcgccgagtccaacaggcttgttggagagctcaagctggataggtaagtgggcctgtgagaggaggagggggctgcccctctgtccttggtgtctgtgggatgacagtggtcctgtgatatacagaagcactgcattgttgttttcctgttggctcatcacattaaaacctcaaagagtgtgcgatggccacagtatccccattttgcagaccatgaaactcatgctcagagaaaaagtgacttgctcgaggtcacacattgtaggtgaccaaccatctcagctta

SEQ ID NO: 362928 - DNA, 1829 bp, Homo sapiens
caacctcaaggccttgaggttttggcagctctggaggatgagagagaacatggccaggggcccttgcaacgcgccgagatgggcgtccctgatggtgctggtcgccataggcaccgccgtgacagcggccgtcaaccctggcgtcgtggtcaggatctcccagaagggcctggactacgccagccagcaggggacggccgctctgcagaaggagctgaagaggatcaagattcctgactactcagacagctttaagatcaagcatcttgggaaggggcattatagcttctacagcatggacatccgtgaattccagcttcccagttcccagataagcatggtgcccaatgtgggccttaagttctccatcagcaacgccaatatcaagatcagcgggaaatggaaggcacaaaagagattcttaaaaatgagcggcaattttgacctgagcatagaaggcatgtccatttcggctgatctgaagctgggcagtaaccccacgtcaggcaagcccaccatcacctgctccagctgcagcagccacatcaacagtgtccacgtgcacatctcaaagagcaaagtggggtggctgatccaactcttccacaaaaaaattgagtctgcgcttcgaaacaagatgaacagccaggtctgcgagaaagtgaccaattctgtatcctccaagctgcaaccttatttccagactctgccagtaatgaccaaaatagattctgtggctggaatcaactatggtctggtggcacctccagcaaccacggctgagaccctggatgtacagatgaagggggagttttacagtgagaaccaccacaatccacctccctttgctccaccagtgatggagtttcccgctgcccatgaccgcatggtatacctgggcctctcagactacttcttcaacacagccgggcttgtataccaagaggctggggtcttgaagatgacccttagagatgacatgattccaaaggagtccaaatttcgactgacaaccaagttctttggaaccttcctacctgaggtggccaagaagtttcccaacatgaagatacagatccatgtctcagcctccaccccgccacacctgtctgtgcagcccaccggccttaccttctaccctgccgtggatgtccaggcctttgccgtcctccccaactcctccctggcttccctcttcctgattggcatgcacacaactggttccatggaggtcagcgccgagtccaacaggcttgttggagagctcaagctggataggctgctcctggaactgaagcactcaaatattggccccttcccggtgaattgctgcaggatatcatgaactacattgtacccattcttgtgctgcccagggttaacgagaaactacagaaaggcttccctctcccgacgccggccagagtccagctctacaacgtagtgcttcagcctcaccagaacttcctgctgttcggtgcagacgttgtctataaatgaaggcaccaggggtgccgggggctgtcagccgcacctgttcctgatgggctgtggggcaccggctgcctttccccagggaatcctctccagatcttaaccaagagccccttgcaaacttcttcgactcagattcagaaatgatctaaacacgaggaaacattattcattggaaaagtgcatggtgtgtattttagggattatgagcttctttcaagggctaaggctgcagagatatttcctccaggaatcgtgtttcaattgtaaccaagaaatttccatttgtgcttcatgaaaaaaaacttctggtttttttcatgtgaaaactgtgt

SEQ ID NO: 362929 - DNA, 1989 bp, Homo sapiens
tggctcaagaagagggcctaagtggaagggacagggagccaggaagaaagcccagagaagctcccacatcttcagtgaaggaggaagagcttgcaaagaagtctggggaaaagcctgtaggggataggaagaaagcggaaggccttggtcacaggactctagaaggagtgtttctagaagggaatgggcaaccacaccaggagctacccagtagtcaagaaatgcaaggactgaagagactgctggattactgagggaaaggtcattcgagagcaacatcaggagagggagggaaggagcttgtctgaccaccagccccagccccaatctcttagtgaggagaagcctgtggtttaaatcctatattctagctatctattgcttgaaaacaaacaactcaaaatttggtatcataaaacaaccaccattgttaacattcatggattctgtgcatcaggaaaaaggcatgacagggatggctaagctctctgctccatgaggtctgaggcctcacctcagaagactcaaaagttccatgttagaattacctggagagttcctctctcccatctctggtgcctgggctaggaagacttgaaggctcagctctgctgggactattgacccaagccacttccatggtctctccacagggcttgggcttctcgtagcattgagtgggttctgcacagccttttatgacctcacctctgaagttacacaaaggtcaggtgtattgttgtgttctgttgcttagaagcaagtcggcaagcccagattctagtggcaagttcacagactccatctcttggtgggggtgtggcaaagccacattacagaagagcaaatggaatggaaaatgtctgcgagaaagtgaccaattctgtatcctccaagctgcaaccttatttccagactctgccagtaatgaccaaaatagattctgtggctggaatcaactatggtctggtggcacctccagcaaccacggctgagaccctggatgtacagatgaagtgatggagtttcccgctgcccatgaccgcatggtatacctgggcctctcagactacttcttcaacacagccgggcttgtataccaagaggctggggtcttgaagatgacccttagagatgacatgattccaaaggagtccaaatttcgactgacaaccaagttctttggaaccttcctacctgaggtggccaagaagtttcccaacatgaagatacagatccatgtctcagcctccaccccgccacacctgtctgtgcagcccaccggccttaccttctaccctgccgtggatgtccaggcctttgccgtcctccccaactcctccctggcttccctcttcctgattggcatgcacacaactggttccatggaggtcagcgccgagtccaacaggcttgttggagagctcaagctggataggctgctcctggaactgaagcactcaaatattggccccttcccggtgaattgctgcaggatatcatgaactacattgtacccattcttgtgctgcccagggttaacgagaaactacagaaaggcttccctctcccgacgccggccagagtccagctctacaacgtagtgcttcagcctcaccagaacttcctgctgttcggtgcagacgttgtctataaatgaaggcaccaggggtgccgggggctgtcagccgcacctgttcctgatgggctgtggggcaccggctgcctttccccagggaatcctctccagatcttaaccaagagccccttgcaaacttcttcgactcagattcagaaatgatctaaacacgaggaaacattattcattggaaaagtgcatggtgtgtattttagggattatgagcttctttcaagggctaaggctgcagagatatttcctccaggaatcgtgtttcaattgtaaccaagaaatttccatttgtgcttcatgaaaaaaaacttctggtttttttcatgtgaaaactgtgt

SEQ ID NO: 362930 - DNA, 1537 bp, Homo sapiens
caacctcaaggccttgaggttttggcagctctggaggatgagagagaacatggccaggggcccttgcaacgcgccgagatgggcgtccctgatggtgctggtcgccataggcaccgccgtgacagcggccgtcaaccctggcgtcgtggtcaggatctcccagaagggcctggactacgccagccagcaggggacggccgctctgcagaaggagctgaagaggatcaagattcctgactactcagacagctttaagatcaagcatcttgggaaggggcattatagcttctacagcatggacatccgtgaattccagcttcccagttcccagataagcatggtgcccaatgtgggccttaagttctccatcagcaacgccaatatcaagatcagcgggaaatggaaggcacaaaagagattcttaaaaatgagcggcaattttgacctgagcatagaaggcatgtccatttcggctgatctgaagctgggcagtaaccccacgtcaggcaagcccaccatcacctgctccagctgcagcagccacatcaacagtgtccacgtgcacatctcaaagagcaaagtggggtggctgatccaactcttccacaaaaaaattgagtctgcgcttcgaaacaagatgaacagccaggtctgcgagaaagtgaccaattctgtatcctccaagctgcaaccttatttccagactctgccagtaatgaccaaaatagattctgtggctggaatcaactatggtctggtggcacctccagcaaccacggctgagaccctggatgtacagatgaagggggagttttacagtgagaaccaccacaatccacctccctttgctccaccagtgatggagtttcccgctgcccatgaccgcatggtatacctgggcctctcagactacttcttcaacacagccgggcttgtataccaagaggctggggtcttgaagatgacccttagagatgacatgattccaaaggagtccaaatttcgactgacaaccaagttctttggaaccttcctacctgaggtggccaagaagtttcccaacatgaagatacagatccatgtctcagcctccaccccgccacacctgtctgtgcagcccaccggccttaccttctaccctgccgtggatgtccaggcctttgccgtcctccccaactcctccctggcttccctcttcctgattggcatggtaagcagttcctgggttggacagatgaggagccccagacagtcccaacagcactgtctttggagtcaggagaccatgtgaatcctgtctggattcaaacctggactgtgtcactccggagcctgaggcttgagtcactgtactcaatggtgccgactcctggaggtattcattcacccagccattcactagtgcgtttgtttacttattcattcaattattcattcagtcaatttctcattcattcaattattcattccatgttggcttgaaatatgtgtactgttccaattcatccatttatatctttagtcattcaattatgca

SEQ ID NO: 362931 - DNA, 665 bp, Homo sapiens
cacgcaggtgctagaagtggacttggggttgatggacaacaggtgggaggtacggactctggggcagccttcctttcaggcatgtatgcccatgccagtccctacctagggccaggcatgctggttcagggaggctgtctacccaggctctctggccctccctcctcccctgcccttctctttcttttctcctggtcctcaccatcggtctctgtcacagagaaactacagaaaggcttccctctcccgacgccggccagagtccagctctacaacgtagtgcttcagcctcaccagaacttcctgctgttcggtgcagacgttgtctataaatgaaggcaccaggggtgccgggggctgtcagccgcacctgttcctgatgggctgtggggcaccggctgcctttccccagggaatcctctccagatcttaaccaagagccccttgcaaacttcttcgactcagattcagaaatgatctaaacacgaggaaacattattcattggaaaagtgcatggtgtgtattttagggattatgagcttctttcaagggctaaggctgcagagatatttcctccaggaatcgtgtttcaattgtaaccaagaaatttccatttgtgcttcatgaaaaaaaacttctggtttttttcatgtgaaaactgtgt

SEQ ID NO: 362932 - DNA, 602 bp, Homo sapiens
cctgaccctggttccaataaaactttatttacaaatcagacagtcggcccgtgggcgatagtttgccaatttgatttttaaaaccatcccattaagatattttttggattattgagtttttggatgcctccttaaatttgtgcctcacttgcttcaccctagtcctaacccagctgtcactgactgccagagccctgatggaggagcccatgttcttacaagggtctgcacctgctgtggtttgaatgtgttccccgtatttcatgtgttggaaactgaatgcccaacttagcagtattgaaagatggggcctttaagaggtgattggatcctaaggcctctgccctcatgaattgattaatccacgtgtggactaatagattaatgggttattatgagagcaggactggtggctttataagaggaagagagacctgagctagcacacccagcccccttgtcacatgatgccatgtgccgcctcaggtctctgtagagtccccaccttcaagaaggctgtgcccccaccagatgtgccccctcgaccttgtattcctccataacagtaagaaataaactccttttctttataaattacccag

SEQ ID NO: 362933 - DNA, 461 bp, Homo sapiens
gcttgggagggagtggggattagctgagaaggggagaaggaagcatttttgaggtgacgtaaatgtttttgtatcttgattatggtggctgttatgggggtgcacatccaagtgtcaagactcatcgaactgtacacttttgttctaggtacattagacctcaataaagtggattttaaacctaaataagccaggtaacagctttgcctgggtggctgggggagaggcttgggacactttacattgatctccctcttaggcatgttcgttttggtttggttttgttcttatgatgtattatttattcaaaaatatatcattagcagagtgactgatgtaaatgtaaaaccattgttaaggaaaccaacaaaagcgggaacaagagacactggtgcatcctgttagagggataagaataagcactcgctgtccaagctcataaaatattttggaaatgaatg

SEQ ID NO: 362934 - DNA, 414 bp, Homo sapiens
tgttatctaagcaacaatgtgtttggtatgaaaaccagtttcgcatgttcaacctaagttacatgctgctgaatggaacctttcatagaaggaaaggaaaccagaagtgtggcttttagttcttcgtttccttgagccaaaacctcctcctacaatttttctaaatatttgtttaactctgttaaagtttattcattattttgcaaatacactaaatacgtcaaactgtttcaatttttagctggtactaaaaaagttagaatcaaatttttccatagtatttcataggagaaaaacacttttagtcactgtggttgtacagacatgatcattcatgtgtgaattgttttattagagatgacaataaagttaaaaaccagcttttccagggttctggataagtgaagggattgg

SEQ ID NO: 362935 - DNA, 444 bp, Homo sapiens
gctggaagccaagatgaggaggtggcagagattcaggccagagttgtgggccgccgtcggcagcaagaacagagagagaggtggacagatctgagagatactgagattaaaaggagcccaagccccatctcatcctagcacaccctcctccactgtcctggcagtagcagtccctgcactaggtcagacaatcccctttggggtacaggaaacaaagcaggaggagtttgaggtccctacactgcagcagaagaagaggaaggagtggggcctgaattgaccataaaggatgtaggggccacgttgttccactgtaatgtcaaggagggggtggccattgtttgtcccagcctggggctccccctctggtttcctatttgtagttactagaatgaaaaaaaaacatgatagataaataaataatccactggcagagatcagaga

SEQ ID NO: 362936 - DNA, 336 bp, Homo sapiens
cagtgaaggtgtggcagctgagcacagagttcacggaacaagggccccgggaagctgaggacctggactgcctggcagctctccctcaagtatctgtttgctgtgcgctggtccccagtgcggcccttggtttttgcagctgcctctgggaaaggtgacgtgcagctgtttgatctccagaaaagctcccagaaacccacagttttgatcaagcaaacccaggatgaaagccctgtctactgtctggagttcaacagccagcagactcagctcttggtgtgccgagccttgtgtttctgacgcaagccaaatgaagaaaagcaaagctttggggga

SEQ ID NO: 362937 - DNA, 1968 bp, Homo sapiens
gctggaagccaagatgaggaggtggcagagattcaggccagagttgtgggccgccgtcggcagcaagaacagagagagaggtggacagatctgagagatactgaggtcttgcaggaggcgctgcgaccaattcaaacatggcgccgtcagcctcacattccccgttttccgctcatggcggcgtaggggcggaggtcgcgcctgagtgcgtccgcacgagagggcggaaccgtctccatggcaacccgcgcgcagccggggccactcagccaggcgggaagcgctggtgttgcggcgctggcgacagtcggggttgcgagcggcccggggccggggcggccagggccgctgcaggacgagaccctgggtgtggcgtccgtgccctcgcagtggagggccgtccagggcatccgcggggagacgaaaagttgccagacggccagcattgccactgccagtgcatccgcccaggccaggaatcatgtggacgcccaggtgcagacggaggcccccgtgcctgtcagcgtgcagcccccgtcccagtacgacatacccaggctcgcagcctttcttcggagagtggaggccatggtcatccgagagctgaacaagaattggcagagccacgcgtttgatggcttcgaggtgaactggaccgagcagcagcagatggtgtcttgtctgtataccctgggctacccgccagcccaagcgcagggtctgcatgtgaccagcatctcctggaactccactggctctgtggtggcctgtgcctacggccggctggaccatggggactggagcacgcttaagtccttcgtgtgtgcctggaacctggaccggcgagacctgcgtccccagcaaccgtcggccgtggtggaggtccccagcgctgtcctgtgtctggccttccaccccacgcagccctcccacgtcgcaggagggctgtacagtggtgaggtgttggtgtgggacctgagccgtcttgaggacccgctgctgtggcgcacaggcctgacggatgacacccacacagaccctgtgtcccaggtggtgtggctgcccgagcctgggcacagccaccgcttccaggtgctgagtgtggccactgacgggaaggtgctactctggcagggcatcggggtaggccagctgcagctcacagagggcttcgccctggtcatgcagcagctgccacggagcaccaagctcaagaagcatccccgcggggagaccgaggtgggcgccacggcagtggccttctccagctttgaccctaggctgttcattctgggcacggaaggcggcttcccgctcaagtgttccctggcagctggagaggcagccctcacgcggatgcccagctccgtgcccctgcgggccccagcacagtttaccttctccccccacggcggtcccatctactctgtgagctgttcccccttccacaggaatctcttcctgagcgctgggactgacgggcatgtccacctgtactccatgctgcaggcccctcccttgacttcgctgcagctctccctcaagtatctgtttgctgtgcgctggtccccagtgcggcccttggtttttgcagctgcctctgggaaaggtgacgtgcagctgtttgatctccagaaaagctcccagaaacccacagttttgatcaagcaaacccaggatgaaagccctgtctactgtctggagttcaacagccagcagactcagctcttggctgcgggcgatgcccagggcacagtgaaggtgtggcagctgagcacagagttcacggaacaagggccccgggaagctgaggacctggactgcctggcagcagaggtggcggcctgaggggtcccgggaggcgggtgcaagccttcgctgtgccgagccttgtgtttctgacgcaagccaaatgaagaaaagcaaagctttgggggaaaaaaaaacacacacaaaaactcgcagggg

SEQ ID NO: 362938 - DNA, 1689 bp, Homo sapiens
aattacggctaggtacgaggctgggtggtgagcgctggtgttgcggcgctggcgacagtcggggttgcgagcggcccggggccggggcggccagggccgctgcaggacgagaccctgggtgtggcgtccgtgccctcgcagtggagggccgtccagggcatccgcggggagacgaaaagttgccagacggccagcattgccactgccagtgcatccgcccaggccaggaatcatgtggacgcccaggtgcagacggaggcccccgtgcctgtcagcgtgcagcccccgtcccagtacgacatacccaggctcgcagcctttcttcggagagtggaggccatggtcatccgagagctgaacaagaattggcagagccacgcgtttgatggcttcgaggtgaactggaccgagcagcagcagatggtgtcttgtctgtataccctgggctacccgccagcccaagcgcagggtctgcatgtgaccagcatctcctggaactccactggctctgtggtggcctgtgcctacggccggctggaccatggggactggagcacgcttaagtccttcgtgtgtgcctggaacctggaccggcgagacctgcgtccccagcaaccgtcggccgtggtggaggtccccagcgctgtcctgtgtctggccttccaccccacgcagccctcccacgtcgcaggagggctgtacagtggtgaggtgttggtgtgggacctgagccgtcttgaggacccgctgctgtggcgcacaggcctgacggatgacacccacacagaccctgtgtcccaggtggtgtggctgcccgagcctgggcacagccaccgcttccaggtgctgagtgtggccactgacgggaaggtgctactctggcagggcatcggggtaggccagctgcagctcacagagggcttcgccctggtcatgcagcagctgccacggagcaccaagctcaagaagcatccccgcggggagaccgaggtgggcgccacggcagtggccttctccagctttgaccctaggctgttcattctgggcacggaaggcggcttcccgctcaagtgttccctggcagctggagaggcagccctcacgcggatgcccagctccgtgcccctgcgggccccagcacagtttaccttctccccccacggcggtcccatctactctgtgagctgttcccccttccacaggaatctcttcctgagcgctgggactgacgggcatgtccacctgtactccatgctgcaggcccctcccttgacttcgctgcagctctccctcaagtatctgtttgctgtgcgctggtccccagtgcggcccttggtttttgcagctgcctctgggaaaggtgacgtgcagctgtttgatctccagaaaagctcccagaaacccacagttttgatcaagcaaacccaggatgaaagccctgtctactgtctggagttcaacagccagcagactcagctcttggctgcgggcgatgcccagggcacagtgaaggtgtggcagctgagcacagagttcacggaacaagggccccgggaagctgaggacctggactgcctggcagcagaggtggcggcctgaggggtcccgggaggcgggtgcaagccttcgctgtgccgagccttgtgtttctgacgcaagccaaatgaagaaaagcaaagctttggggga

SEQ ID NO: 362939 - DNA, 1712 bp, Homo sapiens
ggacgcgtgggtccggacgcgtgggtccggacgcgtgggtcgacccacgcgtcagcgctggtgttgcggcgctggcgacagtcggggttgcgagcggcccggggccggggcggccagggccgctgcaggacgagaccctgggtgtggcgtccgtgccctcgcagtggagggccgtccagggcatccgcggggagacgaaaagttgccagacggccagcattgccactgccagtgcatccgcccaggccaggaatcatgtggacgcccaggtgcagacggaggcccccgtgcctgtcagcgtgcagcccccgtcccagtacgacatacccaggctcgcagcctttcttcggagagtggaggccatggtcatccgagagctgaacaagaattggcagagccacgcgtttgatggcttcgaggtgaactggaccgagcagcagcagatggtgtcttgtctgtataccctgggctacccgccagcccaagcgcagggtctgcatgtgaccagcatctcctggaactccactggctctgtggtggcctgtgcctacggccggctggaccatggggactggagcacgcttaagtccttcgtgtgtgcctggaacctggaccggcgagacctgcgtccccagcaaccgtcggccgtggtggaggtccccagcgctgtcctgtgtctggccttccaccccacgcagccctcccacgtcgcaggagggctgtacagtggtgaggtgttggtgtgggacctgagccgtcttgaggacccgctgctgtggcgcacaggcctgacggatgacacccacacagaccctgtgtcccaggtggtgtggctgcccgagcctgggcacagccaccgcttccaggtgctgagtgtggccactgacgggaaggtgctactctggcagggcatcggggtaggccagctgcagctcacagagggcttcgccctggtcatgcagcagctgccacggagcaccaagctcaagaagcatccccgcggggagaccgaggtgggcgccacggcagtggccttctccagctttgaccctaggctgttcattctgggcacggaaggcggcttcccgctcaagtgttccctggcagctggagaggcagccctcacgcggatgcccagctccgtgcccctgcgggccccagcacagtttaccttctccccccacggcggtcccatctactctgtgagctgttcccccttccacaggaatctcttcctgagcgctgggactgacgggcatgtccacctgtactccatgctgcaggcccctcccttgacttcgctgcagctctccctcaagtatctgtttgctgtgcgctggtccccagtgcggcccttggtttttgcagctgcctctgggaaaggtgacgtgcagctgtttgatctccagaaaagctcccagaaacccacagttttgatcaagcaaacccaggatgaaagccctgtctactgtctggagttcaacagccagcagactcagctcttggctgcgggcgatgcccagggcacagtgaaggtgtggcagctgagcacagagttcacggaacaagggccccgggaagctgaggacctggactgcctggcagcagaggtggcggcctgaggggtcccgggaggcgggtgcaagccttcgctgtgccgagccttgtgtttctgacgcaagccaaatgaagaaaagcaaagctttggggga

SEQ ID NO: 362940 - DNA, 1554 bp, Homo sapiens
gctggaagccaagatgaggaggtggcagagattcaggccagagttgtgggccgccgtcggcagcaagaacagagagagaggtggacagatctgagagatactgaggtcttgcaggaggcgctgcgaccaattcaaacatggcgccgtcagcctcacattccccgttttccgctcatggcggcgtaggggcggaggtcgcgcctgagtgcgtccgcacgagagggcggaaccgtctccatggcaacccgcgcgcagccggggccactcagccaggcgggaagcgctggtgttgcggcgctggcgacagtcggggttgcgagcggcccggggccggggcggccagggccgctgcaggacgagaccctgggtgtggcgtccgtgccctcgcagtggagggccgtccagggcatccgcggggagacgaaaagttgccagacggccagcattgccactgccagtgcatccgcccaggccaggaatcatgtggacgcccaggtgcagacggaggcccccgtgcctgtcagcgtgcagcccccgtcccagtacgacatacccaggctcgcagcctttcttcggagagtggaggccatggtcatccgagagctgaacaagaattggcagagccacgcgtttgatggcttcgaggtgaactggaccgagcagcagcagatggtgtcttgtctgtataccctgggctacccgccagcccaagcgcagggtctgcatgtgaccagcatctcctggaactccactggctctgtggtggcctgtgcctacggccggctggaccatggggactggagcacgcttaagtccttcgtgtgtgcctggaacctggaccggcgagacctgcgtccccagcaaccgtcggccgtggtggaggtccccagcgctgtcctgtgtctggccttccaccccacgcagccctcccacgtcgcaggagggctgtacagtggtgaggtgttggtgtgggacctgagccgtcttgaggacccgctgctgtggcgcacaggcctgacggatgacacccacacagaccctgtgtcccaggtggtgtggctgcccgagcctgggcacagccaccgcttccaggtgctgagtgtggccactgacgggaaggtgctactctggcagggcatcggggtaggccagctgcagctcacagagggcttcgccctggtcatgcagcagctgccacggagcaccaagctcaagaagcatccccgcggggagaccgaggtgggcgccacggcagtggccttctccagctttgaccctaggctgttcattctgggcacggaaggcggcttcccgctcaagtgttccctggcagctggagaggcagccctcacgcggatgcccagctccgtgcccctgcggccagaagttaactttcccacgggtcatctcctgtgagtgtcctccacgatctccgaggcggacgacggcttcccgttcctgggccctgattcgggtccaagttggggcggccgggcggttgcgccggagggtttcacccaccttccaggtggcccttggggagagaacacgttg

SEQ ID NO: 362941 - DNA, 1909 bp, Homo sapiens
gctggaagccaagatgaggaggtggcagagattcaggccagagttgtgggccgccgtcggcagcaagaacagagagagaggtggacagatctgagagatactgaggtcttgcaggaggcgctgcgaccaattcaaacatggcgccgtcagcctcacattccccgttttccgctcatggcggcgtaggggcggaggtcgcgcctgagtgcgtccgcacgagagggcggaaccgtctccatggcaacccgcgcgcagccggggccactcagccaggcgggaagcgctggtgttgcggcgctggcgacagtcggggttgcgagcggcccggggccggggcggccagggccgctgcaggacgagaccctgggtgtggcgtccgtgccctcgcagtggagggccgtccagggcatccgcggggagacgaaaagttgccagacggccagcattgccactgccagtgcatccgcccaggccaggaatcatgtggacgcccaggtgcagacggaggcccccgtgcctgtcagcgtgcagcccccgtcccagtacgacatacccaggctcgcagcctttcttcggagagtggaggccatggtcatccgagagctgaacaagaattggcagagccacgcgtttgatggcttcgaggtgaactggaccgagcagcagcagatggtgtcttgtctgtataccctgggctacccgccagcccaagcgcagggtctgcatgtgaccagcatctcctggaactccactggctctgtggtggcctgtgcctacggccggctggaccatggggactggagcacgcttaagtccttcgtgtgtgcctggaacctggaccggcgagacctgcgtccccagcaaccgtcggccgtggtggaggtccccagcgctgtcctgtgtctggccttccaccccacgcagccctcccacgtcgcaggagggctgtacagtggtgaggtgttggtgtgggacctgagccgtcttgaggacccgctgctgtggcgcacaggcctgacggatgacacccacacagaccctgtgtcccagccaccgcttccaggtgctgagtgtggccactgacgggaaggtgctactctggcagggcatcggggtaggccagctgcagctcacagagggcttcgccctggtcatgcagcagctgccacggagcaccaagctcaagaagcatccccgcggggagaccgaggtgggcgccacggcagtggccttctccagctttgaccctaggctgttcattctgggcacggaaggcggcttcccgctcaagtgttccctggcagctggagaggcagccctcacgcggatgcccagctccgtgcccctgcgggccccagcacagtttaccttctccccccacggcggtcccatctactctgtgagctgttcccccttccacaggaatctcttcctgagcgctgggactgacgggcatgtccacctgtactccatgctgcaggcccctcccttgacttcgctgcagctctccctcaagtatctgtttgctgtgcgctggtccccagtgcggcccttggtttttgcagctgcctctgggaaaggtgacgtgcagctgtttgatctccagaaaagctcccagaaacccacagttttgatcaagcaaacccaggatgaaagccctgtctactgtctggagttcaacagccagcagactcagctcttggctgcgggcgatgcccagggcacagtgaaggtgtggcagctgagcacagagttcacggaacaagggccccgggaagctgaggacctggactgcctggcagcagaggtggcggcctgaggggtcccgggaggcgggtgcaagccttcgctgtgccgagccttgtgtttctgacgcaagccaaatgaagaaaagcaaagctttggggga

SEQ ID NO: 362942 - DNA, 1122 bp, Homo sapiens
gctggaagccaagatgaggaggtggcagagattcaggccagagttgtgggccgccgtcggcagcaagaacagagagagaggtggacagatctgagagatactgaggtcttgcaggaggcgctgcgaccaattcaaacatggcgccgtcagcctcacattccccgttttccgctcatggcggcgtaggggcggaggtcgcgcctgagtgcgtccgcacgagagggcggaaccgtctccatggcaacccgcgcgcagccggggccactcagccaggcgggaagcgctggtgttgcggcgctggcgacagtcggggttgcgagcggcccggggccggggcggccagggccgctgcaggacgagaccctgggtgtggcgtccgtgccctcgcagtggagggccgtccagggcatccgcggggagacgaaaagttgccagacggccagcattgccactgccagtgcatccgcccaggccaggaatcatgtggacgcccaggtgcagacggaggcccccgtgcctgtcagcgtgcagcccccgtcccagtacgacatacccaggctcgcagcctttcttcggagagtggaggccatggtcatccgagagctgaacaagaattggcagagccacgcgtttgatggcttcgaggtgaactggaccgagcagcagcagatggtgtcttgtctgtataccctgggctacccgccagcccaagcgcagggtctgcatgtgaccagcatctcctggaactccactggctctgtggtggcctgtgcctacggccggctggaccatggggactggagcacgcttaagtccttcgtgtgtgcctggaacctggaccggcgagacctgcgtccccagcaaccgtcggccgtggtggaggtccccagcgctgtcctgtgtctggccttccaccccacgcagccctcccacgtcgcaggagggctgtacagtggtgaggtgttggtgtgggacctgagccgtcttgaggacccgctgctgtggcgcacaggcctgacggatgacacccacacagaccctgtgtcccagggtgtggtgccgagctgggcagcacgttccggtgctggtgtggccctccggacggccatctgccggatcggc

SEQ ID NO: 362943 - DNA, 1620 bp, Homo sapiens
gctggaagccaagatgaggaggtggcagagattcaggccagagttgtgggccgccgtcggcagcaagaacagagagagaggtggacagatctgagagatactgagaaaagttgccagacggccagcattgccactgccagtgcatccgcccaggccaggaatcatgtggacgcccaggtgcagacggaggcccccgtgcctgtcagcgtgcagcccccgtcccagtacgacatacccaggctcgcagcctttcttcggagagtggaggccatggtcatccgagagctgaacaagaattggcagagccacgcgtttgatggcttcgaggtgaactggaccgagcagcagcagatggtgtcttgtctgtataccctgggctacccgccagcccaagcgcagggtctgcatgtgaccagcatctcctggaactccactggctctgtggtggcctgtgcctacggccggctggaccatggggactggagcacgcttaagtccttcgtgtgtgcctggaacctggaccggcgagacctgcgtccccagcaaccgtcggccgtggtggaggtccccagcgctgtcctgtgtctggccttccaccccacgcagccctcccacgtcgcaggagggctgtacagtggtgaggtgttggtgtgggacctgagccgtcttgaggacccgctgctgtggcgcacaggcctgacggatgacacccacacagaccctgtgtcccaggtggtgtggctgcccgagcctgggcacagccaccgcttccaggtgctgagtgtggccactgacgggaaggtgctactctggcagggcatcggggtaggccagctgcagctcacagagggcttcgccctggtcatgcagcagctgccacggagcaccaagctcaagaagcatccccgcggggagaccgaggtgggcgccacggcagtggccttctccagctttgaccctaggctgttcattctgggcacggaaggcggcttcccgctcaagtgttccctggcagctggagaggcagccctcacgcggatgcccagctccgtgcccctgcgggccccagcacagtttaccttctccccccacggcggtcccatctactctgtgagctgttcccccttccacaggaatctcttcctgagcgctgggactgacgggcatgtccacctgtactccatgctgcaggcccctcccttgacttcgctgcagctctccctcaagtatctgtttgctgtgcgctggtccccagtgcggcccttggtttttgcagctgcctctgggaaaggtgacgtgcagctgtttgatctccagaaaagctcccagaaacccacagttttgatcaagcaaacccaggatgaaagccctgtctactgtctggagttcaacagccagcagactcagctcttggctgcgggcgatgcccagggcacagtgaaggtgtggcagctgagcacagagttcacggaacaagggccccgggaagctgaggacctggactgcctggcagcagaggtggcggcctgaggggtcccgggaggcgggtgcaagccttcgctgtgccgagccttgtgtttctgacgcaagccaaatgaagaaaagcaaagctttggggga

SEQ ID NO: 362944 - DNA, 1713 bp, Homo sapiens
gtgaagcgctggtgtttgcggcgctggctgacatgtcgtggtgttgctgatgctgtgccctggtgtgccgtgtggctgtgccatgtggcctgcatgcatgtgactgatgacctctgtgtgttgtgtgctgtcctgtgcccgtctgcagatgtgaagtgtgcctagtccatgtgtgcattcctgctgtgtggatgactgaaaagttgccagacggccagcattgccactgccagtgcatccgcccaggccaggaatcatgtggacgcccaggtgcagacggaggcccccgtgcctgtcagcgtgcagcccccgtcccagtacgacatacccaggctcgcagcctttcttcggagagtggaggccatggtcatccgagagctgaacaagaattggcagagccacgcgtttgatggcttcgaggtgaactggaccgagcagcagcagatggtgtcttgtctgtataccctgggctacccgccagcccaagcgcagggtctgcatgtgaccagcatctcctggaactccactggctctgtggtggcctgtgcctacggccggctggaccatggggactggagcacgcttaagtccttcgtgtgtgcctggaacctggaccggcgagacctgcgtccccagcaaccgtcggccgtggtggaggtccccagcgctgtcctgtgtctggccttccaccccacgcagccctcccacgtcgcaggagggctgtacagtggtgaggtgttggtgtgggacctgagccgtcttgaggacccgctgctgtggcgcacaggcctgacggatgacacccacacagaccctgtgtcccaggtggtgtggctgcccgagcctgggcacagccaccgcttccaggtgctgagtgtggccactgacgggaaggtgctactctggcagggcatcggggtaggccagctgcagctcacagagggcttcgccctggtcatgcagcagctgccacggagcaccaagctcaagaagcatccccgcggggagaccgaggtgggcgccacggcagtggccttctccagctttgaccctaggctgttcattctgggcacggaaggcggcttcccgctcaagtgttccctggcagctggagaggcagccctcacgcggatgcccagctccgtgcccctgcgggccccagcacagtttaccttctccccccacggcggtcccatctactctgtgagctgttcccccttccacaggaatctcttcctgagcgctgggactgacgggcatgtccacctgtactccatgctgcaggcccctcccttgacttcgctgcagctctccctcaagtatctgtttgctgtgcgctggtccccagtgcggcccttggtttttgcagctgcctctgggaaaggtgacgtgcagctgtttgatctccagaaaagctcccagaaacccacagttttgatcaagcaaacccaggatgaaagccctgtctactgtctggagttcaacagccagcagactcagctcttggctgcgggcgatgcccagggcacagtgaaggtgtggcagctgagcacagagttcacggaacaagggccccgggaagctgaggacctggactgcctggcagcagaggtggcggcctgaggggtcccgggaggcgggtgcaagccttcgctgtgccgagccttgtgtttctgacgcaagccaaatgaagaaaagcaaagctttggggga

SEQ ID NO: 362945 - DNA, 1828 bp, Homo sapiens
gctggaagccaagatgaggaggtggcagagattcaggccagagttgtgggccgccgtcggcagcaagaacagagagagaggtggacagatctgagagatactgaggtcttgcaggaggcgctgcgaccaattcaaacatggcgccgtcagcctcacattccccgttttccgctcatggcggcgtaggggcggaggtcgcgcctgagtgcgtccgcacgagagggcggaaccgtctccatggcaacccgcgcgcagccggggccactcagccaggcgggaagcgctggtgttgcggcgctggcgacagtcggggttgcgagcggcccggggccggggcggccagggccgctgcaggacgagaccctgggtgtggcgtccgtgccctcgcagtggagggccgtccagggcatccgcggggagacgaaaagttgccagacggccagcattgccactgccagtgcatccgcccaggccaggaatcatgtggacgcccaggtgcagacggaggcccccgtgcctgtcagcgtgcagcccccgtcccagtacgacatacccaggctcgcagcctttcttcggagagtggaggccatggtcatccgagagctgaacaagaattggcagagccacgcgtttgatggcttcgaggtgaactggaccgagcagcagcagatggtgtcttgtctgtataccctgggctacccgccagcccaagcgcagggtctgcatgtgaccagcatctcctggaactccactggctctgtggtggcctgtgcctacggccggctggaccatggggactggagcacgcttaagtccttcgtgtgtgcctggaacctggaccggcgagacctgcgtccccagcaaccgtcggccgtggtggaggtccccagcgctgtcctgtgtctggccttccaccccacgcagccctcccacgtcgcaggtggtgtggctgcccgagcctgggcacagccaccgcttccaggtgctgagtgtggccactgacgggaaggtgctactctggcagggcatcggggtaggccagctgcagctcacagagggcttcgccctggtcatgcagcagctgccacggagcaccaagctcaagaagcatccccgcggggagaccgaggtgggcgccacggcagtggccttctccagctttgaccctaggctgttcattctgggcacggaaggcggcttcccgctcaagtgttccctggcagctggagaggcagccctcacgcggatgcccagctccgtgcccctgcgggccccagcacagtttaccttctccccccacggcggtcccatctactctgtgagctgttcccccttccacaggaatctcttcctgagcgctgggactgacgggcatgtccacctgtactccatgctgcaggcccctcccttgacttcgctgcagctctccctcaagtatctgtttgctgtgcgctggtccccagtgcggcccttggtttttgcagctgcctctgggaaaggtgacgtgcagctgtttgatctccagaaaagctcccagaaacccacagttttgatcaagcaaacccaggatgaaagccctgtctactgtctggagttcaacagccagcagactcagctcttggctgcgggcgatgcccagggcacagtgaaggtgtggcagctgagcacagagttcacggaacaagggccccgggaagctgaggacctggactgcctggcagcagaggtggcggcctgaggggtcccgggaggcgggtgcaagccttcgctgtgccgagccttgtgtttctgacgcaagccaaatgaagaaaagcaaagctttggggga

SEQ ID NO: 362946 - DNA, 1828 bp, Homo sapiens
gctggaagccaagatgaggaggtggcagagattcaggccagagttgtgggccgccgtcggcagcaagaacagagagagaggtggacagatctgagagatactgaggtcttgcaggaggcgctgcgaccaattcaaacatggcgccgtcagcctcacattccccgttttccgctcatggcggcgtaggggcggaggtcgcgcctgagtgcgtccgcacgagagggcggaaccgtctccatggcaacccgcgcgcagccggggccactcagccaggcgggaagcgctggtgttgcggcgctggcgacagtcggggttgcgagcggcccggggccggggcggccagggccgctgcaggacgagaccctgggtgtggcgtccgtgccctcgcagtggagggccgtccagggcatccgcggggagacgaaaagttgccagacggccagcattgccactgccagtgcatccgcccaggccaggaatcatgtggacgcccaggtgcagacggaggcccccgtgcctgtcagcgtgcagcccccgtcccagtacgacatacccaggctcgcagcctttcttcggagagtggaggccatggtcatccgagagctgaacaagaattggcagagccacgcgtttgatggcttcgaggtgaactggaccgagcagcagcagatggctggaccatggggactggagcacgcttaagtccttcgtgtgtgcctggaacctggaccggcgagacctgcgtccccagcaaccgtcggccgtggtggaggtccccagcgctgtcctgtgtctggccttccaccccacgcagccctcccacgtcgcaggagggctgtacagtggtgaggtgttggtgtgggacctgagccgtcttgaggacccgctgctgtggcgcacaggcctgacggatgacacccacacagaccctgtgtcccaggtggtgtggctgcccgagcctgggcacagccaccgcttccaggtgctgagtgtggccactgacgggaaggtgctactctggcagggcatcggggtaggccagctgcagctcacagagggcttcgccctggtcatgcagcagctgccacggagcaccaagctcaagaagcatccccgcggggagaccgaggtgggcgccacggcagtggccttctccagctttgaccctaggctgttcattctgggcacggaaggcggcttcccgctcaagtgttccctggcagctggagaggcagccctcacgcggatgcccagctccgtgcccctgcgggccccagcacagtttaccttctccccccacggcggtcccatctactctgtgagctgttcccccttccacaggaatctcttcctgagcgctgggactgacgggcatgtccacctgtactccatgctgcaggcccctcccttgacttcgctgcagctctccctcaagtatctgtttgctgtgcgctggtccccagtgcggcccttggtttttgcagctgcctctgggaaaggtgacgtgcagctgtttgatctccagaaaagctcccagaaacccacagttttgatcaagcaaacccaggatgaaagccctgtctactgtctggagttcaacagccagcagactcagctcttggctgcgggcgatgcccagggcacagtgaaggtgtggcagctgagcacagagttcacggaacaagggccccgggaagctgaggacctggactgcctggcagcagaggtggcggcctgaggggtcccgggaggcgggtgcaagccttcgctgtgccgagccttgtgtttctgacgcaagccaaatgaagaaaagcaaagctttggggga

SEQ ID NO: 362947 - DNA, 1351 bp, Homo sapiens
cctggggaccattttccagagaatgccacacccttggggtgctagagtggagtgtgggccacttcaatacccagagtagtgtctggtggtgacaaggacacagcgagtgtgtccggggctagtggggagagaggtggggtgggtgataggagccccacccaggggcacagccggctcaagcctgtccctgcacaggctggaccatggggactggagcacgcttaagtccttcgtgtgtgcctggaacctggaccggcgagacctgcgtccccagcaaccgtcggccgtggtggaggtccccagcgctgtcctgtgtctggccttccaccccacgcagccctcccacgtcgcaggagggctgtacagtggtgaggtgttggtgtgggacctgagccgtcttgaggacccgctgctgtggcgcacaggcctgacggatgacacccacacagaccctgtgtcccaggtggtgtggctgcccgagcctgggcacagccaccgcttccaggtgctgagtgtggccactgacgggaaggtgctactctggcagggcatcggggtaggccagctgcagctcacagagggcttcgccctggtcatgcagcagctgccacggagcaccaagctcaagaagcatccccgcggggagaccgaggtgggcgccacggcagtggccttctccagctttgaccctaggctgttcattctgggcacggaaggcggcttcccgctcaagtgttccctggcagctggagaggcagccctcacgcggatgcccagctccgtgcccctgcgggccccagcacagtttaccttctccccccacggcggtcccatctactctgtgagctgttcccccttccacaggaatctcttcctgagcgctgggactgacgggcatgtccacctgtactccatgctgcaggcccctcccttgacttcgctgcagctctccctcaagtatctgtttgctgtgcgctggtccccagtgcggcccttggtttttgcagctgcctctgggaaaggtgacgtgcagctgtttgatctccagaaaagctcccagaaacccacagttttgatcaagcaaacccaggatgaaagccctgtctactgtctggagttcaacagccagcagactcagctcttggctgcgggcgatgcccagggcacagtgaaggtgtggcagctgagcacagagttcacggaacaagggccccgggaagctgaggacctggactgcctggcagcagaggtggcggcctgaggggtcccgggaggcgggtgcaagccttcgctgtgccgagccttgtgtttctgacgcaagccaaatgaagaaaagcaaagctttggggga

SEQ ID NO: 362948 - DNA, 2341 bp, Homo sapiens
gctggaagccaagatgaggaggtggcagagattcaggccagagttgtgggccgccgtcggcagcaagaacagagagagaggtggacagatctgagagatactgaggtcttgcaggaggcgctgcgaccaattcaaacatggcgccgtcagcctcacattccccgttttccgctcatggcggcgtaggggcggaggtcgcgcctgagtgcgtccgcacgagagggcggaaccgtctccatggcaacccgcgcgcagccggggccactcagccaggcgggaagcgctggtgttgcggcgctggcgacagtcggggttgcgagcggcccggggccggggcggccagggccgctgcaggacgagaccctgggtgtggcgtccgtgccctcgcagtggagggccgtccagggcatccgcggggagacgaaaagttgccagacggccagcattgccactgccagtgcatccgcccaggccaggaatcatgtggacgcccaggtgcagacggaggcccccgtgcctgtcagcgtgcagcccccgtcccagtacgacatacccaggctcgcagcctttcttcggagagtggaggccatggtcatccgagagctgaacaagaattggcagagccacgcgtttgatggcttcgaggtgaactggaccgagcagcagcagatggctggaccatggggactggagcacgcttaagtccttcgtgtgtgcctggaacctggaccggcgagacctgcgtccccagcaaccgtcggccgtggtggaggtccccagcgctgtcctgtgtctggccttccaccccacgcagccctcccacgtcgcaggtgagctgcctgctgtgtccgcctcctctcctctcaggactcagcttcccgccctgcagagggccacagggagctttccatgggccctttggcccggagacaggaaggcgggccctgaccctctcagtctggagcccaggtgaaggtctgcagtgagccctgaggggtggaactcgggggaggagtctggaagggggccagggtcggggccaggactgggggctgtggagaggccagaagaggcaggtgcccttgggaagccgtcagtggtagggggcaggcaacgctggagggagctgccaggtgcagggcaggggtgtccggcaaagctccctggggtacaacaggggagctgggggctaggactctccctctgtggggatgacttccagccaagtggctctgccgcctggccctggccctggccctgtaggtgggctggggcgggtgtttggccaggaagtcaggctgggggtggggctgagcctctgcccaggtccactgtccctgcaggagggctgtacagtggtgaggtgttggtgtgggacctgagccgtcttgaggacccgctgctgtggcgcacaggcctgacggatgacacccacacagaccctgtgtcccaggtggtgtggctgcccgagcctgggcacagccaccgcttccaggtgctgagtgtggccactgacgggaaggtgctactctggcagggcatcggggtaggccagctgcagctcacagagggcttcgccctggtcatgcagcagctgccacggagcaccaagctcaagaagcatccccgcggggagaccgaggtgggcgccacggcagtggccttctccagctttgaccctaggctgttcattctgggcacggaaggcggcttcccgctcaagtgttccctggcagctggagaggcagccctcacgcggatgcccagctccgtgcccctgcgggccccagcacagtttaccttctccccccacggcggtcccatctactctgtgagctgttcccccttccacaggaatctcttcctgagcgctgggactgacgggcatgtccacctgtactccatgctgcaggcccctcccttgacttcgctgcagctctccctcaagtatctgtttgctgtgcgctggtccccagtgcggcccttggtttttgcagctgcctctgggaaaggtgacgtgcagctgtttgatctccagaaaagctcccagaaacccacagttttgatcaagcaaacccaggatgaaagccctgtctactgtctggagttcaacagccagcagactcagctcttggctgcgggcgatgcccagggcacagtgaaggtgtggcagctgagcacagagttcacggaacaagggccccgggaagctgaggacctggactgcctggcagcagaggtggcggcctgaggggtcccgggaggcgggtgcaagccttcgctgtgccgagccttgtgtttctgacgcaagccaaatgaagaaaagcaaagctttggggga

SEQ ID NO: 362949 - DNA, 509 bp, Homo sapiens
tggccccctgcatcccgtctaggaatctcttcctgagcgctgggactgacgggcatgtccacctgtactccatgctgcaggcccctcccttgacttcgctgcagctctccctcaagtatctgtttgctgtgcgctggtccccagtgcggcccttggtttttgcagctgcctctgggaaaggtgacgtgcagctgtttgatctccagaaaagctcccagaaacccacagttttgatcaagcaaacccaggatgaaagccctgtctactgtctggagttcaacagccagcagactcagctcttggctgcgggcgatgcccagggcacagtgaaggtgtggcagctgagcacagagttcacggaacaagggccccgggaagctgaggacctggactgcctggcagcagaggtggcggcctgaggggtcccgggaggcgggtgcaagccttcgctgtgccgagccttgtgtttctgacgcaagccaaatgaagaaaagcaaagctttggggga

SEQ ID NO: 362950 - DNA, 411 bp, Homo sapiens
gctggaagccaagatgaggaggtggcagagattcaggccagagttgtgggccgccgtcggcagcaagaacagagagagaggtggacagatctgagagatactgagattaaaaggagcccaagccccatctcatcctagcacaccctcctccactgtcctggcagtagcagtccctgcactaggtcagacaatcccctttggggtacaggaaacaaagtccctacactgcagcagaagaagaggaaggagtggggcctgaattgaccataaaggatgtaggggccacgttgttccactgtaatcattgtttgtcccagcctggggctccccctctggtttcctatttgtagttactagaatgaaaaaaaaacatgatagataaataaataatccactggcagagatcagaga

SEQ ID NO: 362951 - DNA, 232 bp, Homo sapiens
aaaaaaaaaagaaaaaaactataatagatatgaacaaaacctaattgggctacagaaaatggaacaaatacatctacttgcagattaaaaggagcccaagccccatctcatcctagcacaccctcctccactgtcctggcagtagcaggtatggccatctgcgggggtgcttattctcaaaaatgtccccagcccagcctgtgtctttgtcactccatggagctcacactca

SEQ ID NO: 362952 - DNA, 522 bp, Homo sapiens
gggtggaactcgggggaggagtctggaagggggccagggtcggggccaggactgggggctgtggagaggccagaagaggcaggtgcccttgggaagccgtcagtggtagggggcaggcaacgctggagggagctgccaggtgcagggcaggggtgtccggcaaagctccctggggtacaacaggggagctgggggctaggactctccctctgtggggatgacttccagccaagtggctctgccgcctggccctggccctggccctgtaggtgggctggggcgggtgtttggccaggaagtcaggctgggggtggggctgagcctctgcccaggtccactgtccctgcaggagggctgtacagtggtgaggtgttggtgtgggacctgagccgtcttgaggacccgctgctgtggcgcacaggcctgacggatgacacccacacagaccctgtgtcccagggtcagggcaggggctgccgggcggggtgggccctgaggcagagctggggagagggcgcccac

SEQ ID NO: 362953 - DNA, 1938 bp, Homo sapiens
gctggaagccaagatgaggaggtggcagagattcaggccagagttgtgggccgccgtcggcagcaagaacagagagagaggtggacagatctgagagatactgaggtcttgcaggaggcgctgcgaccaattcaaacatggcgccgtcagcctcacattccccgttttccgctcatggcggcgtaggggcggaggtcgcgcctgagtgcgtccgcacgagagggcggaaccgtctccatggcaacccgcgcgcagccggggccactcagccaggcgggaagcgctggtgttgcggcgctggcgacagtcggggttgcgagcggcccggggccggggcggccagggccgctgcaggacgagaccctgggtgtggcgtccgtgccctcgcagtggagggccgtccagggcatccgcggggagacgaaaagttgccagacggccagcattgccactgccagtgcatccgcccaggccaggaatcatgtggacgcccaggtgcagacggaggcccccgtgcctgtcagcgtgcagcccccgtcccagtacgacatacccaggctcgcagcctttcttcggagagtggaggccatggtcatccgagagctgaacaagaattggcagagccacgcgtttgatggcttcgaggtgaactggaccgagcagcagcagatggtgtcttgtctgtataccctgggctacccgccagcccaagcgcagggtctgcatgtgaccagcatctcctggaactccactggctctgtggtggcctgtgcctacggccggctggaccatggggactggagcacgcttaagtccttcgtgtgtgcctggaacctggaccggcgagacctgcgtccccagcaaccgtcggccgtggtggaggtccccagcgctgtcctgtgtctggccttccaccccacgcagccctcccacgtcgcaggagggctgtacagtggtgaggtgttggtgtgggacctgagccgtcttgaggacccgctgctgtggcgcacaggcctgacggatgacacccacacagaccctgtgtcccaggtggtgtggctgcccgagcctgggcacagccaccgcttccaggtgctgagtgtggccactgacgggaaggtgctactctggcagggcatcggggtaggccagctgcagctcacagagggcttcgccctggtcatgcagcagctgccacggagcaccaagctcaagaagcatccccgcggggagaccgaggtgggcgccacggcagtggccttctccagctttgaccctaggctgttcattctgggcacggaaggcggcttcccgctcaagtgttccctggcagctggagaggcagccctcacgcggatgcccagctccgtgcccctgcgggccccagcacagtttaccttctccccccacggcggtcccatctactctgtgagctgttcccccttccacaggaatctcttcctgagcgctgggactgacgggcatgtccacctgtactccatgctgcaggcccctcccttgacttcgctgcagctctccctcaagtatctgtttgctgtgcgctggtccccagtgcggcccttggtttttgcagctgcctctgggaaaggtgacgtgcagctgtttgatctccagaaaagctcccagaaacccacagttttgatcaagcaaacccaggatgaaagccctgtctactgtctggagttcaacagccagcagactcagctcttggctgcgggcgatgcccagggcacagtgaaggtgtggcagctgagcacagagttcacggaacaagggccccgggaagctgaggacctggactgcctggcagcagaggtggcggcctgaggggtcccgggaggcgggtgcaagccttcgctgtgccgagccttgtgtttctgacgcaagccaaatgaagaaaagcaaagctttggggga

SEQ ID NO: 362954 - DNA, 2046 bp, Homo sapiens
gctggaagccaagatgaggaggtggcagagattcaggccagagttgtgggccgccgtcggcagcaagaacagagagagaggtggacagatctgagagatactgaggtcttgcaggaggcgctgcgaccaattcaaacatggcgccgtcagcctcacattccccgttttccgctcatggcggcgtaggggcggaggtcgcgcctgagtgcgtccgcacgagagggcggaaccgtctccatggcaacccgcgcgcagccggggccactcagccaggcgggaagcgctggtgttgcggcgctggcgacagtcggggttgcgagcggcccggggccggggcggccagggccgctgcaggacgagaccctgggtgtggcgtccgtgccctcgcagtggagggccgtccagggcatccgcggggagacgaaaagttgccagacggccagcattgccactgccagtgcatccgcccaggccaggaatcatgtggacgcccaggtgcagacggaggcccccgtgcctgtcagcgtgcagcccccgtcccagtacgacatacccaggctcgcagcctttcttcggagagtggaggccatggtcatccgagagctgaacaagaattggcagagccacgcgtttgatggcttcgaggtgaactggaccgagcagcagcagatggtgtcttgtctgtataccctgggctacccgccagcccaagcgcagggtctgcatgtgaccagcatctcctggaactccactggctctgtggtggcctgtgcctacggccggctggaccatggggactggagcacgcttaagtccttcgtgtgtgcctggaacctggaccggcgagacctgcgtccccagcaaccgtcggccgtggtggaggtccccagcgctgtcctgtgtctggccttccaccccacgcagccctcccacgtcgcaggagggctgtacagtggtgaggtgttggtgtgggacctgagccgtcttgaggacccgctgctgtggcgcacaggcctgacggatgacacccacacagaccctgtgtcccaggtggtgtggctgcccgagcctgggcacagccaccgcttccaggtgctgagtgtggccactgacgggaaggtgctactctggcagggcatcggggtaggccagctgcagctcacagagggcttcgccctggtcatgcagcagctgccacggagcaccaagctcaagaagcatccccgcggggagaccgaggtgggcgccacggcagtggccttctccagctttgaccctaggctgttcattctgggcacggaaggcggcttcccgctcaagtgttccctggcagctggagaggcagccctcacgcggatgcccagctccgtgcccctgcgggccccagcacagtttaccttctccccccacggcggtcccatctactctgtgagctgttcccccttccacaggaatctcttcctgagcgctgggactgacgggcatgtccacctgtactccatgctgcaggcccctcccttgacttcgctgcagctctccctcaagtatctgtttgctgtgcgctggtccccagtgcggcccttggtttttgcagctgcctctgggaaaggtgacgtgcagctgtttgatctccagaaaagctcccagaaacccacagttttgatcaagcaaacccaggatgaaagccctgtctactgtctggagttcaacagccagcagactcagctcttggctgcgggcgatgcccagggcacagtgaaggtgtggcagctgagcacagagttcacggaacaagggccccgggaagctgaggacctggactgcctggcagcagaggtggcggcctgaggggtcccgggaggcgggtgcaagccttcgctgtgccgagccttgtgtttctgacgcaagccaaatgaagaaaagcaaagctttgggggaaaaaaaaaatattaattaaaaaataatgaaataattaaaaattaattcctcgaggggggggccccggtcccccaattcccgcccttattgggggagttctgttttttt

SEQ ID NO: 362955 - DNA, 1710 bp, Homo sapiens
gctggaagccaagatgaggaggtggcagagattcaggccagagttgtgggccgccgtcggcagcaagaacagagagagaggtggacagatctgagagatactgaggtcttgcaggaggcgctgcgaccaattcaaacatggcgccgtcagcctcacattccccgttttccgctcatggcggcgtaggggcggaggtcgcgcctgagtgcgtccgcacgagagggcggaaccgtctccatggcaacccgcgcgcagccggggccactcagccaggcgggaagcgctggtgttgcggcgctggcgacagtcggggttgcgagcggcccggggccggggcggccagggccgctgcaggacgagaccctgggtgtggcgtccgtgccctcgcagtggagggccgtccagggcatccgcggggagacgaaaagttgccagacggccagcattgccactgccagtgcatccgcccaggccaggaatcatgtggacgcccaggtgcagacggaggcccccgtgcctgtcagcgtgcagcccccgtcccagtacgacatacccaggctcgcagcctttcttcggagagtggaggccatggtcatccgagagctgaacaagaattggcagagccacgcgtttgatggcttcgaggtgaactggaccgagcagcagcagatggtgtcttgtctgtataccctgggctacccgccagcccaagcgcagggtctgcatgtgaccagcatctcctggaactccactggctctgtggtggcctgtgcctacggccggctggaccatggggactggagcacgcttaagtccttcgtgtgtgcctggaacctggaccggcgagacctgcgtccccagcaaccgtcggccgtggtggaggtccccagcgctgtcctgtgtctggccttccaccccacgcagccctcccacgtcgcaggagggctgtacagtggtgaggtgttggtgtgggacctgagccgtcttgaggacccgctgctgtggcgcacaggcctgacggatgacacccacacagaccctgtgtcccaggtggtgtggctgcccgagcctgggcacagccaccgcttccaggtgctgagtgtggccactgacgggaaggtgctactctggcagggcatcggggtaggccagctgcagctcacagagggcttcgccctggtcatgcagcagctgccacggagcaccaagctcaagaagcatccccgcggggagaccgaggtgggcgccacggcagtggccttctccagctttgaccctaggctgttcattctgggcacggaaggcggcttcccgctcaagtgttccctggcagctggagaggcagccctcacgcggatgcccagctccgtgcccctgcgggccccagcacagtttaccttctccccccacggcggtcccatctactctgtgagctgttcccccttccacaggaatctcttcctgagcgctgggactgacgggcatgtccacctgtactccatgctgcaggcccctcccttgacttcgctgcagctctccctcaagtatctgtttgctgtgcgctggtccccccgggaagctgaggacctggactgcctggcagcagaggtggcggcctgaggggtcccgggaggcgggtgcaagccttcgctgtgccgagccttgtgtttctgacgcaagccaaatgaagaaaagcaaagctttggggga

SEQ ID NO: 362956 - DNA, 1756 bp, Homo sapiens
gctggaagccaagatgaggaggtggcagagattcaggccagagttgtgggccgccgtcggcagcaagaacagagagagaggtggacagatctgagagatactgaggtcttgcaggaggcgctgcgaccaattcaaacatggcgccgtcagcctcacattccccgttttccgctcatggcggcgtaggggcggaggtcgcgcctgagtgcgtccgcacgagagggcggaaccgtctccatggcaacccgcgcgcagccggggccactcagccaggcgggaagcgctggtgttgcggcgctggcgacagtcggggttgcgagcggcccggggccggggcggccagggccgctgcaggacgagaccctgggtgtggcgtccgtgccctcgcagtggagggccgtccagggcatccgcggggagacgaaaagttgccagacggccagcattgccactgccagtgcatccgcccaggccaggaatcatgtggacgcccaggtgcagacggaggcccccgtgcctgtcagcgtgcagcccccgtcccagtacgacatacccaggctcgcagcctttcttcggagagtggaggccatggtcatccgagagctgaacaagaattggcagagccacgcgtttgatggcttcgaggtgaactggaccgagcagcagcagatggtgtcttgtctgtataccctgggctacccgccagcccaagcgcagggtctgcatgtgaccagcatctcctggaactccactggctctgtggtggcctgtgcctacggccggctggaccatggggactggagcacgcttaagtccttcgtgtgtgcctggaacctggaccggcgagacctgcgtccccagcaaccgtcggccgtggtggaggtccccagcgctgtcctgtgtctggccttccaccccacgcagccctcccacgtcgcaggagggctgtacagtggtgaggtgttggtgtgggacctgagccgtcttgaggacccgctgctgtggcgcacaggcctgacggatgacacccacacagaccctgtgtcccaggtggtgtggctgcccgagcctgggcacagccaccgcttccaggtgctgagtgtggccactgacgggaaggtgctactctggcagggcatcggggtaggccagctgcagctcacagagggcttcgccctggtcatgcagcagctgccacggagcaccaagctcaagaagagcatccccgcgggggagaccgaggatggggcagccacggcagagaactactccagcttatgacccataagagcagaacaatactgggagaaccgggaaagggcggaatacccgcatcaacatgtaccctgggacaagcttggaagaggcaagaccctaacagacggatgcccaggatcagagacccaatgcagagaccccagaacaggtgataaacctattttaccgcccaaaggagcggtacccaatctactctttgcatgagctggtaccccacattatcaacaggagatactcctattacattggaagcggcacgggagacaatcagcagggggaagttggtcccaaccttagtgtcaccaaatgcataggaagaggcccccacacccagttggaatacccggctgagaagattacacgcaaaagaagtaacagaacaggcgcagcagcatgggtacccccaaagtgggcagccacgggacatacggacagaagacgaatctgaacagagcacacggaacacagtgatgggacc

SEQ ID NO: 362957 - DNA, 1651 bp, Homo sapiens
aattacggctaggtacgaggctgggtggtggagcggcccggggccggggcggccagggccgctgcaggacgagaccctgggtgtggcgtccgtgccctcgcagtggagggccgtccagggcatccgcggggagacgaaaagttgccagacggccagcattgccactgccagtgcatccgcccaggccaggaatcatgtggacgcccaggtgcagacggaggcccccgtgcctgtcagcgtgcagcccccgtcccagtacgacatacccaggctcgcagcctttcttcggagagtggaggccatggtcatccgagagctgaacaagaattggcagagccacgcgtttgatggcttcgaggtgaactggaccgagcagcagcagatggtgtcttgtctgtataccctgggctacccgccagcccaagcgcagggtctgcatgtgaccagcatctcctggaactccactggctctgtggtggcctgtgcctacggccggctggaccatggggactggagcacgcttaagtccttcgtgtgtgcctggaacctggaccggcgagacctgcgtccccagcaaccgtcggccgtggtggaggtccccagcgctgtcctgtgtctggccttccaccccacgcagccctcccacgtcgcaggagggctgtacagtggtgaggtgttggtgtgggacctgagccgtcttgaggacccgctgctgtggcgcacaggcctgacggatgacacccacacagaccctgtgtcccaggtggtgtggctgcccgagcctgggcacagccaccgcttccaggtgctgagtgtggccactgacgggaaggtgctactctggcagggcatcggggtaggccagctgcagctcacagagggcttcgccctggtcatgcagcagctgccacggagcaccaagctcaagaagcatccccgcggggagaccgaggtgggcgccacggcagtggccttctccagctttgaccctaggctgttcattctgggcacggaaggcggcttcccgctcaagtgttccctggcagctggagaggcagccctcacgcggatgcccagctccgtgcccctgcgggccccagcacagtttaccttctccccccacggcggtcccatctactctgtgagctgttcccccttccacaggaatctcttcctgagcgctgggactgacgggcatgtccacctgtactccatgctgcaggcccctcccttgacttcgctgcagctctccctcaagtatctgtttgctgtgcgctggtccccagtgcggcccttggtttttgcagctgcctctgggaaaggtgacgtgcagctgtttgatctccagaaaagctcccagaaacccacagttttgatcaagcaaacccaggatgaaagccctgtctactgtctggagttcaacagccagcagactcagctcttggctgcgggcgatgcccagggcacagtgaaggtgtggcagctgagcacagagttcacggaacaagggccccgggaagctgaggacctggactgcctggcagcagaggtggcggcctgaggggtcccgggaggcgggtgcaagccttcgctgtgccgagccttgtgtttctgacgcaagccaaatgaagaaaagcaaagctttggggga

SEQ ID NO: 362958 - DNA, 2451 bp, Homo sapiens
gctggaagccaagatgaggaggtggcagagattcaggccagagttgtgggccgccgtcggcagcaagaacagagagagaggtggacagatctgagagatactgaggtcttgcaggaggcgctgcgaccaattcaaacatggcgccgtcagcctcacattccccgttttccgctcatggcggcgtaggggcggaggtcgcgcctgagtgcgtccgcacgagagggcggaaccgtctccatggcaacccgcgcgcagccggggccactcagccaggcgggaagcgctggtgttgcggcgctggcgacagtcggggttgcgagcggcccggggccggggcggccagggccgctgcaggacgagaccctgggtgtggcgtccgtgccctcgcagtggagggccgtccagggcatccgcggggagacgaaaagttgccagacggccagcattgccactgccagtgcatccgcccaggccaggaatcatgtggacgcccaggtgcagacggaggcccccgtgcctgtcagcgtgcagcccccgtcccagtacgacatacccaggctcgcagcctttcttcggagagtggaggccatggtcatccgagagctgaacaagaattggcagagccacgcgtttgatggcttcgaggtgaactggaccgagcagcagcagatggtgtcttgtctgtataccctgggctacccgccagcccaagcgcagggtctgcatgtgaccagcatctcctggaactccactggctctgtggtggcctgtgcctacggccggctggaccatggggactggagcacgcttaagtccttcgtgtgtgcctggaacctggaccggcgagacctgcgtccccagcaaccgtcggccgtggtggaggtccccagcgctgtcctgtgtctggccttccaccccacgcagccctcccacgtcgcaggtgagctgcctgctgtgtccgcctcctctcctctcaggactcagcttcccgccctgcagagggccacagggagctttccatgggccctttggcccggagacaggaaggcgggccctgaccctctcagtctggagcccaggtgaaggtctgcagtgagccctgaggggtggaactcgggggaggagtctggaagggggccagggtcggggccaggactgggggctgtggagaggccagaagaggcaggtgcccttgggaagccgtcagtggtagggggcaggcaacgctggagggagctgccaggtgcagggcaggggtgtccggcaaagctccctggggtacaacaggggagctgggggctaggactctccctctgtggggatgacttccagccaagtggctctgccgcctggccctggccctggccctgtaggtgggctggggcgggtgtttggccaggaagtcaggctgggggtggggctgagcctctgcccaggtccactgtccctgcaggagggctgtacagtggtgaggtgttggtgtgggacctgagccgtcttgaggacccgctgctgtggcgcacaggcctgacggatgacacccacacagaccctgtgtcccaggtggtgtggctgcccgagcctgggcacagccaccgcttccaggtgctgagtgtggccactgacgggaaggtgctactctggcagggcatcggggtaggccagctgcagctcacagagggcttcgccctggtcatgcagcagctgccacggagcaccaagctcaagaagcatccccgcggggagaccgaggtgggcgccacggcagtggccttctccagctttgaccctaggctgttcattctgggcacggaaggcggcttcccgctcaagtgttccctggcagctggagaggcagccctcacgcggatgcccagctccgtgcccctgcgggccccagcacagtttaccttctccccccacggcggtcccatctactctgtgagctgttcccccttccacaggaatctcttcctgagcgctgggactgacgggcatgtccacctgtactccatgctgcaggcccctcccttgacttcgctgcagctctccctcaagtatctgtttgctgtgcgctggtccccagtgcggcccttggtttttgcagctgcctctgggaaaggtgacgtgcagctgtttgatctccagaaaagctcccagaaacccacagttttgatcaagcaaacccaggatgaaagccctgtctactgtctggagttcaacagccagcagactcagctcttggctgcgggcgatgcccagggcacagtgaaggtgtggcagctgagcacagagttcacggaacaagggccccgggaagctgaggacctggactgcctggcagcagaggtggcggcctgaggggtcccgggaggcgggtgcaagccttcgctgtgccgagccttgtgtttctgacgcaagccaaatgaagaaaagcaaagctttggggga

SEQ ID NO: 362959 - DNA, 2083 bp, Homo sapiens
gctggaagccaagatgaggaggtggcagagattcaggccagagttgtgggccgccgtcggcagcaagaacagagagagaggtggacagatctgagagatactgaggtcttgcaggaggcgctgcgaccaattcaaacatggcgccgtcagcctcacattccccgttttccgctcatggcggcgtaggggcggaggtcgcgcctgagtgcgtccgcacgagagggcggaaccgtctccatggcaacccgcgcgcagccggggccactcagccaggcgggaagcgctggtgttgcggcgctggcgacagtcggggttgcgagcggcccggggccggggcggccagggccgctgcaggacgagaccctgggtgtggcgtccgtgccctcgcagtggagggccgtccagggcatccgcggggagacgaaaagttgccagacggccagcattgccactgccagtgcatccgcccaggccaggaatcatgtggacgcccaggtgcagacggaggcccccgtgcctgtcagcgtgcagcccccgtcccagtacgacatacccaggctcgcagcctttcttcggagagtggaggccatggtcatccgagagctgaacaagaattggcagagccacgcgtttgatggcttcgaggtgaactggaccgagcagcagcagatggtgtcttgtctgtataccctgggctacccgccagcccaagcgcagggtctgcatgtgaccagcatctcctggaactccactggctctgtggtggcctgtgcctacggccggctggaccatggggactggagcacgcttaagtccttcgtgtgtgcctggaacctggaccggcgagacctgcgtccccagcaaccgtcggccgtggtggaggtccccagcgctgtcctgtgtctggccttccaccccacgcagccctcccacgtcgcaggtgagctgcctgctgtgtccgcctcctctcctctcaggactcagcttcccgccctgcagagggccacagggagctttccatgggccctttggcccggagacaggaaggcgggccctgaccctctcagtctggagcccaggtgaaggagggctgtacagtggtgaggtgttggtgtgggacctgagccgtcttgaggacccgctgctgtggcgcacaggcctgacggatgacacccacacagaccctgtgtcccaggtggtgtggctgcccgagcctgggcacagccaccgcttccaggtgctgagtgtggccactgacgggaaggtgctactctggcagggcatcggggtaggccagctgcagctcacagagggcttcgccctggtcatgcagcagctgccacggagcaccaagctcaagaagcatccccgcggggagaccgaggtgggcgccacggcagtggccttctccagctttgaccctaggctgttcattctgggcacggaaggcggcttcccgctcaagtgttccctggcagctggagaggcagccctcacgcggatgcccagctccgtgcccctgcgggccccagcacagtttaccttctccccccacggcggtcccatctactctgtgagctgttcccccttccacaggaatctcttcctgagcgctgggactgacgggcatgtccacctgtactccatgctgcaggcccctcccttgacttcgctgcagctctccctcaagtatctgtttgctgtgcgctggtccccagtgcggcccttggtttttgcagctgcctctgggaaaggtgacgtgcagctgtttgatctccagaaaagctcccagaaacccacagttttgatcaagcaaacccaggatgaaagccctgtctactgtctggagttcaacagccagcagactcagctcttggctgcgggcgatgcccagggcacagtgaaggtgtggcagctgagcacagagttcacggaacaagggccccgggaagctgaggacctggactgcctggcagcagaggtggcggcctgaggggtcccgggaggcgggtgcaagccttcgctgtgccgagccttgtgtttctgacgcaagccaaatgaagaaaagcaaagctttggggga

SEQ ID NO: 362960 - DNA, 1911 bp, Homo sapiens
gctggaagccaagatgaggaggtggcagagattcaggccagagttgtgggccgccgtcggcagcaagaacagagagagaggtggacagatctgagagatactgaggtcttgcaggaggcgctgcgaccaattcaaacatggcgccgtcagcctcacattccccgttttccgctcatggcggcgtaggggcggaggtcgcgcctgagtgcgtccgcacgagagggcggaaccgtctccatggcaacccgcgcgcagccggggccactcagccaggcgggaagcgctggtgttgcggcgctggcgacagtcggggttgcgagcggcccggggccggggcggccagggccgctgcaggacgagaccctgggtgtggcgtccgtgccctcgcagtggagggccgtccagggcatccgcggggagacgaaaagttgccagacggccagcattgccactgccagtgcatccgcccaggccaggaatcatgtggacgcccaggtgcagacggaggcccccgtgcctgtcagcgtgcagcccccgtcccagtacgacatacccaggctcgcagcctttcttcggagagtggaggccatggtcatccgagagctgaacaagaattggcagagccacgcgtttgatggcttcgaggtgtcttgtctgtataccctgggctacccgccagcccaagcgcagggtctgcatgtgaccagcatctcctggaactccactggctctgtggtggcctgtgcctacggccggctggaccatggggactggagcacgcttaagtccttcgtgtgtgcctggaacctggaccggcgagacctgcgtccccagcaaccgtcggccgtggtggaggtccccagcgctgtcctgtgtctggccttccaccccacgcagccctcccacgtcgcaggagggctgtacagtggtgaggtgttggtgtgggacctgagccgtcttgaggacccgctgctgtggcgcacaggcctgacggatgacacccacacagaccctgtgtcccaggtggtgtggctgcccgagcctgggcacagccaccgcttccaggtgctgagtgtggccactgacgggaaggtgctactctggcagggcatcggggtaggccagctgcagctcacagagggcttcgccctggtcatgcagcagctgccacggagcaccaagctcaagaagcatccccgcggggagaccgaggtgggcgccacggcagtggccttctccagctttgaccctaggctgttcattctgggcacggaaggcggcttcccgctcaagtgttccctggcagctggagaggcagccctcacgcggatgcccagctccgtgcccctgcgggccccagcacagtttaccttctccccccacggcggtcccatctactctgtgagctgttcccccttccacaggaatctcttcctgagcgctgggactgacgggcatgtccacctgtactccatgctgcaggcccctcccttgacttcgctgcagctctccctcaagtatctgtttgctgtgcgctggtccccagtgcggcccttggtttttgcagctgcctctgggaaaggtgacgtgcagctgtttgatctccagaaaagctcccagaaacccacagttttgatcaagcaaacccaggatgaaagccctgtctactgtctggagttcaacagccagcagactcagctcttggctgcgggcgatgcccagggcacagtgaaggtgtggcagctgagcacagagttcacggaacaagggccccgggaagctgaggacctggactgcctggcagcagaggtggcggcctgaggggtcccgggaggcgggtgcaagccttcgctgtgccgagccttgtgtttctgacgcaagccaaatgaagaaaagcaaagctttggggga

SEQ ID NO: 362961 - DNA, 1744 bp, Homo sapiens
gctggaagccaagatgaggaggtggcagagattcaggccagagttgtgggccgccgtcggcagcaagaacagagagagaggtggacagatctgagagatactgaggtcttgcaggaggcgctgcgaccaattcaaacatggcgccgtcagcctcacattccccgttttccgctcatggcggcgtaggggcggaggtcgcgcctgagtgcgtccgcacgagagggcggaaccgtctccatggcaacccgcgcgcagccggggccactcagccaggcgggaagcgctggtgttgcggcgctggcgacagtcggggttgcgagcggcccggggccggggcggccagggccgctgcaggacgagaccctgggtgtggcgtccgtgccctcgcagtggagggccgtccagggcatccgcggggagacgaaaagttgccagacggccagcattgccactgccagtgcatccgcccaggccaggaatcatgtggacgcccaggtgcagacggaggcccccgtgcctgtcagcgtgcagcccccgtcccagtacgacatacccaggctcgcagcctttcttcggagagtggaggccatggtcatccgagagctgaacaagaattggcagagccacgcgtttgatggcttcgaggtgaactggaccgagcagcagcagatggtgtcttgtctgtataccctgggctacccgccagcccaagcgcagggtctgcatgtgaccagcatctcctggaactccactggctctgtggtggcctgtgcctacggccggctggaccatggggactggagcacgcttaagtccttcgtgtgtgcctggaacctggaccggcgagacctgcgtccccagcaaccgtcggccgtggtggaggtccccagcgctgtcctgtgtctggccttccaccccacgcagccctcccacgtcgcagggcatcggggtaggccagctgcagctcacagagggcttcgccctggtcatgcagcagctgccacggagcaccaagctcaagaagcatccccgcggggagaccgaggtgggcgccacggcagtggccttctccagctttgaccctaggctgttcattctgggcacggaaggcggcttcccgctcaagtgttccctggcagctggagaggcagccctcacgcggatgcccagctccgtgcccctgcgggccccagcacagtttaccttctccccccacggcggtcccatctactctgtgagctgttcccccttccacaggaatctcttcctgagcgctgggactgacgggcatgtccacctgtactccatgctgcaggcccctcccttgacttcgctgcagctctccctcaagtatctgtttgctgtgcgctggtccccagtgcggcccttggtttttgcagctgcctctgggaaaggtgacgtgcagctgtttgatctccagaaaagctcccagaaacccacagttttgatcaagcaaacccaggatgaaagccctgtctactgtctggagttcaacagccagcagactcagctcttggctgcgggcgatgcccagggcacagtgaaggtgtggcagctgagcacagagttcacggaacaagggccccgggaagctgaggacctggactgcctggcagcagaggtggcggcctgaggggtcccgggaggcgggtgcaagccttcgctgtgccgagccttgtgtttctgacgcaagccaaatgaagaaaagcaaagctttggggga

SEQ ID NO: 362962 - DNA, 1143 bp, Homo sapiens
gctggaagccaagatgaggaggtggcagagattcaggccagagttgtgggccgccgtcggcagcaagaacagagagagaggtggacagatctgagagatactgaggtcttgcaggaggcgctgcgaccaattcaaacatggcgccgtcagcctcacattccccgttttccgctcatggcggcgtaggggcggaggtcgcgcctgagtgcgtccgcacgagagggcggaaccgtctccatggcaacccgcgcgcagccggggccactcagccaggcgggaagcgctggtgttgcggcgctggcgacagtcggggttgcgagcggcccggggccggggcggccagggccgctgcaggacgagaccctgggtgtggcgtccgtgccctcgcagtggagggccgtccagggcatccgcggggagacgcatccccgcggggagaccgaggtgggcgccacggcagtggccttctccagctttgaccctaggctgttcattctgggcacggaaggcggcttcccgctcaagtgttccctggcagctggagaggcagccctcacgcggatgcccagctccgtgcccctgcgggccccagcacagtttaccttctccccccacggcggtcccatctactctgtgagctgttcccccttccacaggaatctcttcctgagcgctgggactgacgggcatgtccacctgtactccatgctgcaggcccctcccttgacttcgctgcagctctccctcaagtatctgtttgctgtgcgctggtccccagtgcggcccttggtttttgcagctgcctctgggaaaggtgacgtgcagctgtttgatctccagaaaagctcccagaaacccacagttttgatcaagcaaacccaggatgaaagccctgtctactgtctggagttcaacagccagcagactcagctcttggctgcgggcgatgcccagggcacagtgaaggtgtggcagctgagcacagagttcacggaacaagggccccgggaagctgaggacctggactgcctggcagcagaggtggcggcctgaggggtcccgggaggcgggtgcaagccttcgctgtgccgagccttgtgtttctgacgcaagccaaatgaagaaaagcaaagctttggggga

SEQ ID NO: 362963 - DNA, 667 bp, Homo sapiens
tcgcctccggtcacacggcccctgcaggcgtggagggccgtgagcacgggattgccgtgctggaatgtaaagtacccaactcccgcatccccacggcctggttccgtgaggaccagcggcagctcgcccctggcagctcgcccctgagttaactcaggggcgagctgcccccttccacaggaatctcttcctgagcgctgggactgacgggcatgtccacctgtactccatgctgcaggcccctcccttgacttcgctgcagctctccctcaagtatctgtttgctgtgcgctggtccccagtgcggcccttggtttttgcagctgcctctgggaaaggtgacgtgcagctgtttgatctccagaaaagctcccagaaacccacagttttgatcaagcaaacccaggatgaaagccctgtctactgtctggagttcaacagccagcagactcagctcttggctgcgggcgatgcccagggcacagtgaaggtgtggcagctgagcacagagttcacggaacaagggccccgggaagctgaggacctggactgcctggcagcagaggtggcggcctgaggggtcccgggaggcgggtgcaagccttcgctgtgccgagccttgtgtttctgacgcaagccaaatgaagaaaagcaaagctttggggga

SEQ ID NO: 362964 - DNA, 402 bp, Homo sapiens
catatatcttatggcttatcaaaccttctctctggggctgtttctttttcctaaattatatcctgtagaagtgttgttactgagggtttattaacggtaaactgtttttgtttgtccaaaaatgtccttcgttcttaaaagatgtcctggctgggcacagtgcctcacacctgtaatcccagcactttgggaggtcaaggcgggtggatcacctgaggtcaggagttcgagacaagcctggccaacatggtgaaaccctgtctctactaaaaatacaaaaattaggccaggcccggtggctcacgcctgtaatcccagcactttgggaggccgaggcaggcagatcacgaggtcaggagatcgagaccatcctggctaacacggtgaaaccctgtctccact

SEQ ID NO: 362965 - DNA, 1379 bp, Homo sapiens
  misc_feature (4)..(4): n is a, c, g, or t
ggangaggggaggccgcgcgagggctgacgaaccggaagaagaggaactgggcctgaaagggtaccggtgaccgctactgctgccggtgtttgcgtgtggcagggagccaggcctggcgagcggggtgtgtcgcgatgccggagctggcagtgcagaaggtggtggtccaccccctggtgctgctcagtgtggtggatcatttcaaccggtgagcgagcgccctatagctgggccggcggcgcagccgctgctgagtcacgggcacgctggagatggcgcggcggccgcggacgagctggggacgcagatagggcggctggtgacccttacttgttcacgagtccagaccagcgtcggctcacgatgccggagtcatccagcctcccgcccctgccccagccgccgccacttcggggccttggctgcctgttccgtttagcctgtttgttttacagagttccctttccgagttcgttttgccgaagttcgttttaccgaaatctggatgatgctgggggtcgggagatgcggctagctttagttggccctgacccccgcccccaagctcgtgtctgtcacttcgttttgaagttcgttttgccgaaatctggataaagccagggtggggcggaggcgggctagcttcatttggctctgacccccgaccccagggtcgtatcttcatttgactcagttgatttcactgaaatgtgaataatgcaaagtgactgatgtctggatgatgcttgggtggggcggagtgggctagctccatttagccccgccccaaggctatgtttatcttcgtttgaccgaattggtttcaccgaaatatggatgatgctggagtggggtgcagggtggctaccttcatttggccctgaccccggccccagggtcgtatttatgtttatcctcgtttaaccaagttgatttcaccgaaatgtgaatgatgcaaagtgaatgatgcctggatgatgccggagtggggctaagggggctagcttcaatttggccctgacccccgcccccagggtcgtatctatgtttgtcttcatttgaccgagttcctgttatcgaaatctggatgatgctcagcaccccgaagggcttcctggatcagctgtggttttaacccattaacatttttaaatgggaatctgattagactccgtctcaaaaaaaaaaatgtatatatagatgaggtttcagtttttatttaaaacacgaggccgagcatggtggctcacgcctgtaatcccagcattttgggaggctgagacgggaggatcgcttgagcccaggagttcgaagctgtcgtgagctgagatcatgccactgcactccagcctgggtgagagtgagaccctgtctccaa

SEQ ID NO: 362966 - DNA, 1164 bp, Homo sapiens
  misc_feature (4)..(4): n is a, c, g, or t
ggangaggggaggccgcgcgagggctgacgaaccggaagaagaggaactgggcctgaaagggtaccggtgaccgctactgctgccggtgtttgcgtgtggcagggagccaggcctggcgagcggggtgtgtcgcgatgccggagctggcagtgcagaaggtggtggtccaccccctggtgctgctcagtgtggtggatcatttcaaccgaatcggcaaggttggaaaccagaagcgtgttgttggtgtgcttttggggtcatggcaaaagaaagtacttgatgtatcgaacagttttgcagttccttttgatgaagatgacaaagacgattctgtatggtttttagaccatgattatttggaaaacatgtatggaatgtttaagaaagtcaatgccagggaaagaatagttggctggtaccacacaggccctaaactacacaagaatgacattgccatcaacgaactcatgaaaagatactgtcctaattccgtattggtcatcattgatgtgaagccgaaggacctagggctgcctacagaagcgtacatttcagtggaagaagtccatgatgatggaactccaacctcgaaaacatttgaacacgtgaccagtgaaattggagcagaggaagctgaggaagttggagttgaacacttgttacgagatatcaaagacacgacggtgggcactctgtcccagcggatcacaaaccaggtccatggtttgaagggactgaactccaagcttctggatatcaggagctacctggaaaaagtcgccacaggcaagctgcccatcaaccaccagatcatctaccagctgcaggacgtcttcaacctgctgccagatgtcagcctgcaggagttcgtcaaggccttttacctgaagaccaatgaccagatggtggtagtgtacttggcctcgctgatccgttccgtggtcgccctgcacaacctcatcaacaacaagattgccaaccgggatgcagagaagacgacagaagggcaggagaaagaagagagcaaaaaggataggaaagaggacaaggagaaagataaagataaggaaaagagtgatgtaaagaaagaggagaaaaaggagaaaaagtaaaacatgtattaaatagcttttttaatttgtaaattaaaatcttacaaacta

SEQ ID NO: 362967 - DNA, 1093 bp, Homo sapiens
  misc_feature (4)..(4): n is a, c, g, or t
ggangaggggaggccgcgcgagggctgacgaaccggaagaagaggaactgggcctgaaagggtaccggtgaccgctactgctgccggtgtttgcgtgtggcagggagccaggcctggcgagcggggtgtgtcgcgatgccggagctggcagtgcagaaggtggtggtccaccccctggtgctgctcagtgtggtggatcatttcaaccgaatcggcaaggttggaaaccagaagcgtgttgttggtgtgcttttggggtcatggcaaaagaaagtacttgatgtatcgaacagttttgcagttccttttgatgaagatgacaaagacgattctgtatggtttttagaccatgattatttggaaaacatgtatggaatgtttaagaaagtcaatgccagggaaagaatagttggctggtaccacacaggccctaaactacacaagaatgacattgccatcaacgaactcatgaaaagatactgtcctaattccgtattggtcatcattgatgtgaagccgaaggacctagggctgcctacagaagcgtacatttcagtggaagaagtccatgatgatggaactccaacctcgaaaacatttgaacacgtgaccagtgaaattggagcagaggaagctgaggaagttggagttgaacacttgttacgagatatcaaagacacgacggtgggcactctgtcccagcggatcacaaaccaggtccatggtttgaagggactgaactccaagcttctggatatcaggagctacctggaaaaagtcgccacaggcaagctgcccatcaaccaccagatcatctaccagctgcaggacgtcttcaacctgctgccagatgtcagcctgcaggagttcgtcaaggccttttacctgaagaccaatgaccagatggtggtagtgtacttggcctcgctgatccgttccgtggtcgccctgcacaacctcatcaacaacaagattgccaaccgggatgcagagaagacgacagaagggcaggagaaagaagagagcaaaaaggataggaaagaggacaaggagaaagataaagataaggaaaagagtgatgtaaagaaagagg

SEQ ID NO: 362968 - DNA, 1296 bp, Homo sapiens
gttttttttgccgttttttttttgtttgcttttgttgttttcttcctgttcttctccccttgtgttgctttgggttttttgttgcttttttgttttgttttgtttttgtgtggtgctctttttgtgtttgcgttttgttgtgatgtgatttttgttccgcggggggggtgtgtttttcggtttttgtttttcccctgagttgcgcggggtgtgtttgcgtgctgtctgctcattttttcggtttgtgtgttgtttgtcccccgtttttccgccgtgggggtgttgttttgtgtgccccttcgtgcgtgtcttttttgttttcgtgtgggtgggtttggtcgccccgttttgtgctcgctcccccccccgcgcgtgaggtggggtccttgcccctgtttctcccccggttctctcccgtggttctccccctcttctctcttttggttggtcgctcgcgcccctgcctctatcgtttgttttatatttcctccctcctgttgtggggcgcccccctttttccctgagagtgggggtgcgcgctgggggcgctctcccgtggaggtatttttggcgcgcgcccgccccctctcttttttttttttttttttttttttttttttttttttttttttttttttttttttttttttttttttttttttaaaaatcaagccatttaattgtatctctgttgataataccacaccatgttctggacccatagctctggcatcctcaggggttgtgatccagctccatatattgtttaccttcaaagatacaattaaatggcttgatttttaagctgtgttctagtcgtttttgacttcgggagtagtgatctgtagtttccagaagcagccaagacagtcttcgattggagctgccttaagttctcttgcacttggtatcatttatgaaagagcatctcattcccctaaatggaaacaggcagtctgctgtagtgaggagagttctctgagcccagaagacccgggttccagtttgtacctcagatccctcatttatgaggtggtaggttgcagtccgtcatctctgaagtccccagaacagtgtttcaaaagggacacatttaccacactgcagcaagttgtaagtacctcagaccacaggccaaacaggcatgttactaagaatggaacaatgtttcccccaagataagtgcacaggactcctagaggaacaaattaaataaggcactaaatcatttgacatacagtagtcacggatattaaatttcctctcttgaacagatagaacctctcaaatgcacta

SEQ ID NO: 362969 - DNA, 2160 bp, Homo sapiens
  misc_feature (4)..(4): n is a, c, g, or t
ggangaggggaggccgcgcgagggctgacgaaccggaagaagaggaactgggcctgaaagggtaccggtgaccgctactgctgccggtgtttgcgtgtggcagggagccaggcctggcgagcggggtgtgtcgcgatgccggagctggcagtgcagaaggtggtggtccaccccctggtgctgctcagtgtggtggatcatttcaaccgaatcggcaaggttggaaaccagaagcgtgttgttggtgtgcttttggggtcatggcaaaagaaagtacttgatgtatcgaacagttttgcagttccttttgatgaagatgacaaagacgattctgtatggtttttagaccatgattatttggaaaacatgtatggaatgtttaagaaagtcaatgccagggaaagaatagttggctggtaccacacaggccctaaactacacaagaatgacattgccatcaacgaactcatgaaaagatactgtcctaattccgtattggtcatcattgatgtgaagccgaaggacctagggctgcctacagaagcgtacatttcagtggaagaagtccatgatgatggaactccaacctcgaaaacatttgaacacgtgaccagtgaaattggagcagaggaagctgaggaagttggagttgaacacttgttacgagatatcaaagacacgacggtgggcactctgtcccagcggatcacaaaccaggtccatggtttgaagggactgaactccaagcttctggatatcaggagctacctggaaaaagtcgccacaggcaagctgcccatcaaccaccagatcatctaccagctgcaggacgtcttcaacctgctgccagatgtcagcctgcaggagttcgtcaaggccttttacctgaagaccaatgaccagatggtggtagtgtacttggcctcgctgatccgttccgtggtcgccctgcacaacctcatcaacaacaagattgccaaccgggatgcagagaagacgacagaagggcaggagaaagaagagagcaaaaaggataggaaagaggacaaggagaaagataaagataaggaaaagagtgatgtaaagaaagaggagaaaaaggagaaaaagtaaaacatgtattaaatagcttttttaatttgtaaattaaaatcttacaaactaaatcagtgtgctgctagagggttctttttcacttgacatgcttattagaaagctgacccaacaagagctctctgcctccggtcactcttgctgtggtgctacgtggaagtgaatggagactgatctcaaatctgaactgcagctttcgctgctgtgagttggggatatgatagtcagctcaggcttcagattgtatgagaaaaatgaagagaagtcaacaaatattttggtactcttcattcatttatctctaaaaccaggagttgaattttcctcatcttgaaagactcttggggtctgtttctggtattttacaaaattgctaagtggaatgcatgaattgcattatgttctctggtaacacgtagagttcagacccttctgaactctgttgataataccacaccatgttctggacccatagctctggcatcctcaggggttgtgatccagctccatatattgtttaccttcaaagatacaattaaatggcttgatttttaagctgtgttctagtcgtttttgacttcgggagtagtgatctgtagtttccagaagcagccaagacagtcttcgattggagctgccttaagttctcttgcacttggtatcatttatgaaagagcatctcattcccctaaatggaaacaggcagtctgctgtagtgaggagagttctctgagcccagaagacccgggttccagtttgtacctcagatccctcatttatgaggtggtaggttgcagtccgtcatctctgaagtccccagaacagtgtttcaaaagggacacatttaccacactgcagcaagttgtaagtacctcagaccacaggccaaacaggcatgttactaagaatggaacaatgtttcccccaagataagtgcacaggactcctagaggaacaaattaaataaggcactaaatcatttgacatacagtagtcacggatattaaatttcctctcttgaacagatagaacctctcaaatgcacta

SEQ ID NO: 362970 - DNA, 1609 bp, Homo sapiens
  misc_feature (4)..(4): n is a, c, g, or t
ggangaggggaggccgcgcgagggctgacgaaccggaagaagaggaactgggcctgaaagggtaccggtgaccgctactgctgccggtgtttgcgtgtggcagggagccaggcctggcgagcggggtgtgtcgcgatgccggagctggcagtgcagaaggtggtggtccaccccctggtgctgctcagtgtggtggatcatttcaaccgaatcggcaaggttggaaaccagaagcgtgttgttggtgtgcttttggggtcatggcaaaagaaagtacttgatgtatcgaacagttttgcagttccttttgatgaagatgacaaagacgattctgtatggtttttagaccatgattatttggaaaacatgtatggaatgtttaagaaagtcaatgccagggaaagaatagttggctggtaccacacaggccctaaactacacaagaatgacattgccatcaacgaactcatgaaaagatactgtcctaattccgtattggtcatcattgatgtgaagccgaaggacctagggctgcctacagaagcgtacatttcagtggaagaagtccatgatgatggaactccaacctcgaaaacatttgaacacgtgaccagtgaaattggagcagaggaagctgaggaagttggagttgaacacttgttacgagatatcaaagacacgacggtgggcactctgtcccagcggatcacaaaccaggtccatggtttgaagggactgaactccaagcttctggatatcaggagctacctggacgtcttcaacctgctgccagatgtcagcctgcaggagttcgtcaaggccttttacctgaagaccaatgaccagatggtggtagtgtacttggcctcgctgatccgttccgtggtcgccctgcacaacctcatcaacaacaagattgccaaccgggatgcagagaagacgacagaagggcaggagaaagaagagagcaaaaaggataggaaagaggacaaggagaaagataaagataaggaaaagagtgatgtaaagaaagaggagaaaaaggagaaaaagtaaaacatgtattaaatagcttttttaatttgtaaattaaaatcttacaaactaaatcagtgtgctgctagagggttctttttcacttgacatgcttattagaaagctgacccaacaagagctctctgcctccggtcactcttgctgtggtgctacgtggaagtgaatggagactgatctcaaatctgaactgcagctttcgctgctgtgagttggggatatgatagtcagctcaggcttcagattgtatgagaaaaatgaagagaagtcaacaaatattttggtactcttcattcatttatctctaaaaccaggagttgaattttcctcatcttgaaagactcttggggtctgtttctggtattttacaaaattgctaagtggaatgcatgaattgcattatgttctctggtaacacgtagagttcagacccttctgaactctgttgataataccacaccatgttctggacccatagctctggcatcctcaggggttgtgatccagctccatatattgtttaccttcaaagatacaattaaatggcttgattttt

SEQ ID NO: 362971 - DNA, 1499 bp, Homo sapiens
tggcggtgttctagaggatcccggatggcgacatttcaaccgaatcggcaaggttggaaaccagaagcgtgttgttggtgtgcttttggggtcatggcaaaagaaagtacttgatgtatcgaacagttttgcagttccttttgatgaagatgacaaagacgattctgtatggtttttagaccatgattatttggaaaacatgtatggaatgtttaagaaagtcaatgccagggaaagaatagttggctggtaccacacaggccctaaactacacaagaatgacattgccatcaacgaactcatgaaaagatactgtcctaattccgtattggtcatcattgatgtgaagccgaaggacctagggctgcctacagaagcgtacatttcagtggaagaagtccatgatgatggaactccaacctcgaaaacatttgaacacgtgaccagtgaaattggagcagaggaagctgaggaagttggagttgaacacttgttacgagatatcaaagacacgacggtgggcactctgtcccagcggatcacaaaccaggtccatggtttgaagggactgaactccaagcttctggatatcaggagctacctggaaaaagtcgccacaggcaagctgcccatcaaccaccagatcatctaccagctgcaggacgtcttcaacctgctgccagatgtcagcctgcaggagttcgtcaaggccttttacctgaagaccaatgaccagatggtggtagtgtacttggcctcgctgatccgttccgtggtcgccctgcacaacctcatcaacaacaagattgccaaccgggatgcagagaagacgacagaagggcaggagaaagaagagagcaaaaaggataggaaagaggacaaggagaaagataaagataaggaaaagagtgatgtaaagaaagaggagaaaaaggagaaaaagtaaaacatgtattaaatagcttttttaatttgtaaattaaaatcttacaaactaaatcagtgtgctgctagagggttctttttcacttgacatgcttattagaaagctgacccaacaagagctctctgcctccggtcactcttgctgtggtgctacgtggaagtgaatggagactgatctcaaatctgaactgcagctttcgctgctgtgagttggggatatgatagtcagctcaggcttcagattgtatgagaaaaatgaagagaagtcaacaaatattttggtactcttcattcatttatctctaaaaccaggagttgaattttcctcatcttgaaagactcttggggtctgtttctggtattttacaaaattgctaagtggaatgcatgaattgcattatgttctctggtaacacgtagagttcagacccttctgaactctgttgataataccacaccatgttctggacccatagctctggcatcctcaggggttgtgatccagctccatatattgtttaccttcaaagatacaattaaatggcttgattttt

SEQ ID NO: 362972 - DNA, 1057 bp, Homo sapiens
  misc_feature (4)..(4): n is a, c, g, or t
  misc_feature (843)..(843): n is a, c, g, or t
  misc_feature (952)..(952): n is a, c, g, or t
ggangaggggaggccgcgcgagggctgacgaaccggaagaagaggaactgggcctgaaagggtaccggtgaccgctactgctgccggtgtttgcgtgtggcagggagccaggcctggcgagcggggtgtgtcgcgatgccggagctggcagtgcagaaggtggtggtccaccccctggtgctgctcagtgtggtggatcatttcaaccgaatcggcaaggttggaaaccagaagcgtgttgttggtgtgcttttggggtcatggcaaaagaaagtacttgatgtatcgaacagttttgcagttccttttgatgaagatgacaaagacgattctgtatggtttttagaccatgattatttggaaaacatgtatggaatgtttaagaaagtcaatgccagggaaagaatagttggctggtaccacacaggccctaaactacacaagaatgacattgccatcaacgaactcatgaaaagatactgtcctaattccgtattggtcatcattgatgtgaagccgaaggacctagggctgcctacagaagcgtacatttcagtggaagaagtccatgatgatggaactccaacctcgaaaacatttgaacacgtgaccagtgaaattggagcagaggaagctgaggaagttggagttgaacacttgttacgagatatcaaagacacgacggtgggcactctgtcccagcggatcacaaaccaggtccatggtttgaagggactgaactccaagcttctggatatcaggagctacctggaaaaagtcgccacaggcaagctgcccatcaaccaccagggtggtgattggtaatcttttgtttgcatgttnagtgctcccttaaggacctcttgtaaggtaggcctggtggtaacagaagcccttagcatttgcttgtctgaaaaggattttatttctccttcacttatgaagctgagtntggctgaatatgaaatactcagttggaatttctttactttaagaatgctgaatataggcccccaatctcttctggcttgtaggcgtactgttgcaaggtctgctg

SEQ ID NO: 362973 - DNA, 1666 bp, Homo sapiens
  misc_feature (4)..(4): n is a, c, g, or t
ggangaggggaggccgcgcgagggctgacgaaccggaagaagaggaactgggcctgaaagggtaccggtgaccgctactgctgccggtgtttgcgtgtggcagggagccaggcctggcgagcggggtgtgtcgcgatgccggagctggcagtgcagaaggtggtggtccaccccctggtgctgctcagtgtggtggatcatttcaaccgaatcggcaaggttggaaaccagaagcgtgttgttggtgtgcttttggggtcatggcaaaagaaagtacttgatgtatcgaacagttttgcagttccttttgatgaagatgacaaagacgattctgtatggtttttagaccatgattatttggaaaacatgtatggaatgtttaagaaagtcaatgccagggaaagaatagttggctggtaccacacaggccctaaactacacaagaatgacattgccatcaacgaactcatgaaaagatactgtcctaattccgtattggtcatcattgatgtgaagccgaaggacctagggctgcctacagaagcgtacatttcagtggaagaagtccatgatgatggaactccaacctcgaaaacatttgaacacgtgaccagtgaaattggagcagaggaagctgaggaagttggagttgaacacttgttacgagatatcaaagacacgacggtgggcactctgtcccagcggatcacaaaccaggtccatggtttgaagggactgaactccaagcttctggatatcaggagctacctggaaaaagtcgccacaggcaagctgcccatcaaccaccagatcatctaccagctgcaggacgtcttcaacctgctgccagatgtcagcctgcaggagttcgtcaaggccttttacctgaagaccaatgaccagatggtggtagtgtacttggcctcgctgatccgttccgtggtcgccctgcacaacctcatcaacaacaagattgccaaccgggatgcagagaagacgacagaagggcaggagaaagaagagagcaaaaaggataggaaagaggacaaggagaaagataaagataaggaaaagagtgatgtaaagaaagaggagaaaaaggagaaaaagtaaaacatgtattaaatagcttttttaatttgtaaattaaaatcttacaaactaaatcagtgtgctgctagagggttctttttcacttgacatgcttattagaaagctgacccaacaagagctctctgcctccggtcactcttgctgtggtgctacgtggaagtgaatggagactgatctcaaatctgaactgcagctttcgctgctgtgagttggggatatgatagtcagctcaggcttcagattgtatgagaaaaatgaagagaagtcaacaaatattttggtactcttcattcatttatctctaaaaccaggagttgaattttcctcatcttgaaagactcttggggtctgtttctggtattttacaaaattgctaagtggaatgcatgaattgcattatgttctctggtaacacgtagagttcagacccttctgaactctgttgataataccacaccatgttctggacccatagctctggcatcctcaggggttgtgatccagctccatatattgtttaccttcaaagatacaattaaatggcttgattttt

SEQ ID NO: 362974 - DNA, 1612 bp, Homo sapiens
  misc_feature (4)..(4): n is a, c, g, or t
ggangaggggaggccgcgcgagggctgacgaaccggaagaagaggaactgggcctgaaagggtaccggtgaccgctactgctgccggtgtttgcgtgtggcagggagccaggcctggcgagcggggtgtgtcgcgatgccggagctggcagtgcagaaggtggtggtccaccccctggtgctgctcagtgtggtggatcatttcaaccgaatcggcaaggttggaaaccagaagcgtgttgttggtgtgcttttggggtcatggcaaaagaaagtacttgatgtatcgaacagttttgcagttccttttgatgaagatgacaaagacgattctgtatggtttttagaccatgattatttggaaaacatgtatggaatgtttaagaaagtcaatgccagggaaagaatagttggctggtaccacacaggccctaaactacacaagaatgacattgccatcaacgaactcatgaaaagatactgtcctaattccgtattggtcatcattgatgtgaagccgaaggacctagggctgcctacagaagcgtacatttcagtggaagaagtccatgatgatggaactccaacctcgaaaacatttgaacacgtgaccagtgaaattggagcagaggaagctgaggaagttggagttgaacacttgttacgagatatcaaagacacgacggtgggcactctgtcccagcggatcacaaaccaggtccatggtttgaagggactgaactccaagcttctggatatcaggagctacctggaaaaagtcgccacaggcaagctgcccatcaaccaccagatcatctaccagctgcaggacgtcttcaacctgctgccagatgtcagcctgcaggagttcgtcaaggccttttacctgaagaccaatgaccagatggtggtagtgtacttggcctcgctgatccgttccgtggtcgccctgcacaacctcatcaacaacaagattgccaaccgggatgcagagaagacgacagaagggcaggagaaagaagagagcaaaaaggataggaaagaggacaaggagaaagataaagataaggaaaagagtgatgtaaagaaagaggagaaaaaggagaaaaagtaaaacatgtattaaatagcttttttaatttgtaaattaaaatcttacaaactaaatcagtgtgctgctagagggttctttttcacttgacatgcttattagaaagctgacccaacaagagctctctgcctccggtcactcttgctgtggtgctacgtggaagtgaatggagactgatctcaaatctgaactgcagctttcgctgctgtgagttggggatatgatagtcagctcaggcttcagattgtatgagaaaaatgaagagaagtcaacaaatattttggtactcttcattcatttatctctaaaaccaggagttgaattttcctcatcttgaaagactcttggggtctgtttctggtattttacgttcagacccttctgaactctgttgataataccacaccatgttctggacccatagctctggcatcctcaggggttgtgatccagctccatatattgtttaccttcaaagatacaattaaatggcttgattttt

SEQ ID NO: 362975 - DNA, 961 bp, Homo sapiens
  misc_feature (4)..(4): n is a, c, g, or t
ggangaggggaggccgcgcgagggctgacgaaccggaagaagaggaactgggcctgaaagggtaccggtgaccgctactgctgccggtgtttgcgtgtggcagggagccaggcctggcgagcggggtgtgtcgcgatgccggagctggcagtgcagaaggtggtggtccaccccctggtgctgctcagtgtggtggatcatttcaaccgaatcggcaaggttggaaaccagaagcgtgttgttggtgtgcttttggggtcatggcaaaagaaagtacttgatgtatcgaacagttttgcagttccttttgatgaagatgacaaagacgattctgtatggtttttagaccatgattatttggaaaacatgtatggaatgtttaagaaagtcaatgccagggaaagaatagttggctggtaccacacaggccctaaactacacaagaatgacattgccatcaacgaactcatgaaaagatactgtcctaattccgtattggtcatcattgatgtgaagccgaaggacctagggctgcctacagaagcgtacatttcagtggaagaagtccatgatgatggaactccaacctcgaaaacatttgaacacgtgaccagtgaaattggagcagaggaagctgaggaagttggagttgaacacttgttacggtgagaccctagtacagcatcaaaatcattcactgcccgagaggtcacacagtgtaaggaagaggtctgtgtcgggaatatggagacctggggtctcgtcctggccgtccactaacaagtctgccattctgagcaaatcacagtccctttccagacctttgttttattgtctgtaaattgaagtgtttgaactacatcaactgtaaaatgtcttgagttacaatttatgactttgtggatagcataccttgtctggaaactataatgttgactgacgggaagaggttatgaaataa

SEQ ID NO: 362976 - DNA, 616 bp, Homo sapiens
tgtataatatttgatggtacctaaggtgcctaagaagcttttttgaaggtagcttttaagttctaggaagtcttttgttgaatttccttgtattggtttaaagccctaaataccatagattttatttcctctcttggaaaaaagatggaagtgacatggcagtatttcctgctgttctccagttacttcacaataccaaaataaattaaacgtactgttgcaaaactcctatgagaaatcactattcaaaaaatggtgccagcttgctgtttaatggtacaactgaagaggaaggagccttcccatttccataaaagaggcaaaggagtcatacccacatagcactactgccagtcactcttgccttcacagggtcacctctcctcacagaaagcagactggacaaatatcagggcccacctccctccaacatggaaacaagtccccctaagaaagagctgagactagtgtgctaatacctgttgtattttgtggagataaaggtgcaggagaataaactcctttataaagaagtgtctttcaggtgttctgaaaccctgccttgttacttacctttattaaaagaaccgaaataatgcctaactcagccaaacaa

SEQ ID NO: 362977 - DNA, 609 bp, Homo sapiens
gagatggagttttgctcttattgcccaggctggagtacaatgtaatgaggcctgatagttaaaaaatcaaaatagagtcctggtgtgcattttaactttgcagttaatgggactggtgattttttccttgttaataagcatgttatataatgttaatcttaactagaggtcctcctgctttatcttaactagattcgtgtgagggatgacaagatgcctttggcgcaccttgcaatagctgttgaagctgttggttgggcacatccagatacaatctgtctcatggttgcaaacacgctgattggcaactgggatcgctcttttgggggaggaatggtaagtgattttaaaagaaattttccataacagatggaagattatcatgttttcttaaatataagttctttgtaagaatccttttttaaagtggcagaatagagtcttgtactgtgaattctgacttaaaaatataaactgatcctggattgcatgtgggccagaaaaagtttctttttttctttgccacaaagtttattagtggcaaaatttgaataaggacagaattagctagaagtactatgtcaatgttaatatcctaattttaatagt

SEQ ID NO: 362978 - DNA, 2472 bp, Homo sapiens
atccttcatcctctaccttccttctagcagaaatggcggctgcggcggctcgagtggtgttgtcatccgcggcgcggcggcggctctggggtttcagcgagagtcttctaatccgaggcgctgcgggacggtcattatattttggagagaacagattaagaagtacacaggctgctacccaagttgttctgaatgttcctgaaacaagagtaacatgtttagaaagtggactcagagtagcttcggaagactctgggctctcaacatgcacagttggactctggattgatgctggaagtagatacgaaaatgagaagaacaatggaacagcacactttctggagcatatggctttcaagggcaccaagaagagatcccagttagatctggaacttgagattgaaaatatgggtgctcatctcaatgcctatacctccagagagcagactgtatactatgccaaagcattctctaaagacttgccaagagctgtagaaattcttgctgatataatacaaaacagcacattgggagaagcagagattgaacgtgagcgtggagtaatccttagagagatgcaggaagttgaaaccaatttacaagaagttgtttttgattatcttcatgccacagcttatcaaaatactgcacttggacggacaattttgggaccaactgaaaatatcaaatctataagtcgtaaggacttagtggattatataaccacacattataaggggccaagaatagtgcttgctgctgctggaggtgtttcccatgatgaattgcttgacttagcaaagtttcatttcggtgactctttatgcacacacaaaggagaaataccagctctgcctccctgcaaattcacaggaagtgagattcgtgtgagggatgacaagatgcctttggcgcaccttgcaatagctgttgaagctgttggttgggcacatccagatacaatctgtctcatggttgcaaacacgctgattggcaactgggatcgctcttttgggggaggaatgaatttatctagcaagctggcccagctcacttgtcatggcaatctttgccatagctttcagtctttcaacacttcctacacagatacaggattatggggactgtatatggtttgtgaatcatccactgttgcagacatgctacatgttgttcaaaaagaatggatgcgactctgtacaagtgtcacagaaagtgaggttgcacgagccagaaatcttctgaaaacaaacatgttgttgcagcttgatggttcaactccaatttgtgaagatattggtaggcaaatgttatgctataatagaaggattcccatccctgagcttgaagcaagaattgatgctgtgaatgctgagacaattcgagaagtatgtaccaaatacatttataataggagtccagctattgctgctgttggtcccattaagcaactaccagattttaaacagatacgcagtaacatgtgttggcttcgtgattaaaatgctcctaatcaagattgtttgaacacatgtatttataaaacagagctagagaaaaataaaaatgaacatgtatatacatttggaaatttgaattaaatactgtatcatactttcaaaggataaaaagactacccctctgaaggttgttttgtattaatggtcagtctttgttctctgagaaattatgttggaagcagcatactttcaaattattaccatgagtataattttaagaatgaaaatgtttacagtattttcagttttattataaaaatgcacacacaacaaagattgtcatttcttggctctacttgcattcagcacttgttcttgagcagctttctttgcttttaccatctcgacaagttcctaggaagggagaaaggtgtgatttaagaagttgcgatttaaaaacagacattttaatctagtgtttggtgtaaagaattcaagcaactaagatagatagtactaaatatactgatttcattatctgccagggcctagaaagtttctaaggttgctcatttcttcctcataatattgaccccataactactggttttgaaataagcactatattattaaccacttaatagacataaaatatgagctatatcacccaagctacaatttaaaatacaacaatctataaacgcttaagtctgcaaccttgtatcgtttcatgcagtccttctttgtcctgccaggcaccgcttctgctattttttcccatctttcaggtgtatttactgggtatgttttcaaagcttgttccaaaagcttctgttcttctgttgtccaaggggtgaagtctgtatatggacctgattaagaaaaatttttatttgaaaactgtctttgaacatgttctcagacaagtcttgtggtccacaagtattcgctaagtgcccatttcaatctgggatgtgtcattttgaaaataaacttgtagagatgagagata

SEQ ID NO: 362979 - DNA, 772 bp, Homo sapiens
atccttcatcctctaccttccttctagcagaaatggcggctgcggcggctcgagtggtgttgtcatccgcggcgcggcggcggctctggggtttcagcgagagtcttctaatccgaggcgctgcgggacggtcattatattttggagagaacagattaagaagtacacaggctgctacccaagttgttctgaatgttcctgaaacaagagtaacatgtttagaaagtggactcagagtagcttcggaagactctgggctctcaacatgcacagttggactctggattgatgctggaagtagatacgaaaatgagaagaacaatggaacagcacactttctggagcatatggctttcaagggcaccaagaagagatcccagttagatctggaacttgagattgaaaatatgggtgctcatctcaatgcctatacctccagagagcagactgtatactatgccaaagcattctctaaagacttgccaagagctgtagaaattcttgctgatataatacaaaacagcacattgggagaagcagagattgaacgtgagcgtggagtaatccttagagagatgcaggaagttgaaaccaatttacaagaagttgtttttgattatcttcatgccacagcttatcaaaatactgcacttggacggacaattttgggaccaactgaaaatatcaatctataagtgcaagggactgtgggttattttaccccccttattagggggcaccactgctgtcgggtctgggggggtgtccccag

SEQ ID NO: 362980 - DNA, 1627 bp, Homo sapiens
atccttcatcctctaccttccttctagcagaaatggcggctgcggcggctcgagtggtgttgtcatccgcggcgcggcggcggctctggggtttcagcgagagtcttctaatccgaggcgctgcgggacggtcattatattttggagagaacagattaagaagtacacaggctgctacccaagttgttctgaatgttcctgaaacaagagtaacatgtttagaaagtggactcagagtagcttcggaagactctgggctctcaacatgcacagttggactctggattgatgctggaagtagatacgaaaatgagaagaacaatggaacagcacactttctggagcatatggctttcaagggcaccaagaagagatcccagttagatctggaacttgagattgaaaatatgggtgctcatctcaatgcctatacctccagagagcagactgtatactatgccaaagcattctctaaagacttgccaagagctgtagaaattcttgctgatataatacaaaacagcacattgggagaagcagagattgaacgtgagcgtggagtaatccttagagagatgcaggaagttgaaaccaatttacaagaagttgtttttgattatcttcatgccacagcttatcaaaatactgcacttggacggacaattttgggaccaactgaaaatatcaaatctataagtcgtaaggacttagtggattatataaccacacattataaggggccaagaatagtgcttgctgctgctggaggtgtttcccatgatgaattgcttgacttagcaaagtttcatttcggtgactctttatgcacacacaaaggagaaataccagctctgcctccctgcaaattcacaggaagtgagattcgtgtgagggatgacaagatgcctttggcgcaccttgcaatagctgttgaagctgttggttgggcacatccagatacaatctgtctcatggttgcaaacacgctgattggcaactgggatcgctcttttgggggaggaatgaatttatctagcaagctggcccagctcacttgtcatggcaatctttgccatagctttcagtctttcaacacttcctacacagatacaggattatggggactgtatatggtttgtgaatcatccactgttgcagacatgctacatgttgttcaaaaagaatggatgcgactctgtacaagtgtcacagaaagtgaggttgcacgagccagaaatcttctgaaaacaaacatgttgttgcagcttgatggttcaactccaatttgtgaagatattggtaggcaaatgttatgctataatagaaggattcccatccctgagcttgaagcaagaattgatgctgtgaatgctgagacaattcgagaagtatgtaccaaatacatttataataggagtccagctattgctgctgttggtcccattaagcaactaccagattttaaacagatacgcagtaacatgtgttggcttcgtgattaaaatgctcctaatcaagattgtttgaacacatgtatttataaaacagagctagagaaaaataaaaatgaacatgtatatacatttggaaatttgaattaaatactgtatcatactttcaaaggata

SEQ ID NO: 362981 - DNA, 1701 bp, Homo sapiens
atccttcatcctctaccttccttctagcagaaatggcggctgcggcggctcgagtggtgttgtcatccgcggcgcggcggcggctctggggtttcagcgagagtcttctaatccgaggcgctgcgggacggtcattatattttggagagaacagattaagaagtacacaggctgctacccaagttgttctgaatgttcctgaaacaagagtaacatgtttagaaagtggactcagagtagcttcggaagactctgggctctcaacatgcacagttggactctggattgatgctggaagtagatacgaaaatgagaagaacaatggaacagcacactttctggagcatatggctttcaagggcaccaagaagagatcccagttagatctggaacttgagattgaaaatatgggtgctcatctcaatgcctatacctccagagagcagactgtatactatgccaaagcattctctaaagacttgccaagagctgtagaaattcttgctgatataatacaaaacagcacattgggagaagcagagattgaacgtgagcgtggagtaatccttagagagatgcaggaagttgaaaccaatttacaagaagttgtttttgattatcttcatgccacagcttatcaaaatactgcacttggacggacaattttgggaccaactgaaaatatcaaatctataagtcgtaaggacttagtggattatataaccacacattataaggggccaagaatagtgcttgctgctgctggaggtgtttcccatgatgaattgcttgacttagcaaagtttcatttcggtgactctttatgcacacacaaaggagaaataccagctctgcctccctgcaaattcacaggaagtgagattcgtgtgagggatgacaagatgcctttggcgcaccttgcaatagctgttgaagctgttggttgggcacatccagatacaatctgtctcatggttgcaaacacgctgattggcaactgggatcgctcttttgggggaggaatgaatttatctagcaagctggcccagctcacttgtcatggcaatctttgccatagctttcagtctttcaacacttcctacacagatacaggattatggggactgtatatggtttgtgaatcatccactgttgcagacatgctacatgttgttcaaaaagaatggatgcgactctgtacaagtgtcacagaaagtgaggttgcacgagccagaaatcttctgaaaacaaacatgttgttgcagcttgatggttcaactccaatttgtgaagatattggtaggcaaatgttatgctataatagaaggattcccatccctgagcttgaagcaagaattgatgctgtgaatgctgagacaattcgagaagtatgtaccaaatacatttataataggagtccagctattgctgctgttggtcccattaagcaactaccagattttaaacagatacgcagtaacatgtgttggcttcgtgattaaaatgctcctaatcaagattgtttgaacacatgtatttataaaacagagctagagaaaaataaaaatgaacatgtatatacatttggaaatttgaattaaatactgtatcatactttcaaaggatagatacctctgtaaaaaaaaaggggggcggccaaattccccaggccagttacggtcccgtttctgtcaaggggcc

SEQ ID NO: 362982 - DNA, 1938 bp, Homo sapiens
atccttcatcctctaccttccttctagcagaaatggcggctgcggcggctcgagtggtgttgtcatccgcggcgcggcggcggctctggggtttcagcgagagtcttctaatccgaggcgctgcgggacggtcattatattttggagagaacagattaagaagtacacaggctgctacccaagttgttctgaatgttcctgaaacaagagtaacatgtttagaaagtggactcagagtagcttcggaagactctgggctctcaacatgcacagttggactctggattgatgctggaagtagatacgaaaatgagaagaacaatggaacagcacactttctggagcatatggctttcaagggcaccaagaagagatcccagttagatctggaacttgagattgaaaatatgggtgctcatctcaatgcctatacctccagagagcagactgtatactatgccaaagcattctctaaagacttgccaagagctgtagaaattcttgctgatataatacaaaacagcacattgggagaagcagagattgaacgtgagcgtggagtaatccttagagagatgcaggaagttgaaaccaatttacaagaagttgtttttgattatcttcatgccacagcttatcaaaatactgcacttggacggacaattttgggaccaactgaaaatatcaaatctataagtcgtaaggacttagtggattatataaccacacattataaggggccaagaatagtgcttgctgctgctggaggtgtttcccatgatgaattgcttgacttagcaaagtttcatttcggtgactctttatgcacacacaaaggagaaataccagctctgcctccctgcaaattcacaggaagtgagattcgtgtgagggatgacaagatgcctttggcgcaccttgcaatagctgttgaagctgttggttgggcacatccagatacaatctgtctcatggttgcaaacacgctgattggcaactgggatcgctcttttgggggaggaatgaatttatctagcaagctggcccagctcacttgtcatggcaatctttgccatagctttcagtctttcaacacttcctacacagatacaggattatggggactgtatatggtttgtgaatcatccactgttgcagacatgctacatgttgttcaaaaagaatggatgcgactctgtacaagtgtcacagaaagtgaggttgcacgagccagaaatcttctgaaaacaaacatgttgttgcagcttgatggttcaactccaatttgtgaagatattggtaggcaaatgttatgctataatagaaggattcccatccctgagcttgaagcaagaattgatgctgtgaatgctgagacaattcgagaagtatgtaccaaatacatttataataggagtccagctattgctgctgttggtcccattaagcaactaccagattttaaacagatacgcagtaacatgtgttggcttcgtgattaaaatgctcctaatcaagattgtttgaacacatgtatttataaaacagagctagagaaaaataaaaatgaacatgtatatacaaaaaaaaaaaaaaaaaaaaaaaaaaaaaaaaaaaaaaaaaaaaaaaaaaaaaaaaggggggggggggcaaaaaattccccgcgggagggggccccacagttatcgcagcaccccgccgtcgtcgttgtgcaccagagaggggcccccacaagaggagggagctgctacatatagtaaccaactgcaggacggcgggcgccgcgtttacaaaacagcggcggagacgaggggcgcaacacaccgcggcagccgcgcgcgggacacacatcggggcgggagcaaggacacccccccaacccagcgggggggggggggcacaacaaactggggcgcgcacaccatccccccccagaga

SEQ ID NO: 362983 - DNA, 2710 bp, Homo sapiens
atccttcatcctctaccttccttctagcagaaatggcggctgcggcggctcgagtggtgttgtcatccgcggcgcggcggcggctctggggtttcagcgagagtcttctaatccgaggcgctgcgggacggtcattatattttggagagaacagattaagaagtacacaggctgctacccaagttgttctgaatgttcctgaaacaagagtaacatgtttagaaagtggactcagagtagcttcggaagactctgggctctcaacatgcacagttggactctggattgatgctggaagtagatacgaaaatgagaagaacaatggaacagcacactttctggagcatatggctttcaagggcaccaagaagagatcccagttagatctggaacttgagattgaaaatatgggtgctcatctcaatgcctatacctccagagagcagactgtatactatgccaaagcattctctaaagacttgccaagagctgtagaaattcttgctgatataatacaaaacagcacattgggagaagcagagattgaacgtgagcgtggagtaatccttagagagatgcaggaagttgaaaccaatttacaagaagttgtttttgattatcttcatgccacagcttatcaaaatactgcacttggacggacaattttgggaccaactgaaaatatcaaatctataagtcgtaaggacttagtggattatataaccacacattataaggggccaagaatagtgcttgctgctgctggaggtgtttcccatgatgaattgcttgacttagcaaagtttcatttcggtgactctttatgcacacacaaaggagaaataccagctctgcctccctgcaaattcacaggaagtgagattcgtgtgagggatgacaagatgcctttggcgcaccttgcaatagctgttgaagctgttggttgggcacatccagatacaatctgtctcatggttgcaaacacgctgattggcaactgggatcgctcttttgggggaggaatgaatttatctagcaagctggcccagctcacttgtcatggcaatctttgccatagctttcagtctttcaacacttcctacacagatacaggattatggggactgtatatggtttgtgaatcatccactgttgcagacatgctacatgttgttcaaaaagaatggatgcgactctgtacaagtgtcacagaaagtgaggttgcacgagccagaaatcttctgaaaacaaacatgttgttgcagcttgatggtaaaaataaagatataggttctgttttcatatggttgatctgtattccaatagttaatttttccttctctttaaacaggttcaactccaatttgtgaagatattggtaggcaaatgttatgctataatagaaggattcccatccctgagcttgaagcaagaattgatgtaagtagtcctgagttactattgggtcatgtgtaaaaagatccttgttacaaaagctgagaatatgtatctttcatcttgctttagttttaaaaagttccaggtatagactttgtttttactacaaacagctgaatgacagtgtcttccatatttcaggctgtgaatgctgagacaattcgagaagtatgtaccaaatacatttataataggagtccagctattgctgctgttggtcccattaagcaactaccagattttaaacagatacgcagtaacatgtgttggcttcgtgattaaaatgctcctaatcaagattgtttgaacacatgtatttataaaacagagctagagaaaaataaaaatgaacatgtatatacatttggaaatttgaattaaatactgtatcatactttcaaaggataaaaagactacccctctgaaggttgttttgtattaatggtcagtctttgttctctgagaaattatgttggaagcagcatactttcaaattattaccatgagtataattttaagaatgaaaatgtttacagtattttcagttttattataaaaatgcacacacaacaaagattgtcatttcttggctctacttgcattcagcacttgttcttgagcagctttctttgcttttaccatctcgacaagttcctaggaagggagaaaggtgtgatttaagaagttgcgatttaaaaacagacattttaatctagtgtttggtgtaaagaattcaagcaactaagatagatagtactaaatatactgatttcattatctgccagggcctagaaagtttctaaggttgctcatttcttcctcataatattgaccccataactactggttttgaaataagcactatattattaaccacttaatagacataaaatatgagctatatcacccaagctacaatttaaaatacaacaatctataaacgcttaagtctgcaaccttgtatcgtttcatgcagtccttctttgtcctgccaggcaccgcttctgctattttttcccatctttcaggtgtatttactgggtatgttttcaaagcttgttccaaaagcttctgttcttctgttgtccaaggggtgaagtctgtatatggacctgattaagaaaaatttttatttgaaaactgtctttgaacatgttctcagacaagtcttgtggtccacaagtattcgctaagtgcccatttcaatctgggatgtgtcattttgaaaataaacttgtagagatgagagata

SEQ ID NO: 362984 - DNA, 1861 bp, Homo sapiens
atccttcatcctctaccttccttctagcagaaatggcggctgcggcggctcgagtggtgttgtcatccgcggcgcggcggcggctctggggtttcagcgagagtcttctaatccgaggcgctgcgggacggtcattatattttggagagaacagattaagaagtacacaggctgctacccaagttgttctgaatgttcctgaaacaagagtaacatgtttagaaagtggactcagagtagcttcggaagactctgggctctcaacatgcacagttggactctggattgatgctggaagtagatacgaaaatgagaagaacaatggaacagcacactttctggagcatatggctttcaagggcaccaagaagagatcccagttagatctggaacttgagattgaaaatatgggtgctcatctcaatgcctatacctccagagagcagactgtatactatgccaaagcattctctaaagacttgccaagagctgtagaaattcttgctgatataatacaaaacagcacattgggagaagcagagattgaacgtgagcgtggagtaatccttagagagatgcaggaagttgaaaccaatttacaagaagttgtttttgattatcttcatgccacagcttatcaaaatactgcacttggacggacaattttgggaccaactgaaaatatcaaatctataagtcgtaaggacttagtggattatataaccacacattataaggggccaagaatagtgcttgctgctgctggaggtgtttcccatgatgaattgcttgacttagcaaagtttcatttcggtgactctttatgcacacacaaaggagaaataccagctctgcctccctgcaaattcacaggaagtgagattcgtgtgagggatgacaagatgcctttggcgcaccttgcaatagctgttgaagctgttggttgggcacatccagatacaatctgtctcatggttgcaaacacgctgattggcaactgggatcgctcttttgggggaggaatgaatttatctagcaagctggcccagctcacttgtcatggcaatctttgccatagctttcagtctttcaacacttcctacacagatacaggattatggggactgtatatggtttgtgaatcatccactgttgcagacatgctacatgttgttcaaaaagaatggatgcgactctgtacaagtgtcacagaaagtgaggttgcacgagccagaaatcttctgaaaacaaacatgttgttgcagcttgatggttcaactccaatttgtgaagatattggtaggcaaatgttatgctataatagaaggattcccatccctgagcttgaagcaagaattgatgtaagtagtcctgagttactattgggtcatgtgtaaaaagatccttgttacaaaagctgagaatatgtatctttcatcttgctttagttttaaaaagttccaggtatagactttgtttttactacaaacagctgaatgacagtgtcttccatatttcaggctgtgaatgctgagacaattcgagaagtatgtaccaaatacatttataataggagtccagctattgctgctgttggtaagcctggcttcttttcttctatgcaaaaagttggccaagtacttttaattaactcttctttttaatccttaggtcccattaagcaactaccagattttaaacagatacgcagtaacatgtgttggcttcgtgattaaaatgctcctaatcaagattgtttgaacacatgtatttataaaacagagctagagaaaaataaaaatgaacatgtatatacatttggaaatttgaattaaatactgtatcatactttcaaaggata

SEQ ID NO: 362985 - DNA, 1940 bp, Homo sapiens
atccttcatcctctaccttccttctagcagaaatggcggctgcggcggctcgagtggtgttgtcatccgcggcgcggcggcggctctggggtttcagcgagagtcttctaatccgaggcgctgcgggacggtcattatattttggagagaacagattaagaagtacacaggctgctacccaagttgttctgaatgttcctgaaacaagagtaacatgtttagaaagtggactcagagtagcttcggaagactctgggctctcaacatgcacagttggactctggattgatgctggaagtagatacgaaaatgagaagaacaatggaacagcacactttctggagcatatggctttcaagggcaccaagaagagatcccagttagatctggaacttgagattgaaaatatgggtgctcatctcaatgcctatacctccagagagcagactgtatactatgccaaagcattctctaaagacttgccaagagctgtagaaattcttgctgatataatacaaaacagcacattgggagaagcagagattgaacgtgagcgtggagtaatccttagagagatgcaggaagttgaaaccaatttacaagaagttgtttttgattatcttcatgccacagcttatcaaaatactgcacttggacggacaattttgggaccaactgaaaatatcaaatctataagtcgtaaggacttagtggattatataaccacacattataaggggccaagaatagtgcttgctgctgctggaggtgtttcccatgatgaattgcttgacttagcaaagtttcatttcggtgactctttatgcacacacaaaggagaaataccagctctgcctccctgcaaattcacaggaagtgagattcgtgtgagggatgacaagatgcctttggcgcaccttgcaatagctgttgaagctgttggttgggcacatccagatacaatctgtctcatggttgcaaacacgctgattggcaactgggatcgctcttttgggggaggaatgaatttatctagcaagctggcccagctcacttgtcatggcaatctttgccatagctttcagtctttcaacacttcctacacagatacaggattatggggactgtatatggtttgtgaatcatccactgttgcagacatgctacatgttgttcaaaaagaatggatgcgactctgtacaagtgtcacagaaagtgaggttgcacgagccagaaatcttctgaaaacaaacatgttgttgcagcttgatggtaaaaataaagatataggttctgttttcatatggttgatctgtattccaatagttaatttttccttctctttaaacaggttcaactccaatttgtgaagatattggtaggcaaatgttatgctataatagaaggattcccatccctgagcttgaagcaagaattgatgtaagtagtcctgagttactattgggtcatgtgtaaaaagatccttgttacaaaagctgagaatatgtatctttcatcttgctttagttttaaaaagttccaggtatagactttgtttttactacaaacagctgaatgacagtgtcttccatatttcaggctgtgaatgctgagacaattcgagaagtatgtaccaaatacatttataataggagtccagctattgctgctgttggtaagcctggcttcttttcttctatgcaaaaagttggccaagtacttttaattaactcttctttttaatccttaggtcccattaagcaactaccagattttaaacagatacgcagtaacatgtgttggcttcgtgattaaaatgctcctaatcaagattgtttgaacacatgtatttataaaacagagctagagaaaaataaaaatgaacatgtatatacatttggaaatttgaattaaatactgtatcatactttcaaaggata

SEQ ID NO: 362986 - DNA, 1069 bp, Homo sapiens
atccttcatcctctaccttccttctagcagaaatggcggctgcggcggctcgagtggtgttgtcatccgcggcgcggcggcggctctggggtttcagcgagagtcttctaatccgaggcgctgcgggacggtcattatattttggagagaacagattaagaagtacacaggctgctacccaagttgttctgaatgttcctgaaacaagagtaacatgtttagaaagtggactcagagtagcttcggaagactctgggctctcaacatgcacagttggactctggattgatgctggaagtagatacgaaaatgagaagaacaatggaacagcacactttctggagcatatggctttcaagggcaccaagaagagatcccagttagatctggaacttgagattgaaaatatgggtgctcatctcaatgcctatacctccagagagcagactgtatactatgccaaagcattctctaaagacttgccaagagctgtagaaattcttgctgatataatacaaaacagcacattgggagaagcagagattgaacgtgagcgtggagtaatccttagagagatgcaggaagttgaaaccaatttacaagaagttgtttttgattatcttcatgccacagcttatcaaaatactgcacttggacggacaattttgggaccaactgaaaatatcaaatctataagtcgtaaggacttagtggattatataaccacacattataaggggccaagaatagtgcttgctgctgctggaggtgtttcccatgatgaattgcttgacttagcaaagtttcatttcggtgactctttatgcacacctctcctcacagaaagcagactggacaaatatcagggcccacctccctccaacatggaaacaagtccccctaagaaagagctgagactagtgtgctaatacctgttgtattttgtggagataaaggtgcaggagaataaactcctttataaagaagtgtctttcaggtgttctgaaaccctgccttgttacttacctttattaaaagaaccgaaataatgcctaactcagccaaacaa

SEQ ID NO: 362987 - DNA, 1396 bp, Homo sapiens
actctattaggatcccctgtcggtcaaaaagaatggatgcgactctgtacaagtgtcacagaaagtgaggttgcacgagccagaaatcttctgaaaacaaacatgttgttgcagcttgatggttcaactccaatttgtgaagatattggtaggcaaatgttatgctataatagaaggattcccatccctgagcttgaagcaagaattgatgctgtgaatgctgagacaattcgagaagtatgtaccaaatacatttataataggagtccagctattgctgctgttggtaagcctggcttcttttcttctatgcaaaaagttggccaagtacttttaattaactcttctttttaatccttaggtcccattaagcaactaccagattttaaacagatacgcagtaacatgtgttggcttcgtgattaaaatgctcctaatcaagattgtttgaacacatgtatttataaaacagagctagagaaaaataaaaatgaacatgtatatacatttggaaatttgaattaaatactgtatcatactttcaaaggataaaaagactacccctctgaaggttgttttgtattaatggtcagtctttgttctctgagaaattatgttggaagcagcatactttcaaattattaccatgagtataattttaagaatgaaaatgtttacagtattttcagttttattataaaaatgcacacacaacaaagattgtcatttcttggctctacttgcattcagcacttgttcttgagcagctttctttgcttttaccatctcgacaagttcctaggaagggagaaaggtgtgatttaagaagttgcgatttaaaaacagacattttaatctagtgtttggtgtaaagaattcaagcaactaagatagatagtactaaatatactgatttcattatctgccagggcctagaaagtttctaaggttgctcatttcttcctcataatattgaccccataactactggttttgaaataagcactatattattaaccacttaatagacataaaatatgagctatatcacccaagctacaatttaaaatacaacaatctataaacgcttaagtctgcaaccttgtatcgtttcatgcagtccttctttgtcctgccaggcaccgcttctgctattttttcccatctttcaggtgtatttactgggtatgttttcaaagcttgttccaaaagcttctgttcttctgttgtccaaggggtgaagtctgtatatggacctgattaagaaaaatttttatttgaaaactgtctttgaacatgttctcagacaagtcttgtggtccacaagtattcgctaagtgcccatttcaatctgggatgtgtcattttgaaaataaacttgtagagatgagagata

SEQ ID NO: 362988 - DNA, 152 bp, Homo sapiens
gttggactctggattgatgctggaagtagatacgaaaatgagaagaacaatggaacagcacactttctggagcatatggctttcaaggcaagttgtaagactttacaaaaatgcactctctttaagagataataagcacaaagtctcattct

SEQ ID NO: 362989 - DNA, 532 bp, Homo sapiens
ccagttagatctggaacttgagattgaaaatatgggtgctcatctcaatgcctatacctccagagagcagactgtatactatgccaaagcattctctaaagacttgccaagaggtactgttattatttatacagcagataatgtaattttcatgagaatcaggaattatttagtactatttttattatgtctgttgtaaaagagtaagttccagaaatgtgaaaaagcgaaactgaattctgggtgagggtacagctgatcttattttttttctaaatatgacaaatagtaaattatggatgatggtttttcttaatatgtagcaataaaatagagattatttggtgggaataaaatattttgtcaggacagcagtttgttagttaccatgtttgtagactgttttgactctcttaaaagttattacacaaaacatttcccagtggaagaattaacaacaaaatttagcagttttagagctaattggtaaactcattatttttgtttagagagatagtctcgctctgtcacc

SEQ ID NO: 362990 - DNA, 332 bp, Homo sapiens
ggaaacagcctctaaggatattcactattttccacacactccatttttctttctgtattttggacatgtataattaaaattctcttggaatttttttttccttgcagaatttatctagcaagctggcccagctcacttgtcatggcaatctttgccatagctttcagtctttcaacacttcctacacagatacaggattatggggactgtatatggtttgtgaatcatccactgttgcagacatgctacatgttgttcaaaaagaatggtgagaaaaatagctttaagtaatttaaattttgcctttaattcgttttaaactagttttttat

SEQ ID NO: 362991 - DNA, 1702 bp, Homo sapiens
atccttcatcctctaccttccttctagcagaaatggcggctgcggcggctcgagtggtgttgtcatccgcggcgcggcggcggctctggggtttcagcgagagtcttctaatccgaggcgctgcgggacggtcattatattttggagagaacagattaagaagtacacaggctgctacccaagttgttctgaatgttcctgaaacaagagtaacatgtttagaaagtggactcagagtagcttcggaagactctgggctctcaacatgcacagttggactctggattgatgctggaagtagatacgaaaatgagaagaacaatggaacagcacactttctggagcatatggctttcaagggcaccaagaagagatcccagttagatctggaacttgagattgaaaatatgggtgctcatctcaatgcctatacctccagagagcagactgtatactatgccaaagcattctctaaagacttgccaagagctgtagaaattcttgctgatataatacaaaacagcacattgggagaagcagagattgaacgtgagcgtggagtaatccttagagagatgcaggaagttgaaaccaatttacaagaagttgtttttgattatcttcatgccacagcttatcaaaatactgcacttggacggacaattttgggaccaactgaaaatatcaaatctataagtcgtaaggacttagtggattatataaccacacattataaggggccaagaatagtgcttgctgctgctggaggtgtttcccatgatgaattgcttgacttagcaaagtttcatttcggtgactctttatgcacacacaaaggagaaataccagctctgcctccctgcaaattcacaggaagtgagattcgtgtgagggatgacaagatgcctttggcgcaccttgcaatagctgttgaagctgttggttgggcacatccagatacaatctgtctcatggttgcaaacacgctgattggcaactgggatcgctcttttgggggaggaatgaatttatctagcaagctggcccagctcacttgtcatggcaatctttgccatagctttcagtctttcaacacttcctacacagatacaggattatggggactgtatatggtttgtgaatcatccactgttgcagacatgctacatgttgttcaaaaagaatggatgcgactctgtacaagtgtcacagaaagtgaggttgcacgagccagaaatcttctgaaaacaaacatgttgttgcagcttgatggttcaactccaatttgtgaagatattggtaggcaaatgttatgctataatagaaggattcccatccctgagcttgaagcaagaattgatgctgtgaatgctgagacaattcgagaagtatgtaccaaatacatttataataggagtccagctattgctgctgttggtaagcctggcttcttttcttctatgcaaaaagttggccaagtacttttaattaactcttctttttaatccttaggtcccattaagcaactaccagattttaaacagatacgcagtaacatgtgttggcttcgtgattaaaatgctcctaatcaagattgtttgaacacatgtatttataaaacagagctagagaaaaataaaaatgaacatgtatatacatttggaaatttgaattaaatactgtatcatactttcaaaggata

SEQ ID NO: 362992 - DNA, 713 bp, Homo sapiens
atccttcatcctctaccttccttctagcagaaatggcggctgcggcggctcgagtggtgttgtcatccgcggcgcggcggcggctctggggtttcagcgagagtcttctaatccgaggcgctgcgggacggtcattatattttggagagaacagattaagaagtacacaggctgctacccaagttgttctgaatgttcctgaaacaagagtaacatgtttagaaagtggactcagagtagcttcggaagactctgggctctcaacatgcacagttggactctggattgatgctggaagtagatacgaaaatgagaagaacaatggaacagcacactttctggagcatatggctttcaagggcaccaagaagagatcccagttagatctggaacttgagattgaaaatatgggtgctcatctcaatgcctatacctccagagagcagactgtatactatgccaaagcattctctaaagacttgccaagagctgtagaaattcttgctgatataatacaaaacagcacattgggagaagcagagattgaacgtgagcgtggagtaatccttagagagatgcaggaagttgaaaccaatttacaagaagttgtttttgattatcttcatgccacagcttatcgaaggccttagggatatttacccacctttaaggggcaagattgtgctgctgctgctgaggtgtttccatgaaga

SEQ ID NO: 362993 - DNA, 1624 bp, Homo sapiens
atccttcatcctctaccttccttctagcagaaatggcggctgcggcggctcgagtggtgttgtcatccgcggcgcggcggcggctctggggtttcagcgagagtcttctaatccgaggcgctgcgggacggtcattatattttggagagaacagattaagaagtacacaggctgctacccaagttgttctgaatgttcctgaaacaagagtaacatgtttagaaagtggactcagagtagcttcggaagactctgggctctcaacatgcacagttggactctggattgatgctggaagtagatacgaaaatgagaagaacaatggaacagcacactttctggagcatatggctttcaagggcaccaagaagagatcccagttagatctggaacttgagattgaaaatatgggtgctcatctcaatgcctatacctccagagagcagactgtatactatgccaaagcattctctaaagacttgccaagagctgtagaaattcttgctgatataatacaaaacagcacattgggagaagcagagattgaacgtgagcgtggagtaatccttagagagatgcaggaagttgaaaccaatttacaagaagttgtttttgattatcttcatgccacagcttatcaaaatactgcacttggacggacaattttgggaccaactgaaaatatcaaatctataagtcgtaaggacttagtggattatataaccacacattataaggggccaagaatagtgcttgctgctgctggaggtgtttcccatgatgaattgcttgacttagcaaagtttcatttcggtgactctttatgcacacacaaaggagaaataccagctctgcctccctgcaaattcacaggaagtgagattcgtgtgagggatgacaagatgcctttggcgcaccttgcaatagctgttgaagctgttggttgggcacatccagatacaatctgtctcatggttgcaaacacgctgattggcaactgggatcgctcttttgggggaggaatgaatttatctagcaagctggcccagctcacttgtcatggcaatctttgccatagctttcagtctttcaacacttcctacacagatacaggattatggggactgtatatggtttgtgaatcatccactgttgcagacatgctacatgttgttcaaaaagaatggatgcgactctgtacaagtgtcacagaaagtgaggttgcacgagccagaaatcttctgaaaacaaacatgttgttgcagcttgatggttcaactccaatttgtgaagatattggtaggcaaatgttatgctataatagaaggattcccatccctgagcttgaagcaagaattgatgctgtgaatgctgagacaattcgagaagtatgtaccaaatacatttataataggagtccagctattgctgctgttggtcccattaagcaactaccagattttaaacagatacgcagtaacatgtgttggcttcgtgattaaaatgctcctaatcaagattgtttgaacacatgtatttataaaacagagctagagaaaaataaaaatgaacatgtatatacaacgacattgataatactgtatcccggcggtggggggggggg

SEQ ID NO: 362994 - DNA, 2547 bp, Homo sapiens
atccttcatcctctaccttccttctagcagaaatggcggctgcggcggctcgagtggtgttgtcatccgcggcgcggcggcggctctggggtttcagcgagagtcttctaatccgaggcgctgcgggacggtcattatattttggagagaacagattaagaagtacacaggctgctacccaagttgttctgaatgttcctgaaacaagagtaacatgtttagaaagtggactcagagtagcttcggaagactctgggctctcaacatgcacagttggactctggattgatgctggaagtagatacgaaaatgagaagaacaatggaacagcacactttctggagcatatggctttcaagggcaccaagaagagatcccagttagatctggaacttgagattgaaaatatgggtgctcatctcaatgcctatacctccagagagcagactgtatactatgccaaagcattctctaaagacttgccaagagctgtagaaattcttgctgatataatacaaaacagcacattgggagaagcagagattgaacgtgagcgtggagtaatccttagagagatgcaggaagttgaaaccaatttacaagaagttgtttttgattatcttcatgccacagcttatcaaaatactgcacttggacggacaattttgggaccaactgaaaatatcaaatctataagtcgtaaggacttagtggattatataaccacacattataaggggccaagaatagtgcttgctgctgctggaggtgtttcccatgatgaattgcttgacttagcaaagtttcatttcggtgactctttatgcacacacaaaggagaaataccagctctgcctccctgcaaattcacaggaagtgagattcgtgtgagggatgacaagatgcctttggcgcaccttgcaatagctgttgaagctgttggttgggcacatccagatacaatctgtctcatggttgcaaacacgctgattggcaactgggatcgctcttttgggggaggaatgaatttatctagcaagctggcccagctcacttgtcatggcaatctttgccatagctttcagtctttcaacacttcctacacagatacaggattatggggactgtatatggtttgtgaatcatccactgttgcagacatgctacatgttgttcaaaaagaatggatgcgactctgtacaagtgtcacagaaagtgaggttgcacgagccagaaatcttctgaaaacaaacatgttgttgcagcttgatggttcaactccaatttgtgaagatattggtaggcaaatgttatgctataatagaaggattcccatccctgagcttgaagcaagaattgatgctgtgaatgctgagacaattcgagaagtatgtaccaaatacatttataataggagtccagctattgctgctgttggtaagcctggcttcttttcttctatgcaaaaagttggccaagtacttttaattaactcttctttttaatccttaggtcccattaagcaactaccagattttaaacagatacgcagtaacatgtgttggcttcgtgattaaaatgctcctaatcaagattgtttgaacacatgtatttataaaacagagctagagaaaaataaaaatgaacatgtatatacatttggaaatttgaattaaatactgtatcatactttcaaaggataaaaagactacccctctgaaggttgttttgtattaatggtcagtctttgttctctgagaaattatgttggaagcagcatactttcaaattattaccatgagtataattttaagaatgaaaatgtttacagtattttcagttttattataaaaatgcacacacaacaaagattgtcatttcttggctctacttgcattcagcacttgttcttgagcagctttctttgcttttaccatctcgacaagttcctaggaagggagaaaggtgtgatttaagaagttgcgatttaaaaacagacattttaatctagtgtttggtgtaaagaattcaagcaactaagatagatagtactaaatatactgatttcattatctgccagggcctagaaagtttctaaggttgctcatttcttcctcataatattgaccccataactactggttttgaaataagcactatattattaaccacttaatagacataaaatatgagctatatcacccaagctacaatttaaaatacaacaatctataaacgcttaagtctgcaaccttgtatcgtttcatgcagtccttctttgtcctgccaggcaccgcttctgctattttttcccatctttcaggtgtatttactgggtatgttttcaaagcttgttccaaaagcttctgttcttctgttgtccaaggggtgaagtctgtatatggacctgattaagaaaaatttttatttgaaaactgtctttgaacatgttctcagacaagtcttgtggtccacaagtattcgctaagtgcccatttcaatctgggatgtgtcattttgaaaataaacttgtagagatgagagata

SEQ ID NO: 362995 - DNA, 2785 bp, Homo sapiens
atccttcatcctctaccttccttctagcagaaatggcggctgcggcggctcgagtggtgttgtcatccgcggcgcggcggcggctctggggtttcagcgagagtcttctaatccgaggcgctgcgggacggtcattatattttggagagaacagattaagaagtacacaggctgctacccaagttgttctgaatgttcctgaaacaagagtaacatgtttagaaagtggactcagagtagcttcggaagactctgggctctcaacatgcacagttggactctggattgatgctggaagtagatacgaaaatgagaagaacaatggaacagcacactttctggagcatatggctttcaagggcaccaagaagagatcccagttagatctggaacttgagattgaaaatatgggtgctcatctcaatgcctatacctccagagagcagactgtatactatgccaaagcattctctaaagacttgccaagagctgtagaaattcttgctgatataatacaaaacagcacattgggagaagcagagattgaacgtgagcgtggagtaatccttagagagatgcaggaagttgaaaccaatttacaagaagttgtttttgattatcttcatgccacagcttatcaaaatactgcacttggacggacaattttgggaccaactgaaaatatcaaatctataagtcgtaaggacttagtggattatataaccacacattataaggggccaagaatagtgcttgctgctgctggaggtgtttcccatgatgaattgcttgacttagcaaagtttcatttcggtgactctttatgcacacacaaaggagaaataccagctctgcctccctgcaaattcacaggaagtgagattcgtgtgagggatgacaagatgcctttggcgcaccttgcaatagctgttgaagctgttggttgggcacatccagatacaatctgtctcatggttgcaaacacgctgattggcaactgggatcgctcttttgggggaggaatgaatttatctagcaagctggcccagctcacttgtcatggcaatctttgccatagctttcagtctttcaacacttcctacacagatacaggattatggggactgtatatggtttgtgaatcatccactgttgcagacatgctacatgttgttcaaaaagaatggatgcgactctgtacaagtgtcacagaaagtgaggttgcacgagccagaaatcttctgaaaacaaacatgttgttgcagcttgatggtaaaaataaagatataggttctgttttcatatggttgatctgtattccaatagttaatttttccttctctttaaacaggttcaactccaatttgtgaagatattggtaggcaaatgttatgctataatagaaggattcccatccctgagcttgaagcaagaattgatgtaagtagtcctgagttactattgggtcatgtgtaaaaagatccttgttacaaaagctgagaatatgtatctttcatcttgctttagttttaaaaagttccaggtatagactttgtttttactacaaacagctgaatgacagtgtcttccatatttcaggctgtgaatgctgagacaattcgagaagtatgtaccaaatacatttataataggagtccagctattgctgctgttggtaagcctggcttcttttcttctatgcaaaaagttggccaagtacttttaattaactcttctttttaatccttaggtcccattaagcaactaccagattttaaacagatacgcagtaacatgtgttggcttcgtgattaaaatgctcctaatcaagattgtttgaacacatgtatttataaaacagagctagagaaaaataaaaatgaacatgtatatacatttggaaatttgaattaaatactgtatcatactttcaaaggataaaaagactacccctctgaaggttgttttgtattaatggtcagtctttgttctctgagaaattatgttggaagcagcatactttcaaattattaccatgagtataattttaagaatgaaaatgtttacagtattttcagttttattataaaaatgcacacacaacaaagattgtcatttcttggctctacttgcattcagcacttgttcttgagcagctttctttgcttttaccatctcgacaagttcctaggaagggagaaaggtgtgatttaagaagttgcgatttaaaaacagacattttaatctagtgtttggtgtaaagaattcaagcaactaagatagatagtactaaatatactgatttcattatctgccagggcctagaaagtttctaaggttgctcatttcttcctcataatattgaccccataactactggttttgaaataagcactatattattaaccacttaatagacataaaatatgagctatatcacccaagctacaatttaaaatacaacaatctataaacgcttaagtctgcaaccttgtatcgtttcatgcagtccttctttgtcctgccaggcaccgcttctgctattttttcccatctttcaggtgtatttactgggtatgttttcaaagcttgttccaaaagcttctgttcttctgttgtccaaggggtgaagtctgtatatggacctgattaagaaaaatttttatttgaaaactgtctttgaacatgttctcagacaagtcttgtggtccacaagtattcgctaagtgcccatttcaatctgggatgtgtcattttgaaaataaacttgtagagatgagagata

SEQ ID NO: 362996 - DNA, 2359 bp, Homo sapiens
atccttcatcctctaccttccttctagcagaaatggcggctgcggcggctcgagtggtgttgtcatccgcggcgcggcggcggctctggggtttcagcgagagtcttctaatccgaggcgctgcgggacggtcattatattttggagagaacagattaagaagtacacaggctgctacccaagttgttctgaatgttcctgaaacaagagtaacatgtttagaaagtggactcagagtagcttcggaagactctgggctctcaacatgcacagttggactctggattgatgctggaagtagatacgaaaatgagaagaacaatggaacagcacactttctggagcatatggctttcaagggcaccaagaagagatcccagttagatctggaacttgagattgaaaatatgggtgctcatctcaatgcctatacctccagagagcagactgtatactatgccaaagcattctctaaagacttgccaagagctgtagaaattcttgctgatataatacaaaacagcacattgggagaagcagagattgaacgtgagcgtggagtaatccttagagagatgcaggaagttgaaaccaatttacaagaagttgtttttgattatcttcatgccacagcttatcaaaatactgcacttggacggacaattttgggaccaactgaaaatatcaaatctataagtcgtaaggacttagtggattatataaccacacattataaggggccaagaatagtgcttgctgctgctggagattcgtgtgagggatgacaagatgcctttggcgcaccttgcaatagctgttgaagctgttggttgggcacatccagatacaatctgtctcatggttgcaaacacgctgattggcaactgggatcgctcttttgggggaggaatgaatttatctagcaagctggcccagctcacttgtcatggcaatctttgccatagctttcagtctttcaacacttcctacacagatacaggattatggggactgtatatggtttgtgaatcatccactgttgcagacatgctacatgttgttcaaaaagaatggatgcgactctgtacaagtgtcacagaaagtgaggttgcacgagccagaaatcttctgaaaacaaacatgttgttgcagcttgatggttcaactccaatttgtgaagatattggtaggcaaatgttatgctataatagaaggattcccatccctgagcttgaagcaagaattgatgctgtgaatgctgagacaattcgagaagtatgtaccaaatacatttataataggagtccagctattgctgctgttggtcccattaagcaactaccagattttaaacagatacgcagtaacatgtgttggcttcgtgattaaaatgctcctaatcaagattgtttgaacacatgtatttataaaacagagctagagaaaaataaaaatgaacatgtatatacatttggaaatttgaattaaatactgtatcatactttcaaaggataaaaagactacccctctgaaggttgttttgtattaatggtcagtctttgttctctgagaaattatgttggaagcagcatactttcaaattattaccatgagtataattttaagaatgaaaatgtttacagtattttcagttttattataaaaatgcacacacaacaaagattgtcatttcttggctctacttgcattcagcacttgttcttgagcagctttctttgcttttaccatctcgacaagttcctaggaagggagaaaggtgtgatttaagaagttgcgatttaaaaacagacattttaatctagtgtttggtgtaaagaattcaagcaactaagatagatagtactaaatatactgatttcattatctgccagggcctagaaagtttctaaggttgctcatttcttcctcataatattgaccccataactactggttttgaaataagcactatattattaaccacttaatagacataaaatatgagctatatcacccaagctacaatttaaaatacaacaatctataaacgcttaagtctgcaaccttgtatcgtttcatgcagtccttctttgtcctgccaggcaccgcttctgctattttttcccatctttcaggtgtatttactgggtatgttttcaaagcttgttccaaaagcttctgttcttctgttgtccaaggggtgaagtctgtatatggacctgattaagaaaaatttttatttgaaaactgtctttgaacatgttctcagacaagtcttgtggtccacaagtattcgctaagtgcccatttcaatctgggatgtgtcattttgaaaataaacttgtagagatgagagata

SEQ ID NO: 362997 - DNA, 1699 bp, Homo sapiens
  misc_feature (9)..(9): n is a, c, g, or t
  misc_feature (42)..(42): n is a, c, g, or t
  misc_feature (71)..(71): n is a, c, g, or t
gggccagantgctgcgtgcggagtgccctgtgatgctgactngcaagttcattcgtgactcgcaccacaangagaataccgcttgcctcctgcaattcacggagtgagattcgtgtgagggatgacaagatgcctttggcgcaccttgcaatagctgttgaagctgttggttgggcacatccagatacaatctgtctcatggttgcaaacacgctgattggcaactgggatcgctcttttgggggaggaatgaatttatctagcaagctggcccagctcacttgtcatggcaatctttgccatagctttcagtctttcaacacttcctacacagatacaggattatggggactgtatatggtttgtgaatcatccactgttgcagacatgctacatgttgttcaaaaagaatggatgcgactctgtacaagtgtcacagaaagtgaggttgcacgagccagaaatcttctgaaaacaaacatgttgttgcagcttgatggttcaactccaatttgtgaagatattggtaggcaaatgttatgctataatagaaggattcccatccctgagcttgaagcaagaattgatgctgtgaatgctgagacaattcgagaagtatgtaccaaatacatttataataggagtccagctattgctgctgttggtcccattaagcaactaccagattttaaacagatacgcagtaacatgtgttggcttcgtgattaaaatgctcctaatcaagattgtttgaacacatgtatttataaaacagagctagagaaaaataaaaatgaacatgtatatacatttggaaatttgaattaaatactgtatcatactttcaaaggataaaaagactacccctctgaaggttgttttgtattaatggtcagtctttgttctctgagaaattatgttggaagcagcatactttcaaattattaccatgagtataattttaagaatgaaaatgtttacagtattttcagttttattataaaaatgcacacacaacaaagattgtcatttcttggctctacttgcattcagcacttgttcttgagcagctttctttgcttttaccatctcgacaagttcctaggaagggagaaaggtgtgatttaagaagttgcgatttaaaaacagacattttaatctagtgtttggtgtaaagaattcaagcaactaagatagatagtactaaatatactgatttcattatctgccagggcctagaaagtttctaaggttgctcatttcttcctcataatattgaccccataactactggttttgaaataagcactatattattaaccacttaatagacataaaatatgagctatatcacccaagctacaatttaaaatacaacaatctataaacgcttaagtctgcaaccttgtatcgtttcatgcagtccttctttgtcctgccaggcaccgcttctgctattttttcccatctttcaggtgtatttactgggtatgttttcaaagcttgttccaaaagcttctgttcttctgttgtccaaggggtgaagtctgtatatggacctgattaagaaaaatttttatttgaaaactgtctttgaacatgttctcagacaagtcttgtggtccacaagtattcgctaagtgcccatttcaatctgggatgtgtcattttgaaaataaacttgtagagatgagagata

SEQ ID NO: 362998 - DNA, 1445 bp, Homo sapiens
atccttcatcctctaccttccttctagcagaaatggcggctgcggcggctcgagtggtgttgtcatccgcggcgcggcggcggctctggggtttcagcgagagtcttctaatccgaggcgctgcgggacggtcattatattttggagagaacagattaagaagtacacaggctgctacccaagttgttctgaatgttcctgaaacaagagtaacatgtttagaaagtggactcagagtagcttcggaagactctgggctctcaacatgcacagttggactctggcattgatgctggaagtagatacgacacatgagaaagccatatgctcccggcctgcggcggctcgacgtggtgtcgtcatccgcggcgcaggcgcgacgcgaatctggaggtattcagcgcagagtctatctaactcccgagagcgctgcagcggaccggaccacattactatccgtccgcgacgagcacacagacttaacagaacgcttaccaccaggcctgctctacaccaaatgttgttcctgcaactggttccctgcaacaccacgaagtccacaagtgtcgcacgacacagcgccacctcagcagctacgccctgtcgcggagagaaactcctcgggctttcatcgaaagcattgccagcaacgcatggaacctcctgggcatacagcatagcctggcgaagctactaattcccgaacacccctgcacgcacgcatacccatcggacacacgccccacctccctctgtgacgcccataattggaactaccaacacagtcggcagacaccaacaggatacagagaaaatccccacgccgtacggaattcatgcggacaccattggaagacatatgagaaaaattaacgcgggactggcactaccgacagatccaaccgctcactacaacccctcacaacagaaaggagaccagaacgacggcacaacaactactctcccaacacagcactatctccactcatacaccgtacaactagcaccaacatgcacaagccatcacaaaacaaaaattcctcaacccaatcagtcaacacaaacccccaccacacacaaccaacatgaccacaacccacacatcaaacaacttggacatccattacatacctctcattaactaacaaccattaactcactagacttcacacgacaatatgaccaaccctcacattctatcacataaaatcatcacatccaccaacactatatcaccaccattaccacaacacacccattatctcgccattccgcgacacccttgacacccgtcacctacatctcgacgcactcacactgaatacctccacacacatcatcctcaacctcttaactggacacatcccctcgaacatatttgcacaccaccatatatagtgcactccacacaacaactactaattgcatcacttctaccacaccac

SEQ ID NO: 362999 - DNA, 3274 bp, Homo sapiens
gcctctctccatcagacaccccaaggttccatccgaagcaggcggagcaccgaacgcaccccggggtggtcagggacccccatccgtgctgccccctaggagcccgcgcctctcctctgcgccccgcctctcgggccgcaacatcgcgcggttcctttaacagcgcgctggcagggtgtgggaagcaggaccgcgtcctcccgccccctcccatccgagtttcaggtgaattggtcaccgagggaggaggccgacacaccacacctacactcccgcgtccacctctccctccctgcttcctctggcggaggcggcaggaaccgagagccaggtccagagcgccgaggagccggtctaggacgcagcagattggtttatcttggaagctaaagggcattgctcatcctgaagatcagctgaccattgacaatcagccatgtcatccaggcctcttgaaagtccacctccttacaggcctgatgaattcaaaccgaatcattatgcaccaagcaatgacatatatggtggagagatgcatgttcgaccaatgctctctcagccagcctactctttttacccagaagatgaaattcttcacttctacaaatggacctctcctccaggagtgattcggatcctgtctatgctcattattgtgatgtgcattgccatctttgcctgtgtggcctccacgcttgcctgggacagaggctatggaacttcccttttaggaggtagtgtaggctacccttatggaggaagtggctttggtagctacggaagtggctatggctatggctatggttatggctatggctacggaggctatacagacccaagagcagcaaagggcttcatgttggccatggctgccttttgtttcattgccgcgttggtgatctttgttaccagtgttataagatctgaaatgtccagaacaagaagatactacttaagtgtgataatagtgagtgctatcctgggcatcatggtgtttattgccacaattgtctatataatgggagtgaacccaactgctcagtcttctggatctctatatggttcacaaatatatgccctctgcaaccaattttatacacctgcagctactggactctacgtggatcagtatttgtatcactactgtgttgtggatccccaggaggccattgccattgtactggggttcatgattattgtggcttttgctttaataattttctttgctgtgaaaactcgaagaaagatggacaggtatgacaagtccaatattttgtgggacaaggaacacatttatgatgagcagccccccaatgtcgaggagtgggttaaaaatgtgtctgcaggcacacaggacgtgccttcacccccatctgactatgtggaaagagttgacagtcccatggcatactcttccaatggcaaagtgaatgacaagcggttttatccagagtcttcctataaatccacgccggttcctgaagtggttcaggagcttccattaacttcgcctgtggatgacttcaggcagcctcgttacagcagcggtggtaactttgagacaccttcaaaaagagcacctgcaaagggaagagcaggaaggtcaaagagaacagagcaagatcactatgagacagactacacaactggcggcgagtcctgtgatgagctggaggaggactggatcagggaatatccacctatcacttcagatcaacaaagacaactgtacaagaggaattttgacactggcctacaggaatacaagagcttacaatcagaacttgatgagatcaataaagaactctcccgtttggataaagaattggatgactatagagaagaaagtgaagagtacatggctgctgctgatgaatacaatagactgaagcaagtgaagggatctgcagattacaaaagtaagaagaatcattgcaagcagttaaagagcaaattgtcacacatcaagaagatggttggagactatgatagacagaaaacatagaaggctgatgccaagttgtttgagaaattaagtatctgacatctctgcaatcttctcagaaggcaaatgactttggaccataaccccggaagccaaacctctgtgagcatcacaaagttttggttgctttaacatcatcagtattgaagcattttataaatcgcttttgataatcaactgggctgaacactccaattaaggattttatgctttaaacattggttcttgtattaagaatgaaatactgtttgaggtttttaagccttaaaggaaggttctggtgtgaactaaactttcacaccccagacgatgtcttcatacctacatgtatttgtttgcataggtgatctcatttaatcctctcaaccacctttcagataactgttatttataatcacttttttccacataaggaaactgggttcctgcaatgaagtctctgaagtgaaactgcttgtttcctagcacacacttttggttaagtctgttttatgacttcattaataataaattccctggcctttcatattttagctactatatatgtgatgatctaccagcctccctattttttttctgttatataaatggttaaaagaggtttttcttaaataataaagatcatgtaaaagtaacaaatgtgtgaaatttaaagattgtaaatatatatttacttttttaagatcaaagtttaaacccggtggttagaattttgtgtgtttttaaatactttttatctttttgcatgcctttttttaaaaaccaactagaacttttcattatatcagaatatctgattacatttataattcaattgtgacttgaactgtatcttacaggaatgttcaatttctatacatattttataaggtattaaacctggtgttttctttccataataacctgtttgatgttattagtgctgttaacacacagcaatggaaaaccacactcaggagttgtatctgttgttgtttatactcctttggatgctgtgctggttagtcgtttcccattcctttggctgtaagaatgctgatatgtctgggaatagaatgctataccacgaaataccaaataatttcaaatggtgcccttaaattgtatcacttttttaaaaattcagattcttattagtaaaattagttgatagcactgtgctgaccaagttgattgtgatcatcccagcttagacttttctaaaaacttttttttagaataatctataaactgaactttagtatgcatttcagatatttaggtatataa

SEQ ID NO: 363000 - DNA, 2661 bp, Homo sapiens
tttagtagagatggggtttctccacgttggtcaggctggtctcgaactcctgacctcaggtgatccatccacctcggcctcccaaagtgctgggattagaggcgtgagccactgtgcccggcctataatttttgatagatgattttgaattattttccagagataaaattttaaatgtttccattatatcactgatttatttctgcaaattgaataaattcttaattttctgcatgcacataatacaaaaggtattttcatagttttggatttataccaaatgaaaaggattctcttgatgagcacctttaactgatttttctgttaaagttttaacaatttgttcttggaagtcagttcgtgaaggcaagtttgtcagtattttcacaaaactattcagctgaatccagaaagtgaaacagcaagaatttgcattgtaaaattgtgttataaaattggactttgaaatttcaaaaataagaaaaattttcatgtgtatttatactaaataccgttttaggaaactaggatcagggtgtttctgttggcgttggcattaactagctggatgtaaatttgaaaagccactcaagcagcttcctagtctagaaagtcagaggtttagattagatttccgacatcccttccatttctgacctgtagttcttgtctggaattctgctttgttataaactattgttctaaggagtttgttgtgatagcacatagttcattttgtaaagattccctgcgtataaagtgatgccctacatatgtgattttgtattaaaagtatataggatcattattttattttgaaaaatttaaatacagaaaagtataaaatataagtaccatccgcccagaaataacatgtgttaatgttttgtcatatgtgctttatattttttgaaataaagtgaagtcaactagtatttatagtaaataagttacatacacataagtacatatatgatatttaatcctcacaacgatcttttgacatgtgaccatttcttattcttcttttatagacaaggaactaatgatatgatagattaactggctgttgtcacactagcaagtggcaaaacaagggattaggatcttagtctcttcaactgttagattctatacttccatcctgtgttgactttgttaatggattggataatgtgagatcactctgatgtaaataaagtatcctatattaatttcgagtgcattttaagtacttgtaacataaatgcttcctgtgaaacatctgtaaagacctgaatgggtacatgtgtgtaaagaagaatcagggcagaaaagtgcttttatcatggctccggggaccttagcttcagttggtgttgtgagaattcctcacacaaggacattctccttgcttcagcatcaggatggaagtgtttctcatctggactttttcaaagactcagctggaggaatcagaattcataatttcctggcagctcatgattctgctacactacaccatgccatctcttgtgtgaaaggacagatttgatggaggactatgtcatccctcatgcgtttcttattgtctacatttattctaatgggaagaagtgagcaaaaacacctcaataatttgggtagtttttagaaaaccttgttagtaaattagaatagtgccactttggcattatgagaaagaagcatggatacataactagggttttgtgtatgactacaacgaaatgcagaatggtgtctccaaaaggtttccagttgctgccacaagaactgcttggtattgcctacatgtgttgtcctatttttgctttgcccttctgcagttacttgctgtgggaccttggagaaattaacttagcctctctgtacttcagttttttgtatttgtaaaaatatatttgtaataatctcatagttaagaaggtagttaatgtgtgactcagtccttgtctaaaagtaaatatgcctagctacccccatcttccaaagccagaaggtgaaactttaacaagttttctaaaagcaaattgtgttttttaaaagtgcatgtgtcatccaatcccatatgattgatctgtgctgggtgcagccttagaatgtaaattcttttgaattctaggcagagaatgcaggattggcattctaaatatttgtacatgataaacaaatgcttctttaggttacagcaaatagtttacttatcaagatcacgattgttagatactgttgtcaattacagaggttttagatgaggctttctggaatgatttagtttccctgtaagggagcctgtctattggaatagacaggttcacttctcccagtctttcaagttgcatgctttttatatctgattccactggctgagctgattgtgaatgtcctaaccctgttgattgtgtctggccactcatgggcaaagaacagattatccattctttatagttgtcttttagttttacaagttgaaaaaacatctgagtaggttagataatttattctaccactttgtaaatgattagaatatgtcagtcataatcatgccaagagattatggatttatgcatattttgttttgctgtagtaccattcctagttgaatcttaacatccatgtctaaaatctatacagaacaaatattacagttgggaaaactgt

SEQ ID NO: 363001 - DNA, 383 bp, Homo sapiens
atgtctgagcagaatgggttgtggctagaggccaataatcttatgttttaacaagccctccaggtgattcctgtgcacagataagctttagtttcatttacccaatggtttaaattattccaaataagttgtgttctttctgcttactaccaaaaaatgctaacttgaaattattttcatgttcatttcagcaaaccgaatcattatgcaccaagcaatgacatatatggtggagagatgcatgttcgaccaatgctctctcagccagcctactctttttacccagaagatgaaattcttcacttctacaaatggacctctcctccaggagtgattcggatcctgtctatgctcattattgtgatgtgcattgccatctttgc

SEQ ID NO: 363002 - DNA, 4584 bp, Homo sapiens
gcctctctccatcagacaccccaaggttccatccgaagcaggcggagcaccgaacgcaccccggggtggtcagggacccccatccgtgctgccccctaggagcccgcgcctctcctctgcgccccgcctctcgggccgcaacatcgcgcggttcctttaacagcgcgctggcagggtgtgggaagcaggaccgcgtcctcccgccccctcccatccgagtttcaggtgaattggtcaccgagggaggaggccgacacaccacacctacactcccgcgtccacctctccctccctgcttcctctggcggaggcggcaggaaccgagagccaggtccagagcgccgaggagccggtctaggacgcagcagattggtttatcttggaagctaaagggcattgctcatcctgaagatcagctgaccattgacaatcagccatgtcatccaggcctcttgaaagtccacctccttacaggcctgatgaattcaaaccgaatcattatgcaccaagcaatgacatatatggtggagagatgcatgttcgaccaatgctctctcagccagcctactctttttacccagaagatgaaattcttcacttctacaaatggacctctcctccaggagtgattcggatcctgtctatgctcattattgtgatgtgcattgccatctttgcctgtgtggcctccacgcttgcctgggacagaggctatggaacttcccttttaggaggtagtgtaggctacccttatggaggaagtggctttggtagctacggaagtggctatggctatggctatggttatggctatggctacggaggctatacagacccaagagcagcaaagggcttcatgttggccatggctgccttttgtttcattgccgcgttggtgatctttgttaccagtgttataagatctgaaatgtccagaacaagaagatactacttaagtgtgataatagtgagtgctatcctgggcatcatggtgtttattgccacaattgtctatataatgggagtgaacccaactgctcagtcttctggatctctatatggttcacaaatatatgccctctgcaaccaattttatacacctgcagctactggactctacgtggatcagtatttgtatcactactgtgttgtggatccccaggaggccattgccattgtactggggttcatgattattgtggcttttgctttaataattttctttgctgtgaaaactcgaagaaagatggacaggtatgacaagtccaatattttgtgggacaaggaacacatttatgatgagcagccccccaatgtcgaggagtgggttaaaaatgtgtctgcaggcacacaggacgtgccttcacccccatctgactatgtggaaagagttgacagtcccatggcatactcttccaatggcaaagtgaatgacaagcggttttatccagagtcttcctataaatccacgccggttcctgaagtggttcaggagcttccattaacttcgcctgtggatgacttcaggcagcctcgttacagcagcggtggtaactttgagacaccttcaaaaagagcacctgcaaagggaagagcaggaaggtcaaagagaacagagcaagatcactatgagacagactacacaactggcggcgagtcctgtgatgagctggaggaggactggatcagggaatatccacctatcacttcagatcaacaaagacaactgtacaagaggaattttgacactggcctacaggaatacaagagcttacaatcagaacttgatgagatcaataaagaactctcccgtttggataaagaattggatgactatagagaagaaagtgaagagtacatggctgctgctgatgaatacaatagactgaagcaagtgaagggatctgcagattacaaaagtaagaagaatcattgcaagcagttaaagagcaaattgtcacacatcaagaagatggttggagactatgatagacagaaaacatagaaggctgatgccaagttgtttgagaaattaagtatctgacatctctgcaatcttctcagaaggcaaatgactttggaccataaccccggaagccaaacctctgtgagcatcacaaagttttggttgctttaacatcatcagtattgaagcattttataaatcgcttttgataatcaactgggctgaacactccaattaaggattttatgctttaaacattggttcttgtattaagaatgaaatactgtttgaggtttttaagccttaaaggaaggttctggtgtgaactaaactttcacaccccagacgatgtcttcatacctacatgtatttgtttgcataggtgatctcatttaatcctctcaaccacctttcagataactgttatttataatcacttttttccacataaggaaactgggttcctgcaatgaagtctctgaagtgaaactgcttgtttcctagcacacacttttggttaagtctgttttatgacttcattaataataaattccctggcctttcatattttagctactatatatgtgatgatctaccagcctccctattttttttctgttatataaatggttaaaagaggtttttcttaaatattgttctaaggagtttgttgtgatagcacatagttcattttgtaaagattccctgcgtataaagtgatgccctacatatgtgattttgtattaaaagtatataggatcattattttattttgaaaaatttaaatacagaaaagtataaaatataagtaccatccgcccagaaataacatgtgttaatgttttgtcatatgtgctttatattttttgaaataaagtgaagtcaactagtatttatagtaaataagttacatacacataagtacatatatgatatttaatcctcacaacgatcttttgacatgtgaccatttcttattcttcttttatagacaaggaactaatgatatgatagattaactggctgttgtcacactagcaagtggcaaaacaagggattaggatcttagtctcttcaactgttagattctatacttccatcctgtgttgactttgttaatggattggataatgtgagatcactctgatgtaaataaagtatcctatattaatttcgagtgcattttaagtacttgtaacataaatgcttcctgtgaaacatctgtaaagacctgaatgggtacatgtgtgtaaagaagaatcagggcagaaaagtgcttttatcatggctccggggaccttagcttcagttggtgttgtgagaattcctcacacaaggacattctccttgcttcagcatcaggatggaagtgtttctcatctggactttttcaaagactcagctggaggaatcagaattcataatttcctggcagctcatgattctgctacactacaccatgccatctcttgtgtgaaaggacagatttgatggaggactatgtcatccctcatgcgtttcttattgtctacatttattctaatgggaagaagtgagcaaaaacacctcaataatttgggtagtttttagaaaaccttgttagtaaattagaatagtgccactttggcattatgagaaagaagcatggatacataactagggttttgtgtatgactacaacgaaatgcagaatggtgtctccaaaaggtttccagttgctgccacaagaactgcttggtattgcctacatgtgttgtcctatttttgctttgcccttctgcagttacttgctgtgggaccttggagaaattaacttagcctctctgtacttcagttttttgtatttgtaaaaatatatttgtaataatctcatagttaagaaggtagttaatgtgtgactcagtccttgtctaaaagtaaatatgcctagctacccccatcttccaaagccagaaggtgaaactttaacaagttttctaaaagcaaattgtgttttttaaaagtgcatgtgtcatccaatcccatatgattgatctgtgctgggtgcagccttagaatgtaaattcttttgaattctaggcagagaatgcaggattggcattctaaatatttgtacatgataaacaaatgcttctttaggttacagcaaatagtttacttatcaagatcacgattgttagatactgttgtcaattacagaggttttagatgaggctttctggaatgatttagtttccctgtaagggagcctgtctattggaatagacaggttcacttctcccagtctttcaagttgcatgctttttatatctgattccactggctgagctgattgtgaatgtcctaaccctgttgattgtgtctggccactcatgggcaaagaacagattatccattctttatagttgtcttttagttttacaagttgaaaaaacatctgagtaggttagataatttattctaccactttgtaaatgattagaatatgtcagtcataatcatgccaagagattatggatttatgcatattttgttttgctgtagtaccattcctagttgaatcttaacatccatgtctaaaatctatacagaacaaatattacagttgggaaaactgt

SEQ ID NO: 363003 - DNA, 4327 bp, Homo sapiens
agtccccggctgagcgctggcggtcggtgcggcgtcaggtgcgcccgccaggtgagcgcgctccctggcaccgttggcccccggagggtcgggcccagttgcggcgagcggattggtttatcttggaagctaaagggcattgctcatcctgaagatcagctgaccattgacaatcagccatgtcatccaggcctcttgaaagtccacctccttacaggcctgatgaattcaaaccgaatcattatgcaccaagcaatgacatatatggtggagagatgcatgttcgaccaatgctctctcagccagcctactctttttacccagaagatgaaattcttcacttctacaaatggacctctcctccaggagtgattcggatcctgtctatgctcattattgtgatgtgcattgccatctttgcctgtgtggcctccacgcttgcctgggacagaggctatggaacttcccttttaggaggtagtgtaggctacccttatggaggaagtggctttggtagctacggaagtggctatggctatggctatggttatggctatggctacggaggctatacagacccaagagcagcaaagggcttcatgttggccatggctgccttttgtttcattgccgcgttggtgatctttgttaccagtgttataagatctgaaatgtccagaacaagaagatactacttaagtgtgataatagtgagtgctatcctgggcatcatggtgtttattgccacaattgtctatataatgggagtgaacccaactgctcagtcttctggatctctatatggttcacaaatatatgccctctgcaaccaattttatacacctgcagctactggactctacgtggatcagtatttgtatcactactgtgttgtggatccccaggaggccattgccattgtactggggttcatgattattgtggcttttgctttaataattttctttgctgtgaaaactcgaagaaagatggacaggtatgacaagtccaatattttgtgggacaaggaacacatttatgatgagcagccccccaatgtcgaggagtgggttaaaaatgtgtctgcaggcacacaggacgtgccttcacccccatctgactatgtggaaagagttgacagtcccatggcatactcttccaatggcaaagtgaatgacaagcggttttatccagagtcttcctataaatccacgccggttcctgaagtggttcaggagcttccattaacttcgcctgtggatgacttcaggcagcctcgttacagcagcggtggtaactttgagacaccttcaaaaagagcacctgcaaagggaagagcaggaaggtcaaagagaacagagcaagatcactatgagacagactacacaactggcggcgagtcctgtgatgagctggaggaggactggatcagggaatatccacctatcacttcagatcaacaaagacaactgtacaagaggaattttgacactggcctacaggaatacaagagcttacaatcagaacttgatgagatcaataaagaactctcccgtttggataaagaattggatgactatagagaagaaagtgaagagtacatggctgctgctgatgaatacaatagactgaagcaagtgaagggatctgcagattacaaaagtaagaagaatcattgcaagcagttaaagagcaaattgtcacacatcaagaagatggttggagactatgatagacagaaaacatagaaggctgatgccaagttgtttgagaaattaagtatctgacatctctgcaatcttctcagaaggcaaatgactttggaccataaccccggaagccaaacctctgtgagcatcacaaagttttggttgctttaacatcatcagtattgaagcattttataaatcgcttttgataatcaactgggctgaacactccaattaaggattttatgctttaaacattggttcttgtattaagaatgaaatactgtttgaggtttttaagccttaaaggaaggttctggtgtgaactaaactttcacaccccagacgatgtcttcatacctacatgtatttgtttgcataggtgatctcatttaatcctctcaaccacctttcagataactgttatttataatcacttttttccacataaggaaactgggttcctgcaatgaagtctctgaagtgaaactgcttgtttcctagcacacacttttggttaagtctgttttatgacttcattaataataaattccctggcctttcatattttagctactatatatgtgatgatctaccagcctccctattttttttctgttatataaatggttaaaagaggtttttcttaaatattgttctaaggagtttgttgtgatagcacatagttcattttgtaaagattccctgcgtataaagtgatgccctacatatgtgattttgtattaaaagtatataggatcattattttattttgaaaaatttaaatacagaaaagtataaaatataagtaccatccgcccagaaataacatgtgttaatgttttgtcatatgtgctttatattttttgaaataaagtgaagtcaactagtatttatagtaaataagttacatacacataagtacatatatgatatttaatcctcacaacgatcttttgacatgtgaccatttcttattcttcttttatagacaaggaactaatgatatgatagattaactggctgttgtcacactagcaagtggcaaaacaagggattaggatcttagtctcttcaactgttagattctatacttccatcctgtgttgactttgttaatggattggataatgtgagatcactctgatgtaaataaagtatcctatattaatttcgagtgcattttaagtacttgtaacataaatgcttcctgtgaaacatctgtaaagacctgaatgggtacatgtgtgtaaagaagaatcagggcagaaaagtgcttttatcatggctccggggaccttagcttcagttggtgttgtgagaattcctcacacaaggacattctccttgcttcagcatcaggatggaagtgtttctcatctggactttttcaaagactcagctggaggaatcagaattcataatttcctggcagctcatgattctgctacactacaccatgccatctcttgtgtgaaaggacagatttgatggaggactatgtcatccctcatgcgtttcttattgtctacatttattctaatgggaagaagtgagcaaaaacacctcaataatttgggtagtttttagaaaaccttgttagtaaattagaatagtgccactttggcattatgagaaagaagcatggatacataactagggttttgtgtatgactacaacgaaatgcagaatggtgtctccaaaaggtttccagttgctgccacaagaactgcttggtattgcctacatgtgttgtcctatttttgctttgcccttctgcagttacttgctgtgggaccttggagaaattaacttagcctctctgtacttcagttttttgtatttgtaaaaatatatttgtaataatctcatagttaagaaggtagttaatgtgtgactcagtccttgtctaaaagtaaatatgcctagctacccccatcttccaaagccagaaggtgaaactttaacaagttttctaaaagcaaattgtgttttttaaaagtgcatgtgtcatccaatcccatatgattgatctgtgctgggtgcagccttagaatgtaaattcttttgaattctaggcagagaatgcaggattggcattctaaatatttgtacatgataaacaaatgcttctttaggttacagcaaatagtttacttatcaagatcacgattgttagatactgttgtcaattacagaggttttagatgaggctttctggaatgatttagtttccctgtaagggagcctgtctattggaatagacaggttcacttctcccagtctttcaagttgcatgctttttatatctgattccactggctgagctgattgtgaatgtcctaaccctgttgattgtgtctggccactcatgggcaaagaacagattatccattctttatagttgtcttttagttttacaagttgaaaaaacatctgagtaggttagataatttattctaccactttgtaaatgattagaatatgtcagtcataatcatgccaagagattatggatttatgcatattttgttttgctgtagtaccattcctagttgaatcttaacatccatgtctaaaatctatacagaacaaatattacagttgggaaaactgt

SEQ ID NO: 363004 - DNA, 2404 bp, Homo sapiens
  misc_feature (5)..(6): n is a, c, g, or t
ggcgnngcccgcgggcggccgggcccggcatggagaagcgcgcggccgcggggctggagggcgcgccgggcgcccgggcgcagctggccgtcgtctgtctggtgaacatctttctcaccgggagactcagcagtgcggttcctgccttagcggcctgcagtgggaagctggagcagcacacggagcggcgtggggtcatctacagcccggcctggcccctcaactacccgccaggcaccaactgcagctggtacatccagggcgaccgtggtgacatgattaccatcagcttccgcaactttgacgtggaggagtcccaccagtgctccctggactggctcctgctgggcccagcagccccaccccgccaggaggccttccgcctctgtggctccgccatcccacctgccttcatctctgcccgcgaccatgtctggattttcttccactcagacgcctccagctccggccaggcccagggcttccgtctgtcttacatccgagggaagctgggccaggcatcctgccaggcagatgagttccgctgtgacaacggcaagtgcctgcccggcccgtggcagtgcaacacggtggacgagtgtggagacggctctgatgagggcaactgctcggcgcccgcctccgagcctccaggcagcctgtgccccggggggaccttcccatgcagcggggcgcgctccacgcgctgcctgcctgtggagcggcgctgtgacggcttgcaggactgcggcgacggctcggatgaggcgggctgccccgacctggcgtgcggccggcggctgggcagcttctacggctcctttgcctccccagacctgttcggcgccgctcgcgggccctcagaccttcactgcacgtggctggtggacacacaggactcccggcgggtgctgctgcagctggaactgcggctgggctatgacgactacgtgcaggtatacgagggcctgggcgagcgcggggaccgcctgctgcagacgctgtcctaccgcagcaaccaccggcccgtgagcctggaggccgcccagggccgcctcaccgtggcctaccacgcgcgcgcccgcagcgccggccacggcttcaatgccacctaccaggtgaagggctattgcctcccctgggagcagccgtgcgggagcagtagtgacagtgacgggggcagcctgggcgaccagggctgcttctcagagccacagcgctgtgatggctggtggcattgtgccagcggccgagacgagcagggctgccctgcctgcccgcccgaccagtacccctgcgagggtggcagtggtctgtgctacacgcctgccgaccgctgcaacaaccagaaaagctgtcccgacggcgccgacgagaagaactgcttctcctgccagcccggcaccttccactgcggtaccaacctgtgcatcttcgagacgtggcgctgtgacggccaggaagactgccaggacggcagcgatgagcatgggtgcctggccgccgtgccccgcaaggtcatcacggcggcgctcattggcagcctggtgtgtggcctgctgctggtcatcgcgctgggctgcgccttcaagctctactcactgcgcacgcaggaatacagggccttcgagacccagatgacgcgcctggaggctgagttcgtgcggcgggaggcacccccatcctatggtcagctcatcgcccagggcctcattccacccgtggaggactttcctgtctacagtgcgtcccaggcctctgtgctgcagaatcttcgcacagccatgcggagacagatgcgtcggcacgcctcccgccgggggccctcccgccgccgcctcggccgcctctggaaccggctctttcaccggccgcgggcgccccgaggccagatcccactgctgaccgcagcacgcccctcacagaccgtgctgggcgatggcttcctccagcctgctccaggggctgcccccgaccccccagcaccgctcatggacacaggcagcaccagggcggccggagacaggccccccagtgcccccggccgtgcaccggaggtgggaccttcagggccacccttgccctcgggcctgcgagacccagagtgcaggcccgtggacaaggacagaaaggtctgcagggagccactggcagacggcccagctcctgcagatgcacctcgggagccctgctcagcccaggacccgcacccccaggtctccactgccagcagcaccctgggcccccactcgccagagccactgggggtctgcaggaaccccccgcccccctgctccccaatgctggaggccagcgatgatgaggccctgttggtctgttgaccgctgggctcgctggtgaccgccacagccccgctttgtaaccagggaatacacagtcattt

SEQ ID NO: 363005 - DNA, 343 bp, Homo sapiens
agcccccgcagggcccgtgacgccgcggccgatgtggccgcgcgcgccctacgggcctgcaccgccaccgcacaaagacgcctcgggagccgccgcctgcacccgggccgcagcagccacgccagccggagcccggcattttaccctccagattcccaatctatttttaaaaataatgttcaaaacatatgggaaaaataagtgattgctccttttcatggtcacagattgtatttattttttcagactggttttccaacctaacgagggaatgggtagtgaatgttgttgttgttgttgttgtttatgttggttaatttcgaaataaaactgtttaactcgt

SEQ ID NO: 363006 - DNA, 3233 bp, Homo sapiens
  misc_feature (5)..(6): n is a, c, g, or t
ggcgnngcccgcgggcggccgggcccggcatggagaagcgcgcggccgcggggctggagggcgcgccgggcgcccgggcgcagctggccgtcgtctgtctggtgaacatctttctcaccgggagactcagcagtgcggttcctgccttagcggcctgcagtgggaagctggagcagcacacggagcggcgtggggtcatctacagcccggcctggcccctcaactacccgccaggcaccaactgcagctggtacatccagggcgaccgtggtgacatgattaccatcagcttccgcaactttgacgtggaggagtcccaccagtgctccctggactggctcctgctgggcccagcagccccaccccgccaggaggccttccgcctctgtggctccgccatcccacctgccttcatctctgcccgcgaccatgtctggattttcttccactcagacgcctccagctccggccaggcccagggcttccgtctgtcttacatccgagggaagctgggccaggcatcctgccaggcagatgagttccgctgtgacaacggcaagtgcctgcccggcccgtggcagtgcaacacggtggacgagtgtggagacggctctgatgagggcaactgctcggcgcccgcctccgagcctccaggcagcctgtgccccggggggaccttcccatgcagcggggcgcgctccacgcgctgcctgcctgtggagcggcgctgtgacggcttgcaggactgcggcgacggctcggatgaggcgggctgccccgacctggcgtgcggccggcggctgggcagcttctacggctcctttgcctccccagacctgttcggcgccgctcgcgggccctcagaccttcactgcacgtggctggtggacacacaggactcccggcgggtgctgctgcagctggaactgcggctgggctatgacgactacgtgcaggtatacgagggcctgggcgagcgcggggaccgcctgctgcagacgctgtcctaccgcagcaaccaccggcccgtgagcctggaggccgcccagggccgcctcaccgtggcctaccacgcgcgcgcccgcagcgccggccacggcttcaatgccacctaccaggtgaagggctattgcctcccctgggagcagccgtgcgggagcagtagtgacagtgacgggggcagcctgggcgaccagggctgcttctcagagccacagcgctgtgatggctggtggcattgtgccagcggccgagacgagcagggctgccctgcctgcccgcccgaccagtacccctgcgagggtggcagtggtctgtgctacacgcctgccgaccgctgcaacaaccagaaaagctgtcccgacggcgccgacgagaagaactgcttctcctgccagcccggcaccttccactgcggtaccaacctgtgcatcttcgagacgtggcgctgtgacggccaggaagactgccaggacggcagcgatgagcatgggtgcctggccgccgtgccccgcaaggtcatcacggcggcgctcattggcagcctggtgtgtggcctgctgctggtcatcgcgctgggctgcgccttcaagctctactcactgcgcacgcaggaatacagggccttcgagacccagatgacgcgcctggaggctgagttcgtgcggcgggaggcacccccatcctatggtcagctcatcgcccagggcctcattccacccgtggaggactttcctgtctacagtgcgtcccaggcctctgtgctgcagaatcttcgcacagccatgcggagacagatgcgtcggcacgcctcccgccgggggccctcccgccgccgcctcggccgcctctggaaccggctctttcaccggccgcgggcgccccgaggccagatcccactgctgaccgcagcacgcccctcacagaccgtgctgggcgatggcttcctccagcctgctccaggggctgcccccgaccccccagcaccgctcatggacacaggcagcaccagggcggccggagacaggccccccagtgcccccggccgtgcaccggaggtgggaccttcagggccacccttgccctcgggcctgcgagacccagagtgcaggcccgtggacaaggacagaaaggtctgcagggagccactggcagacggcccagctcctgcagatgcacctcgggagccctgctcagcccaggacccgcacccccaggtctccactgccagcagcaccctgggcccccactcgccagagccactgggggtctgcaggaaccccccgcccccctgctccccaatgctggaggccagcgatgatgaggccctgttggtctgttgaccgctgggctcgctggtgaccgccacagccccgctttgtaaccagggaatacacagtcatttctaccctgcctctgcgtcctttcttatggagaggccctccggggaccccagcggaggggctggcccctaagccagctggctgcactggtgggcgggagctgtgggactgaacggcgggggggagaagagtggagtggtgagcccgtctgcagggtcccattgtacacaagcaccctggggtctcacttctctccccccactccattctgggaacccatttccagagaagcaggggaccagagcctttttgcttcatctgccctgcagtggcaacagctgcccctagagctgggagttgtcatgaggatggggccgggccatggggacgctgggtctcatccgtggtgactattttgctcacgcctcaccctcttcctgtccagcaaggcctctggaggacctgggttgggtggctcctgccaaaccctcatgcccctggccaggcaggcgccctttgccctccctgaaggtccaatctcctgggcaccgtggaagggctggggtgtgtgcctgctgtacatgaagcccctggagttccctgcaggcctcaaagcccccaggacatgctgctctgtgctttctggggacagagaggccgaggcaccaacagcagtggccacgtctgttccatcctatctcagggcctcggtttccccacctgtaagccagggtgagactgtgggctctgaagtcctgaccttcactctgtggtgatttacgggaagaaagacaatcccagcctggagcccctgagctctcctgggtggccgagctcagactggcatcgaggggcctggggtaggggcggactgagctgctaccccatcct

SEQ ID NO: 363007 - DNA, 1762 bp, Homo sapiens
agcccccgcagggcccgtgacgccgcggccgatgtggccgcgcgcgccctacgggcctgcaccgccaccgcacaaagacgcctcgggagccgccgcctgcacccgggccgcagcagccacgccaggcgggctgccccgacctggcgtgcggccggcggctgggcagcttctacggctcctttgcctccccagacctgttcggcgccgctcgcgggccctcagaccttcactgcacgtggctggtggacacacaggactcccggcgggtgctgctgcagctggaactgcggctgggctatgacgactacgtgcaggtatacgagggcctgggcgagcgcggggaccgcctgctgcagacgctgtcctaccgcagcaaccaccggcccgtgagcctggaggccgcccagggccgcctcaccgtggcctaccacgcgcgcgcccgcagcgccggccacggcttcaatgccacctaccaggtgaagggctattgcctcccctgggagcagccgtgcgggagcagtagtgacagtgacgggggcagcctgggcgaccagggctgcttctcagagccacagcgctgtgatggctggtggcattgtgccagcggccgagacgagcagggctgccctgcctgcccgcccgaccagtacccctgcgagggtggcagtggtctgtgctacacgcctgccgaccgctgcaacaaccagaaaagctgtcccgacggcgccgacgagaagaactgcttctcctgccagcccggcaccttccactgcggtaccaacctgtgcatcttcgagacgtggcgctgtgacggccaggaagactgccaggacggcagcgatgagcatgggtgcctggccgccgtgccccgcaaggtcatcacggcggcgctcattggcagcctggtgtgtggcctgctgctggtcatcgcgctgggctgcgccttcaagctctactcactgcgcacgcaggaatacagggccttcgagacccagatgacgcgcctggaggctgagttcgtgcggcgggaggcacccccatcctatggtcagctcatcgcccagggcctcattccacccgtggaggactttcctgtctacagtgcgtcccaggcctctgtgctgcagaatcttcgcacagccatgcggagacagatgcgtcggcacgcctcccgccgggggccctcccgccgccgcctcggccgcctctggaaccggctctttcaccggccgcgggcgccccgaggccagatcccactgctgaccgcagcacgcccctcacagaccgtgctgggcgatggcttcctccagcctgctccaggggctgcccccgaccccccagcaccgctcatggacacaggcagcaccagggcggccggagacaggccccccagtgcccccggccgtgcaccggaggtgggaccttcagggccacccttgccctcgggcctgcgagacccagagtgcaggcccgtggacaaggacagaaaggtctgcagggagccactggcagacggcccagctcctgcagatgcacctcgggagccctgctcagcccaggacccgcacccccaggtctccactgccagcagcaccctgggcccccactcgccagagccactgggggtctgcaggaaccccccgcccccctgctccccaatgctggaggccagcgatgatgaggccctgttggtctgttgaccgctgggctcgctggtgaccgccacagccccgctttgtaaccagggaatacacagtcattt

SEQ ID NO: 363008 - DNA, 1606 bp, Homo sapiens
  misc_feature (5)..(6): n is a, c, g, or t
ggcgnngcccgcgggcggccgggcccggcatggagaagcgcgcggccgcggggctggagggcgcgccgggcgcccgggcgcagctggccgtcgtctgtctggtgaacatctttctcaccgggagactcagcagtgcggttcctgccttagcggcctgcagtgggaagctggagcagcacacggagcggcgtggggtcatctacagcccggcctggcccctcaactacccgccaggcaccaactgcagctggtacatccagggcgaccgtggtgacatgattaccatcagccctcacagaccgtgctgggcgatggcttcctccagcctgctccaggggctgcccccgaccccccagcaccgctcatggacacaggcagcaccagggcggccggagacaggccccccagtgcccccggccgtgcaccggaggtgggaccttcagggccacccttgccctcgggcctgcgagacccagagtgcaggcccgtggacaaggacagaaaggtctgcagggagccactggcagacggcccagctcctgcagatgcacctcgggagccctgctcagcccaggacccgcacccccaggtctccactgccagcagcaccctgggcccccactcgccagagccactgggggtctgcaggaaccccccgcccccctgctccccaatgctggaggccagcgatgatgaggccctgttggtctgttgaccgctgggctcgctggtgaccgccacagccccgctttgtaaccagggaatacacagtcatttctaccctgcctctgcgtcctttcttatggagaggccctccggggaccccagcggaggggctggcccctaagccagctggctgcactggtgggcgggagctgtgggactgaacggcgggggggagaagagtggagtggtgagcccgtctgcagggtcccattgtacacaagcaccctggggtctcacttctctccccccactccattctgggaacccatttccagagaagcaggggaccagagcctttttgcttcatctgccctgcagtggcaacagctgcccctagagctgggagttgtcatgaggatggggccgggccatggggacgctgggtctcatccgtggtgactattttgctcacgcctcaccctcttcctgtccagcaaggcctctggaggacctgggttgggtggctcctgccaaaccctcatgcccctggccaggcaggcgccctttgccctccctgaaggtccaatctcctgggcaccgtggaagggctggggtgtgtgcctgctgtacatgaagcccctggagttccctgcaggcctcaaagcccccaggacatgctgctctgtgctttctggggacagagaggccgaggcaccaacagcagtggccacgtctgttccatcctatctcagggcctcggtttccccacctgtaagccagggtgagactgtgggctctgaagtcctgaccttcactctgtggtgatttacgggaagaaagacaatcccagcctggagcccctgagctctcctgggtggccgagctcagactggcatcgaggggcctggggtaggggcggactgagctgctaccccatcct

SEQ ID NO: 363009 - DNA, 824 bp, Homo sapiens
  misc_feature (5)..(6): n is a, c, g, or t
ggcgnngcccgcgggcggccgggcccggcatggagaagcgcgcggccgcggggctggagggcgcgccgggcgcccgggcgcagctggccgtcgtctgtctggtgaacatctttctcaccgggagactcagcagtgcggttcctgccttagcggcctgcagtgggaagctggagcagcacacggagcggcgtggggtcatctacagcccggcctggcccctcaactacccgccaggcaccaactgcagctggtacatccagggcgaccgtggtgacatgattaccatcaggtaggggcacccgggggtgtcggaaggaatcaatgtgggcccacgtgcatggggtgggtgagaatgtgtgtgtgtgagcaggtgtggagggcacacgcctgagggtgtacatgtgtgtgagcaggtgtgggatcatgtgcatgtgtgtgagcatatgagtgaggcgtgtgtgagcactcgtgtgaacaggtgtatgggtgtgtgcatgtgtgtgagcatttgtgagtaggtgtgtgtgcatgcagatgtgtgtgtgtgaggtaggcgtgtgtaggtatttgagcaggtatgtggtgtgtgcatgcatgtgaacacatgtaagtaggtgtgtgtgcatatgtgtgtgtgtgcatgtatgtgaacacatgtgtgcttgtgtacatggaaaagcccatgtcggagaagacataaaggacacatgtgagagactgcatgtgtgagcacatgtatgtgcacgagccatgcctgcaaaggtgcagagagcgtgtatgtgcgcatgcatgtaagataacaggtgtaaccatgtgtgaaccgt

SEQ ID NO: 363010 - DNA, 834 bp, Homo sapiens
  misc_feature (5)..(6): n is a, c, g, or t
ggcgnngcccgcgggcggccgggcccggcatggagaagcgcgcggccgcggggctggagggcgcgccgggcgcccgggcgcagctggccgtcgtctgtctggtgaacatctttctcaccgggagactcagcagtgcggttcctgccttagaggtaagtaagcactttctctccttcctccactccttcagtcccttttgggtgagtggtccctgaagacaggccttcagggtcctggcactaccccgagttcctgtgtgcatcttttctacatcacaaaggagctgtttggctttggacaggcttcaacttgtctgagcctcagtttcctcatctgtaaagtgggtgaaataacaaggtctactcaaaacctgtctcttagtattccatgagccagtgaggcaagctcttagtgtggtgcctggcacgtggtggctttataccaccggcaagctgccgagggtcccgtggaattgacatcttgtgcctcattgcaggccatgagcttcctaggatttaatttataggagtatgactgaggggtgacacagagaggcccatgccagggaaagaaggctttattaattttcttgaaaggaggggacatgctacgccatgcagggccacctgggaattactagatttggacaagcaggagcaggggtggaagaaaggtgtaagttagaagctgcatcacagcttccgtgggaaagtctcgacatccaggtgctgtggctcacgcctgtgatcccagcatttgggaggctgaggcaagagaatgcttgagccctggagtttgagaccagcctgagcaacatagtgaaactccatctct

SEQ ID NO: 363011 - DNA, 382 bp, Homo sapiens
acccctcgcccttgagctccactggccgctgcagggtcactgtggtggtgatcaggccccgctccggacagcgactagcccgccaggcaccaactgcagctggtacatccagggcgaccgtggtgacatgattaccatcagcttccgcaactttgacgtggaggagtcccaccagtgctccctggactggctcctgctgggcccagcagccccaccccgccaggaggccttccgcctctgtggctccgccatcccacctgccttcatctctgcccgcgaccatgtctggattttcttccactcagacgcctccagctccggccaggcccagggcttccgtctgtcttacatccgaggtgatggaggctgcagggcaggcagg

SEQ ID NO: 363012 - DNA, 2451 bp, Homo sapiens
tcctttgttcagatttcgtcacgaatgaaatctaactttgagccaacccctgcaggacacccaacaccttcatgattctgactctggctcccgcctcaacatgggtcctgcctcacatggccctcacctgtacaccccctctcctcccaacaagcgcctggccaggcgcttgttgggacagcttttctggttgttgccggcctgcagtgggaagctggagcagcacacggagcggcgtggggtcatctacagcccggcctggcccctcaactacccgccaggcaccaactgcagctggtacatccagggcgaccgtggtgacatgattaccatcagcttccgcaactttgacgtggaggagtcccaccagtgctccctggactggctcctgctgggcccagcagccccaccccgccaggaggccttccgcctctgtggctccgccatcccacctgccttcatctctgcccgcgaccatgtctggattttcttccactcagacgcctccagctccggccaggcccagggcttccgtctgtcttacatccgagggaagctgggccaggcatcctgccaggcagatgagttccgctgtgacaacggcaagtgcctgcccggcccgtggcagtgcaacacggtggacgagtgtggagacggctctgatgagggcaactgctcggcgcccgcctccgagcctccaggcagcctgtgccccggggggaccttcccatgcagcggggcgcgctccacgcgctgcctgcctgtggagcggcgctgtgacggcttgcaggactgcggcgacggctcggatgaggcgggctgccccgacctggcgtgcggccggcggctgggcagcttctacggctcctttgcctccccagacctgttcggcgccgctcgcgggccctcagaccttcactgcacgtggctggtggacacacaggactcccggcgggtgctgctgcagctggaactgcggctgggctatgacgactacgtgcaggtatacgagggcctgggcgagcgcggggaccgcctgctgcagacgctgtcctaccgcagcaaccaccggcccgtgagcctggaggccgcccagggccgcctcaccgtggcctaccacgcgcgcgcccgcagcgccggccacggcttcaatgccacctaccaggtgaagggctattgcctcccctgggagcagccgtgcgggagcagtagtgacagtgacgggggcagcctgggcgaccagggctgcttctcagagccacagcgctgtgatggctggtggcattgtgccagcggccgagacgagcagggctgccctgcctgcccgcccgaccagtacccctgcgagggtggcagtggtctgtgctacacgcctgccgaccgctgcaacaaccagaaaagctgtcccgacggcgccgacgagaagaactgcttctcctgccagcccggcaccttccactgcggtaccaacctgtgcatcttcgagacgtggcgctgtgacggccaggaagactgccaggacggcagcgatgagcatgggtgcctggccgccgtgccccgcaaggtcatcacggcggcgctcattggcagcctggtgtgtggcctgctgctggtcatcgcgctgggctgcgccttcaagctctactcactgcgcacgcaggaatacagggccttcgagacccagatgacgcgcctggaggctgagttcgtgcggcgggaggcacccccatcctatggtcagctcatcgcccagggcctcattccacccgtggaggactttcctgtctacagtgcgtcccaggcctctgtgctgcagaatcttcgcacagccatgcggagacagatgcgtcggcacgcctcccgccgggggccctcccgccgccgcctcggccgcctctggaaccggctctttcaccggccgcgggcgccccgaggccagatcccactgctgaccgcagcacgcccctcacagaccgtgctgggcgatggcttcctccagcctgctccaggggctgcccccgaccccccagcaccgctcatggacacaggcagcaccagggcggccggagacaggccccccagtgcccccggccgtgcaccggaggtgggaccttcagggccacccttgccctcgggcctgcgagacccagagtgcaggcccgtggacaaggacagaaaggtctgcagggagccactggcagacggcccagctcctgcagatgcacctcgggagccctgctcagcccaggacccgcacccccaggtctccactgccagcagcaccctgggcccccactcgccagagccactgggggtctgcaggaaccccccgcccccctgctccccaatgctggaggccagcgatgatgaggccctgttggtctgttgaccgctgggctcgctggtgaccgccacagccccgctttgtaaccagggaatacacagtcattt

SEQ ID NO: 363013 - DNA, 2653 bp, Homo sapiens
  misc_feature (5)..(6): n is a, c, g, or t
ggcgnngcccgcgggcggccgggcccggcatggagaagcgcgcggccgcggggctggagggcgcgccgggcgcccgggcgcagctggccgtcgtctgtctggtgaacatctttctcaccgggagactcagcagtgcggttcctgccttagcggcctgcagtgggaagctggagcagcacacggagcggcgtggggtcatctacagcccggcctggcccctcaactacccgccaggcaccaactgcagctggtacatccagggcgaccgtggtgacatgattaccatcagcttccgcaactttgacgtggaggagtcccaccagtgctccctggactggctcctgctgggcccagcagccccaccccgccaggaggccttccgcctctgtggctccgccatcccacctgccttcatctctgcccgcgaccatgtctggattttcttccactcagacgcctccagctccggccaggcccagggcttccgtctgtcttacatccgagggaagctgggccaggcatcctgccaggcagatgagttccgctgtgacaacggcaagtgcctgcccggcccgtggcagtgcaacacggtggacgagtgtggagacggctctgatgagggcaactgctcggcgcccgcctccgagcctccaggcagcctgtgccccggggggaccttcccatgcagcggggcgcgctccacgcgctgcctgcctgtggagcggcgctgtgacggcttgcaggactgcggcgacggctcggatgaggcgggctgccccgacctggcgtgcggccggcggctgggcagcttctacggctcctttgcctccccagacctgttcggcgccgctcgcgggccctcagaccttcactgcacgtggctggtggacacacaggactcccggcgggtgctgctgcagctggaactgcggctgggctatgacgactacgtgcaggtatacgagggcctgggcgagcgcggggaccgcctgctgcagacgctgtcctaccgcagcaaccaccggcccgtgagcctggaggccgcccagggccgcctcaccgtggcctaccacgcgcgcgcccgcagcgccggccacggcttcaatgccacctaccaggtgaagggctattgcctcccctgggagcagccgtgcgggagcagtagtgacagtgacgggggcagcctgggcgaccagggctgcttctcagagccacagcgctgtgatggctggtggcattgtgccagcggccgagacgagcagggctgccctgcctgcccgcccgaccagtacccctgcgagggtggcagtggtctgtgctacacgcctgccgaccgctgcaacaaccagaaaagctgtcccgacggcgccgacgagaagaactgcttctcctgccagcccggcaccttccactgcggtaccaacctgtgcatcttcgagacgtggcgctgtgacggccaggaagactgccaggacggcagcgatgagcatgggtgcctggccgccgtgccccgcaaggtcatcacggcggcgctcattggcagcctggtgtgtggcctgctgctggtcatcgcgctgggctgcgccttcaagctctactcactgcgcacgcaggaatacaggacccgcacccccaggtctccactgccagcagcaccctgggcccccactcgccagagccactgggggtctgcaggaaccccccgcccccctgctccccaatgctggaggccagcgatgatgaggccctgttggtctgttgaccgctgggctcgctggtgaccgccacagccccgctttgtaaccagggaatacacagtcatttctaccctgcctctgcgtcctttcttatggagaggccctccggggaccccagcggaggggctggcccctaagccagctggctgcactggtgggcgggagctgtgggactgaacggcgggggggagaagagtggagtggtgagcccgtctgcagggtcccattgtacacaagcaccctggggtctcacttctctccccccactccattctgggaacccatttccagagaagcaggggaccagagcctttttgcttcatctgccctgcagtggcaacagctgcccctagagctgggagttgtcatgaggatggggccgggccatggggacgctgggtctcatccgtggtgactattttgctcacgcctcaccctcttcctgtccagcaaggcctctggaggacctgggttgggtggctcctgccaaaccctcatgcccctggccaggcaggcgccctttgccctccctgaaggtccaatctcctgggcaccgtggaagggctggggtgtgtgcctgctgtacatgaagcccctggagttccctgcaggcctcaaagcccccaggacatgctgctctgtgctttctggggacagagaggccgaggcaccaacagcagtggccacgtctgttccatcctatctcagggcctcggtttccccacctgtaagccagggtgagactgtgggctctgaagtcctgaccttcactctgtggtgatttacgggaagaaagacaatcccagcctggagcccctgagctctcctgggtggccgagctcagactggcatcgaggggcctggggtaggggcggactgagctgctaccccatcct

SEQ ID NO: 363014 - DNA, 570 bp, Homo sapiens
  misc_feature (5)..(6): n is a, c, g, or t
ggcgnngcccgcgggcggccgggcccggcatggagaagcgcgcggccgcggggctggagggcgcgccgggcgcccgggcgcagctggccgtcgtctgtctggtgaacatctttctcaccgggagactcagcagtgcggttcctgccttagaccgctcatggacacaggcagcaccagggcggccggagacaggccccccagtgcccccggccgtgcaccggaggtgggaccttcagggccacccttgccctcgggcctgcgagacccagagtgcaggcccgtggacaaggacagaaaggtctgcagggagccactggcagacggcccagctcctgcagatgcacctcgggagccctgctcagcccaggacccgcacccccaggtctccactgccagcagcaccctgggcccccactcgccagagccactgggggtctgcaggaaccccccgcccccctgctccccaatgctggaggccagcgatgatgaggccctgttggtctgttgaccgctgggctcgctggtgaccgccacagccccgctttgtaaccagggaatacacagtcattt

SEQ ID NO: 363015 - DNA, 702 bp, Homo sapiens
gcttgtctcctcatctccttgtctgcttccggagcctgagtttcagggtttatatgggcacaggataggtggcatggcaggccaaaaacaacttttggggtgcaaaaacaggaatccctgtccccatttagggctgtagattcccgggcttgagggtgaggcctttgccaggaaactaccttcttctacccagggtttccctgtcttctgtccatatcacaatgttcttagaaggataagaaaagacacaaaagaaagcctgacaagtttgctaatgtctggggtatatgagagttggctcgccccatgatgggctccaattaaattcatctctgtcttcctcatgtgccattcttccctggctcacattagaaattcaggagcggagaacaaagcagccaagtttgtttttccagagcaagaggggtctggtgaaagcagtcctgacagctgcaccgtgtgtcttggtgaactaacggcttttacgtgtttcattcaagactgtttagtctgcgtgctaaggattcatatatcagtttttggctctagtgacattgaggtagtttgatttccaatgatttcgttgtcatctgtatttgcctacagtgaaagaaataactgagagtcgagttagtgcagggtcacttaaaagcttgcctttcttcattcactctccttaatgatattgccagtgcttctaaa

SEQ ID NO: 363016 - DNA, 466 bp, Homo sapiens
ccagtgctgtgctgagggtaagggcacccagcgcaagccccagcgcagctgcctgtccagccctgcctcagctccttgcacagaatgagcttgaagtgctcccctctgctcggttctagttctgcctctgacagttttgctctttggttcacaaggcttcctaaactcaggattgctttgtgggtctgttctttgggatgagaggccagggcaggtgcaagctatgccttcactcctttgtccctgccttcctccttcctgtaccccagctacagccccgttgggaagaatgtgtcgttagtcacaaagcattgcagatgtgtctaagaaatgccacgctggggccgggcgtggtgctcacacctgtaatcccagcacttcgagaggctgaggcaggcggattgcctgagctcaggatttcaagaccaccctgggtaacatggtgaaaccctgtctctactaaaaa

SEQ ID NO: 363017 - DNA, 110 bp, Homo sapiens
acctcatctatactacaaattaaaaaaaaatttagctgggcatggtggtgcacacctaagtcgtccctagtagtagtccctagctactcaggaggatcactggagttcag

SEQ ID NO: 363018 - DNA, 2098 bp, Homo sapiens
caatcgcgaaagtgtgtgaacgtgctgccgccgatcagtcacccagtcggctggagtcggaggcgatatttctaggggtgtacttgttggggtcagggtaagcaccagccacaaaaacctacaaaagaagggaaattactgtctttaaatattaaaaaaaaacaagatccatgagtgggcatcgatcaacaaggaaaagatgtggagattctcacccggagtccccagtgggcttcgggcatatgagtactacaggatgtgtattaaataaattgtttcagttaccaacaccaccattgtcaagacaccaactaaagcggctagaagaacacagatatcaaagtgctggacggtccctgcttgagcccttaatgcaagggtattgggaatggctcgttagaagagttccctcctggattgccccaaatctcatcaccatcattggactgtcaataaacatctgtacaactattttattagtcttctactgccctacagctacagagcaggcacctctgtgggcatatattgcttgtgcctgtggccttttcatttaccagtctttggatgctattgatgggaaacaggcaagaagaaccaatagtagttctcctctgggagaactttttgatcatggctgtgattcactatcaacagtttttgtggttcttggaacttgtattgcagtgcagctggggacaaaccctgattggatgtttttttgttgttttgcggggacatttatgttctattgtgcgcactggcaaacgtatgtttctggaacattgcgatttggaataattgatgtgactgaagtgcaaatcttcataataatcatgcatttgctggcagtgattggaggaccacctttttggcaatctatgattccagtgctgaatattcaaatgaaaatttttcctgcactttgtactgtagcagggaccatattttcctgtacaaattacttccgtgtaatcttcacaggtggtgttggcaaaaatggatcaacaatagcaggaacaagtgtcctttctccttttctccatattggatcagtgattacattagctgcaatgatctacaagaaatctgcagttcagctttttgaaaagcatccctgtctttatatactgacatttggttttgtgtctgctaaaatcactaataagcttgtggttgcacacatgacgaaaagtgaaatgcatttgcatgacacagcattcataggtccggcacttttgtttctggaccagtattttaacagctttattgatgaatatattgtactttggattgccctggttttctctttctttgatttgatccgctactgtgtcagtgtttgcaatcagattgcgtctcacctgcacatacatgtcttcagaatcaaggtctctacagctcattctaatcatcattaatgatgtaattggtatataggaacatcatgttttctgcaggaaagaaagtaacatattaaggagaatgggggtggataagaacaaatataatttataataatcaatgttgtataacttttattctttattattggtaacacgccctaactatcctgtgtgagaatgggaatttcaagtcccatcttgtaaattgtatatgttgtcatgcagggtttgggccaagaaagcatgcagaaaaaaatgccatgtgattgtaattatcctggattcagaataatactgtgatggggagccagatccgcagtggtggagagttctaatgttgactgtttgcaggccaaaagatgattgctttataattttaacaaatcattgtcttttagtaacatccttgtttagtgtcttctcaagctttctttactgaggaattcagcttgtgacacagatacatcccactagcttgtgaggtggaactagtaataaagaccttgaatttggattgaaaagtttcctatctttacattgttgaggaagtcctttttttttttttttttttttaattgctcaagaaatgattctctcacaggcttgggaaatcctgttagcatgcagaataatgtggtaactttgtcaatttcccattttatttttttaaataaatatatgatctaaaagcc

SEQ ID NO: 363019 - DNA, 1104 bp, Homo sapiens
taagagtcaaatcaagaaatactcaaaacttctgttgaataaatggtagttggctgtcttgaaaggcaacaaccagctgactgcaggatggcaggatggcaggcttcctattatttattttaaattgcagtcatttttgcgttgtagtttgaggtctagacttttataggaagtctttttctatgtatgtcacccataacaatatctgtttaaaaaaaaaaagacagttatcaatctgaagcaagtaagtcggtccgtctggggattatatagcccctttgtttttcttttttggctgtctgccttgtaatgatttgctgatcattagtactagtgtctctaagtcaggaaaatactcgaagaaatgttgaagtattttagttgccttcaagaactttgcttccactaagtgatttggtaaaaaaaaaaaaaaaaagagagattgaaattatggggtaagagattatgtaacagattatatcctacttttctgttacaatagataactgagagaagattatgcatttacagcatatctttttgtctcatctaaaatcatttccagctcagttgtttgctattcatattatttggttttcatcgtgatctttcttctgcagtttttgtggttcttggaacttgtattgcagtgcagctggggacaaaccctgattggatgtttttttgttgttttgcggggacatttatgttctattgtgcgcactggcaaacgtatgtttctggaacattgcgatttggaatgtaagtaatacttaatggtaatttttgttttctctttcacatatggagaatgttgccttataagtatttgagtattagaaattgatcaaatcactaagttagtttaataaattaaaaaatttatgcttcattattatagctatttcctaatagtctctgcatatgtccctctattatacttttttaaaaggagatatcagaacctcccagccagtattttaaaagcaatacaaaaagcagtagcccctcatctttgtctttcccacagaaaaattcactttttttccccaccattatttaccttaattccatttttattttcacatataaaaatgcatttcc

SEQ ID NO: 363020 - DNA, 584 bp, Homo sapiens
taatttggttattcagtttatttacattctcagtctcaatctggacactcaaattaaggcttcttgtgaaaagcatcttttgtagggttagttgacatgatacatccctttctttctcagacgcatttcatattgttgggtttttagttttgggaattcaacagctattcctaaataattattggaagttgatatctgagcacaatatgatttactatgtagttcacaattgtcctcttatgaaaatgcctacgttattctgttttattcataggttgcacacatgacgaaaagtgaaatgcatttgcatgacacagcattcataggtccggcacttttgtttctggaccagtattttaacagctttattgatgaatatattgtactttggattgccctggtaggtattgtactaagtcttatttcatggtttgagggtttgaaggttgcttgttttcttattttgatgacccagtcatgaaagatcgttcatataattgtaatgatttggaatgtcagaaatccacataaatggggctgtgtgagagttctatggctttatatttgagccttttattttttgc

SEQ ID NO: 363021 - DNA, 3233 bp, Homo sapiens
caatcgcgaaagtgtgtgaacgtgctgccgccgatcagtcacccagtcggctggagtcggaggcgatatttctaggggtgtacttgttggggtcagggtaagcaccagccacaaaaacctacaaaagaagggaaattactgtctttaaatattaaaaaaaaacaagatccatgagtgggcatcgatcaacaaggaaaagatgtggagattctcacccggagtccccagtgggcttcgggcatatgagtactacaggatgtgtattaaataaattgtttcagttaccaacaccaccattgtcaagacaccaactaaagcggctagaagaacacagatatcaaagtgctggacggtccctgcttgagcccttaatgcaagggtattgggaatggctcgttagaagagttccctcctggattgccccaaatctcatcaccatcattggactgtcaataaacatctgtacaactattttattagtcttctactgccctacagctacagagcaggcacctctgtgggcatatattgcttgtgcctgtggccttttcatttaccagtctttggatgctattgatgggaaacaggcaagaagaaccaatagtagttctcctctgggagaactttttgatcatggctgtgattcactatcaacagtttttgtggttcttggaacttgtattgcagtgcagctggggacaaaccctgattggatgtttttttgttgttttgcggggacatttatgttctattgtgcgcactggcaaacgtatgtttctggaacattgcgatttggaataattgatgtgactgaagtgcaaatcttcataataatcatgcatttgctggcagtgattggaggaccacctttttggcaatctatgattccagtgctgaatattcaaatgaaaatttttcctgcactttgtactgtagcagggaccatattttcctgtacaaattacttccgtgtaatcttcacaggtggtgttggcaaaaatggatcaacaatagcaggaacaagtgtcctttctccttttctccatattggatcagtgattacattagctgcaatgatctacaagaaatctgcagttcagctttttgaaaagcatccctgtctttatatactgacatttggttttgtgtctgctaaaatcactaataagcttgtggttgcacacatgacgaaaagtgaaatgcatttgcatgacacagcattcataggtccggcacttttgtttctggaccagtattttaacagctttattgatgaatatattgtactttggattgccctggttttctctttctttgatttgatccgctactgtgtcagtgtttgcaatcagattgcgtctcacctgcacatacatgtcttcagaatcaaggtctctacagctcattctaatcatcattaatgatgtaattggtatataggaacatcatgttttctgcaggaaagaaagtaacatattaaggagaatgggggtggataagaacaaatataatttataataatcaatgttgtataacttttattctttattattggtaacacgccctaactatcctgtgtgagaatgggaatttcaagtcccatcttgtaaattgtatatgttgtcatgcagggtttgggccaagaaagcatgcagaaaaaaatgccatgtgattgtaattatcctggattcagaataatactgtgatggggagccagatccgcagtggtggagagttctaatgttgactgtttgcaggccaaaagatgattgctttataattttaacaaatcattgtcttttagtaacatccttgtttagtgtcttctcaagctttctttactgaggaattcagcttgtgacacagatacatcccactagcttgtgaggtggaactagtaataaagaccttgaatttggattgaaaagtttcctatctttacattgttgaggaagtcctttttttttttttttttttttaattgctcaagaaatgattctctcacaggcttgggaaatcctgttagcatgcagaataatgtggtaactttgtcaatttcccattttatttttttaaataaatatatgatctaaaagccaactttttctcagttttactcagtggaaagataaactaagttttaatgttatttttttaaatttaagcaaaatttatttctgttctttaataaataagaaaatgtggtccactgcattgttgtgatgtgtcttgtgacatttctattttgtagaaactttaactgtgtgattatcaatcatttagaaatctcatacccttcccctaaattttcagcaagtgcctgggcctctctaagaggtcactttgtactctccttttctggcagtctcctctttggtatctgtactatcgtttgaaatgggaaccagatatgtttccattttatacagataattcagttgcttgaagaagagggacacaggagaaaagatttaaactattggctaaaatgaggtgtcttattattgattttcatctatatcttgtcccataatcaggaataaacagtagctacactgccttgtatggcagccagagcgctgcttgcttgcacttttaatgattccatcaataccatgtagattgaattagcaaggagaagtaaacctttcatttctttgccagactatattgggaaatgaaaatccgtcattacttttccttgctagcaattgttcgaatatctgggataaagaaatacatacaggaaaatgttagggcagaccaagtattaaaagctaggacagagcaggacaaaggaggaaggataattctacttgtttggcaaagttacatcagttgtcttactgacacatcaggtactatctatagtggaaattgaggcccggagaggttaaatggcatgccagtgtcacttgctatttttcagaacaaaaattagaatccagatctgaatcctggtgcagtgttctctcctatgccctactgggctttagtgggctaaagttctgaagcaagatgttaagggctaattgaaatgtgtttattctcctagattctttttcagcatagatggaatctgaaaagcactcagatatttagtgtgtgcttccttcagccctaaatacagcattagcatcaaatcaagggtacatttgtaataaacctcagcaaaccttacctgaagaaccttttaagaaagtacagatttccaggtcctatcactagagatg

SEQ ID NO: 363022 - DNA, 3257 bp, Homo sapiens
tggagacattggggtggcggagcgccggcgcgggagccggggggctgttgtgtgggagcccaaggtaagcaccagccacaaaaacctacaaaagaagggaaattactgtctttaaatattaaaaaaaaacaagatccatgagtgggcatcgatcaacaaggaaaagatgtggagattctcacccggagtccccagtgggcttcgggcatatgagtactacaggatgtgtattaaataaattgtttcagttaccaacaccaccattgtcaagacaccaactaaagcggctagaagaacacagatatcaaagtgctggacggtccctgcttgagcccttaatgcaagggtattgggaatggctcgttagaagagttccctcctggattgccccaaatctcatcaccatcattggactgtcaataaacatctgtacaactattttattagtcttctactgccctacagctacagagcaggcacctctgtgggcatatattgcttgtgcctgtggccttttcatttaccagtctttggatgctattgatgggaaacaggcaagaagaaccaatagtagttctcctctgggagaactttttgatcatggctgtgattcactatcaacagtttttgtggttcttggaacttgtattgcagtgcagctggggacaaaccctgattggatgtttttttgttgttttgcggggacatttatgttctattgtgcgcactggcaaacgtatgtttctggaacattgcgatttggaataattgatgtgactgaagtgcaaatcttcataataatcatgcatttgctggcagtgattggaggaccacctttttggcaatctatgattccagtgctgaatattcaaatgaaaatttttcctgcactttgtactgtagcagggaccatattttcctgtacaaattacttccgtgtaatcttcacaggtggtgttggcaaaaatggatcaacaatagcaggaacaagtgtcctttctccttttctccatattggatcagtgattacattagctgcaatgatctacaagaaatctgcagttcagctttttgaaaagcatccctgtctttatatactgacatttggttttgtgtctgctaaaatcactaataagcttgtggttgcacacatgacgaaaagtgaaatgcatttgcatgacacagcattcataggtccggcacttttgtttctggaccagtattttaacagctttattgatgaatatattgtactttggattgccctggttttctctttctttgatttgatccgctactgtgtcagtgtttgcaatcagattgcgtctcacctgcacatacatgtcttcagaatcaaggtctctacagctcattctaatcatcattaatgatgtaattggtatataggaacatcatgttttctgcaggaaagaaagtaacatattaaggagaatgggggtggataagaacaaatataatttataataatcaatgttgtataacttttattctttattattggtaacacgccctaactatcctgtgtgagaatgggaatttcaagtcccatcttgtaaattgtatatgttgtcatgcagggtttgggccaagaaagcatgcagaaaaaaatgccatgtgattgtaattatcctggattcagaataatactgtgatggggagccagatccgcagtggtggagagttctaatgttgactgtttgcaggccaaaagatgattgctttataattttaacaaatcattgtcttttagtaacatccttgtttagtgtcttctcaagctttctttactgaggaattcagcttgtgacacagatacatcccactagcttgtgaggtggaactagtaataaagaccttgaatttggattgaaaagtttcctatctttacattgttgaggaagtcctttttttttttttttttttttaattgctcaagaaatgattctctcacaggcttgggaaatcctgttagcatgcagaataatgtggtaactttgtcaatttcccattttatttttttaaataaatatatgatctaaaagccaactttttctcagttttactcagtggaaagataaactaagttttaatgttatttttttaaatttaagcaaaatttatttctgttctttaataaataagaaaatgtggtccactgcattgttgtgatgtgtcttgtgacatttctattttgtagaaactttaaaaaggagaactatgttcatttttcctgtcaatggtttttttgtgttgtagttgtcacctgtgtgattatcaatcatttagaaatctcatacccttcccctaaattttcagcaagtgcctgggcctctctaagaggtcactttgtactctccttttctggcagtctcctctttggtatctgtactatcgtttgaaatgggaaccagatatgtttccattttatacagataattcagttgcttgaagaagagggacacaggagaaaagatttaaactattggctaaaatgaggtgtcttattattgattttcatctatatcttgtcccataatcaggaataaacagtagctacactgccttgtatggcagccagagcgctgcttgcttgcacttttaatgattccatcaataccatgtagattgaattagcaaggagaagtaaacctttcatttctttgccagactatattgggaaatgaaaatccgtcattacttttccttgctagcaattgttcgaatatctgggataaagaaatacatacaggaaaatgttagggcagaccaagtattaaaagctaggacagagcaggacaaaggaggaaggataattctacttgtttggcaaagttacatcagttgtcttactgacacatcaggtactatctatagtggaaattgaggcccggagaggttaaatggcatgccagtgtcacttgctatttttcagaacaaaaattagaatccagatctgaatcctggtgcagtgttctctcctatgccctactgggctttagtgggctaaagttctgaagcaagatgttaagggctaattgaaatgtgtttattctcctagattctttttcagcatagatggaatctgaaaagcactcagatatttagtgtgtgcttccttcagccctaaatacagcattagcatcaaatcaagggtacatttgtaataaacctcagcaaaccttacctgaagaaccttttaagaaagtacagatttccaggtcctatcactagagatg

SEQ ID NO: 363023 - DNA, 3328 bp, Homo sapiens
cgaagcactaggccgtttgaggatctccgctccgctttgcctgggaccaggaaaagacgcgagagacggaactcggcatcaggcactgcttggggcaggaggagagtaggggaaaccaaggaagagaacagaaaggtaagcaccagccacaaaaacctacaaaagaagggaaattactgtctttaaatattaaaaaaaaacaagatccatgagtgggcatcgatcaacaaggaaaagatgtggagattctcacccggagtccccagtgggcttcgggcatatgagtactacaggatgtgtattaaataaattgtttcagttaccaacaccaccattgtcaagacaccaactaaagcggctagaagaacacagatatcaaagtgctggacggtccctgcttgagcccttaatgcaagggtattgggaatggctcgttagaagagttccctcctggattgccccaaatctcatcaccatcattggactgtcaataaacatctgtacaactattttattagtcttctactgccctacagctacagagcaggcacctctgtgggcatatattgcttgtgcctgtggccttttcatttaccagtctttggatgctattgatgggaaacaggcaagaagaaccaatagtagttctcctctgggagaactttttgatcatggctgtgattcactatcaacagtttttgtggttcttggaacttgtattgcagtgcagctggggacaaaccctgattggatgtttttttgttgttttgcggggacatttatgttctattgtgcgcactggcaaacgtatgtttctggaacattgcgatttggaataattgatgtgactgaagtgcaaatcttcataataatcatgcatttgctggcagtgattggaggaccacctttttggcaatctatgattccagtgctgaatattcaaatgaaaatttttcctgcactttgtactgtagcagggaccatattttcctgtacaaattacttccgtgtaatcttcacaggtggtgttggcaaaaatggatcaacaatagcaggaacaagtgtcctttctccttttctccatattggatcagtgattacattagctgcaatgatctacaagaaatctgcagttcagctttttgaaaagcatccctgtctttatatactgacatttggttttgtgtctgctaaaatcactaataagcttgtggttgcacacatgacgaaaagtgaaatgcatttgcatgacacagcattcataggtccggcacttttgtttctggaccagtattttaacagctttattgatgaatatattgtactttggattgccctggttttctctttctttgatttgatccgctactgtgtcagtgtttgcaatcagattgcgtctcacctgcacatacatgtcttcagaatcaaggtctctacagctcattctaatcatcattaatgatgtaattggtatataggaacatcatgttttctgcaggaaagaaagtaacatattaaggagaatgggggtggataagaacaaatataatttataataatcaatgttgtataacttttattctttattattggtaacacgccctaactatcctgtgtgagaatgggaatttcaagtcccatcttgtaaattgtatatgttgtcatgcagggtttgggccaagaaagcatgcagaaaaaaatgccatgtgattgtaattatcctggattcagaataatactgtgatggggagccagatccgcagtggtggagagttctaatgttgactgtttgcaggccaaaagatgattgctttataattttaacaaatcattgtcttttagtaacatccttgtttagtgtcttctcaagctttctttactgaggaattcagcttgtgacacagatacatcccactagcttgtgaggtggaactagtaataaagaccttgaatttggattgaaaagtttcctatctttacattgttgaggaagtcctttttttttttttttttttttaattgctcaagaaatgattctctcacaggcttgggaaatcctgttagcatgcagaataatgtggtaactttgtcaatttcccattttatttttttaaataaatatatgatctaaaagccaactttttctcagttttactcagtggaaagataaactaagttttaatgttatttttttaaatttaagcaaaatttatttctgttctttaataaataagaaaatgtggtccactgcattgttgtgatgtgtcttgtgacatttctattttgtagaaactttaaaaaggagaactatgttcatttttcctgtcaatggtttttttgtgttgtagttgtcacctgtgtgattatcaatcatttagaaatctcatacccttcccctaaattttcagcaagtgcctgggcctctctaagaggtcactttgtactctccttttctggcagtctcctctttggtatctgtactatcgtttgaaatgggaaccagatatgtttccattttatacagataattcagttgcttgaagaagagggacacaggagaaaagatttaaactattggctaaaatgaggtgtcttattattgattttcatctatatcttgtcccataatcaggaataaacagtagctacactgccttgtatggcagccagagcgctgcttgcttgcacttttaatgattccatcaataccatgtagattgaattagcaaggagaagtaaacctttcatttctttgccagactatattgggaaatgaaaatccgtcattacttttccttgctagcaattgttcgaatatctgggataaagaaatacatacaggaaaatgttagggcagaccaagtattaaaagctaggacagagcaggacaaaggaggaaggataattctacttgtttggcaaagttacatcagttgtcttactgacacatcaggtactatctatagtggaaattgaggcccggagaggttaaatggcatgccagtgtcacttgctatttttcagaacaaaaattagaatccagatctgaatcctggtgcagtgttctctcctatgccctactgggctttagtgggctaaagttctgaagcaagatgttaagggctaattgaaatgtgtttattctcctagattctttttcagcatagatggaatctgaaaagcactcagatatttagtgtgtgcttccttcagccctaaatacagcattagcatcaaatcaagggtacatttgtaataaacctcagcaaaccttacctgaagaaccttttaagaaagtacagatttccaggtcctatcactagagatg

SEQ ID NO: 363024 - DNA, 3253 bp, Homo sapiens
taagagtcaaatcaagaaatactcaaaacttctgttgaataaatggtagttggctgtcttgaaaggcaacaaccagctgactgcaggatggcaggatggcaggcttcctattatttattttaaattgcagtcatttttgcgttgtagtttgaggtctagacttttataggaagtctttttctatgtatgtcacccataacaatatctgtttaaaaaaaaaaagacagttatcaatctgaagcaagtaagtcggtccgtctggggattatatagcccctttgtttttcttttttggctgtctgccttgtaatgatttgctgatcattagtactagtgtctctaagtcaggaaaatactcgaagaaatgttgaagtattttagttgccttcaagaactttgcttccactaagtgatttggtaaaaaaaaaaaaaaaaagagagattgaaattatggggtaagagattatgtaacagattatatcctacttttctgttacaatagataactgagagaagattatgcatttacagcatatctttttgtctcatctaaaatcatttccagctcagttgtttgctattcatattatttggttttcatcgtgatctttcttctgcagtttttgtggttcttggaacttgtattgcagtgcagctggggacaaaccctgattggatgtttttttgttgttttgcggggacatttatgttctattgtgcgcactggcaaacgtatgtttctggaacattgcgatttggaataattgatgtgactgaagtgcaaatcttcataataatcatgcatttgctggcagtgattggaggaccacctttttggcaatctatgattccagtgctgaatattcaaatgaaaatttttcctgcactttgtactgtagcagggaccatattttcctgtacaaattacttccgtgtaatcttcacaggtggtgttggcaaaaatggatcaacaatagcaggaacaagtgtcctttctccttttctccatattggatcagtgattacattagctgcaatgatctacaagaaatctgcagttcagctttttgaaaagcatccctgtctttatatactgacatttggttttgtgtctgctaaaatcactaataagcttgtggttgcacacatgacgaaaagtgaaatgcatttgcatgacacagcattcataggtccggcacttttgtttctggaccagtattttaacagctttattgatgaatatattgtactttggattgccctggttttctctttctttgatttgatccgctactgtgtcagtgtttgcaatcagattgcgtctcacctgcacatacatgtcttcagaatcaaggtctctacagctcattctaatcatcattaatgatgtaattggtatataggaacatcatgttttctgcaggaaagaaagtaacatattaaggagaatgggggtggataagaacaaatataatttataataatcaatgttgtataacttttattctttattattggtaacacgccctaactatcctgtgtgagaatgggaatttcaagtcccatcttgtaaattgtatatgttgtcatgcagggtttgggccaagaaagcatgcagaaaaaaatgccatgtgattgtaattatcctggattcagaataatactgtgatggggagccagatccgcagtggtggagagttctaatgttgactgtttgcaggccaaaagatgattgctttataattttaacaaatcattgtcttttagtaacatccttgtttagtgtcttctcaagctttctttactgaggaattcagcttgtgacacagatacatcccactagcttgtgaggtggaactagtaataaagaccttgaatttggattgaaaagtttcctatctttacattgttgaggaagtcctttttttttttttttttttttaattgctcaagaaatgattctctcacaggcttgggaaatcctgttagcatgcagaataatgtggtaactttgtcaatttcccattttatttttttaaataaatatatgatctaaaagccaactttttctcagttttactcagtggaaagataaactaagttttaatgttatttttttaaatttaagcaaaatttatttctgttctttaataaataagaaaatgtggtccactgcattgttgtgatgtgtcttgtgacatttctattttgtagaaactttaaaaaggagaactatgttcatttttcctgtcaatggtttttttgtgttgtagttgtcacctgtgtgattatcaatcatttagaaatctcatacccttcccctaaattttcagcaagtgcctgggcctctctaagaggtcactttgtactctccttttctggcagtctcctctttggtatctgtactatcgtttgaaatgggaaccagatatgtttccattttatacagataattcagttgcttgaagaagagggacacaggagaaaagatttaaactattggctaaaatgaggtgtcttattattgattttcatctatatcttgtcccataatcaggaataaacagtagctacactgccttgtatggcagccagagcgctgcttgcttgcacttttaatgattccatcaataccatgtagattgaattagcaaggagaagtaaacctttcatttctttgccagactatattgggaaatgaaaatccgtcattacttttccttgctagcaattgttcgaatatctgggataaagaaatacatacaggaaaatgttagggcagaccaagtattaaaagctaggacagagcaggacaaaggaggaaggataattctacttgtttggcaaagttacatcagttgtcttactgacacatcaggtactatctatagtggaaattgaggcccggagaggttaaatggcatgccagtgtcacttgctatttttcagaacaaaaattagaatccagatctgaatcctggtgcagtgttctctcctatgccctactgggctttagtgggctaaagttctgaagcaagatgttaagggctaattgaaatgtgtttattctcctagattctttttcagcatagatggaatctgaaaagcactcagatatttagtgtgtgcttccttcagccctaaatacagcattagcatcaaatcaagggtacatttgtaataaacctcagcaaaccttacctgaagaaccttttaagaaagtacagatttccaggtcctatcactagagatg

SEQ ID NO: 363025 - DNA, 3223 bp, Homo sapiens
atgatttttaaaattcagtacaagtgtatttcattttaaatgatagatattgtgtttgcaaaaatgcatgacatcaatccactctgtcccccccacttcaggtaaataaacacattttcagtatactttatgaatatattattcacttttctgaaaagtacatttaaacttcaaaattttgtatgcacaatagtagaatctgtttgaatgtacttgacctgttttttcttctgcattgtgaatgccttcttaattgccttctgcttttactagctgcctgtatcctaacaatttggagttgggaactcttctgaatagaaattttatcttccattctctatactctgcagatttttatatctagtcgcaacatttctattatgattcatacttcctcacaacaattatgaatgttctacagatttagaggtagaattcaaaaacatatacaaggaaaaaggcagggtgcactccttttattaaaaggccagaacacatcctggttcactgttgcaagaccactgggatgcattaggtgaatctaacttagcttgtgacacaagttaataaagttgaatctggtttttttgttttttttaaggttgatggctgaagtgagattaatttctaaatagtctcaactcttgagacttgctatattgcttataatgaagaggaaaaggacactttcattactttacgtatttatgtaattggagggaatggaaagtttttgggaatatgaatcaaatattagactgttttcttattttagtttgtatatgttttaattgttttctctctctacccattaaagattccagtgctgaatattcaaatgaaaatttttcctgcactttgtactgtagcagggaccatattttcctgtacaaattacttccgtgtaatcttcacaggtggtgttggcaaaaatggatcaacaatagcaggaacaagtgtcctttctccttttctccatattggatcagtgattacattagctgcaatgatctacaagaaatctgcagttcagctttttgaaaagcatccctgtctttatatactgacatttggttttgtgtctgctaaaatcactaataagcttgtggttgcacacatgacgaaaagtgaaatgcatttgcatgacacagcattcataggtccggcacttttgtttctggaccagtattttaacagctttattgatgaatatattgtactttggattgccctggttttctctttctttgatttgatccgctactgtgtcagtgtttgcaatcagattgcgtctcacctgcacatacatgtcttcagaatcaaggtctctacagctcattctaatcatcattaatgatgtaattggtatataggaacatcatgttttctgcaggaaagaaagtaacatattaaggagaatgggggtggataagaacaaatataatttataataatcaatgttgtataacttttattctttattattggtaacacgccctaactatcctgtgtgagaatgggaatttcaagtcccatcttgtaaattgtatatgttgtcatgcagggtttgggccaagaaagcatgcagaaaaaaatgccatgtgattgtaattatcctggattcagaataatactgtgatggggagccagatccgcagtggtggagagttctaatgttgactgtttgcaggccaaaagatgattgctttataattttaacaaatcattgtcttttagtaacatccttgtttagtgtcttctcaagctttctttactgaggaattcagcttgtgacacagatacatcccactagcttgtgaggtggaactagtaataaagaccttgaatttggattgaaaagtttcctatctttacattgttgaggaagtcctttttttttttttttttttttaattgctcaagaaatgattctctcacaggcttgggaaatcctgttagcatgcagaataatgtggtaactttgtcaatttcccattttatttttttaaataaatatatgatctaaaagccaactttttctcagttttactcagtggaaagataaactaagttttaatgttatttttttaaatttaagcaaaatttatttctgttctttaataaataagaaaatgtggtccactgcattgttgtgatgtgtcttgtgacatttctattttgtagaaactttaaaaaggagaactatgttcatttttcctgtcaatggtttttttgtgttgtagttgtcacctgtgtgattatcaatcatttagaaatctcatacccttcccctaaattttcagcaagtgcctgggcctctctaagaggtcactttgtactctccttttctggcagtctcctctttggtatctgtactatcgtttgaaatgggaaccagatatgtttccattttatacagataattcagttgcttgaagaagagggacacaggagaaaagatttaaactattggctaaaatgaggtgtcttattattgattttcatctatatcttgtcccataatcaggaataaacagtagctacactgccttgtatggcagccagagcgctgcttgcttgcacttttaatgattccatcaataccatgtagattgaattagcaaggagaagtaaacctttcatttctttgccagactatattgggaaatgaaaatccgtcattacttttccttgctagcaattgttcgaatatctgggataaagaaatacatacaggaaaatgttagggcagaccaagtattaaaagctaggacagagcaggacaaaggaggaaggataattctacttgtttggcaaagttacatcagttgtcttactgacacatcaggtactatctatagtggaaattgaggcccggagaggttaaatggcatgccagtgtcacttgctatttttcagaacaaaaattagaatccagatctgaatcctggtgcagtgttctctcctatgccctactgggctttagtgggctaaagttctgaagcaagatgttaagggctaattgaaatgtgtttattctcctagattctttttcagcatagatggaatctgaaaagcactcagatatttagtgtgtgcttccttcagccctaaatacagcattagcatcaaatcaagggtacatttgtaataaacctcagcaaaccttacctgaagaaccttttaagaaagtacagatttccaggtcctatcactagagatg

SEQ ID NO: 363026 - DNA, 3703 bp, Homo sapiens
atgatttttaaaattcagtacaagtgtatttcattttaaatgatagatattgtgtttgcaaaaatgcatgacatcaatccactctgtcccccccacttcaggtaaataaacacattttcagtatactttatgaatatattattcacttttctgaaaagtacatttaaacttcaaaattttgtatgcacaatagtagaatctgtttgaatgtacttgacctgttttttcttctgcattgtgaatgccttcttaattgccttctgcttttactagctgcctgtatcctaacaatttggagttgggaactcttctgaatagaaattttatcttccattctctatactctgcagatttttatatctagtcgcaacatttctattatgattcatacttcctcacaacaattatgaatgttctacagatttagaggtagaattcaaaaacatatacaaggaaaaaggcagggtgcactccttttattaaaaggccagaacacatcctggttcactgttgcaagaccactgggatgcattaggtgaatctaacttagcttgtgacacaagttaataaagttgaatctggtttttttgttttttttaaggttgatggctgaagtgagattaatttctaaatagtctcaactcttgagacttgctatattgcttataatgaagaggaaaaggacactttcattactttacgtatttatgtaattggagggaatggaaagtttttgggaatatgaatcaaatattagactgttttcttattttagtttgtatatgttttaattgttttctctctctacccattaaagattccagtgctgaatattcaaatgaaaatttttcctgcactttgtactgtagcagggaccatattttcctgtacaaattacttccgtgtaatcttcacaggtggtgttggcaaaaatggatcaacaatagcagtaagtataccttaagattttcaacacttgtttacactaggacttggttttgttgtcattttgttttttatttcaaatgtataaaatcatttgttaatttataatttatacttagcctttaaagaaactaatgttcaaaacttcaattttatatatacttacccacatttatatgctttatatattcatacttttatgcatacacacacacaaacacacttattcacatgttttttaaagtatgagctgctttgtaaaaataagcctggtctcttaagtgaaatcctcagtttgtgcctaatgaatttatgctgctacttttcattagctcttctagtttgtgatttatagaaattgctgcctatcaggcaccatgaggttcctgaaagtttgagttgaactgtgaactgttctgcagcagatccatgtagtatctgatgagtactgaatactattaactcttctcttcactctgtacagggaacaagtgtcctttctccttttctccatattggatcagtgattacattagctgcaatgatctacaagaaatctgcagttcagctttttgaaaagcatccctgtctttatatactgacatttggttttgtgtctgctaaaatcactaataagcttgtggttgcacacatgacgaaaagtgaaatgcatttgcatgacacagcattcataggtccggcacttttgtttctggaccagtattttaacagctttattgatgaatatattgtactttggattgccctggttttctctttctttgatttgatccgctactgtgtcagtgtttgcaatcagattgcgtctcacctgcacatacatgtcttcagaatcaaggtctctacagctcattctaatcatcattaatgatgtaattggtatataggaacatcatgttttctgcaggaaagaaagtaacatattaaggagaatgggggtggataagaacaaatataatttataataatcaatgttgtataacttttattctttattattggtaacacgccctaactatcctgtgtgagaatgggaatttcaagtcccatcttgtaaattgtatatgttgtcatgcagggtttgggccaagaaagcatgcagaaaaaaatgccatgtgattgtaattatcctggattcagaataatactgtgatggggagccagatccgcagtggtggagagttctaatgttgactgtttgcaggccaaaagatgattgctttataattttaacaaatcattgtcttttagtaacatccttgtttagtgtcttctcaagctttctttactgaggaattcagcttgtgacacagatacatcccactagcttgtgaggtggaactagtaataaagaccttgaatttggattgaaaagtttcctatctttacattgttgaggaagtcctttttttttttttttttttttaattgctcaagaaatgattctctcacaggcttgggaaatcctgttagcatgcagaataatgtggtaactttgtcaatttcccattttatttttttaaataaatatatgatctaaaagccaactttttctcagttttactcagtggaaagataaactaagttttaatgttatttttttaaatttaagcaaaatttatttctgttctttaataaataagaaaatgtggtccactgcattgttgtgatgtgtcttgtgacatttctattttgtagaaactttaaaaaggagaactatgttcatttttcctgtcaatggtttttttgtgttgtagttgtcacctgtgtgattatcaatcatttagaaatctcatacccttcccctaaattttcagcaagtgcctgggcctctctaagaggtcactttgtactctccttttctggcagtctcctctttggtatctgtactatcgtttgaaatgggaaccagatatgtttccattttatacagataattcagttgcttgaagaagagggacacaggagaaaagatttaaactattggctaaaatgaggtgtcttattattgattttcatctatatcttgtcccataatcaggaataaacagtagctacactgccttgtatggcagccagagcgctgcttgcttgcacttttaatgattccatcaataccatgtagattgaattagcaaggagaagtaaacctttcatttctttgccagactatattgggaaatgaaaatccgtcattacttttccttgctagcaattgttcgaatatctgggataaagaaatacatacaggaaaatgttagggcagaccaagtattaaaagctaggacagagcaggacaaaggaggaaggataattctacttgtttggcaaagttacatcagttgtcttactgacacatcaggtactatctatagtggaaattgaggcccggagaggttaaatggcatgccagtgtcacttgctatttttcagaacaaaaattagaatccagatctgaatcctggtgcagtgttctctcctatgccctactgggctttagtgggctaaagttctgaagcaagatgttaagggctaattgaaatgtgtttattctcctagattctttttcagcatagatggaatctgaaaagcactcagatatttagtgtgtgcttccttcagccctaaatacagcattagcatcaaatcaagggtacatttgtaataaacctcagcaaaccttacctgaagaaccttttaagaaagtacagatttccaggtcctatcactagagatg

SEQ ID NO: 363027 - DNA, 2612 bp, Homo sapiens
gttctaagatgtctaccctcctccacccaagacagaatcgatcatctttgacacctacctgcttagtctcctgaatctgctactgagtgtaattccccttattggcaacaccactcaccagaattgatgtgactgaagtgcaaatcttcataataatcatgcatttgctggcagtgattggaggaccacctttttggcaatctatgattccagtgctgaatattcaaatgaaaatttttcctgcactttgtactgtagcagggaccatattttcctgtacaaattacttccgtgtaatcttcacaggtggtgttggcaaaaatggatcaacaatagcaggaacaagtgtcctttctccttttctccatattggatcagtgattacattagctgcaatgatctacaagaaatctgcagttcagctttttgaaaagcatccctgtctttatatactgacatttggttttgtgtctgctaaaatcactaataagcttgtggttgcacacatgacgaaaagtgaaatgcatttgcatgacacagcattcataggtccggcacttttgtttctggaccagtattttaacagctttattgatgaatatattgtactttggattgccctggttttctctttctttgatttgatccgctactgtgtcagtgtttgcaatcagattgcgtctcacctgcacatacatgtcttcagaatcaaggtctctacagctcattctaatcatcattaatgatgtaattggtatataggaacatcatgttttctgcaggaaagaaagtaacatattaaggagaatgggggtggataagaacaaatataatttataataatcaatgttgtataacttttattctttattattggtaacacgccctaactatcctgtgtgagaatgggaatttcaagtcccatcttgtaaattgtatatgttgtcatgcagggtttgggccaagaaagcatgcagaaaaaaatgccatgtgattgtaattatcctggattcagaataatactgtgatggggagccagatccgcagtggtggagagttctaatgttgactgtttgcaggccaaaagatgattgctttataattttaacaaatcattgtcttttagtaacatccttgtttagtgtcttctcaagctttctttactgaggaattcagcttgtgacacagatacatcccactagcttgtgaggtggaactagtaataaagaccttgaatttggattgaaaagtttcctatctttacattgttgaggaagtcctttttttttttttttttttttaattgctcaagaaatgattctctcacaggcttgggaaatcctgttagcatgcagaataatgtggtaactttgtcaatttcccattttatttttttaaataaatatatgatctaaaagccaactttttctcagttttactcagtggaaagataaactaagttttaatgttatttttttaaatttaagcaaaatttatttctgttctttaataaataagaaaatgtggtccactgcattgttgtgatgtgtcttgtgacatttctattttgtagaaactttaaaaaggagaactatgttcatttttcctgtcaatggtttttttgtgttgtagttgtcacctgtgtgattatcaatcatttagaaatctcatacccttcccctaaattttcagcaagtgcctgggcctctctaagaggtcactttgtactctccttttctggcagtctcctctttggtatctgtactatcgtttgaaatgggaaccagatatgtttccattttatacagataattcagttgcttgaagaagagggacacaggagaaaagatttaaactattggctaaaatgaggtgtcttattattgattttcatctatatcttgtcccataatcaggaataaacagtagctacactgccttgtatggcagccagagcgctgcttgcttgcacttttaatgattccatcaataccatgtagattgaattagcaaggagaagtaaacctttcatttctttgccagactatattgggaaatgaaaatccgtcattacttttccttgctagcaattgttcgaatatctgggataaagaaatacatacaggaaaatgttagggcagaccaagtattaaaagctaggacagagcaggacaaaggaggaaggataattctacttgtttggcaaagttacatcagttgtcttactgacacatcaggtactatctatagtggaaattgaggcccggagaggttaaatggcatgccagtgtcacttgctatttttcagaacaaaaattagaatccagatctgaatcctggtgcagtgttctctcctatgccctactgggctttagtgggctaaagttctgaagcaagatgttaagggctaattgaaatgtgtttattctcctagattctttttcagcatagatggaatctgaaaagcactcagatatttagtgtgtgcttccttcagccctaaatacagcattagcatcaaatcaagggtacatttgtaataaacctcagcaaaccttacctgaagaaccttttaagaaagtacagatttccaggtcctatcactagagatg

SEQ ID NO: 363028 - DNA, 2389 bp, Homo sapiens
taatttggttattcagtttatttacattctcagtctcaatctggacactcaaattaaggcttcttgtgaaaagcatcttttgtagggttagttgacatgatacatccctttctttctcagacgcatttcatattgttgggtttttagttttgggaattcaacagctattcctaaataattattggaagttgatatctgagcacaatatgatttactatgtagttcacaattgtcctcttatgaaaatgcctacgttattctgttttattcataggttgcacacatgacgaaaagtgaaatgcatttgcatgacacagcattcataggtccggcacttttgtttctggaccagtattttaacagctttattgatgaatatattgtactttggattgccctggttttctctttctttgatttgatccgctactgtgtcagtgtttgcaatcagattgcgtctcacctgcacatacatgtcttcagaatcaaggtctctacagctcattctaatcatcattaatgatgtaattggtatataggaacatcatgttttctgcaggaaagaaagtaacatattaaggagaatgggggtggataagaacaaatataatttataataatcaatgttgtataacttttattctttattattggtaacacgccctaactatcctgtgtgagaatgggaatttcaagtcccatcttgtaaattgtatatgttgtcatgcagggtttgggccaagaaagcatgcagaaaaaaatgccatgtgattgtaattatcctggattcagaataatactgtgatggggagccagatccgcagtggtggagagttctaatgttgactgtttgcaggccaaaagatgattgctttataattttaacaaatcattgtcttttagtaacatccttgtttagtgtcttctcaagctttctttactgaggaattcagcttgtgacacagatacatcccactagcttgtgaggtggaactagtaataaagaccttgaatttggattgaaaagtttcctatctttacattgttgaggaagtcctttttttttttttttttttttaattgctcaagaaatgattctctcacaggcttgggaaatcctgttagcatgcagaataatgtggtaactttgtcaatttcccattttatttttttaaataaatatatgatctaaaagccaactttttctcagttttactcagtggaaagataaactaagttttaatgttatttttttaaatttaagcaaaatttatttctgttctttaataaataagaaaatgtggtccactgcattgttgtgatgtgtcttgtgacatttctattttgtagaaactttaaaaaggagaactatgttcatttttcctgtcaatggtttttttgtgttgtagttgtcacctgtgtgattatcaatcatttagaaatctcatacccttcccctaaattttcagcaagtgcctgggcctctctaagaggtcactttgtactctccttttctggcagtctcctctttggtatctgtactatcgtttgaaatgggaaccagatatgtttccattttatacagataattcagttgcttgaagaagagggacacaggagaaaagatttaaactattggctaaaatgaggtgtcttattattgattttcatctatatcttgtcccataatcaggaataaacagtagctacactgccttgtatggcagccagagcgctgcttgcttgcacttttaatgattccatcaataccatgtagattgaattagcaaggagaagtaaacctttcatttctttgccagactatattgggaaatgaaaatccgtcattacttttccttgctagcaattgttcgaatatctgggataaagaaatacatacaggaaaatgttagggcagaccaagtattaaaagctaggacagagcaggacaaaggaggaaggataattctacttgtttggcaaagttacatcagttgtcttactgacacatcaggtactatctatagtggaaattgaggcccggagaggttaaatggcatgccagtgtcacttgctatttttcagaacaaaaattagaatccagatctgaatcctggtgcagtgttctctcctatgccctactgggctttagtgggctaaagttctgaagcaagatgttaagggctaattgaaatgtgtttattctcctagattctttttcagcatagatggaatctgaaaagcactcagatatttagtgtgtgcttccttcagccctaaatacagcattagcatcaaatcaagggtacatttgtaataaacctcagcaaaccttacctgaagaaccttttaagaaagtacagatttccaggtcctatcactagagatg

SEQ ID NO: 363029 - DNA, 2250 bp, Homo sapiens
atattgtctgtggctggtttcatggtacaatggcagagttaagcaactgtgacaaagacaataaggcccataaagcttaaaatatttgccatctgtctctctaacaaagagtttgtatgtgaaggaaagattgcaaggaaattgaattattttatggaatggaaggtgaatctgtagagagaacagagtccagtcctctttactttcaggaagcttagggagagcctaaacgggtgctgagaatgtctcttttctttccaggttttctctttctttgatttgatccgctactgtgtcagtgtttgcaatcagattgcgtctcacctgcacatacatgtcttcagaatcaaggtctctacagctcattctaatcatcattaatgatgtaattggtatataggaacatcatgttttctgcaggaaagaaagtaacatattaaggagaatgggggtggataagaacaaatataatttataataatcaatgttgtataacttttattctttattattggtaacacgccctaactatcctgtgtgagaatgggaatttcaagtcccatcttgtaaattgtatatgttgtcatgcagggtttgggccaagaaagcatgcagaaaaaaatgccatgtgattgtaattatcctggattcagaataatactgtgatggggagccagatccgcagtggtggagagttctaatgttgactgtttgcaggccaaaagatgattgctttataattttaacaaatcattgtcttttagtaacatccttgtttagtgtcttctcaagctttctttactgaggaattcagcttgtgacacagatacatcccactagcttgtgaggtggaactagtaataaagaccttgaatttggattgaaaagtttcctatctttacattgttgaggaagtcctttttttttttttttttttttaattgctcaagaaatgattctctcacaggcttgggaaatcctgttagcatgcagaataatgtggtaactttgtcaatttcccattttatttttttaaataaatatatgatctaaaagccaactttttctcagttttactcagtggaaagataaactaagttttaatgttatttttttaaatttaagcaaaatttatttctgttctttaataaataagaaaatgtggtccactgcattgttgtgatgtgtcttgtgacatttctattttgtagaaactttaaaaaggagaactatgttcatttttcctgtcaatggtttttttgtgttgtagttgtcacctgtgtgattatcaatcatttagaaatctcatacccttcccctaaattttcagcaagtgcctgggcctctctaagaggtcactttgtactctccttttctggcagtctcctctttggtatctgtactatcgtttgaaatgggaaccagatatgtttccattttatacagataattcagttgcttgaagaagagggacacaggagaaaagatttaaactattggctaaaatgaggtgtcttattattgattttcatctatatcttgtcccataatcaggaataaacagtagctacactgccttgtatggcagccagagcgctgcttgcttgcacttttaatgattccatcaataccatgtagattgaattagcaaggagaagtaaacctttcatttctttgccagactatattgggaaatgaaaatccgtcattacttttccttgctagcaattgttcgaatatctgggataaagaaatacatacaggaaaatgttagggcagaccaagtattaaaagctaggacagagcaggacaaaggaggaaggataattctacttgtttggcaaagttacatcagttgtcttactgacacatcaggtactatctatagtggaaattgaggcccggagaggttaaatggcatgccagtgtcacttgctatttttcagaacaaaaattagaatccagatctgaatcctggtgcagtgttctctcctatgccctactgggctttagtgggctaaagttctgaagcaagatgttaagggctaattgaaatgtgtttattctcctagattctttttcagcatagatggaatctgaaaagcactcagatatttagtgtgtgcttccttcagccctaaatacagcattagcatcaaatcaagggtacatttgtaataaacctcagcaaaccttacctgaagaaccttttaagaaagtacagatttccaggtcctatcactagagatg

SEQ ID NO: 363030 - DNA, 1597 bp, Homo sapiens
caatcgcgaaagtgtgtgaacgtgctgccgccgatcagtcacccagtcggctggagtcggaggcgatatttctaggggtgtacttgttggggtcagggtaagcaccagccacaaaaacctacaaaagaagggaaattactgtctttaaatattaaaaaaaaacaagatccatgagtgggcatcgatcaacaaggaaaagatgtggagattctcacccggagtccccagtgggcttcgggcatatgagtactacaggatgtgtattaaataaattgtttcagttaccaacaccaccattgtcaagacaccaactaaagcggctagaagaacacagatatcaaagtgctggacggtccctgcttgagcccttaatgcaagggtattgggaatggctcgttagaagagttccctcctggattgccccaaatctcatcaccatcattggactgtcaataaacatctgtacaactattttattagtcttctactgccctacagctacagagcaggcacctctgtgggcatatattgcttgtgcctgtggccttttcatttaccagtctttggatgctattgatgggaaacaggcaagaagaaccaatagtagttctcctctgggagaactttttgatcatggctgtgattcactatcaacagtttttgtggttcttggaacttgtattgcagtgcagctggggacaaaccctgattggatgtttttttgttgttttgcggggacatttatgttctattgtgcgcactggcaaacgtatgtttctggaacattgcgatttggaataattgatgtgactgaagtgcaaatcttcataataatcatgcatttgctggcagtgattggaggaccacctttttggcaatctatgattccagtgctgaatattcaaatgaaaatttttcctgcactttgtactgtagcagggaccatattttcctgtacaaattacttccgtgtaatcttcacaggtggtgttggcaaaaatggatcaacaatagcaggaacaagtgtcctttctccttttctccatattggatcagtgattacattagctgcaatgatctacaagaaatctgcagttcagctttttgaaaagcatccctgtctttatatactgacatttggttttgtgtctgctaaaatcactaataagcttgtggttgcacacatgacgaaaagtgaaatgcatttgcatgacacagcattcataggtccggcacttttgtttctggaccagtattttaacagctttattgatgaatatattgtactttggattgccctggttttctctttctttgatttgatccgctactgtgtcagtgtttgcaatcagattgcgtctcacctgcacatacatgtcttcagaatcaaggtctctacagctcattctaatcatcattaatgatgtaattggtatataggaacatcatgttttctgcaggaaagaaagtaacatattaaggagaatgggggtggataagaacaaatataatttataataatcaatgttgtataacttttatccaggtcagcggtggtacaacggtaatgagtagcgagcagcgcgcgggatgcttc

SEQ ID NO: 363031 - DNA, 1270 bp, Homo sapiens
  misc_feature (12)..(12): n is a, c, g, or t
tactactactantaattcgcggccgcgtcgaccaatttcccattttatttttttaaataaatatatgatctaaaagccaactttttctcagttttactcagtggaaagataaactaagttttaatgttatttttttaaatttaagcaaaatttatttctgttctttaataaataagaaaatgtggtccactgcattgttgtgatgtgtcttgtgacatttctattttgtagaaactttaaaaaggagaactatgttcatttttcctgtcaatggtttttttgtgttgtagttgtcacctgtgtgattatcaatcatttagaaatctcatacccttcccctaaattttcagcaagtgcctgggcctctctaagaggtcactttgtactctccttttctggcagtctcctctttggtatctgtactatcgtttgaaatgggaaccagatatgtttccattttatacagataattcagttgcttgaagaagagggacacaggagaaaagatttaaactattggctaaaatgaggtgtcttattattgattttcatctatatcttgtcccataatcaggaataaacagtagctacactgccttgtatggcagccagagcgctgcttgcttgcacttttaatgattccatcaataccatgtagattgaattagcaaggagaagtaaacctttcatttctttgccagactatattgggaaatgaaaatccgtcattacttttccttgctagcaattgttcgaatatctgggataaagaaatacatacaggaaaatgttagggcagaccaagtattaaaagctaggacagagcaggacaaaggaggaaggataattctacttgtttggcaaagttacatcagttgtcttactgacacatcaggtactatctatagtggaaattgaggcccggagaggttaaatggcatgccagtgtcacttgctatttttcagaacaaaaattagaatccagatctgaatcctggtgcagtgttctctcctatgccctactgggctttagtgggctaaagttctgaagcaagatgttaagggctaattgaaatgtgtttattctcctagattctttttcagcatagatggaatctgaaaagcactcagatatttagtgtgtgcttccttcagccctaaatacagcattagcatcaaatcaagggtacatttgtaataaacctcagcaaaccttacctgaagaaccttttaagaaagtacagatttccaggtcctatcactagagatg

SEQ ID NO: 363032 - DNA, 831 bp, Homo sapiens
caatcgcgaaagtgtgtgaacgtgctgccgccgatcagtcacccagtcggctggagtcggaggcgatatttctaggggtgtacttgttggggtcagggtaagcaccagccacaaaaacctacaaaagaagggaaattactgtctttaaatattaaaaaaaaacaagatccatgagtgggcatcgatcaacaaggaaaagatgtggagattctcacccggagtccccagtgggcttcgggcatatgagtactacaggatgtgtattaaataaattgtttcagttaccaacaccaccattgtcaagacaccaactaaagcggctagaagaacacagatatcaaagtgctggacggtccctgcttgagcccttaatgcaagggtattgggaatggctcgttagaagagttccctcctggattgccccaaatctcatcaccatcattggactgtcaataaacatctgtacaactattttattagtcttctactgccctacagctacagagcaggtaagagtttcttaacagatctcaacatttgctatataccaaaaacgttgtaattgggatcgtggggtcattttaactaaagataaagtaatctgacagctgtcaactattttaaaatatcacacacactgtgataaagcttgtaagtacagcctacacacttgcttattggaaaccagaagcaaacggtagactgtgatcctagtgcttaaattaatgttagcagggattaacatgtaaaatgttccttttaaagtcactaaatctcaattttttacaaaaaagtttttcatttttttaaatggtagaataaagtcttagc

SEQ ID NO: 363033 - DNA, 3290 bp, Homo sapiens
caatcgcgaaagtgtgtgaacgtgctgccgccgatcagtcacccagtcggctggagtcggaggcgatatttctaggggtgtacttgttggggtcagggtaagcaccagccacaaaaacctacaaaagaagggaaattactgtctttaaatattaaaaaaaaacaagatccatgagtgggcatcgatcaacaaggaaaagatgtggagattctcacccggagtccccagtgggcttcgggcatatgagtactacaggatgtgtattaaataaattgtttcagttaccaacaccaccattgtcaagacaccaactaaagcggctagaagaacacagatatcaaagtgctggacggtccctgcttgagcccttaatgcaagggtattgggaatggctcgttagaagagttccctcctggattgccccaaatctcatcaccatcattggactgtcaataaacatctgtacaactattttattagtcttctactgccctacagctacagagcaggcacctctgtgggcatatattgcttgtgcctgtggccttttcatttaccagtctttggatgctattgatgggaaacaggcaagaagaaccaatagtagttctcctctgggagaactttttgatcatggctgtgattcactatcaacagtttttgtggttcttggaacttgtattgcagtgcagctggggacaaaccctgattggatgtttttttgttgttttgcggggacatttatgttctattgtgcgcactggcaaacgtatgtttctggaacattgcgatttggaataattgatgtgactgaagtgcaaatcttcataataatcatgcatttgctggcagtgattggaggaccacctttttggcaatctatgattccagtgctgaatattcaaatgaaaatttttcctgcactttgtactgtagcagggaccatattttcctgtacaaattacttccgtgtaatcttcacaggtggtgttggcaaaaatggatcaacaatagcaggaacaagtgtcctttctccttttctccatattggatcagtgattacattagctgcaatgatctacaagaaatctgcagttcagctttttgaaaagcatccctgtctttatatactgacatttggttttgtgtctgctaaaatcactaataagcttgtggttgcacacatgacgaaaagtgaaatgcatttgcatgacacagcattcataggtccggcacttttgtttctggaccagtattttaacagctttattgatgaatatattgtactttggattgccctggttttctctttctttgatttgatccgctactgtgtcagtgtttgcaatcagattgcgtctcacctgcacatacatgtcttcagaatcaaggtctctacagctcattctaatcatcattaatgatgtaattggtatataggaacatcatgttttctgcaggaaagaaagtaacatattaaggagaatgggggtggataagaacaaatataatttataataatcaatgttgtataacttttattctttattattggtaacacgccctaactatcctgtgtgagaatgggaatttcaagtcccatcttgtaaattgtatatgttgtcatgcagggtttgggccaagaaagcatgcagaaaaaaatgccatgtgattgtaattatcctggattcagaataatactgtgatggggagccagatccgcagtggtggagagttctaatgttgactgtttgcaggccaaaagatgattgctttataattttaacaaatcattgtcttttagtaacatccttgtttagtgtcttctcaagctttctttactgaggaattcagcttgtgacacagatacatcccactagcttgtgaggtggaactagtaataaagaccttgaatttggattgaaaagtttcctatctttacattgttgaggaagtcctttttttttttttttttttttaattgctcaagaaatgattctctcacaggcttgggaaatcctgttagcatgcagaataatgtggtaactttgtcaatttcccattttatttttttaaataaatatatgatctaaaagccaactttttctcagttttactcagtggaaagataaactaagttttaatgttatttttttaaatttaagcaaaatttatttctgttctttaataaataagaaaatgtggtccactgcattgttgtgatgtgtcttgtgacatttctattttgtagaaactttaaaaaggagaactatgttcatttttcctgtcaatggtttttttgtgttgtagttgtcacctgtgtgattatcaatcatttagaaatctcatacccttcccctaaattttcagcaagtgcctgggcctctctaagaggtcactttgtactctccttttctggcagtctcctctttggtatctgtactatcgtttgaaatgggaaccagatatgtttccattttatacagataattcagttgcttgaagaagagggacacaggagaaaagatttaaactattggctaaaatgaggtgtcttattattgattttcatctatatcttgtcccataatcaggaataaacagtagctacactgccttgtatggcagccagagcgctgcttgcttgcacttttaatgattccatcaataccatgtagattgaattagcaaggagaagtaaacctttcatttctttgccagactatattgggaaatgaaaatccgtcattacttttccttgctagcaattgttcgaatatctgggataaagaaatacatacaggaaaatgttagggcagaccaagtattaaaagctaggacagagcaggacaaaggaggaaggataattctacttgtttggcaaagttacatcagttgtcttactgacacatcaggtactatctatagtggaaattgaggcccggagaggttaaatggcatgccagtgtcacttgctatttttcagaacaaaaattagaatccagatctgaatcctggtgcagtgttctctcctatgccctactgggctttagtgggctaaagttctgaagcaagatgttaagggctaattgaaatgtgtttattctcctagattctttttcagcatagatggaatctgaaaagcactcagatatttagtgtgtgcttccttcagccctaaatacagcattagcatcaaatcaagggtacatttgtaataaacctcagcaaaccttacctgaagaaccttttaagaaagtacagatttccaggtcctatcactagagatg

SEQ ID NO: 363034 - DNA, 3770 bp, Homo sapiens
caatcgcgaaagtgtgtgaacgtgctgccgccgatcagtcacccagtcggctggagtcggaggcgatatttctaggggtgtacttgttggggtcagggtaagcaccagccacaaaaacctacaaaagaagggaaattactgtctttaaatattaaaaaaaaacaagatccatgagtgggcatcgatcaacaaggaaaagatgtggagattctcacccggagtccccagtgggcttcgggcatatgagtactacaggatgtgtattaaataaattgtttcagttaccaacaccaccattgtcaagacaccaactaaagcggctagaagaacacagatatcaaagtgctggacggtccctgcttgagcccttaatgcaagggtattgggaatggctcgttagaagagttccctcctggattgccccaaatctcatcaccatcattggactgtcaataaacatctgtacaactattttattagtcttctactgccctacagctacagagcaggcacctctgtgggcatatattgcttgtgcctgtggccttttcatttaccagtctttggatgctattgatgggaaacaggcaagaagaaccaatagtagttctcctctgggagaactttttgatcatggctgtgattcactatcaacagtttttgtggttcttggaacttgtattgcagtgcagctggggacaaaccctgattggatgtttttttgttgttttgcggggacatttatgttctattgtgcgcactggcaaacgtatgtttctggaacattgcgatttggaataattgatgtgactgaagtgcaaatcttcataataatcatgcatttgctggcagtgattggaggaccacctttttggcaatctatgattccagtgctgaatattcaaatgaaaatttttcctgcactttgtactgtagcagggaccatattttcctgtacaaattacttccgtgtaatcttcacaggtggtgttggcaaaaatggatcaacaatagcagtaagtataccttaagattttcaacacttgtttacactaggacttggttttgttgtcattttgttttttatttcaaatgtataaaatcatttgttaatttataatttatacttagcctttaaagaaactaatgttcaaaacttcaattttatatatacttacccacatttatatgctttatatattcatacttttatgcatacacacacacaaacacacttattcacatgttttttaaagtatgagctgctttgtaaaaataagcctggtctcttaagtgaaatcctcagtttgtgcctaatgaatttatgctgctacttttcattagctcttctagtttgtgatttatagaaattgctgcctatcaggcaccatgaggttcctgaaagtttgagttgaactgtgaactgttctgcagcagatccatgtagtatctgatgagtactgaatactattaactcttctcttcactctgtacagggaacaagtgtcctttctccttttctccatattggatcagtgattacattagctgcaatgatctacaagaaatctgcagttcagctttttgaaaagcatccctgtctttatatactgacatttggttttgtgtctgctaaaatcactaataagcttgtggttgcacacatgacgaaaagtgaaatgcatttgcatgacacagcattcataggtccggcacttttgtttctggaccagtattttaacagctttattgatgaatatattgtactttggattgccctggttttctctttctttgatttgatccgctactgtgtcagtgtttgcaatcagattgcgtctcacctgcacatacatgtcttcagaatcaaggtctctacagctcattctaatcatcattaatgatgtaattggtatataggaacatcatgttttctgcaggaaagaaagtaacatattaaggagaatgggggtggataagaacaaatataatttataataatcaatgttgtataacttttattctttattattggtaacacgccctaactatcctgtgtgagaatgggaatttcaagtcccatcttgtaaattgtatatgttgtcatgcagggtttgggccaagaaagcatgcagaaaaaaatgccatgtgattgtaattatcctggattcagaataatactgtgatggggagccagatccgcagtggtggagagttctaatgttgactgtttgcaggccaaaagatgattgctttataattttaacaaatcattgtcttttagtaacatccttgtttagtgtcttctcaagctttctttactgaggaattcagcttgtgacacagatacatcccactagcttgtgaggtggaactagtaataaagaccttgaatttggattgaaaagtttcctatctttacattgttgaggaagtcctttttttttttttttttttttaattgctcaagaaatgattctctcacaggcttgggaaatcctgttagcatgcagaataatgtggtaactttgtcaatttcccattttatttttttaaataaatatatgatctaaaagccaactttttctcagttttactcagtggaaagataaactaagttttaatgttatttttttaaatttaagcaaaatttatttctgttctttaataaataagaaaatgtggtccactgcattgttgtgatgtgtcttgtgacatttctattttgtagaaactttaaaaaggagaactatgttcatttttcctgtcaatggtttttttgtgttgtagttgtcacctgtgtgattatcaatcatttagaaatctcatacccttcccctaaattttcagcaagtgcctgggcctctctaagaggtcactttgtactctccttttctggcagtctcctctttggtatctgtactatcgtttgaaatgggaaccagatatgtttccattttatacagataattcagttgcttgaagaagagggacacaggagaaaagatttaaactattggctaaaatgaggtgtcttattattgattttcatctatatcttgtcccataatcaggaataaacagtagctacactgccttgtatggcagccagagcgctgcttgcttgcacttttaatgattccatcaataccatgtagattgaattagcaaggagaagtaaacctttcatttctttgccagactatattgggaaatgaaaatccgtcattacttttccttgctagcaattgttcgaatatctgggataaagaaatacatacaggaaaatgttagggcagaccaagtattaaaagctaggacagagcaggacaaaggaggaaggataattctacttgtttggcaaagttacatcagttgtcttactgacacatcaggtactatctatagtggaaattgaggcccggagaggttaaatggcatgccagtgtcacttgctatttttcagaacaaaaattagaatccagatctgaatcctggtgcagtgttctctcctatgccctactgggctttagtgggctaaagttctgaagcaagatgttaagggctaattgaaatgtgtttattctcctagattctttttcagcatagatggaatctgaaaagcactcagatatttagtgtgtgcttccttcagccctaaatacagcattagcatcaaatcaagggtacatttgtaataaacctcagcaaaccttacctgaagaaccttttaagaaagtacagatttccaggtcctatcactagagatg

SEQ ID NO: 363035 - DNA, 3179 bp, Homo sapiens
gaggcaatgagggccagcaggagtctcgcgcgcctgcgacgcgggtaagcaccagccacaaaaacctacaaaagaagggaaattactgtctttaaatattacacccggagtccccagtgggcttcgggcatatgagtactacaggatgtgtattaaataaattgtttcagttaccaacaccaccattgtcaagacaccaactaaagcggctagaagaacacagatatcaaagtgctggacggtccctgcttgagcccttaatgcaagggtattgggaatggctcgttagaagagttccctcctggattgccccaaatctcatcaccatcattggactgtcaataaacatctgtacaactattttattagtcttctactgccctacagctacagagcaggcacctctgtgggcatatattgcttgtgcctgtggccttttcatttaccagtctttggatgctattgatgggaaacaggcaagaagaaccaatagtagttctcctctgggagaactttttgatcatggctgtgattcactatcaacagtttttgtggttcttggaacttgtattgcagtgcagctggggacaaaccctgattggatgtttttttgttgttttgcggggacatttatgttctattgtgcgcactggcaaacgtatgtttctggaacattgcgatttggaataattgatgtgactgaagtgcaaatcttcataataatcatgcatttgctggcagtgattggaggaccacctttttggcaatctatgattccagtgctgaatattcaaatgaaaatttttcctgcactttgtactgtagcagggaccatattttcctgtacaaattacttccgtgtaatcttcacaggtggtgttggcaaaaatggatcaacaatagcaggaacaagtgtcctttctccttttctccatattggatcagtgattacattagctgcaatgatctacaagaaatctgcagttcagctttttgaaaagcatccctgtctttatatactgacatttggttttgtgtctgctaaaatcactaataagcttgtggttgcacacatgacgaaaagtgaaatgcatttgcatgacacagcattcataggtccggcacttttgtttctggaccagtattttaacagctttattgatgaatatattgtactttggattgccctggttttctctttctttgatttgatccgctactgtgtcagtgtttgcaatcagattgcgtctcacctgcacatacatgtcttcagaatcaaggtctctacagctcattctaatcatcattaatgatgtaattggtatataggaacatcatgttttctgcaggaaagaaagtaacatattaaggagaatgggggtggataagaacaaatataatttataataatcaatgttgtataacttttattctttattattggtaacacgccctaactatcctgtgtgagaatgggaatttcaagtcccatcttgtaaattgtatatgttgtcatgcagggtttgggccaagaaagcatgcagaaaaaaatgccatgtgattgtaattatcctggattcagaataatactgtgatggggagccagatccgcagtggtggagagttctaatgttgactgtttgcaggccaaaagatgattgctttataattttaacaaatcattgtcttttagtaacatccttgtttagtgtcttctcaagctttctttactgaggaattcagcttgtgacacagatacatcccactagcttgtgaggtggaactagtaataaagaccttgaatttggattgaaaagtttcctatctttacattgttgaggaagtcctttttttttttttttttttttaattgctcaagaaatgattctctcacaggcttgggaaatcctgttagcatgcagaataatgtggtaactttgtcaatttcccattttatttttttaaataaatatatgatctaaaagccaactttttctcagttttactcagtggaaagataaactaagttttaatgttatttttttaaatttaagcaaaatttatttctgttctttaataaataagaaaatgtggtccactgcattgttgtgatgtgtcttgtgacatttctattttgtagaaactttaaaaaggagaactatgttcatttttcctgtcaatggtttttttgtgttgtagttgtcacctgtgtgattatcaatcatttagaaatctcatacccttcccctaaattttcagcaagtgcctgggcctctctaagaggtcactttgtactctccttttctggcagtctcctctttggtatctgtactatcgtttgaaatgggaaccagatatgtttccattttatacagataattcagttgcttgaagaagagggacacaggagaaaagatttaaactattggctaaaatgaggtgtcttattattgattttcatctatatcttgtcccataatcaggaataaacagtagctacactgccttgtatggcagccagagcgctgcttgcttgcacttttaatgattccatcaataccatgtagattgaattagcaaggagaagtaaacctttcatttctttgccagactatattgggaaatgaaaatccgtcattacttttccttgctagcaattgttcgaatatctgggataaagaaatacatacaggaaaatgttagggcagaccaagtattaaaagctaggacagagcaggacaaaggaggaaggataattctacttgtttggcaaagttacatcagttgtcttactgacacatcaggtactatctatagtggaaattgaggcccggagaggttaaatggcatgccagtgtcacttgctatttttcagaacaaaaattagaatccagatctgaatcctggtgcagtgttctctcctatgccctactgggctttagtgggctaaagttctgaagcaagatgttaagggctaattgaaatgtgtttattctcctagattctttttcagcatagatggaatctgaaaagcactcagatatttagtgtgtgcttccttcagccctaaatacagcattagcatcaaatcaagggtacatttgtaataaacctcagcaaaccttacctgaagaaccttttaagaaagtacagatttccaggtcctatcactagagatg

SEQ ID NO: 363036 - DNA, 2342 bp, Homo sapiens
ctagctgagacactctcttaacctccaccgctacacgtggtgttggcaaaaatggatcaacaatagcaggaacaagtgtcctttctccttttctccatattggatcagtgattacattagctgcaatgatctacaagaaatctgcagttcagctttttgaaaagcatccctgtctttatatactgacatttggttttgtgtctgctaaaatcactaataagcttgtggttgcacacatgacgaaaagtgaaatgcatttgcatgacacagcattcataggtccggcacttttgtttctggaccagtattttaacagctttattgatgaatatattgtactttggattgccctggttttctctttctttgatttgatccgctactgtgtcagtgtttgcaatcagattgcgtctcacctgcacatacatgtcttcagaatcaaggtctctacagctcattctaatcatcattaatgatgtaattggtatataggaacatcatgttttctgcaggaaagaaagtaacatattaaggagaatgggggtggataagaacaaatataatttataataatcaatgttgtataacttttattctttattattggtaacacgccctaactatcctgtgtgagaatgggaatttcaagtcccatcttgtaaattgtatatgttgtcatgcagggtttgggccaagaaagcatgcagaaaaaaatgccatgtgattgtaattatcctggattcagaataatactgtgatggggagccagatccgcagtggtggagagttctaatgttgactgtttgcaggccaaaagatgattgctttataattttaacaaatcattgtcttttagtaacatccttgtttagtgtcttctcaagctttctttactgaggaattcagcttgtgacacagatacatcccactagcttgtgaggtggaactagtaataaagaccttgaatttggattgaaaagtttcctatctttacattgttgaggaagtcctttttttttttttttttttttaattgctcaagaaatgattctctcacaggcttgggaaatcctgttagcatgcagaataatgtggtaactttgtcaatttcccattttatttttttaaataaatatatgatctaaaagccaactttttctcagttttactcagtggaaagataaactaagttttaatgttatttttttaaatttaagcaaaatttatttctgttctttaataaataagaaaatgtggtccactgcattgttgtgatgtgtcttgtgacatttctattttgtagaaactttaaaaaggagaactatgttcatttttcctgtcaatggtttttttgtgttgtagttgtcacctgtgtgattatcaatcatttagaaatctcatacccttcccctaaattttcagcaagtgcctgggcctctctaagaggtcactttgtactctccttttctggcagtctcctctttggtatctgtactatcgtttgaaatgggaaccagatatgtttccattttatacagataattcagttgcttgaagaagagggacacaggagaaaagatttaaactattggctaaaatgaggtgtcttattattgattttcatctatatcttgtcccataatcaggaataaacagtagctacactgccttgtatggcagccagagcgctgcttgcttgcacttttaatgattccatcaataccatgtagattgaattagcaaggagaagtaaacctttcatttctttgccagactatattgggaaatgaaaatccgtcattacttttccttgctagcaattgttcgaatatctgggataaagaaatacatacaggaaaatgttagggcagaccaagtattaaaagctaggacagagcaggacaaaggaggaaggataattctacttgtttggcaaagttacatcagttgtcttactgacacatcaggtactatctatagtggaaattgaggcccggagaggttaaatggcatgccagtgtcacttgctatttttcagaacaaaaattagaatccagatctgaatcctggtgcagtgttctctcctatgccctactgggctttagtgggctaaagttctgaagcaagatgttaagggctaattgaaatgtgtttattctcctagattctttttcagcatagatggaatctgaaaagcactcagatatttagtgtgtgcttccttcagccctaaatacagcattagcatcaaatcaagggtacatttgtaataaacctcagcaaaccttacctgaagaaccttttaagaaagtacagatttccaggtcctatcactagagatg

SEQ ID NO: 363037 - DNA, 1141 bp, Homo sapiens
caatcgcgaaagtgtgtgaacgtgctgccgccgatcagtcacccagtcggctggagtcggaggcgatatttctaggggtgtacttgttggggtcagggtaagcaccagccacaaaaacctacaaaagaagggaaattactgtctttaaatattaaaaaaaaacaagatccatgagtgggcatcgatcaacaaggaaaagatgtggagattctcacccggagtccccagtgggcttcgggcatatgagtactacaggatgtgtattaaataaattgtttcagttaccaacaccaccattgtcaagacaccaactaaagcggctagaagaacacagatatcaaagtgctggacggtccctgcttgagcccttaatgcaagggtattgggaatggctcgttagaagagttccctcctggattgccccaaatctcatcaccatcattggactgtcaataaacatctgtacaactattttattagtcttctactgccctacagctacagagcaggcacctctgtgggcatatattgcttgtgcctgtggccttttcatttaccagtctttggatgctattgatgggaaacaggcaagaagaaccaatagtagttctcctctgggagaactttttgatcatggctgtgattcactatcaacagtttttgtggttcttggaacttgtattgcagtgcagctggggacaaaccctgattggatgtttttttgttgttttgcggggacatttatgttctattgtgcgcactggcaaacgtatgtttctggaacattgcgatttggaatgtaagtaatacttaatggtaatttttgttttctctttcacatatggagaatgttgccttataagtatttgagtattagaaattgatcaaatcactaagttagtttaataaattaaaaaatttatgcttcattattatagctatttcctaatagtctctgcatatgtccctctattatacttttttaaaaggagatatcagaacctcccagccagtattttaaaagcaatacaaaaagcagtagcccctcatctttgtctttcccacagaaaaattcactttttttccccaccattatttaccttaattccatttttattttcacatataaaaatgcatttcc

SEQ ID NO: 363038 - DNA, 3062 bp, Homo sapiens
gcgccatggagcagtggcgacagtgcggccgctggctcatcgattgcaaggtcctgccgcccaaccaccgggtggtgtggccctcggccgtggtcttcgacctggcgcaggcgctgcgcgacggggtccttctgtgccagctgctgcacaacctctcccccggctccatcgacctcaaggacatcaacttccggccgcagatgtcccagtttctgtgtttgaagaacatacgcaccttcctgaaagtctgccacgataaatttggattaaggaacagcgagctgtttgacccctttgacctcttcgatgtgcgagactttggaaaggtcatctccgcggtgtcgaggctctccctgcacagcatcgcgcagaacaaagggatcaggccttttccctcagaggagaccacagagaatgacgatgacgtctaccgcagcctggaggagctggccgacgagcatgacctgggggaggacatctacgactgcgtcccgtgtgaggatggaggggacgacatctacgaggacatcatcaaggtggaggtgcagcagcccatgattagatacatgcagaaaatgggcatgactgaagatgacaagaggaactgctgcctgctggagatccaggagaccgaggccaagtactaccgcaccctggaggacattgagaagaactacatgagccccctgcggctggtgctgagcccggcggacatggcagctgtcttcattaacctggaggacctgatcaaggtgcatcacagcttcctgagggccatcgacgtgtccgtgatggtggggggcagcacgctggccaaggtcttcctcgatttcaaggaaaggcttctgatctacggggagtactgcagccacatggagcacgcccagaacacactgaaccagctcctggccagccgggaggacttcaggcagaaagtcgaggagtgcacactgaaggtccaggatggaaaatttaagctgcaagacctgctggtggtccccatgcagagggtgctcaaataccacctgctcttgaaggagcttctgagccattctgcggaacggcctgagaggcagcagctcaaagaagcactggaagccatgcaggacttggcgatgtacatcaatgaagttaaacgggacaaggagaccttgaggaaaatcagcgaatttcagagttctatagaaaatttgcaagtgaaactggaggaatttggaagaccaaagattgacggggaactgaaagtccggtccatagtcaaccacaccaagcaggacaggtacttgttcctgtttgacaaggtggtcatcgtctgcaagcggaagggctacagctacgagctcaaggagatcatcgagctgctgttccacaagatgaccgacgaccccatgaacaacaaggacgtcaagaagtggtcctacggcttctacctaattcaccttcaaggaaagcagggcttccagtttttctgcaaaacagaagatatgaagaggaagtggatggagcagtttgagatggccatgtcaaacatcaagccagacaaagccaatgccaaccaccacagtttccagatgtacacgtttgacaagaccaccaactgcaaagcctgcaaaatgttcctcaggggcaccttctaccagggatacatgtgtaccaagtgtggcgtcggggcacacaaggagtgcctggaagtgatacctccctgcaagttcacttctcctgcagatctggacgcctccggagcgggaccaggtcccaagatggtggccgtgcagaattaccatggcaacccagcccctcccgggaagcctgtgctgaccttccagacgggcgacgtgcttgagctgctgaggggcgaccctgagtctccgtggtgggagggtcgtctggtacaaaccaggaagtcagggtatttccccagctcatctgtgaagccctgccctgtggatggaaggccgcccatcagccggccgccatcccgggagatcgactacactgcatacccctggtttgcaggtaacatggagaggcagcagacggacaacctgctcaagtcccacgccagcgggacctacctgatcagggagcggcctgccgaggctgagcgctttgcaataagcatcaagttcaatgatgaggtgaagcacatcaaggtggtggagaaggacaactggatccacatcacagaggccaagaaattcgacagcctcctggagttggtggagtactaccagtgccactcactgaaggagagcttcaagcagctggacaccacactcaagtacccctacaagtcccgggaacgttcggcctccagggcctccagccggtccccagcttcctgtgcttcctacaacttttcttttctcagtcctcagggcctcagctttgcttctcagggcccctccgctcccttctggtcagtgttcacgccccgcgtcatcggcacagctgtggccaggtataactttgccgcccgagatatgagggagctttcgctgcgggagggtgacgtggtgaggatctacagccgcatcggcggagaccagggctggtggaagggcgagaccaacggacggattggctggtttccttcaacgtacgtagaagaggagggcatccagtgacggcaggaacgtggacaagactcgcagattttcttgggagagtcactccagccctgaagtctgtctctagctcctctgtgactcagaggggaaataccaacctcccagtcttccactgcccacagggatagggagggtgttgagaatcctaaactcgaaccgtttcactgtcagcctgccctcggcgacccatcactgggtatgctattgtacatagaggaaacctgggctagccccacccagagcgcagaggagggggcaccgacagcgctgcgagccaggctctgggtagtggctgaggccagaggcccatcgcctgcccctgtccaactgagatggccttcaggagcctaggtttgaacagcagatgctgtcccaggaagggctagggacatcggaggggacctgcccccacaccctctgctcagcccctgg

SEQ ID NO: 363039 - DNA, 1623 bp, Homo sapiens
gcgccatggagcagtggcgacagtgcggccgctggctcatcgattgcaaggtcctgccgcccaaccaccgggtggtgtggccctcggccgtggtcttcgacctggcgcaggcgctgcgcgacggggtccttctgtgccagctgctgcacaacctctcccccggctccatcgacctcaaggacatcaacttccggccgcagatgtcccagtttctgtgtttgaagaacatacgcaccttcctgaaagtctgccacgataaatttggattaaggaacagcgagctgtttgacccctttgacctcttcgatgtgcgagactttggaaaggtcatctccgcggtgtcgaggctctccctgcacagcatcgcgcagaacaaagggatcaggccttttccctcagaggagaccacagagaatgacgatgacgtctaccgcagcctggaggagctggccgacgagcatgacctgggggaggacatctacgactgcgtcccgtgtgaggatggaggggacgacatctacgaggacatcatcaaggtggaggtgcagcagcccatgattagatacatgcagaaaatgggcatgactgaagatgacaagaggaactgctgcctgctggagatccaggagaccgaggccaagtactaccgcaccctggaggacattgagaagaactacatgagccccctgcggctggtgctgagcccggcggacatggcagctgtcttcattaacctggaggggaagcgaagagtcagccttggagagagcaccctggggcctccgtgtcggggtacacccagcactttgcgacctgcggcccagcaggcgcggaggatggcggggaggaagccagcagcccctgtgtttactgtcgtcagaaaggtcttgtgttttggttttggggtttttgttttgtttgtgttttgtttggcttgtttgttttttaaggggaaaaaagtttgtaattatttcatccaaatctcccgttatatatctgtgaataataagagattttataatagcaagaaaatgatgtatattttagtttgttgacaaataagtcatcatgatcacgaaggacactgagaaaaaataatttagaaccctggtttttgtgaatttttttgttttgtgtttctttgttttgagatttgtgtttggtttggtttttgcactgcactaaggcaggagggttggagggctgggtgcagcctgggagtccgatggttttcagcaggagacggggtgtcccctgcagggggctaaactgcaggggcctgagattagctgtgaacatgtgggagcccgatgcatgtgggtcagggatctgggggcccccccagctggcgggaaccccaaatggacacaaactgtacatttgccaatgggtttttttcagaccatggtttttacttgcaaataaacctgagttcttttctgcaaaaaaacaaaaacaacacaaaccacaccacaagacaacagcaaacacacaggaacagcaccaagggcagtaaaactacacaacacaacgacaaaatggcggcccgcgaaaaaaaatggggcggcaaataaagggtcacccgagtggttcacaacccggggggaaccggttttatccact

SEQ ID NO: 363040 - DNA, 2975 bp, Homo sapiens
gcgccatggagcagtggcgacagtgcggccgctggctcatcgattgcaaggtcctgccgcccaaccaccgggtggtgtggccctcggccgtggtcttcgacctggcgcaggcgctgcgcgacggggtccttctgtgccagctgctgcacaacctctcccccggctccatcgacctcaaggacatcaacttccggccgcagatgtcccagtttctgtgtttgaagaacatacgcaccttcctgaaagtctgccacgataaatttggattaaggaacagcgagctgtttgacccctttgacctcttcgatgtgcgagactttggaaaggtcatctccgcggtgtcgaggctctccctgcacagcatcgcgcagaacaaagggatcaggccttttccctcagaggagaccacagagaatgacgatgacgtctaccgcagcctggaggagctggccgacgagcatgacctgggggaggacatctacgactgcgtcccgtgtgaggatggaggggacgacatctacgaggacatcatcaaggtggaggtgcagcagcccatgattagatacatgcagaaaatgggcatgactgaagatgacaagaggaactgctgcctgctggagatccaggagaccgaggccaagtactaccgcaccctggaggacattgagaagaactacatgagccccctgcggctggtgctgagcccggcggacatggcagctgtcttcattaacctggaggacctgatcaaggtgcatcacagcttcctgagggccatcgacgtgtccgtgatggtggggggcagcacgctggccaaggtcttcctcgatttcaaggaaaggcttctgatctacggggagtactgcagccacatggagcacgcccagaacacactgaaccagctcctggccagccgggaggacttcaggcagaaagtcgaggagtgcacactgaaggtccaggatggaaaatttaagctgcaagacctgctggtggtccccatgcagagggtgctcaaataccacctgctcttgaaggagcttctgagccattctgcggaacggcctgagaggcagcagctcaaagaagcactggaagccatgcaggacttggcgatgtacatcaatgaagttaaacgggacaaggagaccttgaggaaaatcagcgaatttcagagttctatagaaaatttgcaagtgaaactggaggaatttggaagaccaaagattgacggggaactgaaagtccggtccatagtcaaccacaccaagcaggacaggtacttgttcctgtttgacaaggtggtcatcgtctgcaagcggaagggctacagctacgagctcaaggagatcatcgagctgctgttccacaagatgaccgacgaccccatgaacaacaaggacgtcaagaagtggtcctacggcttctacctaattcaccttcaaggaaagcagggcttccagtttttctgcaaaacagaagatatgaagaggaagtggatggagcagtttgagatggccatgtcaaacatcaagccagacaaagccaatgccaaccaccacagtttccagatgtacacgtttgacaagaccaccaactgcaaagcctgcaaaatgttcctcaggggcaccttctaccagggatacatgtgtaccaagtgtggcgtcggggcacacaaggagtgcctggaagtgatacctccctgcaagttcacttctcctgcagatctggacgcctccggagcgggaccaggtcccaagatggtggccgtgcagaattaccatggcaacccagcccctcccgggaagcctgtgctgaccttccagacgggcgacgtgcttgagctgctgaggggcgaccctgagtctccgtggtgggagggtcgtctggtacaaaccaggaagtcagggtatttccccagctcatctgtgaagccctgccctgtggatggaaggccgcccatcagccggccgccatcccgggagatcgactacactgcatacccctggtttgcaggtaacatggagaggcagcagacggacaacctgctcaagtcccacgccagcgggacctacctgatcagggagcggcctgccgaggctgagcgctttgcaataagcatcaagttcaatgatgaggtgaagcacatcaaggtggtggagaaggacaactggatccacatcacagaggccaagaaattcgacagcctcctggagttggtggagtactaccagtgccactcactgaaggagagcttcaagcagctggacaccacactcaagtacccctacaagtcccgggaacgttcggcctccagggcctccagccggtccccagtgttcacgccccgcgtcatcggcacagctgtggccaggtataactttgccgcccgagatatgagggagctttcgctgcgggagggtgacgtggtgaggatctacagccgcatcggcggagaccagggctggtggaagggcgagaccaacggacggattggctggtttccttcaacgtacgtagaagaggagggcatccagtgacggcaggaacgtggacaagactcgcagattttcttgggagagtcactccagccctgaagtctgtctctagctcctctgtgactcagaggggaaataccaacctcccagtcttccactgcccacagggatagggagggtgttgagaatcctaaactcgaaccgtttcactgtcagcctgccctcggcgacccatcactgggtatgctattgtacatagaggaaacctgggctagccccacccagagcgcagaggagggggcaccgacagcgctgcgagccaggctctgggtagtggctgaggccagaggcccatcgcctgcccctgtccaactgagatggccttcaggagcctaggtttgaacagcagatgctgtcccaggaagggctagggacatcggaggggacctgcccccacaccctctgctcagcccctgg

SEQ ID NO: 363041 - DNA, 1245 bp, Homo sapiens
gctgttcactgtgggcccacttgccccactgtgctagggcgcgggaggagagagcactgtggtcgccctctgcagccactctggctcccaagacttccctgactcccccactcccctccttgccaggggcacacccggaccccacacggcaggcccctctcttgggaggggcctttggaatgatgaaattccaaccctgctgcccggtcagcggtaccgtttcctgccctctctctgagaggccctttctggagtcctgggaaggtgtctgcctggccgcgctgccagatcagtacatcttttgtaaaaaccctgaaatgggcagggaagaaaacagggatttcccctctctagatccctgccaggtccctctccaggaggcccctctgctctcctgaagggtggtccctgagggtctgcccagccttggcacgagaggttggttccagcccctggcagggcttccttccaagggcccctgcagcctacaaactgggcctcgggcgactcaaaataagtgctcttgggggtggctctaccccattacctcccccagccacaactcctggccttcgacttctggctgggttagccagaccctggtttctctaccctgatgttgcatgagacctggtaacagtgtctccctcccagctccttgccaaagcctctgttgagacctgggcttcttgtagccccttctccctctggccagctgcacagcctgtgggaggtgcccggcccaggctgggtgtgggggaagctggtccctgctgtgggtggcgctggggacctaggggctccttctgaggttggccttgtggcctctgggctgtatgcctctggggtgtagggaagaggcgggaggagtcatggggatggggagcggcagggggagagaggggccctcgacaaaggcttgggaaatgaggggaggtggaggcagggcaggggaagcgaagagtcagccttggagagagcaccctggggcctccgtgtcggggtacacccagcactttgcgacctgcggcccagcaggcgcggaggatggcggggaggaagccagcagcccctgtgtttactgtcgtcagaaaggtcttgtgttttggttttggggtttttgttttgcagaaggccgaagggattttttgtcagataggcaaggtttcggtgggtccaaaaaatgtctatcacaaggcattttttccttttcctctgtcgaaaagttaaaatctctatgtgttt

SEQ ID NO: 363042 - DNA, 1909 bp, Homo sapiens
gcgccatggagcagtggcgacagtgcggccgctggctcatcgattgcaaggtcctgccgcccaaccaccgggtggtgtggccctcggccgtggtcttcgacctggcgcaggcgctgcgcgacggggtccttctgtgccagctgctgcacaacctctcccccggctccatcgacctcaaggacatcaacttccggccgcagatgtcccagtttctgtgtttgaagaacatacgcaccttcctgaaagtctgccacgataaatttggattaaggaacagcgagctgtttgacccctttgacctcttcgatgtgcgagactttggaaaggtcatctccgcggtgtcgaggctctccctgcacagcatcgcgcagaacaaagggatcaggccttttccctcagaggagaccacagagaatgacgatgacgtctaccgcagcctggaggagctggccgacgagcatgacctgggggaggacatctacgactgcgtcccgtgtgaggatggaggggacgacatctacgaggacatcatcaaggtggaggtgcagcagcccatgattagatacatgcagaaaatgggcatgactgaagatgacaagaggaactgctgcctgctggagatccaggagaccgaggccaagtactaccgcaccctggaggacattgagaagaactacatgagccccctgcggctggtgctgagcccggcggacatggcagctgtcttcattaacctggaggacctgatcaaggtgcatcacagcttcctgagggccatcgacgtgtccgtgatggtggggggcagcacgctggccaaggtcttcctcgatttcaaggaaaggcttctgatctacggggagtactgcagccacatggagcacgcccagaacacactgaaccagctcctggccagccgggaggacttcaggcagaaagtcgaggagtgcacactgaaggtccaggatggaaaatttaagctgcaagacctgctggtggtccccatgcagagggtgctcaaataccacctgctcttgaaggagcttctgagccattctgcggaacggcctgagaggcagcagctcaaagaagcactggaagccatgcaggacttggcgatgtacatcaatgaagttaaacgggacaaggagaccttgaggaaaatcagcgaatttcagagttctatagaaaatttgcaagtgaaactggaggaatttggaagaccaaagattgacggggaactgaaagtccggtccatagtcaaccacaccaagcaggacaggtacttgttcctgtttgacaaggtggtcatcgtctgcaagcggaagggctacagctacgagctcaaggagatcatcgagctgctgttccacaagatgaccgacgaccccatgaacaacaaggacgtcaagaagtggtcctacggcttctacctaattcaccttcaaggaaagcagggcttccagtttttctgcaaaacagaagatatgaagaggaagtggatggagcagtttgagatggccatgtcaaacatcaagccagacaaagccaatgccaaccaccacagtttccagatgtacacgtttgacaagaccaccaactgcaaagcctgcaaaatgttcctcaggggcaccttctaccagggatacatgtgtaccaagtgtggcgtcggggcacacaaggagtgcctggaagtgatacctccctgcaagttcacttactcctgcacatctggacgcctccggaagccgggaccaggtcccaaagattggtggccatgccggaattacaatgggcaaccagaccctccccggaagctgtggctgaccttcagacgggagaagtgttaactgctgagggggaacagattccggggggaaggacctggcaaaacagaaccgggatacccgat

SEQ ID NO: 363043 - DNA, 459 bp, Homo sapiens
aactgcaggggcctgagattagctgtgaacatgtgggagcccgatgcatgtgggtcagggatctggggcccccccagctccctgacccacatgcagggggctaaactgcaggggcctgagattagctgtgaacatgtgggagcccgatgcatgtgggtcagggatctgggggcccccccagctggcgggaaccccaaatggacacaaactgtacatttgccaatgggtttttttcagaccatggtttttacttgcaaataaacctgagttcttttctgcaaaaaaacaaaaacaacacaaaccacaccacaagacaacagcaaacacacaggaacagcaccaagggcagtaaaactacacaacacaacgacaaaatggcggcccgcgaaaaaaaatggggcggcaaataaagggtcacccgagtggttcacaacccggggggaaccggttttatccact

SEQ ID NO: 363044 - DNA, 375 bp, Homo sapiens
ggacttggatgtgctgtgtccccagacccagagggcaaggggccctgggattggaggccagtgtgtccctccagagcctttctgcttgacatccttcctctctgggtacagagcagggttctgggcaccaggggagagacccagcttggcccaagggcctcctggatcactggttgggctcctcctgcagctgtgtgatgctgcccatctccctcaacagtgttcacgccccgcgtcatcggcacagctgtggccaggtataactttgccgcccgagatatgagggagctttcgctgcgggagggtgacgtggtgaggatctacagccgcatcggcggagaccagggctggtggaagggcgagaccaacggacgg

SEQ ID NO: 363045 - DNA, 399 bp, Homo sapiens
gcactgtgtgtcccagatggacaccacaaagcccaggctcagagcaggtggtcagggcaggcttcctggaggaggtgggggcccgtggtaaggagtgggagagagaagggcacagaccttccaggagtggaggtgcacagaggtgaaatatattgccagggtgggggcgtcccatagggaacagtgtccctctcctcccctgctcctgccttgacccctctatctaggaactagtggggacagggagggcggggtgcgttgatgcatgggccacagtcaaagagcagccttccctcatctctgtgttctgtccttctcctgcagatctggacgcctccggagcgggaccaggtgagtcttctggacctgggccctctgctatcacccatgtcagccatc

SEQ ID NO: 363046 - DNA, 1834 bp, Homo sapiens
gctgttcactgtgggcccacttgccccactgtgctagggcgcgggaggagagagcactgtggtcgccctctgcagccactctggctcccaagacttccctgactcccccactcccctccttgccaggggcacacccggaccccacacggcaggcccctctcttgggaggggcctttggaatgatgaaattccaaccctgctgcccggtcagcggtaccgtttcctgccctctctctgagaggccctttctggagtcctgggaaggtgtctgcctggccgcgctgccagatcagtacatcttttgtaaaaaccctgaaatgggcagggaagaaaacagggatttcccctctctagatccctgccaggtccctctccaggaggcccctctgctctcctgaagggtggtccctgagggtctgcccagccttggcacgagaggttggttccagcccctggcagggcttccttccaagggcccctgcagcctacaaactgggcctcgggcgactcaaaataagtgctcttgggggtggctctaccccattacctcccccagccacaactcctggccttcgacttctggctgggttagccagaccctggtttctctaccctgatgttgcatgagacctggtaacagtgtctccctcccagctccttgccaaagcctctgttgagacctgggcttcttgtagccccttctccctctggccagctgcacagcctgtgggaggtgcccggcccaggctgggtgtgggggaagctggtccctgctgtgggtggcgctggggacctaggggctccttctgaggttggccttgtggcctctgggctgtatgcctctggggtgtagggaagaggcgggaggagtcatggggatggggagcggcagggggagagaggggccctcgacaaaggcttgggaaatgaggggaggtggaggcagggcaggggaagcgaagagtcagccttggagagagcaccctggggcctccgtgtcggggtacacccagcactttgcgacctgcggcccagcaggcgcggaggatggcggggaggaagccagcagcccctgtgtttactgtcgtcagaaaggtcttgtgttttggttttggggtttttgttttgtttgtgttttgtttggcttgtttgttttttaaggggaaaaaagtttgtaattatttcatccaaatctcccgttatatatctgtgaataataagagattttataatagcaagaaaatgatgtatattttagtttgttgacaaataagtcatcatgatcacgaaggacactgagaaaaaataatttagaaccctggtttttgtgaatttttttgttttgtgtttctttgttttgagatttgtgtttggtttggtttttgcactgcactaaggcaggagggttggagggctgggtgcagcctgggagtccgatggttttcagcaggagacggggtgtcccctgcagggggctaaactgcaggggcctgagattagctgtgaacatgtgggagcccgatgcatgtgggtcagggatctgggggcccccccagctggcgggaaccccaaatggacacaaactgtacatttgccaatgggtttttttcagaccatggtttttacttgcaaataaacctgagttcttttctgcaaaaaaacaaaaacaacacaaaccacaccacaagacaacagcaaacacacaggaacagcaccaagggcagtaaaactacacaacacaacgacaaaatggcggcccgcgaaaaaaaatggggcggcaaataaagggtcacccgagtggttcacaacccggggggaaccggttttatccact

SEQ ID NO: 363047 - DNA, 1074 bp, Homo sapiens
gctgttcactgtgggcccacttgccccactgtgctagggcgcgggaggagagagcactgtggtcgccctctgcagccactctggctcccaagacttccctgactcccccactcccctccttgccaggggcacacccggaccccacacggcaggcccctctcttgggaggggcctttggaatgatgaaattccaaccctgctgcccggtcagcggtaccgtttcctgccctctctctgagaggccctttctggagtcctgggaaggtgtctgcctggccgcgctgccagatcagtacatcttttgtaaaaaccctgtgtttactgtcgtcagaaaggtcttgtgttttggttttggggtttttgttttgtttgtgttttgtttggcttgtttgttttttaaggggaaaaaagtttgtaattatttcatccaaatctcccgttatatatctgtgaataataagagattttataatagcaagaaaatgatgtatattttagtttgttgacaaataagtcatcatgatcacgaaggacactgagaaaaaataatttagaaccctggtttttgtgaatttttttgttttgtgtttctttgttttgagatttgtgtttggtttggtttttgcactgcactaaggcaggagggttggagggctgggtgcagcctgggagtccgatggttttcagcaggagacggggtgtcccctgcagggggctaaactgcaggggcctgagattagctgtgaacatgtgggagcccgatgcatgtgggtcagggatctgggggcccccccagctggcgggaaccccaaatggacacaaactgtacatttgccaatgggtttttttcagaccatggtttttacttgcaaataaacctgagttcttttctgcaaaaaaacaaaaacaacacaaaccacaccacaagacaacagcaaacacacaggaacagcaccaagggcagtaaaactacacaacacaacgacaaaatggcggcccgcgaaaaaaaatggggcggcaaataaagggtcacccgagtggttcacaacccggggggaaccggttttatccact

SEQ ID NO: 363048 - DNA, 2037 bp, Homo sapiens
ttcaagaccagcctggccaacatggtaaaaccctgtctctactaaaaatacaaaaattagccgggcgtggtggcgcacacctgtagtcccagctactcgggaggctgcggcaagagaatcatttggcctgagaggcagcagctcaaagaagcactggaagccatgcaggacttggcgatgtacatcaatgaagttaaacgggacaaggagaccttgaggaaaatcagcgaatttcagagttctatagaaaatttgcaagtgaaactggaggaatttggaagaccaaagattgacggggaactgaaagtccggtccatagtcaaccacaccaagcaggacaggtacttgttcctgtttgacaaggtggtcatcgtctgcaagcggaagggctacagctacgagctcaaggagatcatcgagctgctgttccacaagatgaccgacgaccccatgaacaacaaggacgtcaagaagtggtcctacggcttctacctaattcaccttcaaggaaagcagggcttccagtttttctgcaaaacagaagatatgaagaggaagtggatggagcagtttgagatggccatgtcaaacatcaagccagacaaagccaatgccaaccaccacagtttccagatgtacacgtttgacaagaccaccaactgcaaagcctgcaaaatgttcctcaggggcaccttctaccagggatacatgtgtaccaagtgtggcgtcggggcacacaaggagtgcctggaagtgatacctccctgcaagttcacttctcctgcagatctggacgcctccggagcgggaccaggtcccaagatggtggccgtgcagaattaccatggcaacccagcccctcccgggaagcctgtgctgaccttccagacgggcgacgtgcttgagctgctgaggggcgaccctgagtctccgtggtgggagggtcgtctggtacaaaccaggaagtcagggtatttccccagctcatctgtgaagccctgccctgtggatggaaggccgcccatcagccggccgccatcccgggagatcgactacactgcatacccctggtttgcaggtaacatggagaggcagcagacggacaacctgctcaagtcccacgccagcgggacctacctgatcagggagcggcctgccgaggctgagcgctttgcaataagcatcaagttcaatgatgaggtgaagcacatcaaggtggtggagaaggacaactggatccacatcacagaggccaagaaattcgacagcctcctggagttggtggagtactaccagtgccactcactgaaggagagcttcaagcagctggacaccacactcaagtacccctacaagtcccgggaacgttcggcctccagggcctccagccggtccccagtgttcacgccccgcgtcatcggcacagctgtggccaggtataactttgccgcccgagatatgagggagctttcgctgcgggagggtgacgtggtgaggatctacagccgcatcggcggagaccagggctggtggaagggcgagaccaacggacggattggctggtttccttcaacgtacgtagaagaggagggcatccagtgacggcaggaacgtggacaagactcgcagattttcttgggagagtcactccagccctgaagtctgtctctagctcctctgtgactcagaggggaaataccaacctcccagtcttccactgcccacagggatagggagggtgttgagaatcctaaactcgaaccgtttcactgtcagcctgccctcggcgacccatcactgggtatgctattgtacatagaggaaacctgggctagccccacccagagcgcagaggagggggcaccgacagcgctgcgagccaggctctgggtagtggctgaggccagaggcccatcgcctgcccctgtccaactgagatggccttcaggagcctaggtttgaacagcagatgctgtcccaggaagggctagggacatcggaggggacctgcccccacaccctctgctcagcccctgg

SEQ ID NO: 363049 - DNA, 501 bp, Homo sapiens
agagctgggttggatggtcatggagggcccagggtgctgccttgccgccctgacctacggttacggggagtggcgtgtcttctgaatgcacaggccttgggggttttgcagctatgtgatgagaaggctgggggcggtggtggctacaccctcggatgtggagctggtctgcctgcttccacttccatccaggcctggcttctcaccccccagccttgggacggggggtttcgtcatctctctgagcccatttcctccttgagaaaacaggaatgagcttggatgtgctggcgcacggaagccagagcttgctgctgttgctgttacggtttttacagagcttacagttttaataagtttttccttgccctccctttgttttttccctttagtttctgtgtttgaagaacatacgcaccttcctgaaagtctgccacgataaatttggattaaggaacagcgagctgtttgacccctttgacctcttcgatgtgcgagact

SEQ ID NO: 363050 - DNA, 228 bp, Homo sapiens
gctgcgggccggggccaagtcagtcaccgagtgagctgctgagtcactgagtgagctgtcctatcctttgcaggtcccaagatggtggccgtgcagaattaccatggcaacccagcccctcccgggaagcctgtgctgaccttccagacgggcgacgtgcttgagctgctgaggggcgaccctgagtctccgtggtgggaggtgggtcctggggcccgggagggtcga

SEQ ID NO: 363051 - DNA, 401 bp, Homo sapiens
ctggggtgtagggaagaggcgggaggagtcatggggatggggagcggcagggggagagaggggccctcgacaaaggcttgggaaatgaggggaggtggaggcagggcaggggaagcgaagagtcagccttggagagagcaccctggggcctccgtgtcggggtacacccagcactttgcgacctgcggcccagcaggcgcggaggatggcggggaggaagccagcagcccctgtgtttactgtcgtcagaaaggtcttgtgttttggttttggggtttttgttttgtttgtgttttgtttggcttgtttgttttttaaggggaaaaaagtttgtaattatttcatccaaatctcccgttatatatctgtgaataataagagattttataatagcaagaaaa

SEQ ID NO: 363052 - DNA, 665 bp, Homo sapiens
ttttttgagatagggtctcattctgtcccccaggctggagtacagtggcgcgatcatggctcactgcaacctcaacctccccgggctgaaatgatccttatacctcagtatccccagtagctgggactacaggagaattgcttgaacctgggaggcggaggttgcagtgagccgagatcgtgccatcgcactccagcctgggcgacagagcgagactccatcttaaaagaaaacagaaaaaccaaaaaaccatagttgcataaccccaaagccactcatgagcaaaactgcaaaaaggacagaggctggggaggctgggtgatgggcggccaccgtaactactcgattgaggactacaaggctggtcatggaactgtggtttcactttggatgagtagagacaggctttttttgtctgccagggaatccacgtagacaccctagtaaaatctgtgttccgtgtacctcctacgcctcctgtggtttgctgatactgcacttttatggtaagctttgtcacacaggtcatagatctgcagcccaagggcccaatccggcccacagacatgttttgtttggccagtatgcagttgtcagtatagtagttcttaaataaattcttagttacttatcagtattcaagaattggaagaggttgggcgtgg

SEQ ID NO: 363053 - DNA, 563 bp, Homo sapiens
ccctggttcttctgcctgcccacaacagactgaaccagcccctgtgggaagagaaagcccccaggctgagaatcaactgagctgcattgaggagccccaggtgtgtgtccaggaatgccaagtgcagaagggctatgcacggggcaccatcatgacctgctgcagagaccgtccctgagaacagaggagcagagagagagaagagcaagagatgggcaaggacagagtcacaatcccagtgtctggcccctgcctccggcttgtctcagctagctctgtcactggactttcatttgtctgggaccaatatctctcttccttcctaaagatgactgcagactggtttctgccctgtgtaatgaaaagatcatgatgtgcacagctttttaccccatcttaagaatatttgaggcacttatctccatagaggggcagaatctgtaatgaatttacttttcagtcctccataacacctgttcgcaaggtttgtacagtttttcaaggaaatactggggtaggatggatggatgggatactgaaaaggacccactaaaatttaatgc

SEQ ID NO: 363054 - DNA, 4767 bp, Homo sapiens
cctgttccggaggcgcgggcggtgccactgtcttggtacctgcggtagtagcctggctttgctctgacggcgatctcgcggcccgagagccttttataggttgcttttcccggggatgtgaaggatacagaaatgactgtgaatcaacccatatcatcaaggagctgataatctagtggaagagttagacgtgtgcatacttcactatgatatgaggcagtctctgagcttatattctctgtggaagatgtgacatatccaggcggaacatcatgatgcagggaaacacatgtcacagaatgtcgttccacccgggacgagggtgtccccgaggacgaggaggacatggagccagaccctcagcaccatcctttaggccccaaaatctgaggctgcttcaccctcagcagcctcctgtgcaatatcaatatgaacctccaagtgccccttccaccactttctcaaactctccagcccccaattttctccctccacgaccagactttgtacccttccccccacccatgcctccgtcagcgcaaggccctcttcccccctgcccaatcaggccgcctttccccaaccaccagatgaggcaccccttcccagttcctccttgttttcctcccatgccaccaccaatgccttgtcctaataaccccccagtccctggggcacctcctggacaaggcactttccccttcatgatgccccctccctccatgcctcatcccccgccccctccagtcatgccgcagcaggttaattatcagtaccctccgggctattctcaccacaacttcccacctcccagttttaatagtttccagaacaaccctagttctttcctgcccagtgctaataacagcagtagtcctcatttcagacatctccctccatacccactcccaaaggctcccagtgagagaaggtccccagaaaggctgaaacactatgatgaccacaggcaccgagatcacagtcatgggcgaggtgagaggcatcggtccctggatcggcgggagcgaggccgcagtcccgacaggagaagacaagacagccggtacagatctgattatgaccgagggagaacaccatctcgccaccgcagctacgaacggagcagagagcgagaacgggagagacacaggcatcgagacaaccgaagatcaccatctctggaaaggtcctacaaaaaagagtataagagatctggaaggagttacggtttatcggttgttcctgaacctgctggatgcacaccagaattacctggggagattattaaaaatacagattcttgggccccacccctggagattgtgaatcatcgctccccaagtagggagaagaagagagctcgttgggaggaagaaaaagaccgttggagtgacaaccagagttctggcaaagacaagaactatacctcaatcaaggaaaaagagcccgaggagaccatgcctgacaagaatgaggaggaagaagaagaacttcttaagcctgtgtggattcgatgcactcattcagaaaactactactccagtgaccccatggatcaggtgggagattctacagtggttggaacgagtaggcttcgtgacttatatgacaaatttgaggaggagttggggagcaggcaagaaaaggccaaagctgctcggcctccgtgggaacctccaaagacgaagctcgatgaagatttagagagttccagtgaatccgagtgtgagtctgatgaggacagcacctgttctagcagctcagactctgaagtttttgacgttattgcagaaatcaaacgcaaaaaggcccaccctgaccgacttcatgatgaactttggtacaacgatccaggccagatgaatgatggaccactctgcaaatgcagcgcaaaggcaagacgcacaggaattaggcacagcatttatcctggagaagaggccatcaagccctgtcgtcctatgaccaacaatgctggcagacttttccactaccggatcacagtctccccgcctacgaactttttaactgacaggccaactgttatagaatacgatgatcacgagtatatctttgaaggattttctatgtttgcacatgcccccctgaccaatattccactgtgtaaagtaattagattcaacatagactacacgattcatttcattgaagagatgatgccggagaatttttgtgtgaaagggcttgaactcttttcactgttcctattcagagatattttggaattatatgactggaatcttaaaggtcctttgtttgaagacagccctccctgctgcccaagatttcatttcatgccacgttttgtaagatttcttccagatggaggaaaggaagtgctgtccatgcaccagattctcctgtacttgttaaggtgcagcaaagccctggtgcctgaggaggagattgccaatatgcttcagtgggaggagctggagtggcagaaatatgcagaagaatgcaaaggcatgattgttaccaaccctgggacgaaaccaagctctgtccgtatcgatcaactggatcgtgaacagttcaaccccgatgtgattacttttccgattatcgtccactttgggatacgccctgcacagttgagttatgcaggagacccacagtaccaaaaactgtggaagagttatgtgaaacttcgccacctcctagcaaatagtcccaaagtcaaacaaactgacaaacagaagctggcacagagggaggaagccctccaaaaaatacggcagaagaatacaatgagacgagaagtaacggtggagctaagtagccaaggattctggaaaactggcatccgttctgatgtctgtcagcatgcaatgatgctacctgttctgacccatcatatccgctaccaccaatgcctaatgcatttggacaagttgataggatatactttccaagatcgttgtctgttgcagctggccatgactcatccaagtcatcatttaaattttggaatgaatcctgatcatgccaggaattcattatctaactgtggaattcggcagcccaaatacggagacagaaaagttcatcacatgcacatgcggaagaaagggattaacaccttgataaatatcatgtcacgccttggccaagatgacccaactccctcgaggattaaccacaatgaacggttggaattcctgggtgatgctgttgttgaatttctgaccagcgtccatttgtactatttgtttcctagtctggaagaaggaggattagcaacctatcggactgccattgttcagaatcagcaccttgccatgctagcaaagaaacttgaactggatcgatttatgctgtatgctcacgggcctgacctttgtagagaatcggaccttcgacatgcaatggccaattgttttgaagcgttaataggagctgtttacttggagggaagcctggaggaagccaagcagttatttggacgcttgctctttaatgatccggacctgcgcgaagtctggctcaattatcctctccacccactccaactacaagagccaaatactgatcgacaacttattgaaacttctccagttctacaaaaacttactgagtttgaagaagcaattggagtaatttttactcatgttcgacttctggcaagggcattcacattgagaactgtgggatttaaccatctgaccctaggccacaatcagagaatggaattcctaggtgactccataatgcaactggtagccacagagtacttattcattcatttcccagatcatcatgaaggacacttaactttgttgcgaagctctttggtgaataatagaactcaggccaaggtagcggaggagctgggcatgcaggagtacgccataaccaacgacaagaccaagaggcctgtggcgcttcgcaccaagaccttggcggaccttttggaatcatttattgcagcgctgtacattgataaggatttggaatatgttcatactttcatgaatgtctgcttctttccacgattgaaagagttcattttgaatcaggattggaatgaccccaaatcccagcttcagcagtgttgcttgacacttaggacagaaggaaaagagccagacattcctctgtacaagactctgcagacagtgggcccatcccatgcccgaacctacactgtggctgtttatttcaagggagaaagaataggctgtgggaaaggaccaagtattcagcaagcggaaatgggagcagcaatggatgcgcttgaaaaatataattttccccagatggcccatcagaagcggttcatcgaacggaagtacagacaagagttaaaagaaatgaggtgggaaagagagcatcaagagagagagccagatgagactgaagacatcaagaaataaaggagggcatgcaagtgtggagtatttacttgctcagtaactgtgactgttgtctattgagacctagcctagttttcctgcagacaatgaacgaagtgtgctcattgaaataaaatacagagtcaaatcgctattgttgttttaatgatctgtttttagctggatggtctttattacaaagtattagatttttcttctatttaacggaaaacttgactttggtgaatgtgcattacttccttttattttgctctttaaataataaaattcaagaagcatattctatgtggaatagatcctgtttttccatctgtgtcccagattgtgaccctagactttcaattgacaagtaaaaaattgactttactag

SEQ ID NO: 363055 - DNA, 318 bp, Homo sapiens
  misc_feature (31)..(31): n is a, c, g, or t
gcgtctcgcccaaaaggaacgcaagaaaggntcgtttagtaatacttccccacaggttataattttccccagatggcccatcagaagcggttcatcgaacggaagtacagacaagagttaaaagaaatgaggtgggaaagagagcatcaagagagagagccagatgagactgaagacatcaagaaataaaggagggcatgcaagtgtggagtatttacttgctcagtaactgtgactgttgtctattgagacctagcctagttttcctgcagacaatgaacgaagtgtgctcattgaaataaaatacagagtcaaatc

SEQ ID NO: 363056 - DNA, 646 bp, Homo sapiens
tacgttattaaggagaaggtaaatgggcatggagcatatcactgtcatctgggtgatggttgaggccatagacctcacttattttggtgtccctgtcagtgacagcctctcaggctagttgggtccaacccaggaataagagaggtcaaaagtgaaatgtgttctcaatgtaccgccattccttttgggcagttgttgcgaagctctttggtgaataatagaactcaggccaaggtagcggaggagctgggcatgcaggagtacgccataaccaacgacaagaccaagaggcctgtggcgcttcgcaccaagaccttggcggaccttttggaatgtgagtgccacacacttttctctcaacctccaggttcagagtttaagtccaagtaaccgtatttgtcctcctcctcattattattatgttctggctaaagaaaccttgtttgctattttaattttttatgctttttaccaaagcttttctgaaggaaaataatttgaaactaagacatgtgaataatgaatttttatgttcaatctatgttcagtggtacccccaacacatacccctccatcctaacactcagctaccacatccctttgtgtgaaacagtaatagaatatgaagatcagttgttgtaaatca

SEQ ID NO: 363057 - DNA, 649 bp, Homo sapiens
acatgcacgtatagtcagatatcttccagatggaggaaaggaagtgctgtccatgcaccagattctcctgtacttgttaaggtgcagcaaagccctggtgcctgaggaggagattgccaatatgcttcagtgggaggagctggagtggcagaaatatgcagaagaatgcaaaggcatgattgttaccaaccctgggacgaaaccaagctctgtccgtatcgatcaactggatcgtgaacagttcaaccccgatgtgattacttttccgattatcgtccactttgggatacgccctgcacagtaccaaaaactgtggaagagttatgtgaaacttcgccacctcctagcaaatagtcccaaagtcaaacaaactgacaaacagaagctggcacagagggaggaagccctccaaaaaatacggcagaagaatacaatgagacgagaagtaacggtggagctaagtagccaaggattctggaaaactggcatccgttctgatgtctgtcagcatgcaatgatgctacctgttctgacccatcatatccgctaccaccaatgcctaatgcatttggacaagttgataggatatactttccaagatcgttgtctgttgcaggtaagaattattctcctgtaaactcacataata

SEQ ID NO: 363058 - DNA, 4752 bp, Homo sapiens
cctgttccggaggcgcgggcggtgccactgtcttggtacctgcggtagtagcctggctttgctctgacggcgatctcgcggcccgagagccttttatagacagctccttcagtgtctctgtttccaaaccgcaaccgagaagagacagacggagaaaagagagttacttttccaggttgcttttcccggggatgtgaaggatacagaaatgactgtgaatcaacccatatcatcaaggagctgataatctagtggaagagttagacgtgtgcatacttcactatgatatgaggcagtctctgagcttatattctctgtggaagatgtgacatatccaggcggaacatcatgatgcagggaaacacatgtcacagaatgtcgttccacccgggacgagggtgtccccgaggacgaggaggacatggagccagaccctcagcaccatcctttaggccccaaaatctgaggctgcttcaccctcagcagcctcctgtgcaatatcaatatgaacctccaagtgccccttccaccactttctcaaactctccagcccccaattttctccctccacgaccagactttgtacccttccccccacccatgcctccgtcagcgcaaggccctcttcccccctgcccaatcaggccgcctttccccaaccaccagatgaggcaccccttcccagttcctccttgttttcctcccatgccaccaccaatgccttgtcctaataaccccccagtccctggggcacctcctggacaaggcactttccccttcatgatgccccctccctccatgcctcatcccccgccccctccagtcatgccgcagcaggttaattatcagtaccctccgggctattctcaccacaacttcccacctcccagttttaatagtttccagaacaaccctagttctttcctgcccagtgctaataacagcagtagtcctcatttcagacatctccctccatacccactcccaaaggctcccagtgagagaaggtccccagaaaggctgaaacactatgatgaccacaggcaccgagatcacagtcatgggcgaggtgagaggcatcggtccctggatcggcgggagcgaggccgcagtcccgacaggagaagacaagacagccggtacagatctgattatgaccgagggagaacaccatctcgccaccgcagctacgaacggagcagagagcgagaacgggagagacacaggcatcgagacaaccgaagatcaccatctctggaaaggtcctacaaaaaagagtataagagatctggaaggagttacggtttatcggttgttcctgaacctgctggatgcacaccagaattacctggggagattattaaaaatacagattcttgggccccacccctggagattgtgaatcatcgctccccaagtagggagaagaagagagctcgttgggaggaagaaaaagaccgttggagtgacaaccagagttctggcaaagacaagaactatacctcaatcaaggaaaaagagcccgaggagaccatgcctgacaagaatgaggaggaagaagaagaacttcttaagcctgtgtggattcgatgcactcattcagaaaactactactccagtgaccccatggatcaggtgggagattctacagtggttggaacgagtaggcttcgtgacttatatgacaaatttgaggaggagttggggagcaggcaagaaaaggccaaagctgctcggcctccgtgggaacctccaaagacgaagctcgatgaagatttagagagttccagtgaatccgagtgtgagtctgatgaggacagcacctgttctagcagctcagactctgaagtttttgacgttattgcagaaatcaaacgcaaaaaggcccaccctgaccgacttcatgatgaactttggtacaacgatccaggccagatgaatgatggaccactctgcaaatgcagcgcaaaggcaagacgcacaggaattaggcacagcatttatcctggagaagaggccatcaagccctgtcgtcctatgaccaacaatgctggcagacttttccactaccggatcacagtctccccgcctacgaactttttaactgacaggccaactgttatagaatacgatgatcacgagtatatctttgaaggattttctatgtttgcacatgcccccctgaccaatattccactgtgtaaagtaattagattcaacatagactacacgattcatttcattgaagagatgatgccggagaatttttgtgtgaaagggcttgaactcttttcactgttcctattcagagatattttggaattatatgactggaatcttaaaggtcctttgtttgaagacagccctccctgctgcccaagatttcatttcatgccacgttttgtaagatttcttccagatggaggaaaggaagtgctgtccatgcaccagattctcctgtacttgttaaggtgcagcaaagccctggtgcctgaggaggagattgccaatatgcttcagtgggaggagctggagtggcagaaatatgcagaagaatgcaaaggcatgattgttaccaaccctgggacgaaaccaagctctgtccgtatcgatcaactggatcgtgaacagttcaaccccgatgtgattacttttccgattatcgtccactttgggatacgccctgcacagttgagttatgcaggagacccacagtaccaaaaactgtggaagagttatgtgaaacttcgccacctcctagcaaatagtcccaaagtcaaacaaactgacaaacagaagctggcacagagggaggaagccctccaaaaaatacggcagaagaatacaatgagacgagaagtaacggtggagctaagtagccaaggattctggaaaactggcatccgttctgatgtctgtcagcatgcaatgatgctacctgttctgacccatcatatccgctaccaccaatgcctaatgcatttggacaagttgataggatatactttccaagatcgttgtctgttgcagctggccatgactcatccaagtcatcatttaaattttggaatgaatcctgatcatgccaggaattcattatctaactgtggaattcggcagcccaaatacggagacagaaaagttcatcacatgcacatgcggaagaaagggattaacaccttgataaatatcatgtcacgccttggccaagatgacccaactccctcgaggattaaccacaatgaacggttggaattcctgggtgatgctgttgttgaatttctgaccagcgtccatttgtactatttgtttcctagtctggaagaaggaggattagcaacctatcggactgccattgttcagaatcagcaccttgccatgctagcaaagaaacttgaactggatcgatttatgctgtatgctcacgggcctgacctttgtagagaatcggaccttcgacatgcaatggccaattgttttgaagcgttaataggagctgtttacttggagggaagcctggaggaagccaagcagttatttggacgcttgctctttaatgatccggacctgcgcgaagtctggctcaattatcctctccacccactccaactacaagagccaaatactgatcgacaacttattgaaacttctccagttctacaaaaacttactgagtttgaagaagcaattggagtaatttttactcatgttcgacttctggcaagggcattcacattgagaactgtgggatttaaccatctgaccctaggccacaatcagagaatggaattcctaggtgactccataatgcaactggtagccacagagtacttattcattcatttcccagatcatcatgaaggacacttaactttgttgcgaagctctttggtgaataatagaactcaggccaaggtagcggaggagctgggcatgcaggagtacgccataaccaacgacaagaccaagaggcctgtggcgcttcgcaccaagaccttggcggaccttttggaatcatttattgcagcgctgtacattgataaggatttggaatatgttcatactttcatgaatgtctgcttctttccacgattgaaagagttcattttgaatcaggattggaatgaccccaaatcccagcttcagcagtgttgcttgacacttaggacagaaggaaaagagccagacattcctctgtacaagactctgcagacagtgggcccatcccatgcccgaacctacactgtggctgtttatttcaagggagaaagaataggctgtgggaaaggaccaagtattcagcaagcggaaatgggagcagcaatggatgcgcttgaaaaatataattttccccagatggcccatcagaagcggttcatcgaacggaagtacagacaagagttaaaagaaatgaggtgggaaagagagcatcaagagagagagccagatgagactgaagacatcaagaaataaaggagggcatgcaagtgtggagtatttacttgctcagtaactgtgactgttgtctattgagacctagcctagttttcctgcagacaatgaacgaagtgtgctcattgaaataaaatacagagtcaaatcgctattgttgttttaatgatctgtttttagctggatggtctttattacaaagtattagatttttcttctatttaacggaaaacttgactttggtgaatgtgcattacttccttttattttgctctttaaataataaaattcaagaagcat

SEQ ID NO: 363059 - DNA, 4676 bp, Homo sapiens
cctgttccggaggcgcgggcggtgccactgtcttggtacctgcggtagtagcctggctttgctctgacggcgatctcgcggcccgagagccttttataggttgcttttcccggggatgtgaaggatacagaaatgactgtgaatcaacccatatcatcaaggagctgataatctagtggaagagttagacgtgtgcatacttcactatgatatgaggcagtctctgagcttatattctctgtggaagatgtgacatatccaggcggaacatcatgatgcagggaaacacatgtcacagaatgtcgttccacccgggacgagggtgtccccgaggacgaggaggacatggagccagaccctcagcaccatcctttaggccccaaaatctgaggctgcttcaccctcagcagcctcctgtgcaatatcaatatgaacctccaagtgccccttccaccactttctcaaactctccagcccccaattttctccctccacgaccagactttgtacccttccccccacccatgcctccgtcagcgcaaggccctcttcccccctgcccaatcaggccgcctttccccaaccaccagatgaggcaccccttcccagttcctccttgttttcctcccatgccaccaccaatgccttgtcctaataaccccccagtccctggggcacctcctggacaaggcactttccccttcatgatgccccctccctccatgcctcatcccccgccccctccagtcatgccgcagcaggttaattatcagtaccctccgggctattctcaccacaacttcccacctcccagttttaatagtttccagaacaaccctagttctttcctgcccagtgctaataacagcagtagtcctcatttcagacatctccctccatacccactcccaaaggctcccagtgagagaaggtccccagaaaggctgaaacactatgatgaccacaggcaccgagatcacagtcatgggcgaggtgagaggcatcggtccctggatcggcgggagcgaggccgcagtcccgacaggagaagacaagacagccggtacagatctgattatgaccgagggagaacaccatctcgccaccgcagctacgaacggagcagagagcgagaacgggagagacacaggcatcgagacaaccgaagatcaccatctctggaaaggtcctacaaaaaagagtataagagatctggaaggagttacggtttatcggttgttcctgaacctgctggatgcacaccagaattacctggggagattattaaaaatacagattcttgggccccacccctggagattgtgaatcatcgctccccaagtagggagaagaagagagctcgttgggaggaagaaaaagaccgttggagtgacaaccagagttctggcaaagacaagaactatacctcaatcaaggaaaaagagcccgaggagaccatgcctgacaagaatgaggaggaagaagaagaacttcttaagcctgtgtggattcgatgcactcattcagaaaactactactccagtgaccccatggatcaggtgggagattctacagtggttggaacgagtaggcttcgtgacttatatgacaaatttgaggaggagttggggagcaggcaagaaaaggccaaagctgctcggcctccgtgggaacctccaaagacgaagctcgatgaagatttagagagttccagtgaatccgagtgtgagtctgatgaggacagcacctgttctagcagctcagactctgaagtttttgacgttattgcagaaatcaaacgcaaaaaggcccaccctgaccgacttcatgatgaactttggtacaacgatccaggccagatgaatgatggaccactctgcaaatgcagcgcaaaggcaagacgcacaggaattaggcacagcatttatcctggagaagaggccatcaagccctgtcgtcctatgaccaacaatgctggcagacttttccactaccggatcacagtctccccgcctacgaactttttaactgacaggccaactgttatagaatacgatgatcacgagtatatctttgaaggattttctatgtttgcacatgcccccctgaccaatattccactgtgtaaagtaattagattcaacatagactacacgattcatttcattgaagagatgatgccggagaatttttgtgtgaaagggcttgaactcttttcactgttcctattcagagatattttggaattatatgactggaatcttaaaggtcctttgtttgaagacagccctccctgctgcccaagatttcatttcatgccacgttttgtaagatttcttccagatggaggaaaggaagtgctgtccatgcaccagattctcctgtacttgttaaggtgcagcaaagccctggtgcctgaggaggagattgccaatatgcttcagtgggaggagctggagtggcagaaatatgcagaagaatgcaaaggcatgattgttaccaaccctgggacgaaaccaagctctgtccgtatcgatcaactggatcgtgaacagttcaaccccgatgtgattacttttccgattatcgtccactttgggatacgccctgcacagttgagttatgcaggagacccacagtaccaaaaactgtggaagagttatgtgaaacttcgccacctcctagcaaatagtcccaaagtcaaacaaactgacaaacagaagctggcacagagggaggaagccctccaaaaaatacggcagaagaatacaatgagacgagaagtaacggtggagctaagtagccaaggattctggaaaactggcatccgttctgatgtctgtcagcatgcaatgatgctacctgttctgacccatcatatccgctaccaccaatgcctaatgcatttggacaagttgataggatatactttccaagatcgttgtctgttgcagctggccatgactcatccaagtcatcatttaaattttggaatgaatcctgatcatgccaggaattcattatctaactgtggaattcggcagcccaaatacggagacagaaaagttcatcacatgcacatgcggaagaaagggattaacaccttgataaatatcatgtcacgccttggccaagatgacccaactccctcgaggattaaccacaatgaacggttggaattcctgggtgatgctgttgttgaatttctgaccagcgtccatttgtactatttgtttcctagtctggaagaaggaggattagcaacctatcggactgccattgttcagaatcagcaccttgccatgctagcaaagaaacttgaactggatcgatttatgctgtatgctcacgggcctgacctttgtagagaatcggaccttcgacatgcaatggccaattgttttgaagcgttaataggagctgtttacttggagggaagcctggaggaagccaagcagttatttggacgcttgctctttaatgatccggacctgcgcgaagtctggctcaattatcctctccacccactccaactacaagagccaaatactgatcgacaacttattgaaacttctccagttctacaaaaacttactgagtttgaagaagcaattggagtaatttttactcatgttcgacttctggcaagggcattcacattgagaactgtgggatttaaccatctgaccctaggccacaatcagagaatggaattcctaggtgactccataatgcaactggtagccacagagtacttattcattcatttcccagatcatcatgaaggacacttaactttgttgcgaagctctttggtgaataatagaactcaggccaaggtagcggaggagctgggcatgcaggagtacgccataaccaacgacaagaccaagaggcctgtggcgcttcgcaccaagaccttggcggaccttttggaatcatttattgcagcgctgtacattgataaggatttggaatatgttcatactttcatgaatgtctgcttctttccacgattgaaagagttcattttgaatcaggattggaatgaccccaaatcccagcttcagcagtgttgcttgacacttaggacagaaggaaaagagccagacattcctctgtacaagactctgcagacagtgggcccatcccatgcccgaacctacactgtggctgtttatttcaagggagaaagaataggctgtgggaaaggaccaagtattcagcaagcggaaatgggagcagcaatggatgcgcttgaaaaatataattttccccagatggcccatcagaagcggttcatcgaacggaagtacagacaagagttaaaagaaatgaggtgggaaagagagcatcaagagagagagccagatgagactgaagacatcaagaaataaaggagggcatgcaagtgtggagtatttacttgctcagtaactgtgactgttgtctattgagacctagcctagttttcctgcagacaatgaacgaagtgtgctcattgaaataaaatacagagtcaaatcgctattgttgttttaatgatctgtttttagctggatggtctttattacaaagtattagatttttcttctatttaacggaaaacttgactttggtgaatgtgcattacttccttttattttgctctttaaataataaaattcaagaagcat

SEQ ID NO: 363060 - DNA, 2870 bp, Homo sapiens
actctcgaggatcccgaggcttcaacggaacttggtacaacgatccaggccagatgaatgatggaccactctgcaaatgcagcgcaaaggcaagacgcacaggaattaggcacagcatttatcctggagaagaggccatcaagccctgtcgtcctatgaccaacaatgctggcagacttttccactaccggatcacagtctccccgcctacgaactttttaactgacaggccaactgttatagaatacgatgatcacgagtatatctttgaaggattttctatgtttgcacatgcccccctgaccaatattccactgtgtaaagtaattagattcaacatagactacacgattcatttcattgaagagatgatgccggagaatttttgtgtgaaagggcttgaactcttttcactgttcctattcagagatattttggaattatatgactggaatcttaaaggtcctttgtttgaagacagccctccctgctgcccaagatttcatttcatgccacgttttgtaagatttcttccagatggaggaaaggaagtgctgtccatgcaccagattctcctgtacttgttaaggtgcagcaaagccctggtgcctgaggaggagattgccaatatgcttcagtgggaggagctggagtggcagaaatatgcagaagaatgcaaaggcatgattgttaccaaccctgggacgaaaccaagctctgtccgtatcgatcaactggatcgtgaacagttcaaccccgatgtgattacttttccgattatcgtccactttgggatacgccctgcacagttgagttatgcaggagacccacagtaccaaaaactgtggaagagttatgtgaaacttcgccacctcctagcaaatagtcccaaagtcaaacaaactgacaaacagaagctggcacagagggaggaagccctccaaaaaatacggcagaagaatacaatgagacgagaagtaacggtggagctaagtagccaaggattctggaaaactggcatccgttctgatgtctgtcagcatgcaatgatgctacctgttctgacccatcatatccgctaccaccaatgcctaatgcatttggacaagttgataggatatactttccaagatcgttgtctgttgcagctggccatgactcatccaagtcatcatttaaattttggaatgaatcctgatcatgccaggaattcattatctaactgtggaattcggcagcccaaatacggagacagaaaagttcatcacatgcacatgcggaagaaagggattaacaccttgataaatatcatgtcacgccttggccaagatgacccaactccctcgaggattaaccacaatgaacggttggaattcctgggtgatgctgttgttgaatttctgaccagcgtccatttgtactatttgtttcctagtctggaagaaggaggattagcaacctatcggactgccattgttcagaatcagcaccttgccatgctagcaaagaaacttgaactggatcgatttatgctgtatgctcacgggcctgacctttgtagagaatcggaccttcgacatgcaatggccaattgttttgaagcgttaataggagctgtttacttggagggaagcctggaggaagccaagcagttatttggacgcttgctctttaatgatccggacctgcgcgaagtctggctcaattatcctctccacccactccaactacaagagccaaatactgatcgacaacttattgaaacttctccagttctacaaaaacttactgagtttgaagaagcaattggagtaatttttactcatgttcgacttctggcaagggcattcacattgagaactgtgggatttaaccatctgaccctaggccacaatcagagaatggaattcctaggtgactccataatgcaactggtagccacagagtacttattcattcatttcccagatcatcatgaaggacacttaactttgttgcgaagctctttggtgaataatagaactcaggccaaggtagcggaggagctgggcatgcaggagtacgccataaccaacgacaagaccaagaggcctgtggcgcttcgcaccaagaccttggcggaccttttggaatcatttattgcagcgctgtacattgataaggatttggaatatgttcatactttcatgaatgtctgcttctttccacgattgaaagagttcattttgaatcaggattggaatgaccccaaatcccagcttcagcagtgttgcttgacacttaggacagaaggaaaagagccagacattcctctgtacaagactctgcagacagtgggcccatcccatgcccgaacctacactgtggctgtttatttcaagggagaaagaataggctgtgggaaaggaccaagtattcagcaagcggaaatgggagcagcaatggatgcgcttgaaaaatataattttccccagatggcccatcagaagcggttcatcgaacggaagtacagacaagagttaaaagaaatgaggtgggaaagagagcatcaagagagagagccagatgagactgaagacatcaagaaataaaggagggcatgcaagtgtggagtatttacttgctcagtaactgtgactgttgtctattgagacctagcctagttttcctgcagacaatgaacgaagtgtgctcattgaaataaaatacagagtcaaatcgctattgttgttttaatgatctgtttttagctggatggtctttattacaaagtattagatttttcttctatttaacggaaaacttgactttggtgaatgtgcattacttccttttattttgctctttaaataataaaattcaagaagcat

SEQ ID NO: 363061 - DNA, 4485 bp, Homo sapiens
agagagagagagagagaactagtctcgagcacaacttcccacctcccagttttaatagtttccagaacaaccctagttctttcctgcccagtgctaataacagcagtagtcctcatttcagacatctccctccatacccactcccaaaggctcccagtgagagaaggtccccagaaaggctgaaacactatgatgaccacaggcaccgagatcacagtcatgggcgaggtgagaggcatcggtccctggatcggcgggagcgaggccgcagtcccgacaggagaagacaagacagccggtacagatctgattatgaccgagggagaacaccatctcgccaccgcagctacgaacggagcagtcgctccccaagtagggagaagaagagagctcgttgggaggaagaaaaagaccgttggagtgacaaccagagttctggcaaagacaagaactatacctcaatcaaggaaaaagagcccgaggagaccatgcctgacaagaatgaggaggaagaagaagaacttcttaagcctgtgtggattcgatgcactcattcagaaaactactactccagtgaccccatggatcaggtgggagattctacagtggttggaacgagtaggcttcgtgacttatatgacaaatttgaggaggagttggggagcaggcaagaaaaggccaaagctgctcggcctccgtgggaacctccaaagacgaagctcgatgaagatttagagagttccagtgaatccgagtgtgagtctgatgaggacagcacctgttctagcagctcagactctgaagtttttgacgttattgcagaaatcaaacgcaaaaaggcccaccctgaccgacttcatgatgaactttggtacaacgatccaggccagatgaatgatggaccactctgcaaatgcagcgcaaaggcaagacgcacaggaattaggcacagcatttatcctggagaagaggccatcaagccctgtcgtcctatgaccaacaatgctggcagacttttccactaccggatcacagtctccccgcctacgaactttttaactgacaggccaactgttatagaatacgatgatcacgagtatatctttgaaggattttctatgtttgcacatgcccccctgaccaatattccactgtgtaaagtaattagattcaacatagactacacgattcatttcattgaagagatgatgccggagaatttttgtgtgaaagggcttgaactcttttcactgttcctattcagagatattttggaattatatgactggaatcttaaaggtcctttgtttgaagacagccctccctgctgcccaagatttcatttcatgccacgttttgtaagatttcttccagatggaggaaaggaagtgctgtccatgcaccagattctcctgtacttgttaaggtgcagcaaagccctggtgcctgaggaggagattgccaatatgcttcagtgggaggagctggagtggcagaaatatgcagaagaatgcaaaggcatgattgttaccaaccctgggacgaaaccaagctctgtccgtatcgatcaactggatcgtgaacagttcaaccccgatgtgattacttttccgattatcgtccactttgggatacgccctgcacagttgagttatgcaggagacccacagtaccaaaaactgtggaagagttatgtgaaacttcgccacctcctagcaaatagtcccaaagtcaaacaaactgacaaacagaagctggcacagagggaggaagccctccaaaaaatacggcagaagaatacaatgagacgagaagtaacggtggagctaagtagccaaggattctggaaaactggcatccgttctgatgtctgtcagcatgcaatgatgctacctgttctgacccatcatatccgctaccaccaatgcctaatgcatttggacaagttgataggatatactttccaagatcgttgtctgttgcagctggccatgactcatccaagtcatcatttaaattttggaatgaatcctgatcatgccaggaattcattatctaactgtggaattcggcagcccaaatacggagacagaaaagttcatcacatgcacatgcggaagaaagggattaacaccttgataaatatcatgtcacgccttggccaagatgacccaactccctcgaggattaaccacaatgaacggttggaattcctgggtgatgctgttgttgaatttctgaccagcgtccatttgtactatttgtttcctagtctggaagaaggaggattagcaacctatcggactgccattgttcagaatcagcaccttgccatgctagcaaagaaacttgaactggatcgatttatgctgtatgctcacgggcctgacctttgtagagaatcggaccttcgacatgcaatggccaattgttttgaagcgttaataggagctgtttacttggagggaagcctggaggaagccaagcagttatttggacgcttgctctttaatgatccggacctgcgcgaagtctggctcaattatcctctccacccactccaactacaagagccaaatactgatcgacaacttattgaaacttctccagttctacaaaaacttactgagtttgaagaagcaattggagtaatttttactcatgttcgacttctggcaagggcattcacattgagaactgtgggatttaaccatctgaccctagatggggtttcttcatgttgccaggctggtctcaaactcctgggctcaagtgatccacctgcctcagcctcacaaagcactgggattagaggcatgagccactgcagccggccagaaggccacaatcagagaatggaattcctaggtgactccataatgcaactggtagccacagagtacttattcattcatttcccagatcatcatgaaggacacttaactttgttgcgaagctctttggtgaataatagaactcaggccaaggtagcggaggagctgggcatgcaggagtacgccataaccaacgacaagaccaagaggcctgtggcgcttcgcaccaagaccttggcggaccttttggaatcatttattgcagcgctgtacattgataaggatttggaatatgttcatactttcatgaatgtctgcttctttccacgattgaaagagttcattttgaatcaggattggaatgaccccaaatcccagcttcagcagtgttgcttgacacttaggacagaaggaaaagagccagacattcctctgtacaagactctgcagacagtgggcccatcccatgcccgaacctacactgtggctgtttatttcaagggagaaagaataggctgtgggaaaggaccaagtattcagcaagcggaaatgggagcagcaatggatgcgcttgaaaaatataattttccccagatggcccatcagaagcggttcatcgaacggaagtacagacaagagttaaaagaaatgaggtgggaaagagagcatcaagagagagagccagatgagactgaagacatcaagaaataaaggagggcatgcaagtgtggagtatttacttgctcagtaactgtgactgttgtctattgagacctagcctagttttcctgcagacaatgaacgaagtgtgctcattgaaataaaatacagagtcaaatcgctattgttgttttaatgatctgtttttagctggatggtctttattacaaagtattagatttttcttctatttaacggaaaacttgactttggtgaatgtgcattacttccttttattttgctctttaaataataaaattcaagaagcatattctatgtggaatagatcctgtttttccatctgtgtcccagattgtgaccctagactttcaattgacaagtaaaaaattgactttactagacattttgactgtgctctagtaacatctatcctttttcaaatctctggatttttaagtagattgttcagctttcatccggtggctgttcatcaagttatcagctgcaaatattgaacttacctctctctaagcagtgagtgttttgtagaaggaatccgtttaacgattaattggctaatgggagaaggggaaagactgatattcaagtcatacagattctttgaatcattagaataggagagaaatcatgattctaagccaggccacactttaaaccaagtgctctcaccctggggttagtggaacctttaagaagttaatgaacagacttcaaggaagtcaaaaacctcccaatactatattcaattttctgtgtgtgtttgagatttgagagggcatggggagcaggaaggaggagggtttatagcttttatcagcctctctaagtgggccctgcagtaaaaggctaacatgacattcaaagacataacattttaaaaaaagttattccaaactaaacatcactggtttcttattaataaaggcaaaacttctttgtaaaacaaatc

SEQ ID NO: 363062 - DNA, 2015 bp, Homo sapiens
  misc_feature (36)..(36): n is a, c, g, or t
cggtacccactagtccacggttggctctagaggggntagagggggtgctatagggtaaatacggcccctatttcaaagatttttaggggaattaattctaggacgatgggcatgaaactgtggtttgctccacagatttcagagcattgaccgtagtatacccccggacctgcgcgaagtctggctcaattatcctctccacccactccaactacaagagccaaatactgatcgacaacttattgaaacttctccagttctacaaaaacttactgagtttgaagaagcaattggagtaatttttactcatgttcgacttctggcaagggcattcacattgagaactgtgggatttaaccatctgaccctaggccacaatcagagaatggaattcctaggtgactccataatgcaactggtagccacagagtacttattcattcatttcccagatcatcatgaaggacacttaactttgttgcgaagctctttggtgaataatagaactcaggccaaggtagcggaggagctgggcatgcaggagtacgccataaccaacgacaagaccaagaggcctgtggcgcttcgcaccaagaccttggcggaccttttggaatcatttattgcagcgctgtacattgataaggatttggaatatgttcatactttcatgaatgtctgcttctttccacgattgaaagagttcattttgaatcaggattggaatgaccccaaatcccagcttcagcagtgttgcttgacacttaggacagaaggaaaagagccagacattcctctgtacaagactctgcagacagtgggcccatcccatgcccgaacctacactgtggctgtttatttcaagggagaaagaataggctgtgggaaaggaccaagtattcagcaagcggaaatgggagcagcaatggatgcgcttgaaaaatataattttccccagatggcccatcagaagcggttcatcgaacggaagtacagacaagagttaaaagaaatgaggtgggaaagagagcatcaagagagagagccagatgagactgaagacatcaagaaataaaggagggcatgcaagtgtggagtatttacttgctcagtaactgtgactgttgtctattgagacctagcctagttttcctgcagacaatgaacgaagtgtgctcattgaaataaaatacagagtcaaatcgctattgttgttttaatgatctgtttttagctggatggtctttattacaaagtattagatttttcttctatttaacggaaaacttgactttggtgaatgtgcattacttccttttattttgctctttaaataataaaattcaagaagcatattctatgtggaatagatcctgtttttccatctgtgtcccagattgtgaccctagactttcaattgacaagtaaaaaattgactttactagacattttgactgtgctctagtaacatctatcctttttcaaatctctggatttttaagtagattgttcagctttcatccggtggctgttcatcaagttatcagctgcaaatattgaacttacctctctctaagcagtgagtgttttgtagaaggaatccgtttaacgattaattggctaatgggagaaggggaaagactgatattcaagtcatacagattctttgaatcattagaataggagagaaatcatgattctaagccaggccacactttaaaccaagtgctctcaccctggggttagtggaacctttaagaagttaatgaacagacttcaaggaagtcaaaaacctcccaatactatattcaattttctgtgtgtgtttgagatttgagagggcatggggagcaggaaggaggagggtttatagcttttatcagcctctctaagtgggccctgcagtaaaaggctaacatgacattcaaagacataacattttaaaaaaagttattccaaactaaacatcactggtttcttattaataaaggcaaaacttctttgtaaaacaaatc

SEQ ID NO: 363063 - DNA, 3746 bp, Homo sapiens
agagagagagagagagaactagtctcgagcacaacttcccacctcccagttttaatagtttccagaacaaccctagttctttcctgcccagtgctaataacagcagtagtcctcatttcagacatctccctccatacccactcccaaaggctcccagtgagagaaggtccccagaaaggctgaaacactatgatgaccacaggcaccgagatcacagtcatgggcgaggtgagaggcatcggtccctggatcggcgggagcgaggccgcagtcccgacaggagaagacaagacagccggtacagatctgattatgaccgagggagaacaccatctcgccaccgcagctacgaacggagcagtcgctccccaagtagggagaagaagagagctcgttgggaggaagaaaaagaccgttggagtgacaaccagagttctggcaaagacaagaactatacctcaatcaaggaaaaagagcccgaggagaccatgcctgacaagaatgaggaggaagaagaagaacttcttaagcctgtgtggattcgatgcactcattcagaaaactactactccagtgaccccatggatcaggtgggagattctacagtggttggaacgagtaggcttcgtgacttatatgacaaatttgaggaggagttggggagcaggcaagaaaaggccaaagctgctcggcctccgtgggaacctccaaagacgaagctcgatgaagatttagagagttccagtgaatccgagtgtgagtctgatgaggacagcacctgttctagcagctcagactctgaagtttttgacgttattgcagaaatcaaacgcaaaaaggcccaccctgaccgacttcatgatgaactttggtacaacgatccaggccagatgaatgatggaccactctgcaaatgcagcgcaaaggcaagacgcacaggaattaggcacagcatttatcctggagaagaggccatcaagccctgtcgtcctatgaccaacaatgctggcagacttttccactaccggatcacagtctccccgcctacgaactttttaactgacaggccaactgttatagaatacgatgatcacgagtatatctttgaaggattttctatgtttgcacatgcccccctgaccaatattccactgtgtaaagtaattagattcaacatagactacacgattcatttcattgaagagatgatgccggagaatttttgtgtgaaagggcttgaactcttttcactgttcctattcagagatattttggaattatatgactggaatcttaaaggtcctttgtttgaagacagccctccctgctgcccaagatttcatttcatgccacgttttgtaagatttcttccagatggaggaaaggaagtgctgtccatgcaccagattctcctgtacttgttaaggtgcagcaaagccctggtgcctgaggaggagattgccaatatgcttcagtgggaggagctggagtggcagaaatatgcagaagaatgcaaaggcatgattgttaccaaccctgggacgaaaccaagctctgtccgtatcgatcaactggatcgtgaacagttcaaccccgatgtgattacttttccgattatcgtccactttgggatacgccctgcacagttgagttatgcaggagacccacagtaccaaaaactgtggaagagttatgtgaaacttcgccacctcctagcaaatagtcccaaagtcaaacaaactgacaaacagaagctggcacagagggaggaagccctccaaaaaatacggcagaagaatacaatgagacgagaagtaacggtggagctaagtagccaaggattctggaaaactggcatccgttctgatgtctgtcagcatgcaatgatgctacctgttctgacccatcatatccgctaccaccaatgcctaatgcatttggacaagttgataggatatactttccaagatcgttgtctgttgcagctggccatgactcatccaagtcatcatttaaattttggaatgaatcctgatcatgccaggaattcattatctaactgtggaattcggcagcccaaatacggagacagaaaagttcatcacatgcacatgcggaagaaagggattaacaccttgataaatatcatgtcacgccttggccaagatgacccaactccctcgaggattaaccacaatgaacggttggaattcctgggtgatgctgttgttgaatttctgaccagcgtccatttgtactatttgtttcctagtctggaagaaggaggattagcaacctatcggactgccattgttcagaatcagcaccttgccatgctagcaaagaaacttgaactggatcgatttatgctgtatgctcacgggcctgacctttgtagagaatcggaccttcgacatgcaatggccaattgttttgaagcgttaataggagctgtttacttggagggaagcctggaggaagccaagcagttatttggacgcttgctctttaatgatccggacctgcgcgaagtctggctcaattatcctctccacccactccaactacaagagccaaatactgatcgacaacttattgaaacttctccagttctacaaaaacttactgagtttgaagaagcaattggagtaatttttactcatgttcgacttctggcaagggcattcacattgagaactgtgggatttaaccatctgaccctaggccacaatcagagaatggaattcctaggtgactccataatgcaactggtagccacagagtacttattcattcatttcccagatcatcatgaaggacacttaactttgttgcgaagctctttggtgaataatagaactcaggccaaggtagcggaggagctgggcatgcaggagtacgccataaccaacgacaagaccaagaggcctgtggcgcttcgcaccaagaccttggcggaccttttggaatcatttattgcagcgctgtacattgataaggatttggaatatgttcatactttcatgaatgtctgcttctttccacgattgaaagagttcattttgaatcaggattggaatgaccccaaatcccagcttcagcagtgttgcttgacacttaggacagaaggaaaagagccagacattcctctgtacaagactctgcagacagtgggcccatcccatgcccgaacctacactgtggctgtttatttcaagggagaaagaataggctgtgggaaaggaccaagtattcagcaagcggaaatgggagcagcaatggatgcgcttgaaaaatataattttccccagatggcccatcagaagcggttcatcgaacggaagtacagacaagagttaaaagaaatgaggtgggaaagagagcatcaagagagagagccagatgagactgaagacgagcagtcattctcccaacagcacctgttgtttcctgactgcataatgatcaccattctaatctggtgtgagatggtatctacattgtggttatgattagcatttctctgattagccagtgatgataagacatttttaccatgtgtctgtcggctgcacaaatatctccttttgagaagtgtctgttcatatccttcacccacttttgatggggttgctttgattttttcttgtaaatttgtttaagttctcttgtagattctggatattagccctattgtcagatgggtagattgtgcaattttctcccttcatgtagtgactgtcacg

SEQ ID NO: 363064 - DNA, 3345 bp, Homo sapiens
agagagagagagagagaactagtctcgagcacaacttcccacctcccagttttaatagtttccagaacaaccctagttctttcctgcccagtgctaataacagcagtagtcctcatttcagacatctccctccatacccactcccaaaggctcccagtgagagaaggtccccagaaaggctgaaacactatgatgaccacaggcaccgagatcacagtcatgggcgaggtgagaggcatcggtccctggatcggcgggagcgaggccgcagtcccgacaggagaagacaagacagccggtacagatctgattatgaccgagggagaacaccatctcgccaccgcagctacgaacggagcagtcgctccccaagtagggagaagaagagagctcgttgggaggaagaaaaagaccgttggagtgacaaccagagttctggcaaagacaagaactatacctcaatcaaggaaaaagagcccgaggagaccatgcctgacaagaatgaggaggaagaagaagaacttcttaagcctgtgtggattcgatgcactcattcagaaaactactactccagtgaccccatggatcaggtgggagattctacagtggttggaacgagtaggcttcgtgacttatatgacaaatttgaggaggagttggggagcaggcaagaaaaggccaaagctgctcggcctccgtgggaacctccaaagacgaagctcgatgaagatttagagagttccagtgaatccgagtgtgagtctgatgaggacagcacctgttctagcagctcagactctgaagtttttgacgttattgcagaaatcaaacgcaaaaaggcccaccctgaccgacttcatgatgaactttggtacaacgatccaggccagatgaatgatggaccactctgcaaatgcagcgcaaaggcaagacgcacaggaattaggcacagcatttatcctggagaagaggccatcaagccctgtcgtcctatgaccaacaatgctggcagacttttccactaccggatcacagtctccccgcctacgaactttttaactgacaggccaactgttatagaatacgatgatcacgagtatatctttgaaggattttctatgtttgcacatgcccccctgaccaatattccactgtgtaaagtaattagattcaacatagactacacgattcatttcattgaagagatgatgccggagaatttttgtgtgaaagggcttgaactcttttcactgttcctattcagagatattttggaattatatgactggaatcttaaaggtcctttgtttgaagacagccctccctgctgcccaagatttcatttcatgccacgttttgtaagatttcttccagatggaggaaaggaagtgctgtccatgcaccagattctcctgtacttgttaaggtgcagcaaagccctggtgcctgaggaggagattgccaatatgcttcagtgggaggagctggagtggcagaaatatgcagaagaatgcaaaggcatgattgttaccaaccctgggacgaaaccaagctctgtccgtatcgatcaactggatcgtgaacagttcaaccccgatgtgattacttttccgattatcgtccactttgggatacgccctgcacagttgagttatgcaggagacccacagtaccaaaaactgtggaagagttatgtgaaacttcgccacctcctagcaaatagtcccaaagtcaaacaaactgacaaacagaagctggcacagagggaggaagccctccaaaaaatacggcagaagaatacaatgagacgagaagtaacggtggagctaagtagccaaggattctggaaaactggcatccgttctgatgtctgtcagcatgcaatgatgctacctgttctgacccatcatatccgctaccaccaatgcctaatgcatttggacaagttgataggatatactttccaagatcgttgtctgttgcagctggccatgactcatccaagtcatcatttaaattttggaatgaatcctgatcatgccaggaattcattatctaactgtggaattcggcagcccaaatacggagacagaaaagttcatcacatgcacatgcggaagaaagggattaacaccttgataaatatcatgtcacgccttggccaagatgacccaactccctcgaggattaaccacaatgaacggttggaattcctgggtgatgctgttgttgaatttctgaccagcgtccatttgtactatttgtttcctagtctggaagaaggaggattagcaacctatcggactgccattgttcagaatcagcaccttgccatgctagcaaagaaacttgaactggatcgatttatgctgtatgctcacgggcctgacctttgtagagaatcggaccttcgacatgcaatggccaattgttttgaagcgttaataggagctgtttacttggagggaagcctggaggaagccaagcagttatttggacgcttgctctttaatgatccggacctgcgcgaagtctggctcaattatcctctccacccactccaactacaagagccaaatactgatcgacaacttattgaaacttctccagttctacaaaaacttactgagtttgaagaagcaattggagtaatttttactcatgttcgacttctggcaagggcattcacattgagaactgtgggatttaaccatctgaccctagatggggtttcttcatgttgccaggctggtctcaaactcctgggctcaagtgatccacctgcctcagcctcacaaagcactgggattagaggcatgagccactgcagccggccagaaggccacaatcagagaatggaattcctaggtgactccataatgcaactggtagccacagagtacttattcattcatttcccagatcatcatgaaggacacttaactgactctgcagacagtgggcccatcccatgcccgaacctacactgtggctgtttatttcaagggagaaagaataggctgtgggaaaggaccaagtattcagcaagcggaaatgggagcagcaatggatgcgcttgaaaaatataattttccccagatggcccatcagaagcggttcatcgaacggaagtacagacaagagttaaaagaaatgaggtgggaaagagagcatcaagagagagagccagatgagactgaagacatcaagaaataaaggagggcatgcaagtgtggagtatttacttgctcagtaactgtgactgttgtctattgagacctagcctagttttcctgcagacaatgaacgaagtgtgctcattgaaataaaatacagagtcaaatc

SEQ ID NO: 363065 - DNA, 1404 bp, Homo sapiens
aggcacagattactgagcaagtaagatactccacagcttgcatgcccgtcctttatagcatgaatgtctgcttctttccacgattgaaagagttcattttgaatcaggattggaatgaccccaaatcccagcttcagcagtgttgcttgacacttaggacagaaggaaaagagccagacattcctctgtacaagactctgcagacagtgggcccatcccatgcccgaacctacactgtggctgtttatttcaagggagaaagaataggctgtgggaaaggaccaagtattcagcaagcggaaatgggagcagcaatggatgcgcttgaaaaatataattttccccagatggcccatcagaagcggttcatcgaacggaagtacagacaagagttaaaagaaatgaggtgggaaagagagcatcaagagagagagccagatgagactgaagacatcaagaaataaaggagggcatgcaagtgtggagtatttacttgctcagtaactgtgactgttgtctattgagacctagcctagttttcctgcagacaatgaacgaagtgtgctcattgaaataaaatacagagtcaaatcgctattgttgttttaatgatctgtttttagctggatggtctttattacaaagtattagatttttcttctatttaacggaaaacttgactttggtgaatgtgcattacttccttttattttgctctttaaataataaaattcaagaagcatattctatgtggaatagatcctgtttttccatctgtgtcccagattgtgaccctagactttcaattgacaagtaaaaaattgactttactagacattttgactgtgctctagtaacatctatcctttttcaaatctctggatttttaagtagattgttcagctttcatccggtggctgttcatcaagttatcagctgcaaatattgaacttacctctctctaagcagtgagtgttttgtagaaggaatccgtttaacgattaattggctaatgggagaaggggaaagactgatattcaagtcatacagattctttgaatcattagaataggagagaaatcatgattctaagccaggccacactttaaaccaagtgctctcaccctggggttagtggaacctttaagaagttaatgaacagacttcaaggaagtcaaaaacctcccaatactatattcaattttctgtgtgtgtttgagatttgagagggcatggggagcaggaaggaggagggtttatagcttttatcagcctctctaagtgggccctgcagtaaaaggctaacatgacattcaaagacataacattttaaaaaaagttattccaaactaaacatcactggtttcttattaataaaggcaaaacttctttgtaaaacaaatc

SEQ ID NO: 363066 - DNA, 1595 bp, Homo sapiens
aagttaaacgacggctagcaaatctgccagagggatgctcaggagagacacgttgaaagccgaggtggagagaaggtggcaccagagggaagtgcccatgtgggttatggaatgacgcaatgcctatacaatccaggaagggacactgaagacagcctcatctggtctttactttgcagttggagaaactgaggctggagagcgcaagtgagtctgctgaggctatacagcactttataccagaacctgggctagaacaagacctctggcctcttggaatgagttcattttgaatcaggattggaatgaccccaaatcccagcttcagcagtgttgcttgacacttaggacagaaggaaaagagccagacattcctctgtacaagactctgcagacagtgggcccatcccatgcccgaacctacactgtggctgtttatttcaagggagaaagaataggctgtgggaaaggaccaagtattcagcaagcggaaatgggagcagcaatggatgcgcttgaaaaatataattttccccagatggcccatcagaagcggttcatcgaacggaagtacagacaagagttaaaagaaatgaggtgggaaagagagcatcaagagagagagccagatgagactgaagacatcaagaaataaaggagggcatgcaagtgtggagtatttacttgctcagtaactgtgactgttgtctattgagacctagcctagttttcctgcagacaatgaacgaagtgtgctcattgaaataaaatacagagtcaaatcgctattgttgttttaatgatctgtttttagctggatggtctttattacaaagtattagatttttcttctatttaacggaaaacttgactttggtgaatgtgcattacttccttttattttgctctttaaataataaaattcaagaagcatattctatgtggaatagatcctgtttttccatctgtgtcccagattgtgaccctagactttcaattgacaagtaaaaaattgactttactagacattttgactgtgctctagtaacatctatcctttttcaaatctctggatttttaagtagattgttcagctttcatccggtggctgttcatcaagttatcagctgcaaatattgaacttacctctctctaagcagtgagtgttttgtagaaggaatccgtttaacgattaattggctaatgggagaaggggaaagactgatattcaagtcatacagattctttgaatcattagaataggagagaaatcatgattctaagccaggccacactttaaaccaagtgctctcaccctggggttagtggaacctttaagaagttaatgaacagacttcaaggaagtcaaaaacctcccaatactatattcaattttctgtgtgtgtttgagatttgagagggcatggggagcaggaaggaggagggtttatagcttttatcagcctctctaagtgggccctgcagtaaaaggctaacatgacattcaaagacataacattttaaaaaaagttattccaaactaaacatcactggtttcttattaataaaggcaaaacttctttgtaaaacaaatc

SEQ ID NO: 363067 - DNA, 1316 bp, Homo sapiens
cttaactctgtctaggcactaagtacatggttttcctcatagttacatagtaaccatgacaaataacactttaccataataaatgttctttcctttccctttcaggactctgcagacagtgggcccatcccatgcccgaacctacactgtggctgtttatttcaagggagaaagaataggctgtgggaaaggaccaagtattcagcaagcggaaatgggagcagcaatggatgcgcttgaaaaatataattttccccagatggcccatcagaagcggttcatcgaacggaagtacagacaagagttaaaagaaatgaggtgggaaagagagcatcaagagagagagccagatgagactgaagacatcaagaaataaaggagggcatgcaagtgtggagtatttacttgctcagtaactgtgactgttgtctattgagacctagcctagttttcctgcagacaatgaacgaagtgtgctcattgaaataaaatacagagtcaaatcgctattgttgttttaatgatctgtttttagctggatggtctttattacaaagtattagatttttcttctatttaacggaaaacttgactttggtgaatgtgcattacttccttttattttgctctttaaataataaaattcaagaagcatattctatgtggaatagatcctgtttttccatctgtgtcccagattgtgaccctagactttcaattgacaagtaaaaaattgactttactagacattttgactgtgctctagtaacatctatcctttttcaaatctctggatttttaagtagattgttcagctttcatccggtggctgttcatcaagttatcagctgcaaatattgaacttacctctctctaagcagtgagtgttttgtagaaggaatccgtttaacgattaattggctaatgggagaaggggaaagactgatattcaagtcatacagattctttgaatcattagaataggagagaaatcatgattctaagccaggccacactttaaaccaagtgctctcaccctggggttagtggaacctttaagaagttaatgaacagacttcaaggaagtcaaaaacctcccaatactatattcaattttctgtgtgtgtttgagatttgagagggcatggggagcaggaaggaggagggtttatagcttttatcagcctctctaagtgggccctgcagtaaaaggctaacatgacattcaaagacataacattttaaaaaaagttattccaaactaaacatcactggtttcttattaataaaggcaaaacttctttgtaaaacaaatc

SEQ ID NO: 363068 - DNA, 635 bp, Homo sapiens
tgatgaactttggtacaacgatccaggccaggtgcgtgtttttatgcccttgctgtgaaggttgcaaacccagacataacggttattgctctgggctcagaagatacatgttgcctagtattgaaactgaattttactgtcagggttttgtccttcagagctatttcttttcagcttcaggttagttccaaagcataagcaccagagcagctgtcccttgaatcatttttgatgatgtttgtaaattccatgttggggagaggagtaatggccctgcctcattaaattgcagtagatggaaggagacacatggtaggatgaggagagagaacttggaggtctttttagaagtagttcacctggaaggtatcttgctgcaaaatagtaaataagtcctataagatttcttttttttagttggtaacagtcacaagttctcttccttgttaagcatgtttgagctaaaaacataataggtggacataattatttttatttttaattactgtcttaatatgaagtaatacataataaaattagcattgttaaaaaagatttgtgtcacacagatatataatacatacaaaaattatatctttaatgcatgtaaagttaggaagctaaggcatatctgt

SEQ ID NO: 363069 - DNA, 383 bp, Homo sapiens
gctaggagagtgatgctaaagcacctgcttggtaacattcccaagccacacgtctgtgttttggcatttctgtatgttcggtgcctgctatacccaagttcacatcagatactgaaatttacaatcaggggcactcatccagacttccattatgtttttgagtgatgaaagaataagggaagaaaacagttttctatcttgtgccttataaaatacaattatacacatttcatatgcacgtatatttgtatgtgtatatgtttagttgcattattctttgcactagattattaaatataattttattaaatataaaatatatttccttgtgtcagatataattttccccagatggcccatcagaagcggttcatcgaacggaa

SEQ ID NO: 363070 - DNA, 481 bp, Homo sapiens
ggctaagtgtattggaaactgcaaaatcagtgttatggtaattgcagaaatattttgtagcattggcagtttgggaaacatgtttatgtctgttttattctttctgttttttagagcttatattctctgtggaagatgtgacatatccaggcggaacatcatgatgcagggaaacacatggtgagtgccgtgatgggaatggcaatagtttgggagaaccgagagaggagcagacattggtgctgggctatagagggtggaaaggatttagatacatggggagaggggataatgtgctcattctttcaacagtgggcacaatacaatagagggccatgcccagggctgggaagccagaccagaacagttaatagaaatcccagagcgctgccctgacagcgcttgcagttccgaggtgcaggcagacattaaaggtggaattaggtccttagaaggtggattgtaattattgtaggacctg

SEQ ID NO: 363071 - DNA, 446 bp, Homo sapiens
cagtcccgacaggagaagacaagacagccggtacagatctgattatgaccgagggagaacaccatctcgccaccgcagctacgaacggagcaggtaaaccgcttgtgtgtagttctttaatgaactgcagaggcccaggcacggtcattctccatttatgacaaccaaaccaaaaggatccagtagggcatcttgatttatgtaaggaaaggaagcacattttggactctgttttcaagaggaagaaacaactgacaaataagttgatgtcagaaaaaaattgcttttaaaaagcattccaaatatatcagtgtagattcatttcagtgaatataagacttttactctgcataatacagttgacattttaatgatgatcccatgagatgaaagatcttgtattttttgtgttatcatagattaaattatgttcaatgtgatcatca

SEQ ID NO: 363072 - DNA, 283 bp, Homo sapiens
cttgtccatcctgactctcagcctcaaagtcatagccttccttagaatgatggctttctgccattaagaataatcaaaagaatgtaatgtatgatttgaagaggcctcttaaaataactggttttgttgcattttaggtttacctcctctttacctgagatgtttgcctgtccttttccttaggtaccaaaaactgtggaagagttatgtgaaacttcgccacctcctagcaaatagtcccaaagtcaaacaaactgacaaacagaagctggcacagagggag

SEQ ID NO: 363073 - DNA, 3707 bp, Homo sapiens
agagagagagagagagaactagtctcgagcacaacttcccacctcccagttttaatagtttccagaacaaccctagttctttcctgcccagtgctaataacagcagtagtcctcatttcagacatctccctccatacccactcccaaaggctcccagtgagagaaggtccccagaaaggctgaaacactatgatgaccacaggcaccgagatcacagtcatgggcgaggtgagaggcatcggtccctggatcggcgggagcgaggccgcagtcccgacaggagaagacaagacagccggtacagatctgattatgaccgagggagaacaccatctcgccaccgcagctacgaacggagcagtcgctccccaagtagggagaagaagagagctcgttgggaggaagaaaaagaccgttggagtgacaaccagagttctggcaaagacaagaactatacctcaatcaaggaaaaagagcccgaggagaccatgcctgacaagaatgaggaggaagaagaagaacttcttaagcctgtgtggattcgatgcactcattcagaaaactactactccagtgaccccatggatcaggtgggagattctacagtggttggaacgagtaggcttcgtgacttatatgacaaatttgaggaggagttggggagcaggcaagaaaaggccaaagctgctcggcctccgtgggaacctccaaagacgaagctcgatgaagatttagagagttccagtgaatccgagtgtgagtctgatgaggacagcacctgttctagcagctcagactctgaagtttttgacgttattgcagaaatcaaacgcaaaaaggcccaccctgaccgacttcatgatgaactttggtacaacgatccaggccagatgaatgatggaccactctgcaaatgcagcgcaaaggcaagacgcacaggaattaggcacagcatttatcctggagaagaggccatcaagccctgtcgtcctatgaccaacaatgctggcagacttttccactaccggatcacagtctccccgcctacgaactttttaactgacaggccaactgttatagaatacgatgatcacgagtatatctttgaaggattttctatgtttgcacatgcccccctgaccaatattccactgtgtaaagtaattagattcaacatagactacacgattcatttcattgaagagatgatgccggagaatttttgtgtgaaagggcttgaactcttttcactgttcctattcagagatattttggaattatatgactggaatcttaaaggtcctttgtttgaagacagccctccctgctgcccaagatttcatttcatgccacgttttgtaagatttcttccagatggaggaaaggaagtgctgtccatgcaccagattctcctgtacttgttaaggtgcagcaaagccctggtgcctgaggaggagattgccaatatgcttcagtgggaggagctggagtggcagaaatatgcagaagaatgcaaaggcatgattgttaccaaccctgggacgaaaccaagctctgtccgtatcgatcaactggatcgtgaacagttcaaccccgatgtgattacttttccgattatcgtccactttgggatacgccctgcacagttgagttatgcaggagacccacagtaccaaaaactgtggaagagttatgtgaaacttcgccacctcctagcaaatagtcccaaagtcaaacaaactgacaaacagaagctggcacagagggaggaagccctccaaaaaatacggcagaagaatacaatgagacgagaagtaacggtggagctaagtagccaaggattctggaaaactggcatccgttctgatgtctgtcagcatgcaatgatgctacctgttctgacccatcatatccgctaccaccaatgcctaatgcatttggacaagttgataggatatactttccaagatcgttgtctgttgcagctggccatgactcatccaagtcatcatttaaattttggaatgaatcctgatcatgccaggaattcattatctaactgtggaattcggcagcccaaatacggagacagaaaagttcatcacatgcacatgcggaagaaagggattaacaccttgataaatatcatgtcacgccttggccaagatgacccaactccctcgaggattaaccacaatgaacggttggaattcctgggtgatgctgttgttgaatttctgaccagcgtccatttgtactatttgtttcctagtctggaagaaggaggattagcaacctatcggactgccattgttcagaatcagcaccttgccatgctagcaaagaaacttgaactggatcgatttatgctgtatgctcacgggcctgacctttgtagagaatcggaccttcgacatgcaatggccaattgttttgaagcgttaataggagctgtttacttggagggaagcctggaggaagccaagcagttatttggacgcttgctctttaatgatccggacctgcgcgaagtctggctcaattatcctctccacccactccaactacaagagccaaatactgatcgacaacttattgaaacttctccagttctacaaaaacttactgagtttgaagaagcaattggagtaatttttactcatgttcgacttctggcaagggcattcacattgagaactgtgggatttaaccatctgaccctaggccacaatcagagaatggaattcctaggtgactccataatgcaactggtagccacagagtacttattcattcatttcccagatcatcatgaaggacacttaactttgttgcgaagctctttggtgaataatagaactcaggccaaggtagcggaggagctgggcatgcaggagtacgccataaccaacgacaagaccaagaggcctgtggcgcttcgcaccaagaccttggcggaccttttggaatcatttattgcagcgctgtacattgataaggatttggaatatgttcatactttcatgaatgtctgcttctttccacgattgaaagagttcattttgaatcaggattggaatgaccccaaatcccagcttcagcagtgttgcttgacacttaggacagaaggaaaagagccagacattcctctgtacaagactctgcagacagtgggcccatcccatgcccgaacctacactgtggctgtttatttcaagggagaaagaataggctgtgggaaaggaccaagtattcagcaagcggaaatgggagcagcaatggatgcgcttgaaaaatataattttccccagatggcccatcagaagcggttcatcgaacggaagtacagacaagagttaaaagaaatgaggtgggaaagagagcatcaagagagagagccagatgagactgaagacatcaagaaataaaggagggcatgcaagtgtggagtatttacttgctcagtaactgtgactgttgtctattgagacctagcctagttttcctgcagacaatgaacgaagtgtgctcattgaaataaaatacagagtcaaatcgctattgttgttttaatgatctgtttttagctggatggtctttattacaaagtattagatttttcttctatttaacggaaaacttgactttggtgaatgtgcattacttccttttattttgctctttaaataataaaattcaagaagcat

SEQ ID NO: 363074 - DNA, 3359 bp, Homo sapiens
ggtgacttgaggacttcaggcgttgtagtgccgttgcagtgtagggaagccagcctgcccgatggggccatggacagcagtgccacacaccccagctccacaactatacctcaatcaaggaaaaagagcccgaggagaccatgcctgacaagaatgaggaggaagaagaagaacttcttaagcctgtgtggattcgatgcactcattcagaaaactactactccagtgaccccatggatcaggtgggagattctacagtggttggaacgagtaggcttcgtgacttatatgacaaatttgaggaggagttggggagcaggcaagaaaaggccaaagctgctcggcctccgtgggaacctccaaagacgaagctcgatgaagatttagagagttccagtgaatccgagtgtgagtctgatgaggacagcacctgttctagcagctcagactctgaagtttttgacgttattgcagaaatcaaacgcaaaaaggcccaccctgaccgacttcatgatgaactttggtacaacgatccaggccagatgaatgatggaccactctgcaaatgcagcgcaaaggcaagacgcacaggaattaggcacagcatttatcctggagaagaggccatcaagccctgtcgtcctatgaccaacaatgctggcagacttttccactaccggatcacagtctccccgcctacgaactttttaactgacaggccaactgttatagaatacgatgatcacgagtatatctttgaaggattttctatgtttgcacatgcccccctgaccaatattccactgtgtaaagtaattagattcaacatagactacacgattcatttcattgaagagatgatgccggagaatttttgtgtgaaagggcttgaactcttttcactgttcctattcagagatattttggaattatatgactggaatcttaaaggtcctttgtttgaagacagccctccctgctgcccaagatttcatttcatgccacgttttgtaagatttcttccagatggaggaaaggaagtgctgtccatgcaccagattctcctgtacttgttaaggtgcagcaaagccctggtgcctgaggaggagattgccaatatgcttcagtgggaggagctggagtggcagaaatatgcagaagaatgcaaaggcatgattgttaccaaccctgggacgaaaccaagctctgtccgtatcgatcaactggatcgtgaacagttcaaccccgatgtgattacttttccgattatcgtccactttgggatacgccctgcacagttgagttatgcaggagacccacagtaccaaaaactgtggaagagttatgtgaaacttcgccacctcctagcaaatagtcccaaagtcaaacaaactgacaaacagaagctggcacagagggaggaagccctccaaaaaatacggcagaagaatacaatgagacgagaagtaacggtggagctaagtagccaaggattctggaaaactggcatccgttctgatgtctgtcagcatgcaatgatgctacctgttctgacccatcatatccgctaccaccaatgcctaatgcatttggacaagttgataggatatactttccaagatcgttgtctgttgcagctggccatgactcatccaagtcatcatttaaattttggaatgaatcctgatcatgccaggaattcattatctaactgtggaattcggcagcccaaatacggagacagaaaagttcatcacatgcacatgcggaagaaagggattaacaccttgataaatatcatgtcacgccttggccaagatgacccaactccctcgaggattaaccacaatgaacggttggaattcctgggtgatgctgttgttgaatttctgaccagcgtccatttgtactatttgtttcctagtctggaagaaggaggattagcaacctatcggactgccattgttcagaatcagcaccttgccatgctagcaaagaaacttgaactggatcgatttatgctgtatgctcacgggcctgacctttgtagagaatcggaccttcgacatgcaatggccaattgttttgaagcgttaataggagctgtttacttggagggaagcctggaggaagccaagcagttatttggacgcttgctctttaatgatccggacctgcgcgaagtctggctcaattatcctctccacccactccaactacaagagccaaatactgatcgacaacttattgaaacttctccagttctacaaaaacttactgagtttgaagaagcaattggagtaatttttactcatgttcgacttctggcaagggcattcacattgagaactgtgggatttaaccatctgaccctaggccacaatcagagaatggaattcctaggtgactccataatgcaactggtagccacagagtacttattcattcatttcccagatcatcatgaaggacacttaactttgttgcgaagctctttggtgaataatagaactcaggccaaggtagcggaggagctgggcatgcaggagtacgccataaccaacgacaagaccaagaggcctgtggcgcttcgcaccaagaccttggcggaccttttggaatcatttattgcagcgctgtacattgataaggatttggaatatgttcatactttcatgaatgtctgcttctttccacgattgaaagagttcattttgaatcaggattggaatgaccccaaatcccagcttcagcagtgttgcttgacacttaggacagaaggaaaagagccagacattcctctgtacaagactctgcagacagtgggcccatcccatgcccgaacctacactgtggctgtttatttcaagggagaaagaataggctgtgggaaaggaccaagtattcagcaagcggaaatgggagcagcaatggatgcgcttgaaaaatataattttccccagatggcccatcagaagcggttcatcgaacggaagtacagacaagagttaaaagaaatgaggtgggaaagagagcatcaagagagagagccagatgagactgaagacatcaagaaataaaggagggcatgcaagtgtggagtatttacttgctcagtaactgtgactgttgtctattgagacctagcctagttttcctgcagacaatgaacgaagtgtgctcattgaaataaaatacagagtcaaatcgctattgttgttttaatgatctgtttttagctggatggtctttattacaaagtattagatttttcttctatttaacggaaaacttgactttggtgaatgtgcattacttccttttattttgctctttaaataataaaattcaagaagcat

SEQ ID NO: 363075 - DNA, 4368 bp, Homo sapiens
agagagagagagagagaactagtctcgagcacaacttcccacctcccagttttaatagtttccagaacaaccctagttctttcctgcccagtgctaataacagcagtagtcctcatttcagacatctccctccatacccactcccaaaggctcccagtgagagaaggtccccagaaaggctgaaacactatgatgaccacaggcaccgagatcacagtcatgggcgaggtgagaggcatcggtccctggatcggcgggagcgaggccgcagtcccgacaggagaagacaagacagccggtacagatctgattatgaccgagggagaacaccatctcgccaccgcagctacgaacggagcagtcgctccccaagtagggagaagaagagagctcgttgggaggaagaaaaagaccgttggagtgacaaccagagttctggcaaagacaagaactatacctcaatcaaggaaaaagagcccgaggagaccatgcctgacaagaatgaggaggaagaagaagaacttcttaagcctgtgtggattcgatgcactcattcagaaaactactactccagtgaccccatggatcaggtgggagattctacagtggttggaacgagtaggcttcgtgacttatatgacaaatttgaggaggagttggggagcaggcaagaaaaggccaaagctgctcggcctccgtgggaacctccaaagacgaagctcgatgaagatttagagagttccagtgaatccgagtgtgagtctgatgaggacagcacctgttctagcagctcagactctgaagtttttgacgttattgcagaaatcaaacgcaaaaaggcccaccctgaccgacttcatgatgaactttggtacaacgatccaggccagatgaatgatggaccactctgcaaatgcagcgcaaaggcaagacgcacaggaattaggcacagcatttatcctggagaagaggccatcaagccctgtcgtcctatgaccaacaatgctggcagacttttccactaccggatcacagtctccccgcctacgaactttttaactgacaggccaactgttatagaatacgatgatcacgagtatatctttgaaggattttctatgtttgcacatgcccccctgaccaatattccactgtgtaaagtaattagattcaacatagactacacgattcatttcattgaagagatgatgccggagaatttttgtgtgaaagggcttgaactcttttcactgttcctattcagagatattttggaattatatgactggaatcttaaaggtcctttgtttgaagacagccctccctgctgcccaagatttcatttcatgccacgttttgtaagatttcttccagatggaggaaaggaagtgctgtccatgcaccagattctcctgtacttgttaaggtgcagcaaagccctggtgcctgaggaggagattgccaatatgcttcagtgggaggagctggagtggcagaaatatgcagaagaatgcaaaggcatgattgttaccaaccctgggacgaaaccaagctctgtccgtatcgatcaactggatcgtgaacagttcaaccccgatgtgattacttttccgattatcgtccactttgggatacgccctgcacagttgagttatgcaggagacccacagtaccaaaaactgtggaagagttatgtgaaacttcgccacctcctagcaaatagtcccaaagtcaaacaaactgacaaacagaagctggcacagagggaggaagccctccaaaaaatacggcagaagaatacaatgagacgagaagtaacggtggagctaagtagccaaggattctggaaaactggcatccgttctgatgtctgtcagcatgcaatgatgctacctgttctgacccatcatatccgctaccaccaatgcctaatgcatttggacaagttgataggatatactttccaagatcgttgtctgttgcagctggccatgactcatccaagtcatcatttaaattttggaatgaatcctgatcatgccaggaattcattatctaactgtggaattcggcagcccaaatacggagacagaaaagttcatcacatgcacatgcggaagaaagggattaacaccttgataaatatcatgtcacgccttggccaagatgacccaactccctcgaggattaaccacaatgaacggttggaattcctgggtgatgctgttgttgaatttctgaccagcgtccatttgtactatttgtttcctagtctggaagaaggaggattagcaacctatcggactgccattgttcagaatcagcaccttgccatgctagcaaagaaacttgaactggatcgatttatgctgtatgctcacgggcctgacctttgtagagaatcggaccttcgacatgcaatggccaattgttttgaagcgttaataggagctgtttacttggagggaagcctggaggaagccaagcagttatttggacgcttgctctttaatgatccggacctgcgcgaagtctggctcaattatcctctccacccactccaactacaagagccaaatactgatcgacaacttattgaaacttctccagttctacaaaaacttactgagtttgaagaagcaattggagtaatttttactcatgttcgacttctggcaagggcattcacattgagaactgtgggatttaaccatctgaccctaggccacaatcagagaatggaattcctaggtgactccataatgcaactggtagccacagagtacttattcattcatttcccagatcatcatgaaggacacttaactttgttgcgaagctctttggtgaataatagaactcaggccaaggtagcggaggagctgggcatgcaggagtacgccataaccaacgacaagaccaagaggcctgtggcgcttcgcaccaagaccttggcggaccttttggaatcatttattgcagcgctgtacattgataaggatttggaatatgttcatactttcatgaatgtctgcttctttccacgattgaaagagttcattttgaatcaggattggaatgaccccaaatcccagcttcagcagtgttgcttgacacttaggacagaaggaaaagagccagacattcctctgtacaagactctgcagacagtgggcccatcccatgcccgaacctacactgtggctgtttatttcaagggagaaagaataggctgtgggaaaggaccaagtattcagcaagcggaaatgggagcagcaatggatgcgcttgaaaaatataattttccccagatggcccatcagaagcggttcatcgaacggaagtacagacaagagttaaaagaaatgaggtgggaaagagagcatcaagagagagagccagatgagactgaagacatcaagaaataaaggagggcatgcaagtgtggagtatttacttgctcagtaactgtgactgttgtctattgagacctagcctagttttcctgcagacaatgaacgaagtgtgctcattgaaataaaatacagagtcaaatcgctattgttgttttaatgatctgtttttagctggatggtctttattacaaagtattagatttttcttctatttaacggaaaacttgactttggtgaatgtgcattacttccttttattttgctctttaaataataaaattcaagaagcatattctatgtggaatagatcctgtttttccatctgtgtcccagattgtgaccctagactttcaattgacaagtaaaaaattgactttactagacattttgactgtgctctagtaacatctatcctttttcaaatctctggatttttaagtagattgttcagctttcatccggtggctgttcatcaagttatcagctgcaaatattgaacttacctctctctaagcagtgagtgttttgtagaaggaatccgtttaacgattaattggctaatgggagaaggggaaagactgatattcaagtcatacagattctttgaatcattagaataggagagaaatcatgattctaagccaggccacactttaaaccaagtgctctcaccctggggttagtggaacctttaagaagttaatgaacagacttcaaggaagtcaaaaacctcccaatactatattcaattttctgtgtgtgtttgagatttgagagggcatggggagcaggaaggaggagggtttatagcttttatcagcctctctaagtgggccctgcagtaaaaggctaacatgacattcaaagacataacattttaaaaaaagttattccaaactaaacatcactggtttcttattaataaaggcaaaacttctttgtaaaacaaatc

SEQ ID NO: 363076 - DNA, 4344 bp, Homo sapiens
agagagagagagagagaactagtctcgagcacaacttcccacctcccagttttaatagtttccagaacaaccctagttctttcctgcccagtgctaataacagcagtagtcctcatttcagacatctccctccatacccactcccaaaggctcccagtgagagaaggtccccagaaaggctgaaacactatgatgaccacaggcaccgagatcacagtcatgggcgaggtgagaggcatcggtccctggatcggcgggagcgaggccgcagtcccgacaggagaagacaagacagccggtacagatctgattatgaccgagggagaacaccatctcgccaccgcagctacgaacggagcagtcgctccccaagtagggagaagaagagagctcgttgggaggaagaaaaagaccgttggagtgacaaccagagttctggcaaagacaagaactatacctcaatcaaggaaaaagagcccgaggagaccatgcctgacaagaatgaggaggaagaagaagaacttcttaagcctgtgtggattcgatgcactcattcagaaaactactactccagtgaccccatggatcaggtgggagattctacagtggttggaacgagtaggcttcgtgacttatatgacaaatttgaggaggagttggggagcaggcaagaaaaggccaaagctgctcggcctccgtgggaacctccaaagacgaagctcgatgaagatttagagagttccagtgaatccgagtgtgagtctgatgaggacagcacctgttctagcagctcagactctgaagtttttgacgttattgcagaaatcaaacgcaaaaaggcccaccctgaccgacttcatgatgaactttggtacaacgatccaggccagatgaatgatggaccactctgcaaatgcagcgcaaaggcaagacgcacaggaattaggcacagcatttatcctggagaagaggccatcaagccctgtcgtcctatgaccaacaatgctggcagacttttccactaccggatcacagtctccccgcctacgaactttttaactgacaggccaactgttatagaatacgatgatcacgagtatatctttgaaggattttctatgtttgcacatgcccccctgaccaatattccactgtgtaaagtaattagattcaacatagactacacgattcatttcattgaagagatgatgccggagaatttttgtgtgaaagggcttgaactcttttcactgttcctattcagagatattttggaattatatgactggaatcttaaaggtcctttgtttgaagacagccctccctgctgcccaagatttcatttcatgccacgttttgtaagatttcttccagatggaggaaaggaagtgctgtccatgcaccagattctcctgtacttgttaaggtgcagcaaagccctggtgcctgaggaggagattgccaatatgcttcagtgggaggagctggagtggcagaaatatgcagaagaatgcaaaggcatgattgttaccaaccctgggacgaaaccaagctctgtccgtatcgatcaactggatcgtgaacagttcaaccccgatgtgattacttttccgattatcgtccactttgggatacgccctgcacagtaccaaaaactgtggaagagttatgtgaaacttcgccacctcctagcaaatagtcccaaagtcaaacaaactgacaaacagaagctggcacagagggaggaagccctccaaaaaatacggcagaagaatacaatgagacgagaagtaacggtggagctaagtagccaaggattctggaaaactggcatccgttctgatgtctgtcagcatgcaatgatgctacctgttctgacccatcatatccgctaccaccaatgcctaatgcatttggacaagttgataggatatactttccaagatcgttgtctgttgcagctggccatgactcatccaagtcatcatttaaattttggaatgaatcctgatcatgccaggaattcattatctaactgtggaattcggcagcccaaatacggagacagaaaagttcatcacatgcacatgcggaagaaagggattaacaccttgataaatatcatgtcacgccttggccaagatgacccaactccctcgaggattaaccacaatgaacggttggaattcctgggtgatgctgttgttgaatttctgaccagcgtccatttgtactatttgtttcctagtctggaagaaggaggattagcaacctatcggactgccattgttcagaatcagcaccttgccatgctagcaaagaaacttgaactggatcgatttatgctgtatgctcacgggcctgacctttgtagagaatcggaccttcgacatgcaatggccaattgttttgaagcgttaataggagctgtttacttggagggaagcctggaggaagccaagcagttatttggacgcttgctctttaatgatccggacctgcgcgaagtctggctcaattatcctctccacccactccaactacaagagccaaatactgatcgacaacttattgaaacttctccagttctacaaaaacttactgagtttgaagaagcaattggagtaatttttactcatgttcgacttctggcaagggcattcacattgagaactgtgggatttaaccatctgaccctaggccacaatcagagaatggaattcctaggtgactccataatgcaactggtagccacagagtacttattcattcatttcccagatcatcatgaaggacacttaactttgttgcgaagctctttggtgaataatagaactcaggccaaggtagcggaggagctgggcatgcaggagtacgccataaccaacgacaagaccaagaggcctgtggcgcttcgcaccaagaccttggcggaccttttggaatcatttattgcagcgctgtacattgataaggatttggaatatgttcatactttcatgaatgtctgcttctttccacgattgaaagagttcattttgaatcaggattggaatgaccccaaatcccagcttcagcagtgttgcttgacacttaggacagaaggaaaagagccagacattcctctgtacaagactctgcagacagtgggcccatcccatgcccgaacctacactgtggctgtttatttcaagggagaaagaataggctgtgggaaaggaccaagtattcagcaagcggaaatgggagcagcaatggatgcgcttgaaaaatataattttccccagatggcccatcagaagcggttcatcgaacggaagtacagacaagagttaaaagaaatgaggtgggaaagagagcatcaagagagagagccagatgagactgaagacatcaagaaataaaggagggcatgcaagtgtggagtatttacttgctcagtaactgtgactgttgtctattgagacctagcctagttttcctgcagacaatgaacgaagtgtgctcattgaaataaaatacagagtcaaatcgctattgttgttttaatgatctgtttttagctggatggtctttattacaaagtattagatttttcttctatttaacggaaaacttgactttggtgaatgtgcattacttccttttattttgctctttaaataataaaattcaagaagcatattctatgtggaatagatcctgtttttccatctgtgtcccagattgtgaccctagactttcaattgacaagtaaaaaattgactttactagacattttgactgtgctctagtaacatctatcctttttcaaatctctggatttttaagtagattgttcagctttcatccggtggctgttcatcaagttatcagctgcaaatattgaacttacctctctctaagcagtgagtgttttgtagaaggaatccgtttaacgattaattggctaatgggagaaggggaaagactgatattcaagtcatacagattctttgaatcattagaataggagagaaatcatgattctaagccaggccacactttaaaccaagtgctctcaccctggggttagtggaacctttaagaagttaatgaacagacttcaaggaagtcaaaaacctcccaatactatattcaattttctgtgtgtgtttgagatttgagagggcatggggagcaggaaggaggagggtttatagcttttatcagcctctctaagtgggccctgcagtaaaaggctaacatgacattcaaagacataacattttaaaaaaagttattccaaactaaacatcactggtttcttattaataaaggcaaaacttctttgtaaaacaaatc

SEQ ID NO: 363077 - DNA, 2657 bp, Homo sapiens
tagttgatgttgtttaagtctctttaatctgtaggttctcactccatttctcctttttttcccttgcaaacatttgttgttgaagaaattggattatgtgtcctgtagagttcctacagtgtagtctgagttttgctgattgcaactttctggtgtcatttaccagcatgcaatgatgctacctgttctgacccatcatatccgctaccaccaatgcctaatgcatttggacaagttgataggatatactttccaagatcgttgtctgttgcagctggccatgactcatccaagtcatcatttaaattttggaatgaatcctgatcatgccaggaattcattatctaactgtggaattcggcagcccaaatacggagacagaaaagttcatcacatgcacatgcggaagaaagggattaacaccttgataaatatcatgtcacgccttggccaagatgacccaactccctcgaggattaaccacaatgaacggttggaattcctgggtgatgctgttgttgaatttctgaccagcgtccatttgtactatttgtttcctagtctggaagaaggaggattagcaacctatcggactgccattgttcagaatcagcaccttgccatgctagcaaagaaacttgaactggatcgatttatgctgtatgctcacgggcctgacctttgtagagaatcggaccttcgacatgcaatggccaattgttttgaagcgttaataggagctgtttacttggagggaagcctggaggaagccaagcagttatttggacgcttgctctttaatgatccggacctgcgcgaagtctggctcaattatcctctccacccactccaactacaagagccaaatactgatcgacaacttattgaaacttctccagttctacaaaaacttactgagtttgaagaagcaattggagtaatttttactcatgttcgacttctggcaagggcattcacattgagaactgtgggatttaaccatctgaccctaggccacaatcagagaatggaattcctaggtgactccataatgcaactggtagccacagagtacttattcattcatttcccagatcatcatgaaggacacttaactttgttgcgaagctctttggtgaataatagaactcaggccaaggtagcggaggagctgggcatgcaggagtacgccataaccaacgacaagaccaagaggcctgtggcgcttcgcaccaagaccttggcggaccttttggaatcatttattgcagcgctgtacattgataaggatttggaatatgttcatactttcatgaatgtctgcttctttccacgattgaaagagttcattttgaatcaggattggaatgaccccaaatcccagcttcagcagtgttgcttgacacttaggacagaaggaaaagagccagacattcctctgtacaagactctgcagacagtgggcccatcccatgcccgaacctacactgtggctgtttatttcaagggagaaagaataggctgtgggaaaggaccaagtattcagcaagcggaaatgggagcagcaatggatgcgcttgaaaaatataattttccccagatggcccatcagaagcggttcatcgaacggaagtacagacaagagttaaaagaaatgaggtgggaaagagagcatcaagagagagagccagatgagactgaagacatcaagaaataaaggagggcatgcaagtgtggagtatttacttgctcagtaactgtgactgttgtctattgagacctagcctagttttcctgcagacaatgaacgaagtgtgctcattgaaataaaatacagagtcaaatcgctattgttgttttaatgatctgtttttagctggatggtctttattacaaagtattagatttttcttctatttaacggaaaacttgactttggtgaatgtgcattacttccttttattttgctctttaaataataaaattcaagaagcatattctatgtggaatagatcctgtttttccatctgtgtcccagattgtgaccctagactttcaattgacaagtaaaaaattgactttactagacattttgactgtgctctagtaacatctatcctttttcaaatctctggatttttaagtagattgttcagctttcatccggtggctgttcatcaagttatcagctgcaaatattgaacttacctctctctaagcagtgagtgttttgtagaaggaatccgtttaacgattaattggctaatgggagaaggggaaagactgatattcaagtcatacagattctttgaatcattagaataggagagaaatcatgattctaagccaggccacactttaaaccaagtgctctcaccctggggttagtggaacctttaagaagttaatgaacagacttcaaggaagtcaaaaacctcccaatactatattcaattttctgtgtgtgtttgagatttgagagggcatggggagcaggaaggaggagggtttatagcttttatcagcctctctaagtgggccctgcagtaaaaggctaacatgacattcaaagacataacattttaaaaaaagttattccaaactaaacatcactggtttcttattaataaaggcaaaacttctttgtaaaacaaatc

SEQ ID NO: 363078 - DNA, 3557 bp, Homo sapiens
agagagagagagagagaactagtctcgagcacaacttcccacctcccagttttaatagtttccagaacaaccctagttctttcctgcccagtgctaataacagcagtagtcctcatttcagacatctccctccatacccactcccaaaggctcccagtgagagaaggtccccagaaaggctgaaacactatgatgaccacaggcaccgagatcacagtcatgggcgaggtgagaggcatcggtccctggatcggcgggagcgaggccgcagtcccgacaggagaagacaagacagccggtacagatctgattatgaccgagggagaacaccatctcgccaccgcagctacgaacggagcagtcgctccccaagtagggagaagaagagagctcgttgggaggaagaaaaagaccgttggagtgacaaccagagttctggcaaagacaagaactatacctcaatcaaggaaaaagagcccgaggagaccatgcctgacaagaatgaggaggaagaagaagaacttcttaagcctgtgtggattcgatgcactcattcagaaaactactactccagtgaccccatggatcaggtgggagattctacagtggttggaacgagtaggcttcgtgacttatatgacaaatttgaggaggagttggggagcaggcaagaaaaggccaaagctgctcggcctccgtgggaacctccaaagacgaagctcgatgaagatttagagagttccagtgaatccgagtgtgagtctgatgaggacagcacctgttctagcagctcagactctgaagtttttgacgttattgcagaaatcaaacgcaaaaaggcccaccctgaccgacttcatgatgaactttggtacaacgatccaggccagatgaatgatggaccactctgcaaatgcagcgcaaaggcaagacgcacaggaattaggcacagcatttatcctggagaagaggccatcaagccctgtcgtcctatgaccaacaatgctggcagacttttccactaccggatcacagtctccccgcctacgaactttttaactgacaggccaactgttatagaatacgatgatcacgagtatatctttgaaggattttctatgtttgcacatgcccccctgaccaatattccactgtgtaaagtaattagattcaacatagactacacgattcatttcattgaagagatgatgccggagaatttttgtgtgaaagggcttgaactcttttcactgttcctattcagagatattttggaattatatgactggaatcttaaaggtcctttgtttgaagacagccctccctgctgcccaagatttcatttcatgccacgttttgtaagatttcttccagatggaggaaaggaagtgctgtccatgcaccagattctcctgtacttgttaaggtgcagcaaagccctggtgcctgaggaggagattgccaatatgcttcagtgggaggagctggagtggcagaaatatgcagaagaatgcaaaggcatgattgttaccaaccctgggacgaaaccaagctctgtccgtatcgatcaactggatcgtgaacagttcaaccccgatgtgattacttttccgattatcgtccactttgggatacgccctgcacagttgagttatgcaggagacccacagtaccaaaaactgtggaagagttatgtgaaacttcgccacctcctagcaaatagtcccaaagtcaaacaaactgacaaacagaagctggcacagagggaggaagccctccaaaaaatacggcagaagaatacaatgagacgagaagtaacggtggagctaagtagccaaggattctggaaaactggcatccgttctgatgtctgtcagcatgcaatgatgctacctgttctgacccatcatatccgctaccaccaatgcctaatgcatttggacaagttgataggatatactttccaagatcgttgtctgttgcagctggccatgactcatccaagtcatcatttaaattttggaatgaatcctgatcatgccaggaattcattatctaactgtggaattcggcagcccaaatacggagacagaaaagttcatcacatgcacatgcggaagaaagggattaacaccttgataaatatcatgtcacgccttggccaagatgacccaactccctcgaggattaaccacaatgaacggttggaattcctgggtgatgctgttgttgaatttctgaccagcgtccatttgtactatttgtttcctagtctggaagaaggaggattagcaacctatcggactgccattgttcagaatcagcaccttgccatgctagcaaagaaacttgaactggatcgatttatgctgtatgctcacgggcctgacctttgtagagaatcggaccttcgacatgcaatggccaattgttttgaagcgttaataggagctgtttacttggagggaagcctggaggaagccaagcagttatttggacgcttgctctttaatgatccggacctgcgcgaagtctggctcaattatcctctccacccactccaactacaagagccaaatactgatcgacaacttattgaaacttctccagttctacaaaaacttactgagtttgaagaagcaattggagtaatttttactcatgttcgacttctggcaagggcattcacattgagaactgtgggatttaaccatctgaccctaggccacaatcagagaatggaattcctaggtgactccataatgcaactggtagccacagagtacttattcattcatttcccagatcatcatgaaggacacttaactttgttgcgaagctctttggtgaataatagaactcaggccaaggtagcggaggagctgggcatgcaggagtacgccataaccaacgacaagaccaagaggcctgtggcgcttcgcaccaagaccttggcggaccttttggaatcatttattgcagcgctgtacattgataaggatttggaatatgttcatactttcatgaatgtctgcttctttccacgattgaaagagttcattttgaatcaggattggaatgaccccaaatcccagcttcagcagtgttgcttgacacttaggacagaaggaaaagagccagacattcctctgtacaagactctgcagacagtgggcccatcccatgcccgaacctacactgtggctgtttatttcaagggagaaagaataggctgtgggaaaggaccaagtattcagcaagcggaaatgggagcagcaatggatgcgcttgaaaaatataattttccccagatggcccatcagaagcggttcatcgaacggaagtacagacaagagttaaaagaaatgaggtgggaaagagagcatcaagagagagagccagatgagactgaagacatcaagaaataaaggagggcatgcaagtgtggagtatttacttgctcagtaactgtgactgttgtctattgagacctagcctagttttcctgcagacaatgaacgaagtgtgctcattgaaataaaatacagagtcaaatc

SEQ ID NO: 363079 - DNA, 1842 bp, Homo sapiens
ataggctagtcgaggccggtgttaattggccgaggcaactacaagagccaaatactgatcgacaacttattgaaacttctccagttctacaaaaacttactgagtttgaagaagcaattggagtaatttttactcatgttcgacttctggcaagggcattcacattgagaactgtgggatttaaccatctgaccctaggccacaatcagagaatggaattcctaggtgactccataatgcaactggtagccacagagtacttattcattcatttcccagatcatcatgaaggacacttaactttgttgcgaagctctttggtgaataatagaactcaggccaaggtagcggaggagctgggcatgcaggagtacgccataaccaacgacaagaccaagaggcctgtggcgcttcgcaccaagaccttggcggaccttttggaatcatttattgcagcgctgtacattgataaggatttggaatatgttcatactttcatgaatgtctgcttctttccacgattgaaagagttcattttgaatcaggattggaatgaccccaaatcccagcttcagcagtgttgcttgacacttaggacagaaggaaaagagccagacattcctctgtacaagactctgcagacagtgggcccatcccatgcccgaacctacactgtggctgtttatttcaagggagaaagaataggctgtgggaaaggaccaagtattcagcaagcggaaatgggagcagcaatggatgcgcttgaaaaatataattttccccagatggcccatcagaagcggttcatcgaacggaagtacagacaagagttaaaagaaatgaggtgggaaagagagcatcaagagagagagccagatgagactgaagacatcaagaaataaaggagggcatgcaagtgtggagtatttacttgctcagtaactgtgactgttgtctattgagacctagcctagttttcctgcagacaatgaacgaagtgtgctcattgaaataaaatacagagtcaaatcgctattgttgttttaatgatctgtttttagctggatggtctttattacaaagtattagatttttcttctatttaacggaaaacttgactttggtgaatgtgcattacttccttttattttgctctttaaataataaaattcaagaagcatattctatgtggaatagatcctgtttttccatctgtgtcccagattgtgaccctagactttcaattgacaagtaaaaaattgactttactagacattttgactgtgctctagtaacatctatcctttttcaaatctctggatttttaagtagattgttcagctttcatccggtggctgttcatcaagttatcagctgcaaatattgaacttacctctctctaagcagtgagtgttttgtagaaggaatccgtttaacgattaattggctaatgggagaaggggaaagactgatattcaagtcatacagattctttgaatcattagaataggagagaaatcatgattctaagccaggccacactttaaaccaagtgctctcaccctggggttagtggaacctttaagaagttaatgaacagacttcaaggaagtcaaaaacctcccaatactatattcaattttctgtgtgtgtttgagatttgagagggcatggggagcaggaaggaggagggtttatagcttttatcagcctctctaagtgggccctgcagtaaaaggctaacatgacattcaaagacataacattttaaaaaaagttattccaaactaaacatcactggtttcttattaataaaggcaaaacttctttgtaaaacaaatc

SEQ ID NO: 363080 - DNA, 1732 bp, Homo sapiens
tacgttattaaggagaaggtaaatgggcatggagcatatcactgtcatctgggtgatggttgaggccatagacctcacttattttggtgtccctgtcagtgacagcctctcaggctagttgggtccaacccaggaataagagaggtcaaaagtgaaatgtgttctcaatgtaccgccattccttttgggcagttgttgcgaagctctttggtgaataatagaactcaggccaaggtagcggaggagctgggcatgcaggagtacgccataaccaacgacaagaccaagaggcctgtggcgcttcgcaccaagaccttggcggaccttttggaatcatttattgcagcgctgtacattgataaggatttggaatatgttcatactttcatgaatgtctgcttctttccacgattgaaagagttcattttgaatcaggattggaatgaccccaaatcccagcttcagcagtgttgcttgacacttaggacagaaggaaaagagccagacattcctctgtacaagactctgcagacagtgggcccatcccatgcccgaacctacactgtggctgtttatttcaagggagaaagaataggctgtgggaaaggaccaagtattcagcaagcggaaatgggagcagcaatggatgcgcttgaaaaatataattttccccagatggcccatcagaagcggttcatcgaacggaagtacagacaagagttaaaagaaatgaggtgggaaagagagcatcaagagagagagccagatgagactgaagacatcaagaaataaaggagggcatgcaagtgtggagtatttacttgctcagtaactgtgactgttgtctattgagacctagcctagttttcctgcagacaatgaacgaagtgtgctcattgaaataaaatacagagtcaaatcgctattgttgttttaatgatctgtttttagctggatggtctttattacaaagtattagatttttcttctatttaacggaaaacttgactttggtgaatgtgcattacttccttttattttgctctttaaataataaaattcaagaagcatattctatgtggaatagatcctgtttttccatctgtgtcccagattgtgaccctagactttcaattgacaagtaaaaaattgactttactagacattttgactgtgctctagtaacatctatcctttttcaaatctctggatttttaagtagattgttcagctttcatccggtggctgttcatcaagttatcagctgcaaatattgaacttacctctctctaagcagtgagtgttttgtagaaggaatccgtttaacgattaattggctaatgggagaaggggaaagactgatattcaagtcatacagattctttgaatcattagaataggagagaaatcatgattctaagccaggccacactttaaaccaagtgctctcaccctggggttagtggaacctttaagaagttaatgaacagacttcaaggaagtcaaaaacctcccaatactatattcaattttctgtgtgtgtttgagatttgagagggcatggggagcaggaaggaggagggtttatagcttttatcagcctctctaagtgggccctgcagtaaaaggctaacatgacattcaaagacataacattttaaaaaaagttattccaaactaaacatcactggtttcttattaataaaggcaaaacttctttgtaaaacaaatc

SEQ ID NO: 363081 - DNA, 1431 bp, Homo sapiens
gtggtttattttaaagtattcttttttccccagcatttattgcagcgctgtacattgataaggatttggaatatgttcatactttcatgaatgtctgcttctttccacgattgaaagagttcattttgaatcaggattggaatgaccccaaatcccagcttcagcagtgttgcttgacacttaggacagaaggaaaagagccagacattcctctgtacaagactctgcagacagtgggcccatcccatgcccgaacctacactgtggctgtttatttcaagggagaaagaataggctgtgggaaaggaccaagtattcagcaagcggaaatgggagcagcaatggatgcgcttgaaaaatataattttccccagatggcccatcagaagcggttcatcgaacggaagtacagacaagagttaaaagaaatgaggtgggaaagagagcatcaagagagagagccagatgagactgaagacatcaagaaataaaggagggcatgcaagtgtggagtatttacttgctcagtaactgtgactgttgtctattgagacctagcctagttttcctgcagacaatgaacgaagtgtgctcattgaaataaaatacagagtcaaatcgctattgttgttttaatgatctgtttttagctggatggtctttattacaaagtattagatttttcttctatttaacggaaaacttgactttggtgaatgtgcattacttccttttattttgctctttaaataataaaattcaagaagcatattctatgtggaatagatcctgtttttccatctgtgtcccagattgtgaccctagactttcaattgacaagtaaaaaattgactttactagacattttgactgtgctctagtaacatctatcctttttcaaatctctggatttttaagtagattgttcagctttcatccggtggctgttcatcaagttatcagctgcaaatattgaacttacctctctctaagcagtgagtgttttgtagaaggaatccgtttaacgattaattggctaatgggagaaggggaaagactgatattcaagtcatacagattctttgaatcattagaataggagagaaatcatgattctaagccaggccacactttaaaccaagtgctctcaccctggggttagtggaacctttaagaagttaatgaacagacttcaaggaagtcaaaaacctcccaatactatattcaattttctgtgtgtgtttgagatttgagagggcatggggagcaggaaggaggagggtttatagcttttatcagcctctctaagtgggccctgcagtaaaaggctaacatgacattcaaagacataacattttaaaaaaagttattccaaactaaacatcactggtttcttattaataaaggcaaaacttctttgtaaaacaaatc

SEQ ID NO: 363082 - DNA, 1352 bp, Homo sapiens
cctgttccggaggcgcgggcggtgccactgtcttggtacctgcggtagtagcctggctttgctctgacggcgatctcgcggcccgagagccttttatagacagctccttcagtgtctctgtttccaaaccgcaaccgagaagagacagacggagaaaagagagttacttttccaggttgcttttcccggggatgtgaaggatacagaaatgactgtgaatcaacccatatcatcaaggagctgataatctagtggaagagttagacgtgtgcatacttcactatgatatgaggcagtctctgagcttatattctctgtggaagatgtgacatatccaggcggaacatcatgatgcagggaaacacatgtcacagaatgtcgttccacccgggacgagggtgtccccgaggacgaggaggacatggagccagaccctcagcaccatcctttaggccccaaaatctgaggctgcttcaccctcagcagcctcctgtgcaatatcaatatgaacctccaagtgccccttccaccactttctcaaactctccagcccccaattttctccctccacgaccagactttgtacccttccccccacccatgcctccgtcagcgcaaggccctcttcccccctgcccaatcaggccgcctttccccaaccaccagatgaggcaccccttcccagttcctccttgttttcctcccatgccaccaccaatgccttgtcctaataaccccccagtccctggggcacctcctggacaaggcactttccccttcatgatgccccctccctccatgcctcatcccccgccccctccagtcatgccgcagcaggttaattatcagtaccctccgggctattctcaccacaacttcccacctcccagttttaatagtttccagaacaaccctagttctttcctgcccagtgctaataacagcagtagtcctcatttcagacatctccctccatacccactcccaaaggctcccagtgagagaaggtccccagaaaggctgaaacactatgatgaccacaggcaccgagatcacagtcatgggcgaggtgagaggcatcggtccctggatcggcgggagcgaggccgcagtcccgacaggagaagacaagacagccggtacagatctgattatgaccgagggagaacaccatctcgccaccgcagctacgaacggagcagagagcgagaacgggagagacacaggcatcgagacaaccgaagatcaccatctctggaaaggtcctacaaaaaagagtataagagatctggaagtcgctccccagtagggagaagaagagagctgatgggaaagactgcggggatcctcta

SEQ ID NO: 363083 - DNA, 3674 bp, Homo sapiens
cgcttgcgcggcgagtagaacgtgtggcggcggcggagatcgcgtctctttcgctccgtgtcccgctgctgctcctgtgagcgcccggcgagtccgtcccgtccaccgtccgcagctggtagccagcctgcccctcgcctcgactccctttcaccaacaccgacacccacattgacacctccagtccggccagccgctccactcgttgcctttgcatctccacacatggcgtcctccgcgcagagcggcggctcctccgggggacccgcggtccccaccgtgcagcggggcatcatcaagatggtcctctcagggtgcgccatcattgtccgaggtcagcctcgtggtgggcctcctcctgagcggcagatcaacctcagcaacattcgtgctggaaatcttgctcgccgggcagccgccacacaacctgatgcaaaggatacccctgatgagccctgggcatttccagctcgagagttccttcgaaagaagctgattgggaaggaagtctgtttcacgatagaaaacaagactccccaggggcgagagtatggcatgatctaccttggaaaagataccaatggggaaaacattgcagaatcactggttgcagagggcttagccacccggagagaaggcatgagagctaataatcctgagcagaaccggctttcagaatgtgaagaacaagcaaaggcagccaagaaagggatgtggagtgaggggaacggttcacatactatccgggatctcaagtataccattgaaaacccaaggcactttgtggactcacaccaccagaagcctgttaatgctatcatcgagcatgtgcgggacggcagtgtggtcagggccctgctcctcccagattactacctggttacagtcatgctgtcaggcatcaagtgcccaacttttcgacgggaagcagatggcagtgaaactccagagccttttgctgcagaagccaaatttttcactgagtcgcgactgcttcagagagatgttcagatcattctggagagctgccacaaccagaacattctgggtaccatccttcatccaaatggcaacatcacagagctcctcctgaaggaaggtttcgcacgctgtgtggactggtcgattgcagtttacacccggggcgcagaaaagctgagggcggcagagaggtttgccaaagagcgcaggctgagaatatggagagactatgtggctcccacagctaatttggaccaaaaggacaagcagtttgttgccaaggtgatgcaggttctgaatgctgatgccattgttgtgaagctgaactcaggcgattacaagacgattcacctgtccagcatccgaccaccgaggctggagggggagaacacccaggataagaacaagaaactgcgtcccctgtatgacattccttacatgtttgaggcccgggaatttcttcgaaaaaagcttattgggaagaaggtcaatgtgacggtggactacattagaccagccagcccagccacagagacagtgcctgccttttcagagcgtacctgtgccactgtcaccattggaggaataaacattgctgaggctcttgtcagcaaaggtctagccacagtgatcagataccggcaggatgatgaccagagatcatcacactacgatgaactgcttgctgcagaggccagagctattaagaatggcaaaggattgcatagcaagaaggaagtgcctatccaccgtgttgcagatatatctggggatacccaaaaagcaaagcagttcctgccttttcttcagcgggcaggtcgttctgaagctgtggtggaatacgtcttcagtggttctcgtctcaaactctatttgccaaaggaaacttgccttatcaccttcttgcttgcaggcattgaatgccccagaggagcccgaaacctcccaggcttggtgcaggaaggagagcccttcagcgaggaagctacacttttcaccaaggaactggtgctgcagcgagaggtggaggtggaggtggagagcatggacaaggccggcaactttatcggctggctgcacatcgacggtgccaacctgtccgtcctgctggtggagcacgcgctctccaaggtccacttcaccgccgaacgcagctcctactacaagtccctgctgtctgccgaggaggccgcaaagcagaagaaagagaaggtctgggcccactatgaggagcagcccgtggaggaggtgatgccagtgctggaggagaaggagcgatctgctagctacaagcccgtgtttgtgaccgagatcactgatgacctgcacttctacgtgcaggatgtggagaccggcacccagttggagaagctgatggagaacatgcgcaatgacattgccagtcacccccctgtagagggctcctatgccccccgcaggggagagttctgcattgccaaatttgtagatggagaatggtaccgtgcccgagtagagaaagtcgagtctcctgccaaaatacatgtcttctacattgactacggcaacagagaggtcctgccatccacccgcctgggtaccctatcacctgccttcagcactcgggtgctgccagctcaagccacggagtatgccttcgccttcatccaggtgccccaagatgatgatgcccgcacggacgccgtggacagcgtagttcgggatatccagaacactcagtgcctgctcaacgtggaacacctgagtgccggctgcccccatgtcaccctgcagtttgcagattccaagggcgatgtggggctgggcttggtgaaggaagggctggtcatggtggaggtgcgcaaggagaaacagttccagaaagtgatcacagaatacctgaatgcccaagagtcagccaagagcgccaggctgaacctgtggcgctatggagactttcgagctgatgatgcagacgaatttggctacagccgctaaggaggggatcgggtttggcccccagccccgctcacgccagtccctcttcctctgccgggagggtgttttcaactccaaaccccagagaggggttgtagattgggtccagctttgcttcagtgtgtggaaatgtctcgtggggtggcatcggggctgcggggtggggaccccaaggctttctggggcagacccttgtcctctgggatgatgggcactgctatccacagtctctgccagttggttttatttggaggtttgtgggctttttttaaaaaaaaaaagtcctcaaatcaggaagaaacatcaaagactatgtcctagtggagggagtaatcctaacacccaggctggccgccagctggcacctgcctctatcccagactgccctcgtcccagctctctgtccaactgttgattatgtgatttttctgatacgtccattctcaaatgccagtgtgttcacatcttcgctctggccagcccattctgtatttaaagcttttgaggcccaataaaatagtacgtgctgtctgcagcccttattgatcacagtgtggtccagagcatggagtcttggcagcttcacccaggaggagacctggacacttgaatgacccccaagatagtcatccaaatgcctggacattctccctagaaatagagccagctggggaaagcaaggcagatcttcagagtctgagcaagcaactcctgga

SEQ ID NO: 363084 - DNA, 733 bp, Homo sapiens
cgcttgcgcggcgagtagaacgtgtggcggcggcggagatcgcgtctctttcgctccgtgtcccgctgctgctcctgtgagcgcccggcgagtccgtcccgtccaccgtccgcagctggtagccagcctgcccctcgcctcgactccctttcaccaacaccgacacccacattgacacctccagtccggccagccgctccactcgttgcctttgcatctccacacatggcgtcctccgcgcagagcggcggctcctccgggggacccgcggtccccaccgtgcagcggggcatcatcaagatggtcctctcagggtgcgccatcattgtccgaggtcagcctcgtggtgggcctcctcctgagcggcagatcaacctcagcaacattcgtgctggaaatcttgctcgccgggcagccgccacacaacctgatgcaaaggatacccctgatgagccctgggcatttccagctcgagagttccttcgaaagaagctgattgggaaggaagtctgtttcacgatagaaaacaagactccccagggccttgctggtgtgacataggcttcagcttcctatctgtttcccctggggaatcaatgaaaacaaggttcatcattcctctaatagattaaaatttttttcttgattaacttcactgtggagttggcaagagttgttatctgttaatcaaaactgtttaaataaaaaataaaaagatcaaactttgagtctt

SEQ ID NO: 363085 - DNA, 1260 bp, Homo sapiens
cgcttgcgcggcgagtagaacgtgtggcggcggcggagatcgcgtctctttcgctccgtgtcccgctgctgctcctgtgagcgcccggcgagtccgtcccgtccaccgtccgcagctggtagccagcctgcccctcgcctcgactccctttcaccaacaccgacacccacattgacacctccagtccggccagccgctccactcgttgcctttgcatctccacacatggcgtcctccgcgcagagcggcggctcctccgggggacccgcggtccccaccgtgcagcggggcatcatcaagatggtcctctcagggtgcgccatcattgtccgaggtcagcctcgtggtgggcctcctcctgagcggcagatcaacctcagcaacattcgtgctggaaatcttgctcgccgggcagccgccacacaacctgatgcaaaggatacccctgatgaggtaggtgtttcctgaggccatcgtgagcctgtggacctaggtaatagcccactgtcttctgtcgctgatgccattttgatgtactctttctttgtattttgagtatttttatatcatagaactgctgattctggatgtgcccacaagcagcttgtatctgttgtttatatgtttactacctttagtggcagttgaagtcttagagctttttcttgtaccttttcccatagacttagatttgtcgtgttttcactactacttttcttggaatagtttaggaacatttcctgggtagccttaagcatttgaaatcaccattggttatggcagagctcttttattaatttatttttgaattcttcattcatttacattgttcagaatgcagaaggatatatagtgaaaaatcgagtacttcccctgagacacctgaggttactagggtcttgtgtctccttccagagatagttaaaacctgtatgatcagacactctcattttcataaatcgtagcatgctataaatgctaggcccatattttattattttattaaagattgtttttctttaaggttcagagggtacattttcatgtttgttacacgggtatattgtgtaatgttggggattgggcttctagtgtatccatcaccaaaatattgaacattgtatccaatagataatcttttaattctcacccccctcactccttctccccttttggagtccccagtgtctattatttctatctatatgtccatgtgtacccattgtttagttcccacttacaaaagttagaacatgtgat

SEQ ID NO: 363086 - DNA, 465 bp, Homo sapiens
ccattaaaacatttctgagggccggcaaattagtcatcaatgctgcaagggttccttgaatcctatgccattaaaaaaaggacaagctgagcgtgtggcaaggtcaaaccgctgattttcccagctgctgcccaataaacctgtgtgccctttggggcagccccagcctcgtgccgaattcggcacgaggctttttttaaaaaaaaaaagtcctcaaatcaggaagaaacatcaaagactatgtcctagtggagggagtaatcctaacacccaggctggccgccagctggcacctgcctctatcccagactgccctcgtcccagctctctgtccaactgttgattatgtgatttttctgatacgtccattctcaaatgccagtgtgttcacatcttcgctctggccagcccattctgtatttaaagcttttgaggcccaataaaatagtacgtgctgtctgcagc

SEQ ID NO: 363087 - DNA, 543 bp, Homo sapiens
ttgaagaaatgtgaaattaagaagaaatcttatctaaattatgtttgttgtaatctgtcggcttatatacctacatttaggccttcacagcacctagtggctttcctgttattaaagagaacagcagacttctgtaactacagaagagcttctctgaaactagtgattttaggggactgagaagaaagaggcagatgagatggtgtctcttaaagggttatttcaaagccaaagtttagatgcatttcacatgcagggagtgtgaattgtctgtatcttctatagggtttagtctaatccttttttcctctcgatgtatgggaaggagtcgcatcacaggatgctggcagggccttgctggtgtgacataggcttcagcttcctatctgtttcccctggggaatcaatgaaaacaaggttcatcattcctctaatagattaaaatttttttcttgattaacttcactgtggagttggcaagagttgttatctgttaatcaaaactgtttaaataaaaaataaaaagatcaaactttgagtctt

SEQ ID NO: 363088 - DNA, 253 bp, Homo sapiens
cgcttgcgcggcgagtagaacgtgtggcggcggcggagatcgcgtctctttcgctccgtgtcccgctgctgctcctgtgagcgcccggcgagtccgtcccgtccaccgtcccagcagggaggtgtgcttggctcagccttaggatttttgaatctgccattgtccccatttcttttacagtcatctatagggtccctccagctttcataatactcacagaggtacaagattatagggtcctagaggctgtctc

SEQ ID NO: 363089 - DNA, 3495 bp, Homo sapiens
cgcttgcgcggcgagtagaacgtgtggcggcggcggagatcgcgtctctttcgctccgtgtcccgctgctgctcctgtgagcgcccggcgagtccgtcccgtccaccgtccgcagctggtagccagcctgcccctcgcctcgactccctttcaccaacaccgacacccacattgacacctccagtccggccagccgctccactcgttgcctttgcatctccacacatggcgtcctccgcgcagagcggcggctcctccgggggacccgcggtccccaccgtgcagcggggcatcatcaagatggtcctctcagggtgcgccatcattgtccgaggtcagcctcgtggtgggcctcctcctgagcggcagatcaacctcagcaacattcgtgctggaaatcttgctcgccgggcagccgccacacaacctgatgcaaaggatacccctgatgagccctgggcatttccagctcgagagttccttcgaaagaagctgattgggaaggaagtctgtttcacgatagaaaacaagactccccaggggcgagagtatggcatgatctaccttggaaaagataccaatggggaaaacattgcagaatcactggttgcagagggcttagccacccggagagaaggcatgagagctaataatcctgagcagaaccggctttcagaatgtgaagaacaagcaaaggcagccaagaaagggatgtggagtgaggggaacggttcacatactatccgggatctcaagtataccattgaaaacccaaggcactttgtggactcacaccaccagaagcctgttaatgctatcatcgagcatgtgcgggacggcagtgtggtcagggccctgctcctcccagattactacctggttacagtcatgctgtcaggcatcaagtgcccaacttttcgacgggaagcagatggcagtgaaactccagagccttttgctgcagaagccaaatttttcactgagtcgcgactgcttcagagagatgttcagatcattctggagagctgccacaaccagaacattctgggtaccatccttcatccaaatggcaacatcacagagctcctcctgaaggaaggtttcgcacgctgtgtggactggtcgattgcagtttacacccggggcgcagaaaagctgagggcggcagagaggtttgccaaagagcgcaggctgagaatatggagagactatgtggctcccacagctaatttggaccaaaaggacaagcagtttgttgccaaggtgatgcaggttctgaatgctgatgccattgttgtgaagctgaactcaggcgattacaagacgattcacctgtccagcatccgaccaccgaggctggagggggagaacacccaggataagaacaagaaactgcgtcccctgtatgacattccttacatgtttgaggcccgggaatttcttcgaaaaaagcttattgggaagaaggtcaatgtgacggtggactacattagaccagccagcccagccacagagacagtgcctgccttttcagagcgtacctgtgccactgtcaccattggaggaataaacattgctgaggctcttgtcagcaaaggtctagccacagtgatcagataccggcaggatgatgaccagagatcatcacactacgatgaactgcttgctgcagaggccagagctattaagaatggcaaaggattgcatagcaagaaggaagtgcctatccaccgtgttgcagatatatctggggatacccaaaaagcaaagcagttcctgccttttcttcagcgggcaggtcgttctgaagctgtggtggaatacgtcttcagtggttctcgtctcaaactctatttgccaaaggaaacttgccttatcaccttcttgcttgcaggcattgaatgccccagaggagcccgaaacctcccaggcttggtgcaggaaggagagcccttcagcgaggaagctacacttttcaccaaggaactggtgctgcagcgagaggtggaggtggaggtggagagcatggacaaggccggcaactttatcggctggctgcacatcgacggtgccaacctgtccgtcctgctggtggagcacgcgctctccaaggtccacttcaccgccgaacgcagctcctactacaagtccctgctgtctgccgaggaggccgcaaagcagaagaaagagaaggtctgggcccactatgaggagcagcccgtggaggaggtgatgccagtgctggaggagaaggagcgatctgctagctacaagcccgtgtttgtgaccgagatcactgatgacctgcacttctacgtgcaggatgtggagaccggcacccagttggagaagctgatggagaacatgcgcaatgacattgccagtcacccccctgtagagggctcctatgccccccgcaggggagagttctgcattgccaaatttgtagatggagaatggtaccgtgcccgagtagagaaagtcgagtctcctgccaaaatacatgtcttctacattgactacggcaacagagaggtcctgccatccacccgcctgggtaccctatcacctgccttcagcactcgggtgctgccagctcaagccacggagtatgccttcgccttcatccaggtgccccaagatgatgatgcccgcacggacgccgtggacagcgtagttcgggatatccagaacactcagtgcctgctcaacgtggaacacctgagtgccggctgcccccatgtcaccctgcagtttgcagattccaagggcgatgtggggctgggcttggtgaaggaagggctggtcatggtggaggtgcgcaaggagaaacagttccagaaagtgatcacagaatacctgaatgcccaagagtcagccaagagcgccaggctgaacctgtggcgctatggagactttcgagctgatgatgcagacgaatttggctacagccgctaaggaggggatcgggtttggcccccagccccgctcacgccagtccctcttcctctgccgggagggtgttttcaactccaaaccccagagaggggttgtagattgggtccagctttgcttcagtgtgtggaaatgtctcgtggggtggcatcggggctgcggggtggggaccccaaggctttctggggcagacccttgtcctctgggatgatgggcactgctatccacagtctctgccagttggttttatttggaggtttgtgggctttttttaaaaaaaaaaagtcctcaaatcaggaagaaacatcaaagactatgtcctagtggagggagtaatcctaacacccaggctggccgccagctggcacctgcctctatcccagactgccctcgtcccagctctctgtccaactgttgattatgtgatttttctgatacgtccattctcaaatgccagtgtgttcacatcttcgctctggccagcccattctgtatttaaagcttttgaggcccaataaaatagtacgtgctgtctgcagc

SEQ ID NO: 363090 - DNA, 3170 bp, Homo sapiens
aggatagacttctccatcagatagtcctctgcctggctgtcctttgtgtggacacatgggtaacactggcctcacttccacaagggttctgtcccagagcactctcttgccctcagaggagtgatgtgccctgggcatttccagctcgagagttccttcgaaagaagctgattgggaaggaagtctgtttcacgatagaaaacaagactccccaggggcgagagtatggcatgatctaccttggaaaagataccaatggggaaaacattgcagaatcactggttgcagagggcttagccacccggagagaaggcatgagagctaataatcctgagcagaaccggctttcagaatgtgaagaacaagcaaaggcagccaagaaagggatgtggagtgaggggaacggttcacatactatccgggatctcaagtataccattgaaaacccaaggcactttgtggactcacaccaccagaagcctgttaatgctatcatcgagcatgtgcgggacggcagtgtggtcagggccctgctcctcccagattactacctggttacagtcatgctgtcaggcatcaagtgcccaacttttcgacgggaagcagatggcagtgaaactccagagccttttgctgcagaagccaaatttttcactgagtcgcgactgcttcagagagatgttcagatcattctggagagctgccacaaccagaacattctgggtaccatccttcatccaaatggcaacatcacagagctcctcctgaaggaaggtttcgcacgctgtgtggactggtcgattgcagtttacacccggggcgcagaaaagctgagggcggcagagaggtttgccaaagagcgcaggctgagaatatggagagactatgtggctcccacagctaatttggaccaaaaggacaagcagtttgttgccaaggtgatgcaggttctgaatgctgatgccattgttgtgaagctgaactcaggcgattacaagacgattcacctgtccagcatccgaccaccgaggctggagggggagaacacccaggataagaacaagaaactgcgtcccctgtatgacattccttacatgtttgaggcccgggaatttcttcgaaaaaagcttattgggaagaaggtcaatgtgacggtggactacattagaccagccagcccagccacagagacagtgcctgccttttcagagcgtacctgtgccactgtcaccattggaggaataaacattgctgaggctcttgtcagcaaaggtctagccacagtgatcagataccggcaggatgatgaccagagatcatcacactacgatgaactgcttgctgcagaggccagagctattaagaatggcaaaggattgcatagcaagaaggaagtgcctatccaccgtgttgcagatatatctggggatacccaaaaagcaaagcagttcctgccttttcttcagcgggcaggtcgttctgaagctgtggtggaatacgtcttcagtggttctcgtctcaaactctatttgccaaaggaaacttgccttatcaccttcttgcttgcaggcattgaatgccccagaggagcccgaaacctcccaggcttggtgcaggaaggagagcccttcagcgaggaagctacacttttcaccaaggaactggtgctgcagcgagaggtggaggtggaggtggagagcatggacaaggccggcaactttatcggctggctgcacatcgacggtgccaacctgtccgtcctgctggtggagcacgcgctctccaaggtccacttcaccgccgaacgcagctcctactacaagtccctgctgtctgccgaggaggccgcaaagcagaagaaagagaaggtctgggcccactatgaggagcagcccgtggaggaggtgatgccagtgctggaggagaaggagcgatctgctagctacaagcccgtgtttgtgaccgagatcactgatgacctgcacttctacgtgcaggatgtggagaccggcacccagttggagaagctgatggagaacatgcgcaatgacattgccagtcacccccctgtagagggctcctatgccccccgcaggggagagttctgcattgccaaatttgtagatggagaatggtaccgtgcccgagtagagaaagtcgagtctcctgccaaaatacatgtcttctacattgactacggcaacagagaggtcctgccatccacccgcctgggtaccctatcacctgccttcagcactcgggtgctgccagctcaagccacggagtatgccttcgccttcatccaggtgccccaagatgatgatgcccgcacggacgccgtggacagcgtagttcgggatatccagaacactcagtgcctgctcaacgtggaacacctgagtgccggctgcccccatgtcaccctgcagtttgcagattccaagggcgatgtggggctgggcttggtgaaggaagggctggtcatggtggaggtgcgcaaggagaaacagttccagaaagtgatcacagaatacctgaatgcccaagagtcagccaagagcgccaggctgaacctgtggcgctatggagactttcgagctgatgatgcagacgaatttggctacagccgctaaggaggggatcgggtttggcccccagccccgctcacgccagtccctcttcctctgccgggagggtgttttcaactccaaaccccagagaggggttgtagattgggtccagctttgcttcagtgtgtggaaatgtctcgtggggtggcatcggggctgcggggtggggaccccaaggctttctggggcagacccttgtcctctgggatgatgggcactgctatccacagtctctgccagttggttttatttggaggtttgtgggctttttttaaaaaaaaaaagtcctcaaatcaggaagaaacatcaaagactatgtcctagtggagggagtaatcctaacacccaggctggccgccagctggcacctgcctctatcccagactgccctcgtcccagctctctgtccaactgttgattatgtgatttttctgatacgtccattctcaaatgccagtgtgttcacatcttcgctctggccagcccattctgtatttaaagcttttgaggcccaataaaatagtacgtgctgtctgcagc

SEQ ID NO: 363091 - DNA, 3789 bp, Homo sapiens
cgcttgcgcggcgagtagaacgtgtggcggcggcggagatcgcgtctctttcgctccgtgtcccgctgctgctcctgtgagcgcccggcgagtccgtcccgtccaccgtccgcagctggtagccagcctgcccctcgcctcgactccctttcaccaacaccgacacccacattgacacctccagtccggccagccgctccactcgttgcctttgcatctccacacatggcgtcctccgcgcagagcggcggctcctccgggggacccgcggtccccaccgtgcagcggggcatcatcaagatggtcctctcagggtgcgccatcattgtccgaggtcagcctcgtggtgggcctcctcctgagcggcagatcaacctcagcaacattcgtgctggaaatcttgctcgccgggcagccgccacacaacctgatgcaaaggatacccctgatgagccctgggcatttccagctcgagagttccttcgaaagaagctgattgggaaggaagtctgtttcacgatagaaaacaagactccccaggggcgagagtatggcatgatctaccttggaaaagataccaatggggaaaacattgcagaatcactggttgcagagggcttagccacccggagagaaggcatgagagctaataatcctgagcagaaccggctttcagaatgtgaagaacaagcaaaggcagccaagaaagggatgtggagtgaggggaacggttcacatactatccgggatctcaagtataccattgaaaacccaaggcactttgtggactcacaccaccagaagcctgttaatgctatcatcgagcatgtgcgggacggcagtgtggtcagggccctgctcctcccagattactacctggttacagtcatgctgtcaggcatcaagtgcccaacttttcgacgggaagcagatggcagtgaaactccagagccttttgctgcagaagccaaatttttcactgagtcgcgactgcttcagagagatgttcagatcattctggagagctgccacaaccagaacattctgggtaccatccttcatccaaatggcaacatcacagagctcctcctgaaggaaggtttcgcacgctgtgtggactggtcgattgcagtttacacccggggcgcagaaaagctgagggcggcagagaggtttgccaaagagcgcaggctgagaatatggagagactatgtggctcccacagctaatttggaccaaaaggacaagcagtttgttgccaaggtgatgcaggttctgaatgctgatgccattgttgtgaagctgaactcaggcgattacaagacgattcacctgtccagcatccgaccaccgaggctggagggggagaacacccaggataagaacaagaaactgcgtcccctgtatgacattccttacatgtttgaggcccgggaatttcttcgaaaaaagcttattgggaagaaggtcaatgtgacggtggactacattagaccagccagcccagccacagagacagtgcctgccttttcagagcgtacctgtgccactgtcaccattggaggaataaacattgctgaggctcttgtcagcaaaggtctagccacagtgatcagataccggcaggatgatgaccagagatcatcacactacgatgaactgcttgctgcagaggccagagctattaagaatggcaaaggattgcatagcaagaaggaagtgcctatccaccgtgttgcagatatatctggggatacccaaaaagcaaagcagttcctgccttttcttcagcgggcaggtcgttctgaagctgtggtggaatacgtcttcagtggttctcgtctcaaactctatttgccaaaggaaacttgccttatcaccttcttgcttgcaggcattgaatgccccagaggagcccgaaacctcccaggcttggtgcaggaaggagagcccttcagcgaggaagctacacttttcaccaaggaactggtgctgcagcgagaggtggaggtggaggtggagagcatggacaaggccggcaactttatcggctggctgcacatcgacggtgccaacctgtccgtcctgctggtggagcacgcgctctccaaggtccacttcaccgccgaacgcagctcctactacaagtccctgctgtctgccgaggaggccgcaaagcagaagaaagagaaggtctgggcccactatgaggagcagcccgtggaggaggtgatgccagtgctggaggagaaggagcgatctgctagctacaagcccgtgtttgtgaccgagatcactgatgacctgcacttctacgtgcaggatgtggagaccggcacccagttggagaagctgatggagaacatgcgcaatgacattgccagtcacccccctgtagagggctcctatgccccccgcaggggagagttctgcattgccaaatttgtagatggagaatggtaccgtgcccgagtagagaaagtcgagtctcctgccaaaatacatgtcttctacattgactacggcaacagagaggtcctgccatccacccgcctgggtaccctatcacctgccttcagcactcgggtgctgccagctcaagccacggagtatgccttcgccttcatccaggtgccccaagatgatgatgcccgcacggacgccgtggacagcgtagttcgggatatccagaacactcagtgcctgctcaacgtggaacacctgagtgccggctgcccccatgtcaccctgcagtttgcagattccaagggcgatgtggggctgggcttggtgaaggaagggctggtcatggtggaggtgcgcaaggagaaacagttccagaaagtgatcacagaatacctgaatgcccaagagtcagccaagagcgccaggctgaacctgtggcgctatggagactttcgagctgatgatgcagacgaatttggctacagccgctaaggaggggatcgggtttggcccccagccccgctcacgccagtccctcttcctctgccgggagggtgttttcaactccaaaccccagagaggggttgtagattgggtccagctttgcttcagtgtgtggaaatgtctcgtggggtggcatcggggctgcggggtggggaccccaaggctttctggggcagacccttgtcctctgggatgatgggcactgctatccacagtctctgccagttggttttatttggaggtttgtgggctttttttaaaaaaaaaaagtcctcaaatcaggaagaaacatcaaagactatgtcctagtggagggagtaatcctaacacccaggctggccgccagctggcacctgcctctatcccagactgccctcgtcccagctctctgtccaactgttgattatgtgatttttctgatacgtccattctcaaatgccagtgtgttcacatcttcgctctggccagcccattctgtatttaaagcttttgaggcccaataaaatagtacgtgctgtctgcagccgtgtctggcaaaaaaaaaaaaaaaaaaaaaaaaaaaaaaaacaaaaaaaacacaaacaaaagaagagagaaaaaaaacacacaaaaaaaaaacaaaacaaagatgtgtgtggggggcagccgacgcgcccaacaaaaaaagagagttttgaagaacacaccattagtggggagggcgagggcgagcacccaaacagatgaagtagaaacaccacgtggccaacacaacaggtgtcaccaagaaaaaaagctgtcgggagaaaaacgggggggggatgactaccacaaacaaga

SEQ ID NO: 363092 - DNA, 3443 bp, Homo sapiens
cgcttgcgcggcgagtagaacgtgtggcggcggcggagatcgcgtctctttcgctccgtgtcccgctgctgctcctgtgagcgcccggcgagtccgtcccgtccaccgtccgcagctggtagccagcctgcccctcgcctcgactccctttcaccaacaccgacacccacattgacacctccagtccggccagccgctccactcgttgcctttgcatctccacacatggcgtcctccgcgcagagcggcggctcctccgggggacccgcggtccccaccgtgcagcggggcatcatcaagatggtcctctcagggtgcgccatcattgtccgaggtcagcctcgtggtgggcctcctcctgagcggcagatcaacctcagcaacattcgtgctggaaatcttgctcgccgggcagccgccacacaacctgatgcaaaggatacccctgatgagccctgggcatttccagctcgagagttccttcgaaagaagctgattgggaaggaagtctgtttcacgatagaaaacaagactccccaggggcgagagtatggcatgatctaccttggaaaagataccaatggggaaaacattgcagaatcactggttgcagagggcttagccacccggagagaaggcatgagagctaataatcctgagcagaaccggctttcagaatgtgaagaacaagcaaaggcagccaagaaagggatgtggagtgaggggaacggttcacatactatccgggatctcaagtataccattgaaaacccaaggcactttgtggactcacaccaccagaagcctgttaatgctatcatcgagcatgtgcgggacggcagtgtggtcagggccctgctcctcccagattactacctggttacagtcatgctgtcaggcatcaagtgcccaacttttcgacgggaagcagatggcagtgaaactccagagccttttgctgcagaagccaaatttttcactgagtcgcgactgcttcagagagatgttcagatcattctggagagctgccacaaccagaacattctgggtaccatccttcatccaaatggcaacatcacagagctcctcctgaaggaaggtttcgcacgctgtgtggactggtcgattgcagtttacacccggggcgcagaaaagctgagggcggcagagaggtttgccaaagagcgcaggctgagaatatggagagactatgtggctcccacagctaatttggaccaaaaggacaagcagtttgttgccaaggtgatgcaggttctgaatgctgatgccattgttgtgaagctgaactcaggcgattacaagacgattcacctgtccagcatccgaccaccgaggctggagggggagaacacccaggataagaacaagaaactgcgtcccctgtatgacattccttacatgtttgaggcccgggaatttcttcgaaaaaagcttattgggaagaaggtcaatgtgacggtggactacattagaccagccagcccagccacagagacagtgcctgccttttcagagcgtacctgtgccactgtcaccattggaggaataaacattgctgaggctcttgtcagcaaaggtctagccacagtgatcagataccggcaggatgatgaccagagatcatcacactacgatgaactgcttgctgcagaggccagagctattaagaatggcaaaggattgcatagcaagaaggaagtgcctatccaccgtgttgcagatatatctggggatacccaaaaagcaaagcagttcctgccttttcttcagcgggcaggtcgttctgaagctgtggtggaatacgtcttcagtggttctcgtctcaaactctatttgccaaaggaaacttgccttatcaccttcttgcttgcaggcattgaatgccccagaggagcccgaaacctcccaggcttggtgcaggaaggagagcccttcagcgaggaagctacacttttcaccaaggaactggtgctgcagcgagaggtggaggtggaggtggagagcatggacaaggccggcaactttatcggctggctgcacatcgacggtgccaacctgtccgtcctgctggtggagcacgcgctctccaaggtccacttcaccgccgaacgcagctcctagtctgggcccactatgaggagcagcccgtggaggaggtgatgccagtgctggaggagaaggagcgatctgctagctacaagcccgtgtttgtgaccgagatcactgatgacctgcacttctacgtgcaggatgtggagaccggcacccagttggagaagctgatggagaacatgcgcaatgacattgccagtcacccccctgtagagggctcctatgccccccgcaggggagagttctgcattgccaaatttgtagatggagaatggtaccgtgcccgagtagagaaagtcgagtctcctgccaaaatacatgtcttctacattgactacggcaacagagaggtcctgccatccacccgcctgggtaccctatcacctgccttcagcactcgggtgctgccagctcaagccacggagtatgccttcgccttcatccaggtgccccaagatgatgatgcccgcacggacgccgtggacagcgtagttcgggatatccagaacactcagtgcctgctcaacgtggaacacctgagtgccggctgcccccatgtcaccctgcagtttgcagattccaagggcgatgtggggctgggcttggtgaaggaagggctggtcatggtggaggtgcgcaaggagaaacagttccagaaagtgatcacagaatacctgaatgcccaagagtcagccaagagcgccaggctgaacctgtggcgctatggagactttcgagctgatgatgcagacgaatttggctacagccgctaaggaggggatcgggtttggcccccagccccgctcacgccagtccctcttcctctgccgggagggtgttttcaactccaaaccccagagaggggttgtagattgggtccagctttgcttcagtgtgtggaaatgtctcgtggggtggcatcggggctgcggggtggggaccccaaggctttctggggcagacccttgtcctctgggatgatgggcactgctatccacagtctctgccagttggttttatttggaggtttgtgggctttttttaaaaaaaaaaagtcctcaaatcaggaagaaacatcaaagactatgtcctagtggagggagtaatcctaacacccaggctggccgccagctggcacctgcctctatcccagactgccctcgtcccagctctctgtccaactgttgattatgtgatttttctgatacgtccattctcaaatgccagtgtgttcacatcttcgctctggccagcccattctgtatttaaagcttttgaggcccaataaaatagtacgtgctgtctgcagc

SEQ ID NO: 363093 - DNA, 3055 bp, Homo sapiens
cgcttgcgcggcgagtagaacgtgtggcggcggcggagatcgcgtctctttcgctccgtgtcccgctgctgctcctgtgagcgcccggcgagtccgtcccgtccaccgtccgcagctggtagccagcctgcccctcgcctcgactccctttcaccaacaccgacacccacattgacacctccagtccggccagccgctccactcgttgcctttgcatctccacacatggcgtcctccgcgcagagcggcggctcctccgggggacccgcggtccccaccgtgcagcggggcatcatcaagatggtcctctcagggtgcgccatcattgtccgaggtcagcctcgtggtgggcctcctcctgagcggcagatcaacctcagcaacattcgtgctggaaatcttgctcgccgggcagccgccacacaacctgatgcaaaggatacccctgatgagccctgggcatttccagctcgagagttccttcgaaagaagctgattgggaaggaagtctgtttcacgatagaaaacaagactccccaggggcgagagtatggcatgatctaccttggaaaagataccaatggggaaaacattgcagaacattctgggtaccatccttcatccaaatggcaacatcacagagctcctcctgaaggaaggtttcgcacgctgtgtggactggtcgattgcagtttacacccggggcgcagaaaagctgagggcggcagagaggtttgccaaagagcgcaggctgagaatatggagagactatgtggctcccacagctaatttggaccaaaaggacaagcagtttgttgccaaggtgatgcaggttctgaatgctgatgccattgttgtgaagctgaactcaggcgattacaagacgattcacctgtccagcatccgaccaccgaggctggagggggagaacacccaggataagaacaagaaactgcgtcccctgtatgacattccttacatgtttgaggcccgggaatttcttcgaaaaaagcttattgggaagaaggtcaatgtgacggtggactacattagaccagccagcccagccacagagacagtgcctgccttttcagagcgtacctgtgccactgtcaccattggaggaataaacattgctgaggctcttgtcagcaaaggtctagccacagtgatcagataccggcaggatgatgaccagagatcatcacactacgatgaactgcttgctgcagaggccagagctattaagaatggcaaaggattgcatagcaagaaggaagtgcctatccaccgtgttgcagatatatctggggatacccaaaaagcaaagcagttcctgccttttcttcagcgggcaggtcgttctgaagctgtggtggaatacgtcttcagtggttctcgtctcaaactctatttgccaaaggaaacttgccttatcaccttcttgcttgcaggcattgaatgccccagaggagcccgaaacctcccaggcttggtgcaggaaggagagcccttcagcgaggaagctacacttttcaccaaggaactggtgctgcagcgagaggtggaggtggaggtggagagcatggacaaggccggcaactttatcggctggctgcacatcgacggtgccaacctgtccgtcctgctggtggagcacgcgctctccaaggtccacttcaccgccgaacgcagctcctactacaagtccctgctgtctgccgaggaggccgcaaagcagaagaaagagaaggtctgggcccactatgaggagcagcccgtggaggaggtgatgccagtgctggaggagaaggagcgatctgctagctacaagcccgtgtttgtgaccgagatcactgatgacctgcacttctacgtgcaggatgtggagaccggcacccagttggagaagctgatggagaacatgcgcaatgacattgccagtcacccccctgtagagggctcctatgccccccgcaggggagagttctgcattgccaaatttgtagatggagaatggtaccgtgcccgagtagagaaagtcgagtctcctgccaaaatacatgtcttctacattgactacggcaacagagaggtcctgccatccacccgcctgggtaccctatcacctgccttcagcactcgggtgctgccagctcaagccacggagtatgccttcgccttcatccaggtgccccaagatgatgatgcccgcacggacgccgtggacagcgtagttcgggatatccagaacactcagtgcctgctcaacgtggaacacctgagtgccggctgcccccatgtcaccctgcagtttgcagattccaagggcgatgtggggctgggcttggtgaaggaagggctggtcatggtggaggtgcgcaaggagaaacagttccagaaagtgatcacagaatacctgaatgcccaagagtcagccaagagcgccaggctgaacctgtggcgctatggagactttcgagctgatgatgcagacgaatttggctacagccgctaaggaggggatcgggtttggcccccagccccgctcacgccagtccctcttcctctgccgggagggtgttttcaactccaaaccccagagaggggttgtagattgggtccagctttgcttcagtgtgtggaaatgtctcgtggggtggcatcggggctgcggggtggggaccccaaggctttctggggcagacccttgtcctctgggatgatgggcactgctatccacagtctctgccagttggttttatttggaggtttgtgggctttttttaaaaaaaaaaagtcctcaaatcaggaagaaacatcaaagactatgtcctagtggagggagtaatcctaacacccaggctggccgccagctggcacctgcctctatcccagactgccctcgtcccagctctctgtccaactgttgattatgtgatttttctgatacgtccattctcaaatgccagtgtgttcacatcttcgctctggccagcccattctgtatttaaagcttttgaggcccaataaaatagtacgtgctgtctgcagc

SEQ ID NO: 363094 - DNA, 2897 bp, Homo sapiens
cgcttgcgcggcgagtagaacgtgtggcggcggcggagatcgcgtctctttcgctccgtgtcccgctgctgctcctgtgagcgcccggcgagtccgtcccgtccaccgtccgcagctggtagccagcctgcccctcgcctcgactccctttcaccaacaccgacacccacattgacacctccagtccggccagccgctccactcgttgcctttgcatctccacacatggcgtcctccgcgcagagcggcggctcctccgggggacccgcggtccccaccgtgcagcggggcatcatcaagatggtcctctcagggtgcgccatcattgtccgaggtcagcctcgtggtgggcctcctcctgagcggcagatcaacctcagcaacattcgtgctggaaatcttgctcgccgggcagccgccacacaacctgatgcaaaggatacccctgatgagccctgggcatttccagctcgagagttccttcgaaagaagctgattgggaaggaagtctgtttcacgatagaaaacaagactccccaggggcgagagtatggcatgatctaccttggaaaaggtttgccaaagagcgcaggctgagaatatggagagactatgtggctcccacagctaatttggaccaaaaggacaagcagtttgttgccaaggtgatgcaggttctgaatgctgatgccattgttgtgaagctgaactcaggcgattacaagacgattcacctgtccagcatccgaccaccgaggctggagggggagaacacccaggataagaacaagaaactgcgtcccctgtatgacattccttacatgtttgaggcccgggaatttcttcgaaaaaagcttattgggaagaaggtcaatgtgacggtggactacattagaccagccagcccagccacagagacagtgcctgccttttcagagcgtacctgtgccactgtcaccattggaggaataaacattgctgaggctcttgtcagcaaaggtctagccacagtgatcagataccggcaggatgatgaccagagatcatcacactacgatgaactgcttgctgcagaggccagagctattaagaatggcaaaggattgcatagcaagaaggaagtgcctatccaccgtgttgcagatatatctggggatacccaaaaagcaaagcagttcctgccttttcttcagcgggcaggtcgttctgaagctgtggtggaatacgtcttcagtggttctcgtctcaaactctatttgccaaaggaaacttgccttatcaccttcttgcttgcaggcattgaatgccccagaggagcccgaaacctcccaggcttggtgcaggaaggagagcccttcagcgaggaagctacacttttcaccaaggaactggtgctgcagcgagaggtggaggtggaggtggagagcatggacaaggccggcaactttatcggctggctgcacatcgacggtgccaacctgtccgtcctgctggtggagcacgcgctctccaaggtccacttcaccgccgaacgcagctcctactacaagtccctgctgtctgccgaggaggccgcaaagcagaagaaagagaaggtctgggcccactatgaggagcagcccgtggaggaggtgatgccagtgctggaggagaaggagcgatctgctagctacaagcccgtgtttgtgaccgagatcactgatgacctgcacttctacgtgcaggatgtggagaccggcacccagttggagaagctgatggagaacatgcgcaatgacattgccagtcacccccctgtagagggctcctatgccccccgcaggggagagttctgcattgccaaatttgtagatggagaatggtaccgtgcccgagtagagaaagtcgagtctcctgccaaaatacatgtcttctacattgactacggcaacagagaggtcctgccatccacccgcctgggtaccctatcacctgccttcagcactcgggtgctgccagctcaagccacggagtatgccttcgccttcatccaggtgccccaagatgatgatgcccgcacggacgccgtggacagcgtagttcgggatatccagaacactcagtgcctgctcaacgtggaacacctgagtgccggctgcccccatgtcaccctgcagtttgcagattccaagggcgatgtggggctgggcttggtgaaggaagggctggtcatggtggaggtgcgcaaggagaaacagttccagaaagtgatcacagaatacctgaatgcccaagagtcagccaagagcgccaggctgaacctgtggcgctatggagactttcgagctgatgatgcagacgaatttggctacagccgctaaggaggggatcgggtttggcccccagccccgctcacgccagtccctcttcctctgccgggagggtgttttcaactccaaaccccagagaggggttgtagattgggtccagctttgcttcagtgtgtggaaatgtctcgtggggtggcatcggggctgcggggtggggaccccaaggctttctggggcagacccttgtcctctgggatgatgggcactgctatccacagtctctgccagttggttttatttggaggtttgtgggctttttttaaaaaaaaaaagtcctcaaatcaggaagaaacatcaaagactatgtcctagtggagggagtaatcctaacacccaggctggccgccagctggcacctgcctctatcccagactgccctcgtcccagctctctgtccaactgttgattatgtgatttttctgatacgtccattctcaaatgccagtgtgttcacatcttcgctctggccagcccattctgtatttaaagcttttgaggcccaataaaatagtacgtgctgtctgcagc

SEQ ID NO: 363095 - DNA, 2307 bp, Homo sapiens
ttatagaggatcccccgttcgccgcttctcgtttccacagctattggaccaaaaggacaagcagtttgtgccaaggtgatgcaggttctgaatgctgatgccattgttgtgaagctgaactcaggcgattacaagacgattcacctgtccagcatccgaccaccgaggctggagggggagaacacccaggataagaacaagaaactgcgtcccctgtatgacattccttacatgtttgaggcccgggaatttcttcgaaaaaagcttattgggaagaaggtcaatgtgacggtggactacattagaccagccagcccagccacagagacagtgcctgccttttcagagcgtacctgtgccactgtcaccattggaggaataaacattgctgaggctcttgtcagcaaaggtctagccacagtgatcagataccggcaggatgatgaccagagatcatcacactacgatgaactgcttgctgcagaggccagagctattaagaatggcaaaggattgcatagcaagaaggaagtgcctatccaccgtgttgcagatatatctggggatacccaaaaagcaaagcagttcctgccttttcttcagcgggcaggtcgttctgaagctgtggtggaatacgtcttcagtggttctcgtctcaaactctatttgccaaaggaaacttgccttatcaccttcttgcttgcaggcattgaatgccccagaggagcccgaaacctcccaggcttggtgcaggaaggagagcccttcagcgaggaagctacacttttcaccaaggaactggtgctgcagcgagaggtggaggtggaggtggagagcatggacaaggccggcaactttatcggctggctgcacatcgacggtgccaacctgtccgtcctgctggtggagcacgcgctctccaaggtccacttcaccgccgaacgcagctcctactacaagtccctgctgtctgccgaggaggccgcaaagcagaagaaagagaaggtctgggcccactatgaggagcagcccgtggaggaggtgatgccagtgctggaggagaaggagcgatctgctagctacaagcccgtgtttgtgaccgagatcactgatgacctgcacttctacgtgcaggatgtggagaccggcacccagttggagaagctgatggagaacatgcgcaatgacattgccagtcacccccctgtagagggctcctatgccccccgcaggggagagttctgcattgccaaatttgtagatggagaatggtaccgtgcccgagtagagaaagtcgagtctcctgccaaaatacatgtcttctacattgactacggcaacagagaggtcctgccatccacccgcctgggtaccctatcacctgccttcagcactcgggtgctgccagctcaagccacggagtatgccttcgccttcatccaggtgccccaagatgatgatgcccgcacggacgccgtggacagcgtagttcgggatatccagaacactcagtgcctgctcaacgtggaacacctgagtgccggctgcccccatgtcaccctgcagtttgcagattccaagggcgatgtggggctgggcttggtgaaggaagggctggtcatggtggaggtgcgcaaggagaaacagttccagaaagtgatcacagaatacctgaatgcccaagagtcagccaagagcgccaggctgaacctgtggcgctatggagactttcgagctgatgatgcagacgaatttggctacagccgctaaggaggggatcgggtttggcccccagccccgctcacgccagtccctcttcctctgccgggagggtgttttcaactccaaaccccagagaggggttgtagattgggtccagctttgcttcagtgtgtggaaatgtctcgtggggtggcatcggggctgcggggtggggaccccaaggctttctggggcagacccttgtcctctgggatgatgggcactgctatccacagtctctgccagttggttttatttggaggtttgtgggctttttttaaaaaaaaaaagtcctcaaatcaggaagaaacatcaaagactatgtcctagtggagggagtaatcctaacacccaggctggccgccagctggcacctgcctctatcccagactgccctcgtcccagctctctgtccaactgttgattatgtgatttttctgatacgtccattctcaaatgccagtgtgttcacatcttcgctctggccagcccattctgtatttaaagcttttgaggcccaataaaatagtacgtgctgtctgcagc

SEQ ID NO: 363096 - DNA, 3092 bp, Homo sapiens
cgcttgcgcggcgagtagaacgtgtggcggcggcggagatcgcgtctctttcgctccgtgtcccgctgctgctcctgtgagcgcccggcgagtccgtcccgtccaccgtccgcagctggtagccagcctgcccctcgcctcgactccctttcaccaacaccgacacccacattgacacctccagtccggccagccgctccactcgttgcctttgcatctccacacatggcgtcctccgcgcagagcggcggctcctccgggggacccgcggtccccaccgtgcagcggggcatcatcaagatggtcctctcagggtgcgccatcattgtccgaggtcagcctcgtggtgggcctcctcctgagcggcagatcaacctcagcaacattcgtgctggaaatcttgctcgccgggcagccgccacacaacctgatgcaaaggatacccctgatgagccctgggcatttccagctcgagagttccttcgaaagaagctgattgggaaggaagtctgtttcacgatagaaaacaagactccccaggggcgagagtatggcatgatctaccttggaaaagataccaatggggaaaacattgcagaatcactggttgcagagggcttagccacccggagagaaggcatgagagctaataatcctgagcagaaccggctttcagaatgtgaagaacaagcaaaggcagccaagaaagggatgtggagtgaggggaacggttcacatactatccgggatctcaagtataccattgaaaacccaaggcactttgtggactcacaccaccagaagcctgttaatgctatcatcgagcatgtgcgggacggcagtgtggtcagggccctgctcctcccagattactacctggttacagtcatgctgtcaggcatcaagtgcccaacttttcgacgggaagcagatggcagtgaaactccagagccttttgctgcagaagccaaatttttcactgagtcgcgactgcttcagagagatgttcagatcattctggagagctgccacaaccagaacattctgggtaccatccttcatccaaatggcaacatcacagagctcctcctgaaggaaggtttcgcacgctgtgtggactggtcgattgcagtttacacccggggcgcagaaaagctgagggcggcagagaggtttgccaaagagcgcaggctgagaatatggagagactatgtggctcccacagctaatttggaccaaaaggacaagcagtttgttgccaaggtgatgcaggttctgaatgctgatgccattgttgtgaagctgaactcaggcgattacaagacgattcacctgtccagcatccgaccaccgaggctggagggggagaacacccaggataagaacaagaaactgcgtcccctgtatgacattccttacatgtttgaggcccgggaatttcttcgaaaaaagcttattgggaagaaggtcaatgtgacggtggactacattagaccagccagcccagccacagagacagtgcctgccttttcagagcgtacctgtgccactgtcaccattggaggaataaacattgctgaggctcttgtcagcaaaggtctagccacagtgatcagataccggcaggatgatgaccagagatcatcacactacgatgaactgcttgctgcagaggccagagctattaagaatggcaaaggattgcatagcaagaaggaagtgcctatccaccgtgttgcagatatatctggggatacccaaaaagcaaagcagttcctgccttttcttcagcgggcaggtcgttctgaagctgtggtggaatacgtcttcagtggttctcgtctcaaactctatttgccaaaggaaacttgccttatcaccttcttgcttgcaggcattgaatgccccagaggagcccgaaacctcccaggcttggtgcaggaaggagagcccttcagcgaggaagctacacttttcaccaaggaactggtgctgcagcgagaggtggaggtggaggtggagagcatggacaaggccggcaactttatcggctggctgcacatcgacggtgccaacctgtccgtcctgctggtggagcacgcgctctccaaggtccacttcaccgccgaacgcagctcctactacaagtccctgctgtctgccgaggaggccgcaaagcagaagaaagagaaggtctgggcccactatgaggagcagcccgtggaggaggtgatgccagtgctggaggagaaggagcgatctgctagctacaagcccgtgtttgtgaccgagatcactgatgacctgcacttctacgtgcaggatgtggagaccggcacccagttggagaagctgatggagaacatgcgcaatgacattgccagtcacccccctgtagagggctcctatgccccccgcaggggagagttctgcattgccaaatttgtagatggagaatggtaccgtgcccgagtagagaaagtcgagtctcctgccaaaatacatgtcttctacattgactacggcaacagagaggtcctgccatccacccgcctgggtaccctatcacctgccttcagcactcgggtgctgccagctcaagccacggagtatgccttcgccttcatccaggtgccccaagatgatgatgcccgcacggacgccgtggacagcgtagttcgggatatccagaacactcagtgcctgctcaacgtggaacacctgagtgccggctgcccccatgtcaccctgcagtttgcagattccaagggcgatgtggggctgggcttggtgaaggaagggctggtcatggtggaggtgcgcaaggagaaacagttccagaaagtgatcacagaatacctgaatgcccaagagtcagccaagagcgccaggctgaacctgtggcgctatggagactttcgagctgatgatgcagactgccctcgtcccagctctctgtccaactgttgattatgtgatttttctgatacgtccattctcaaatgccagtgtgttcacatcttcgctctggccagcccattctgtatttaaagcttttgaggcccaataaaatagtacgtgctgtctgcagc

SEQ ID NO: 363097 - DNA, 3353 bp, Homo sapiens
ctggcaaccagtctttattcattttttaaaaaaggaaatccaaataagttagcaaaaaaaaaaaaaaaaaaaaatacaaaacaatggcaaaaccacacgatgctttgttaacaaaagaaatcacccccaagaggccccaaccccttttccctgcctgtccccggcaacttcagcacaggagaccttggtcggatggcagctttacaaacaacacacgaaacaaaacaaaacataaaaccactggaaggttcccaatattcactgcaaaagtttggccccccagggacttgggaacagagggctgttcctctccccttcttctctctcaattcagggcaggcccagcccagccactggcatcgggaagagaccagaacaggagacgtgcacagcttgtccaggtcagggcactgcgtctctcaaaccgtttcacttggggggtggaattagaggccgcgttatgataaaaaggaagctcctgagtttgccccctgagctggggcatacacgagggggcgctctggtcccctgctttacctccctggaaaggggatgccctctcctctaaggaggcagctgaatgagggcgtccagtcccttgctggggggtgggttaaccttacatggatgaggaaggggatagtctggcctatggcaccccagagctggcttcctagcatcagggcagcctggcttaggaggcccctgctacagaagtagtggcatctgtggccagcttggggggctcgcaaggatgcccggcttggaagacaatctcagttgggcatggtttcatctgggaaggccacagacacatcttccactgtgatgctgtccacgatggaggtgagggagtgcaggttgtgggcatctgtagggtcagccgtgagcagatgatcccctgggttggcgctgaactccagtgcactgccccactctggactgcaggaggcgctgtgagagctgcattcgctgggcacccctggctggggcccgcccccgccccggtagcggaggtcacgctcctcctggttgagggagctgagcagggcctggaggcgctcgatgtactggatggcactgcgcaggatctccacctggcagccctgttggggttgagcagggtgcttctcttcagggcctcgaagcctcattcaccttcttgagcctgcgcttctccctcagtgtgccgcccgccgccggtccacggacaccgacttcctcttacacaccttacacgcccacggcaggcactggcctggacagtgctcgggggtccccagccccttgtcctcaaggggccctggggcctcggggctcagggtgagctccgtccgctcgtagcctggtggttcgaagccctggaggtggacaggcaggtagttttccccatcatagaagcggggttcctggtagaagtagggggatgtctcatacagctccatggggtcggaaaaggcttgttcctgatcagataccggcaggatgatgaccagagatcatcacactacgatgaactgcttgctgcagaggccagagctattaagaatggcaaaggattgcatagcaagaaggaagtgcctatccaccgtgttgcagatatatctggggatacccaaaaagcaaagcagttcctgccttttcttcagcgggcaggtcgttctgaagctgtggtggaatacgtcttcagtggttctcgtctcaaactctatttgccaaaggaaacttgccttatcaccttcttgcttgcaggcattgaatgccccagaggagcccgaaacctcccaggcttggtgcaggaaggagagcccttcagcgaggaagctacacttttcaccaaggaactggtgctgcagcgagaggtggaggtggaggtggagagcatggacaaggccggcaactttatcggctggctgcacatcgacggtgccaacctgtccgtcctgctggtggagcacgcgctctccaaggtccacttcaccgccgaacgcagctcctactacaagtccctgctgtctgccgaggaggccgcaaagcagaagaaagagaaggtctgggcccactatgaggagcagcccgtggaggaggtgatgccagtgctggaggagaaggagcgatctgctagctacaagcccgtgtttgtgaccgagatcactgatgacctgcacttctacgtgcaggatgtggagaccggcacccagttggagaagctgatggagaacatgcgcaatgacattgccagtcacccccctgtagagggctcctatgccccccgcaggggagagttctgcattgccaaatttgtagatggagaatggtaccgtgcccgagtagagaaagtcgagtctcctgccaaaatacatgtcttctacattgactacggcaacagagaggtcctgccatccacccgcctgggtaccctatcacctgccttcagcactcgggtgctgccagctcaagccacggagtatgccttcgccttcatccaggtgccccaagatgatgatgcccgcacggacgccgtggacagcgtagttcgggatatccagaacactcagtgcctgctcaacgtggaacacctgagtgccggctgcccccatgtcaccctgcagtttgcagattccaagggcgatgtggggctgggcttggtgaaggaagggctggtcatggtggaggtgcgcaaggagaaacagttccagaaagtgatcacagaatacctgaatgcccaagagtcagccaagagcgccaggctgaacctgtggcgctatggagactttcgagctgatgatgcagacgaatttggctacagccgctaaggaggggatcgggtttggcccccagccccgctcacgccagtccctcttcctctgccgggagggtgttttcaactccaaaccccagagaggggttgtagattgggtccagctttgcttcagtgtgtggaaatgtctcgtggggtggcatcggggctgcggggtggggaccccaaggctttctggggcagacccttgtcctctgggatgatgggcactgctatccacagtctctgccagttggttttatttggaggtttgtgggctttttttaaaaaaaaaaagtcctcaaatcaggaagaaacatcaaagactatgtcctagtggagggagtaatcctaacacccaggctggccgccagctggcacctgcctctatcccagactgccctcgtcccagctctctgtccaactgttgattatgtgatttttctgatacgtccattctcaaatgccagtgtgttcacatcttcgctctggccagcccattctgtatttaaagcttttgaggcccaataaaatagtacgtgctgtctgcagc

SEQ ID NO: 363098 - DNA, 1888 bp, Homo sapiens
cggacgcgtgggtcgacccacgcgtccgcagagatcatcacactacgatgaactgcttgctgcagaggccagagctattaagaatggcaaaggattgcatagcaagaaggaagtgcctatccaccgtgttgcagatatatctggggatacccaaaaagcaaagcagttcctgccttttcttcagcgggcaggtcgttctgaagctgtggtggaatacgtcttcagtggttctcgtctcaaactctatttgccaaaggaaacttgccttatcaccttcttgcttgcaggcattgaatgccccagaggagcccgaaacctcccaggcttggtgcaggaaggagagcccttcagcgaggaagctacacttttcaccaaggaactggtgctgcagcgagaggtggaggtggaggtggagagcatggacaaggccggcaactttatcggctggctgcacatcgacggtgccaacctgtccgtcctgctggtggagcacgcgctctccaaggtccacttcaccgccgaacgcagctcctactacaagtccctgctgtctgccgaggaggccgcaaagcagaagaaagagaaggtctgggcccactatgaggagcagcccgtggaggaggtgatgccagtgctggaggagaaggagcgatctgctagctacaagcccgtgtttgtgaccgagatcactgatgacctgcacttctacgtgcaggatgtggagaccggcacccagttggagaagctgatggagaacatgcgcaatgacattgccagtcacccccctgtagagggctcctatgccccccgcaggggagagttctgcattgccaaatttgtagatggagaatggtaccgtgcccgagtagagaaagtcgagtctcctgccaaaatacatgtcttctacattgactacggcaacagagaggtcctgccatccacccgcctgggtaccctatcacctgccttcagcactcgggtgctgccagctcaagccacggagtatgccttcgccttcatccaggtgccccaagatgatgatgcccgcacggacgccgtggacagcgtagttcgggatatccagaacactcagtgcctgctcaacgtggaacacctgagtgccggctgcccccatgtcaccctgcagtttgcagattccaagggcgatgtggggctgggcttggtgaaggaagggctggtcatggtggaggtgcgcaaggagaaacagttccagaaagtgatcacagaatacctgaatgcccaagagtcagccaagagcgccaggctgaacctgtggcgctatggagactttcgagctgatgatgcagacgaatttggctacagccgctaaggaggggatcgggtttggcccccagccccgctcacgccagtccctcttcctctgccgggagggtgttttcaactccaaaccccagagaggggttgtagattgggtccagctttgcttcagtgtgtggaaatgtctcgtggggtggcatcggggctgcggggtggggaccccaaggctttctggggcagacccttgtcctctgggatgatgggcactgctatccacagtctctgccagttggttttatttggaggtttgtgggctttttttaaaaaaaaaaagtcctcaaatcaggaagaaacatcaaagactatgtcctagtggagggagtaatcctaacacccaggctggccgccagctggcacctgcctctatcccagactgccctcgtcccagctctctgtccaactgttgattatgtgatttttctgatacgtccattctcaaatgccagtgtgttcacatcttcgctctggccagcccattctgtatttaaagcttttgaggcccaataaaatagtacgtgctgtctgcagc

SEQ ID NO: 363099 - DNA, 1802 bp, Homo sapiens
agaaagaaacgttgggttttattactttccagttactcttttcctcttttctccatcaggatacccaaaaagcaaagcagttcctgccttttcttcagcgggcaggtcgttctgaagctgtggtggaatacgtcttcagtggttctcgtctcaaactctatttgccaaaggaaacttgccttatcaccttcttgcttgcaggcattgaatgccccagaggagcccgaaacctcccaggcttggtgcaggaaggagagcccttcagcgaggaagctacacttttcaccaaggaactggtgctgcagcgagaggtggaggtggaggtggagagcatggacaaggccggcaactttatcggctggctgcacatcgacggtgccaacctgtccgtcctgctggtggagcacgcgctctccaaggtccacttcaccgccgaacgcagctcctactacaagtccctgctgtctgccgaggaggccgcaaagcagaagaaagagaaggtctgggcccactatgaggagcagcccgtggaggaggtgatgccagtgctggaggagaaggagcgatctgctagctacaagcccgtgtttgtgaccgagatcactgatgacctgcacttctacgtgcaggatgtggagaccggcacccagttggagaagctgatggagaacatgcgcaatgacattgccagtcacccccctgtagagggctcctatgccccccgcaggggagagttctgcattgccaaatttgtagatggagaatggtaccgtgcccgagtagagaaagtcgagtctcctgccaaaatacatgtcttctacattgactacggcaacagagaggtcctgccatccacccgcctgggtaccctatcacctgccttcagcactcgggtgctgccagctcaagccacggagtatgccttcgccttcatccaggtgccccaagatgatgatgcccgcacggacgccgtggacagcgtagttcgggatatccagaacactcagtgcctgctcaacgtggaacacctgagtgccggctgcccccatgtcaccctgcagtttgcagattccaagggcgatgtggggctgggcttggtgaaggaagggctggtcatggtggaggtgcgcaaggagaaacagttccagaaagtgatcacagaatacctgaatgcccaagagtcagccaagagcgccaggctgaacctgtggcgctatggagactttcgagctgatgatgcagacgaatttggctacagccgctaaggaggggatcgggtttggcccccagccccgctcacgccagtccctcttcctctgccgggagggtgttttcaactccaaaccccagagaggggttgtagattgggtccagctttgcttcagtgtgtggaaatgtctcgtggggtggcatcggggctgcggggtggggaccccaaggctttctggggcagacccttgtcctctgggatgatgggcactgctatccacagtctctgccagttggttttatttggaggtttgtgggctttttttaaaaaaaaaaagtcctcaaatcaggaagaaacatcaaagactatgtcctagtggagggagtaatcctaacacccaggctggccgccagctggcacctgcctctatcccagactgccctcgtcccagctctctgtccaactgttgattatgtgatttttctgatacgtccattctcaaatgccagtgtgttcacatcttcgctctggccagcccattctgtatttaaagcttttgaggcccaataaaatagtacgtgctgtctgcagc

SEQ ID NO: 363100 - DNA, 2077 bp, Homo sapiens
cagtgtacagtgtgacttgtgtagtcatacatccccactttaacaaccctcgcttctctcttcatttttgcaccctcctaccccttcccattgtgattcttgttttaatcggtttttctcttcttccttaacagagctattaagaatggcaaaggattgcatagcaagaaggaagtgcctatccaccgtgttgcagatatatctgggcttgagagactgaaaggatttgaaggcccttcgcatctatgtgactgagttctgagagtcgaaatgtccatgatttggcactctggaggatagagcacacagactttgtgttgatgcaccaaaaaaggatacccaaaaagcaaagcagttcctgccttttcttcagcgggcaggtcgttctgaagctgtggtggaatacgtcttcagtggttctcgtctcaaactctatttgccaaaggaaacttgccttatcaccttcttgcttgcaggcattgaatgccccagaggagcccgaaacctcccaggcttggtgcaggaaggagagcccttcagcgaggaagctacacttttcaccaaggaactggtgctgcagcgagaggtggaggtggaggtggagagcatggacaaggccggcaactttatcggctggctgcacatcgacggtgccaacctgtccgtcctgctggtggagcacgcgctctccaaggtccacttcaccgccgaacgcagctcctactacaagtccctgctgtctgccgaggaggccgcaaagcagaagaaagagaaggtctgggcccactatgaggagcagcccgtggaggaggtgatgccagtgctggaggagaaggagcgatctgctagctacaagcccgtgtttgtgaccgagatcactgatgacctgcacttctacgtgcaggatgtggagaccggcacccagttggagaagctgatggagaacatgcgcaatgacattgccagtcacccccctgtagagggctcctatgccccccgcaggggagagttctgcattgccaaatttgtagatggagaatggtaccgtgcccgagtagagaaagtcgagtctcctgccaaaatacatgtcttctacattgactacggcaacagagaggtcctgccatccacccgcctgggtaccctatcacctgccttcagcactcgggtgctgccagctcaagccacggagtatgccttcgccttcatccaggtgccccaagatgatgatgcccgcacggacgccgtggacagcgtagttcgggatatccagaacactcagtgcctgctcaacgtggaacacctgagtgccggctgcccccatgtcaccctgcagtttgcagattccaagggcgatgtggggctgggcttggtgaaggaagggctggtcatggtggaggtgcgcaaggagaaacagttccagaaagtgatcacagaatacctgaatgcccaagagtcagccaagagcgccaggctgaacctgtggcgctatggagactttcgagctgatgatgcagacgaatttggctacagccgctaaggaggggatcgggtttggcccccagccccgctcacgccagtccctcttcctctgccgggagggtgttttcaactccaaaccccagagaggggttgtagattgggtccagctttgcttcagtgtgtggaaatgtctcgtggggtggcatcggggctgcggggtggggaccccaaggctttctggggcagacccttgtcctctgggatgatgggcactgctatccacagtctctgccagttggttttatttggaggtttgtgggctttttttaaaaaaaaaaagtcctcaaatcaggaagaaacatcaaagactatgtcctagtggagggagtaatcctaacacccaggctggccgccagctggcacctgcctctatcccagactgccctcgtcccagctctctgtccaactgttgattatgtgatttttctgatacgtccattctcaaatgccagtgtgttcacatcttcgctctggccagcccattctgtatttaaagcttttgaggcccaataaaatagtacgtgctgtctgcagc

SEQ ID NO: 363101 - DNA, 2740 bp, Homo sapiens
cgcttgcgcggcgagtagaacgtgtggcggcggcggagatcgcgtctctttcgctccgtgtcccgctgctgctcctgtgagcgcccggcgagtccgtcccgtccaccgtccgcagctggtagccagcctgcccctcgcctcgactccctttcaccaacaccgacacccacattgacacctccagtccggccagccgctccactcgttgcctttgcatctccacacatggcgtcctccgcgcagagcggcggctcctccgggggacccgcggtccccaccgtgcagcggggcatcatcaagatggtcctctcagggtgcgccatcattgtccgaggtcagcctcgtggtgggcctcctcctgagcggcagatcaacctcagcaacattcgtgctggaaatcttgctcgccgggcagccgccacacaacctgatgcaaaggatacccctgatgagccctgggcatttccagctcgagagttccttcgaaagaagctgattgggaaggaagtctgtttcacgatagaaaacaagactccccaggggcgagagtatggcatgatctaccttggaaaagataccaatggggaaaacattgcagaatcactggttgcagagggcttagccacccggagagaaggcatgagagctaataatcctgagcagaaccggctttcagaatgtgaagaacaagcaaaggcagccaagaaagggatgtggagtgaggggaacggttcacatactatccgggatctcaagtataccattgaaaacccaaggcactttgtggactcacaccaccagaagcctgttaatgctatcatcgagcatgtgcgggacggcagtgtggtcagggccctgctcctcccagattactacctggttacagtcatgctgtcaggcatcaagtgcccaacttttcgacgggaagcagatggcagtgaaactccagagccttttgctgcagaagccaaatttttcactgagtcgcgactgcttcagagagatgttcagatcattctggagagctgccacaaccagaacattctgggtaccatccttcatccaaatggcaacatcacagagctcctcctgaaggaaggtttcgcacgctgtgtggactggtcgattgcagtttacacccggggcgcagaaaagctgagggcggcagagaggtttgccaaagagcgcaggctgagaatatggagagactatgtggctcccacagctaatttggaccaaaaggacaagcagtttgttgccaaggtgatgcaggttctgaatgctgatgccattgttgtgaagctgaactcaggcgattacaagacgattcacctgtccagcatccgaccaccgaggctggagggggagaacacccaggataagaacaagaaactgcgtcccctgtatgacattccttacatgtttgaggcccgggaatttcttcgaaaaaagcttattgggaagaaggtcaatgtgacggtggactacattagaccagccagcccagccacagagacagtgcctgccttttcagagcgtacctgtgccactgtcaccattggaggaataaacattgctgaggctcttgtcagcaaaggtctagccacagtgatcagataccggcaggatgatgaccagagatcatcacactacgatgaactgcttgctgcagaggccagagctattaagaatggcaaaggattgcatagcaagaaggaagtgcctatccaccgtgttgcagatatatctggggatacccaaaaagcaaagcagttcctgccttttcttcagcgggcaggtcgttctgaagctgtggtggaatacgtcttcagtggttctcgtctcaaactctatttgccaaaggaaacttgccttatcaccttcttgcttgcaggcattgaatgccccagaggagcccgaaacctcccaggcttggtgcaggaaggagagcccttcagcgaggaagctacacttttcaccaaggaactggtgctgcagcgagaggtggaggtggaggtggagagcatggacaaggccggcaactttatcggctggctgcacatcgacggtgccaacctgtccgtcctgctggtggagcacgcgctctccaaggtccacttcaccgccgaacgcagctcctactacaagtccctgctgtctgccgaggaggccgcaaagcagaagaaagagaaggtctgggcccactatgaggagcagcccgtggaggaggtgatgccagtgctggaggagaaggagcgatctgctagctacaagcccgtgtttgtgaccgagatcactgatgacctgcacttctacgtgcaggatgtggagaccggcacccagttggagaagctgatggagaacatgcgcaatgacattgccagtcacccccctgtagagggctcctatgccccccgcaggggagagttctgcattgccaaatttgtagatggagaatggtaccgtgcccgagtagagaaagtcgagtctcctgccaaaatacatgtcttctacattgactacggcaacgtgagtgttggggaccagagtgttggaggggctatcaaacacagcagcccccgagtcaaatccatctgatctctccaaggtccctctgagcttaccaatagaacaatgagcattggggcatctctgctgtgcgtgtaacaggccaggccccctcagtgacctggcaaaactggggtctatgaccagtggctgcaagcactgataggtcccg

SEQ ID NO: 363102 - DNA, 2607 bp, Homo sapiens
cgcttgcgcggcgagtagaacgtgtggcggcggcggagatcgcgtctctttcgctccgtgtcccgctgctgctcctgtgagcgcccggcgagtccgtcccgtccaccgtccgcagctggtagccagcctgcccctcgcctcgactccctttcaccaacaccgacacccacattgacacctccagtccggccagccgctccactcgttgcctttgcatctccacacatggcgtcctccgcgcagagcggcggctcctccgggggacccgcggtccccaccgtgcagcggggcatcatcaagatggtcctctcagggtgcgccatcattgtccgaggtcagcctcgtggtgggcctcctcctgagcggcagatcaacctcagcaacattcgtgctggaaatcttgctcgccgggcagccgccacacaacctgatgcaaaggatacccctgatgagccctgggcatttccagctcgagagttccttcgaaagaagctgattgggaaggaagtctgtttcacgatagaaaacaagactccccaggggcgagagtatggcatgatctaccttggaaaagataccaatggggaaaacattgcagaatcactggttgcagagggcttagccacccggagagaaggcatgagagctaataatcctgagcagaaccggctttcagaatgtgaagaacaagcaaaggcagccaagaaagggatgtggagtgaggggaacggttcacatactatccgggatctcaagtataccattgaaaacccaaggcactttgtggactcacaccaccagaagcctgttaatgctatcatcgagcatgtgcgggacggcagtgtggtcagggccctgctcctcccagattactacctggttacagtcatgctgtcaggcatcaagtgcccaacttttcgacgggaagcagatggcagtgaaactccagagccttttgctgcagaagccaaatttttcactgagtcgcgactgcttcagagagatgttcagatcattctggagagctgccacaaccagaacattctgggtaccatccttcatccaaatggcaacatcacagagctcctcctgaaggaaggtttcgcacgctgtgtggactggtcgattgcagtttacacccggggcgcagaaaagctgagggcggcagagaggtttgccaaagagcgcaggctgagaatatggagagactatgtggctcccacagctaatttggaccaaaaggacaagcagtttgttgccaaggtgatgcaggttctgaatgctgatgccattgttgtgaagctgaactcaggcgattacaagacgattcacctgtccagcatccgaccaccgaggctggagggggagaacacccaggataagaacaagaaactgcgtcccctgtatgacattccttacatgtttgaggcccgggaatttcttcgaaaaaagcttattgggaagaaggtcaatgtgacggtggactacattagaccagccagcccagccacagagacagtgcctgccttttcagagcgtacctgtgccactgtcaccattggaggaataaacattgctgaggctcttgtcagcaaaggtctagccacagtgatcagataccggcaggatgatgaccagagatcatcacactacgatgaactgcttgctgcagaggccagagctattaagaatggcaaaggattgcatagcaagaaggaagtgcctatccaccgtgttgcagatatatctggggatacccaaaaagcaaagcagttcctgccttttcttcagcgggcaggtcgttctgaagctgtggtggaatacgtcttcagtggttctcgtctcaaactctatttgccaaaggaaacttgccttatcaccttcttgcttgcaggcattgaatgccccagaggagcccgaaacctcccaggcttggtgcaggaaggagagcccttcagcgaggaagctacacttttcaccaaggaactggtgctgcagcgagaggtggaggtggaggtggagagcatggacaaggccggcaactttatcggctggctgcacatcgacggtgccaacctgtccgtcctgctggtggagcacgcgctctccaaggtccacttcaccgccgaacgcagctcctactacaagtccctgctgtctgccgaggaggccgcaaagcagaagaaagagaaggtctgggcccactatgaggagcagcccgtggaggaggtgatgccagtgctggaggagaaggagcgatctgctagctacaagcccgtgtttgtgaccgagatcactgatgacctgcacttctacgtgcaggatgtggagaccggcacccagttggagaagctgatggagaacatgcgcaatgacattgccagtcacccccctgtagagggctcctatgccccccgcaggggagagttctgcattgccaaatttgtagatggagaatgaagaggcggccgccttctcccgagccgagcacgaaggttacagaggaagccgagtcccagcagcagtgggatacttcaaaaggagaacaagtttcccaaatacggtttgccagctgaacagggatcacctaccaggaatttctaccgg

SEQ ID NO: 363103 - DNA, 1545 bp, Homo sapiens
gaggatcccccggaagcacactgcaacaccaaggaactggtgctgcagcgagaggtggaggtggaggtggagagcatggacaaggccggcaactttatcggctggctgcacatcgacggtgccaacctgtccgtcctgctggtggagcacgcgctctccaaggtccacttcaccgccgaacgcagctcctactacaagtccctgctgtctgccgaggaggccgcaaagcagaagaaagagaaggtctgggcccactatgaggagcagcccgtggaggaggtgatgccagtgctggaggagaaggagcgatctgctagctacaagcccgtgtttgtgaccgagatcactgatgacctgcacttctacgtgcaggatgtggagaccggcacccagttggagaagctgatggagaacatgcgcaatgacattgccagtcacccccctgtagagggctcctatgccccccgcaggggagagttctgcattgccaaatttgtagatggagaatggtaccgtgcccgagtagagaaagtcgagtctcctgccaaaatacatgtcttctacattgactacggcaacagagaggtcctgccatccacccgcctgggtaccctatcacctgccttcagcactcgggtgctgccagctcaagccacggagtatgccttcgccttcatccaggtgccccaagatgatgatgcccgcacggacgccgtggacagcgtagttcgggatatccagaacactcagtgcctgctcaacgtggaacacctgagtgccggctgcccccatgtcaccctgcagtttgcagattccaagggcgatgtggggctgggcttggtgaaggaagggctggtcatggtggaggtgcgcaaggagaaacagttccagaaagtgatcacagaatacctgaatgcccaagagtcagccaagagcgccaggctgaacctgtggcgctatggagactttcgagctgatgatgcagacgaatttggctacagccgctaaggaggggatcgggtttggcccccagccccgctcacgccagtccctcttcctctgccgggagggtgttttcaactccaaaccccagagaggggttgtagattgggtccagctttgcttcagtgtgtggaaatgtctcgtggggtggcatcggggctgcggggtggggaccccaaggctttctggggcagacccttgtcctctgggatgatgggcactgctatccacagtctctgccagttggttttatttggaggtttgtgggctttttttaaaaaaaaaaagtcctcaaatcaggaagaaacatcaaagactatgtcctagtggagggagtaatcctaacacccaggctggccgccagctggcacctgcctctatcccagactgccctcgtcccagctctctgtccaactgttgattatgtgatttttctgatacgtccattctcaaatgccagtgtgttcacatcttcgctctggccagcccattctgtatttaaagcttttgaggcccaataaaatagtacgtgctgtctgcagc

SEQ ID NO: 363104 - DNA, 2273 bp, Homo sapiens
cgcttgcgcggcgagtagaacgtgtggcggcggcggagatcgcgtctctttcgctccgtgtcccgctgctgctcctgtgagcgcccggcgagtccgtcccgtccaccgtccgcagctggtagccagcctgcccctcgcctcgactccctttcaccaacaccgacacccacattgacacctccagtccggccagccgctccactcgttgcctttgcatctccacacatggcgtcctccgcgcagagcggcggctcctccgggggacccgcggtccccaccgtgcagcggggcatcatcaagatggtcctctcagggtgcgccatcattgtccgaggtcagcctcgtggtgggcctcctcctgagcggcagatcaacctcagcaacattcgtgctggaaatcttgctcgccgggcagccgccacacaacctgatgcaaaggatacccctgatgagccctgggcatttccagctcgagagttccttcgaaagaagctgattgggaaggaagtctgtttcacgatagaaaacaagactccccaggggcgagagtatggcatgatctaccttggaaaagataccaatggggaaaacattgcagaatcactggttgcagagggcttagccacccggagagaaggcatgagagctaataatcctgagcagaaccggctttcagaatgtgaagaacaagcaaaggcagccaagaaagggatgtggagtgaggggaacggttcacatactatccgggatctcaagtataccattgaaaacccaaggcactttgtggactcacaccaccagaagcctgttaatgctatcatcgagcatgtgcgggacggcagtgtggtcagggccctgctcctcccagattactacctggttacagtcatgctgtcaggcatcaagtgcccaacttttcgacgggaagcagatggcagtgaaactccagagccttttgctgcagaagccaaatttttcactgagtcgcgactgcttcagagagatgttcagatcattctggagagctgccacaaccagaacattctgggtaccatccttcatccaaatggcaacatcacagagctcctcctgaaggaaggtttcgcacgctgtgtggactggtcgattgcagtttacacccggggcgcagaaaagctgagggcggcagagaggtttgccaaagagcgcaggctgagaatatggagagactatgtggctcccacagctaatttggaccaaaaggacaagcagtttgttgccaaggtgatgcaggttctgaatgctgatgccattgttgtgaagctgaactcaggcgattacaagacgattcacctgtccagcatccgaccaccgaggctggagggggagaacacccaggataagaacaagaaactgcgtcccctgtatgacattccttacatgtttgaggcccgggaatttcttcgaaaaaagcttattgggaagaaggtcaatgtgacggtggactacattagaccagccagcccagccacagagacagtgcctgccttttcagagcgtacctgtgccactgtcaccattggaggaataaacattgctgaggctcttgtcagcaaaggtctagccacagtgatcagataccggcaggatgatgaccagagatcatcacactacgatgaactgcttgctgcagaggccagagctattaagaatggcaaaggattgcatagcaagaaggaagtgcctatccaccgtgttgcagatatatctggggatacccaaaaagcaaagcagttcctgccttttcttcagcgggcaggtcgttctgaagctgtggtggaatacgtcttcagtggttctcgtctcaaactctatttgccaaaggaaacttgccttatcaccttcttgcttgcaggcattgaatgccccagaggagcccgaaacctcccaggcttggtgcaggaaggagagcccttcagcgaggaagctacacttttcaccaaggaactggtgctgcagcgagaggtggaggtggaggtggagagcatggacaaggccggcaactttatcggctggctgcacatcgacggtgccaacctgtccgtcctgctggtggagcacgcgctctccaaggtccacttcaccgccgaacgcagctcctactacaagtccctgctgtctgccgaggaggccgcaaagcagaagaaagagaaggtctgggcccactatgaggagcacccattctgtatttaaagcttttgaggcccaataaaatagtacgtgctgtctgcagc

SEQ ID NO: 363105 - DNA, 2237 bp, Homo sapiens
  misc_feature (2093)..(2093): n is a, c, g, or t
  misc_feature (2097)..(2097): n is a, c, g, or t
  misc_feature (2107)..(2107): n is a, c, g, or t
cgcttgcgcggcgagtagaacgtgtggcggcggcggagatcgcgtctctttcgctccgtgtcccgctgctgctcctgtgagcgcccggcgagtccgtcccgtccaccgtccgcagctggtagccagcctgcccctcgcctcgactccctttcaccaacaccgacacccacattgacacctccagtccggccagccgctccactcgttgcctttgcatctccacacatggcgtcctccgcgcagagcggcggctcctccgggggacccgcggtccccaccgtgcagcggggcatcatcaagatggtcctctcagggtgcgccatcattgtccgaggtcagcctcgtggtgggcctcctcctgagcggcagatcaacctcagcaacattcgtgctggaaatcttgctcgccgggcagccgccacacaacctgatgcaaaggatacccctgatgagccctgggcatttccagctcgagagttccttcgaaagaagctgattgggaaggaagtctgtttcacgatagaaaacaagactccccaggggcgagagtatggcatgatctaccttggaaaagataccaatggggaaaacattgcagaatcactggttgcagagggcttagccacccggagagaaggcatgagagctaataatcctgagcagaaccggctttcagaatgtgaagaacaagcaaaggcagccaagaaagggatgtggagtgaggggaacggttcacatactatccgggatctcaagtataccattgaaaacccaaggcactttgtggactcacaccaccagaagcctgttaatgctatcatcgagcatgtgcgggacggcagtgtggtcagggccctgctcctcccagattactacctggttacagtcatgctgtcaggcatcaagtgcccaacttttcgacgggaagcagatggcagtgaaactccagagccttttgctgcagaagccaaatttttcactgagtcgcgactgcttcagagagatgttcagatcattctggagagctgccacaaccagaacattctgggtaccatccttcatccaaatggcaacatcacagagctcctcctgaaggaaggtttcgcacgctgtgtggactggtcgattgcagtttacacccggggcgcagaaaagctgagggcggcagagaggtttgccaaagagcgcaggctgagaatatggagagactatgtggctcccacagctaatttggaccaaaaggacaagcagtttgttgccaaggtgatgcaggttctgaatgctgatgccattgttgtgaagctgaactcaggcgattacaagacgattcacctgtccagcatccgaccaccgaggctggagggggagaacacccaggataagaacaagaaactgcgtcccctgtatgacattccttacatgtttgaggcccgggaatttcttcgaaaaaagcttattgggaagaaggtcaatgtgacggtggactacattagaccagccagcccagccacagagacagtgcctgccttttcagagcgtacctgtgccactgtcaccattggaggaataaacattgctgaggctcttgtcagcaaaggtctagccacagtgatcagataccggcaggatgatgaccagagatcatcacactacgatgaactgcttgctgcagaggccagagctattaagaatggcaaaggattgcatagcaagaaggaagtgcctatccaccgtgttgcagatatatctggggatacccaaaaagcaaagcagttcctgccttttcttcagcgggcaggtcgttctgaagctgtggtggaatacgtcttcagtggttctcgtctcaaactctatttgccaaaggaaacttgccttatcaccttcttgcttgcaggcattgaatgccccagaggagcccgaaacctcccaggcttggtgcaggaaggagagcccttcagcgaggaagctacacttttcaccaaggaactggtgctgcagcgagaggtggaggtggaggtggagagcatggacaaggccggcaactttatcggctggctgcacatcgacggtgcgttggcccaacgttgggccancgcnccgtgttggncctgcgcaccgtgttgggcctggagaggccaccgtgaggcataagctgcatgtcgcgaggccagtgtgaggcaagacctgggcctgtctacgctgctgggagacaggccggaatctggccagggaaggta

SEQ ID NO: 363106 - DNA, 1187 bp, Homo sapiens
tcactgtgctcttcctcgctttcatcggcacccagttggagaagctgatggagaacatgcgcaatgacattgccagtcacccccctgtagagggctcctatgccccccgcaggggagagttctgcattgccaaatttgtagatggagaatggtaccgtgcccgagtagagaaagtcgagtctcctgccaaaatacatgtcttctacattgactacggcaacagagaggtcctgccatccacccgcctgggtaccctatcacctgccttcagcactcgggtgctgccagctcaagccacggagtatgccttcgccttcatccaggtgccccaagatgatgatgcccgcacggacgccgtggacagcgtagttcgggatatccagaacactcagtgcctgctcaacgtggaacacctgagtgccggctgcccccatgtcaccctgcagtttgcagattccaagggcgatgtggggctgggcttggtgaaggaagggctggtcatggtggaggtgcgcaaggagaaacagttccagaaagtgatcacagaatacctgaatgcccaagagtcagccaagagcgccaggctgaacctgtggcgctatggagactttcgagctgatgatgcagacgaatttggctacagccgctaaggaggggatcgggtttggcccccagccccgctcacgccagtccctcttcctctgccgggagggtgttttcaactccaaaccccagagaggggttgtagattgggtccagctttgcttcagtgtgtggaaatgtctcgtggggtggcatcggggctgcggggtggggaccccaaggctttctggggcagacccttgtcctctgggatgatgggcactgctatccacagtctctgccagttggttttatttggaggtttgtgggctttttttaaaaaaaaaaagtcctcaaatcaggaagaaacatcaaagactatgtcctagtggagggagtaatcctaacacccaggctggccgccagctggcacctgcctctatcccagactgccctcgtcccagctctctgtccaactgttgattatgtgatttttctgatacgtccattctcaaatgccagtgtgttcacatcttcgctctggccagcccattctgtatttaaagcttttgaggcccaataaaatagtacgtgctgtctgcagc

SEQ ID NO: 363107 - DNA, 2247 bp, Homo sapiens
cgcttgcgcggcgagtagaacgtgtggcggcggcggagatcgcgtctctttcgctccgtgtcccgctgctgctcctgtgagcgcccggcgagtccgtcccgtccaccgtccgcagctggtagccagcctgcccctcgcctcgactccctttcaccaacaccgacacccacattgacacctccagtccggccagccgctccactcgttgcctttgcatctccacacatggcgtcctccgcgcagagcggcggctcctccgggggacccgcggtccccaccgtgcagcggggcatcatcaagatggtcctctcagggtgcgccatcattgtccgaggtcagcctcgtggtgggcctcctcctgagcggcagatcaacctcagcaacattcgtgctggaaatcttgctcgccgggcagccgccacacaacctgatgcaaaggatacccctgatgagccctgggcatttccagctcgagagttccttcgaaagaagctgattgggaaggaagtctgtttcacgatagaaaacaagactccccaggggcgagagtatggcatgatctaccttggaaaagataccaatggggaaaacattgcagaatcactggttgcagagggcttagccacccggagagaaggcatgagagctaataatcctgagcagaaccggctttcagaatgtgaagaacaagcaaaggcagccaagaaagggatgtggagtgaggggaacggttcacatactatccgggatctcaagtataccattgaaaacccaaggcactttgtggactcacaccaccagaagcctgttaatgctatcatcgagcatgtgcgggacggcagtgtggtcagggccctgctcctcccagattactacctggttacagtcatgctgtcaggcatcaagtgcccaacttttcgacgggaagcagatggcagtgaaactccagagccttttgctgcagaagccaaatttttcactgagtcgcgactgcttcagagagatgttcagatcattctggagagctgccacaaccagaacattctgggtaccatccttcatccaaatggcaacatcacagagctcctcctgaaggaaggtttcgcacgctgtgtggactggtcgattgcagtttacacccggggcgcagaaaagctgagggcggcagagaggtttgccaaagagcgcaggctgagaatatggagagactatgtggctcccacagctaatttggaccaaaaggacaagcagtttgttgccaaggtgatgcaggttctgaatgctgatgccattgttgtgaagctgaactcaggcgattacaagacgattcacctgtccagcatccgaccaccgaggctggagggggagaacacccaggataagaacaagaaactgcgtcccctgtatgacattccttacatgtttgaggcccgggaatttcttcgaaaaaagcttattgggaagaaggtcaatgtgacggtggactacattagaccagccagcccagccacagagacagtgcctgccttttcagagcgtacctgtgccactgtcaccattggaggaataaacattgctgaggctcttgtcagcaaaggtctagccacagtgatcagataccggcaggatgatgaccagagatcatcacactacgatgaactgcttgctgcagaggccagagctattaagaatggcaaaggattgcatagcaagaaggaagtgcctatccaccgtgttgcagatatatctggggatacccaaaaagcaaagcagttcctgccttttcttcagcgggcaggtcgttctgaagctgtggtggaatacgtcttcagtggttctcgtctcaaactctatttgccaaaggaaacttgccttatcaccttcttgcttgcaggcagacccttgtcctctgggatgatgggcactgctatccacagtctctgccagttggttttatttggaggtttgtgggctttttttaaaaaaaaaaagtcctcaaatcaggaagaaacatcaaagactatgtcctagtggagggagtaatcctaacacccaggctggccgccagctggcacctgcctctatcccagactgccctcgtcccagctctctgtccaactgttgattatgtgatttttctgatacgtccattctcaaatgccagtgtgttcacatcttcgctctggccagcccattctgtatttaaagcttttgaggcccaataaaatagtacgtgctgtctgcagc

SEQ ID NO: 363108 - DNA, 2070 bp, Homo sapiens
cgcttgcgcggcgagtagaacgtgtggcggcggcggagatcgcgtctctttcgctccgtgtcccgctgctgctcctgtgagcgcccggcgagtccgtcccgtccaccgtccgcagctggtagccagcctgcccctcgcctcgactccctttcaccaacaccgacacccacattgacacctccagtccggccagccgctccactcgttgcctttgcatctccacacatggcgtcctccgcgcagagcggcggctcctccgggggacccgcggtccccaccgtgcagcggggcatcatcaagatggtcctctcagggtgcgccatcattgtccgaggtcagcctcgtggtgggcctcctcctgagcggcagatcaacctcagcaacattcgtgctggaaatcttgctcgccgggcagccgccacacaacctgatgcaaaggatacccctgatgagccctgggcatttccagctcgagagttccttcgaaagaagctgattgggaaggaagtctgtttcacgatagaaaacaagactccccaggggcgagagtatggcatgatctaccttggaaaagataccaatggggaaaacattgcagaatcactggttgcagagggcttagccacccggagagaaggcatgagagctaataatcctgagcagaaccggctttcagaatgtgaagaacaagcaaaggcagccaagaaagggatgtggagtgaggggaacggttcacatactatccgggatctcaagtataccattgaaaacccaaggcactttgtggactcacaccaccagaagcctgttaatgctatcatcgagcatgtgcgggacggcagtgtggtcagggccctgctcctcccagattactacctggttacagtcatgctgtcaggcatcaagtgcccaacttttcgacgggaagcagatggcagtgaaactccagagccttttgctgcagaagccaaatttttcactgagtcgcgactgcttcagagagatgttcagatcattctggagagctgccacaaccagaacattctgggtaccatccttcatccaaatggcaacatcacagagctcctcctgaaggaaggtttcgcacgctgtgtggactggtcgattgcagtttacacccggggcgcagaaaagctgagggcggcagagaggtttgccaaagagcgcaggctgagaatatggagagactatgtggctcccacagctaatttggaccaaaaggacaagcagtttgttgccaaggtgatgcaggttctgaatgctgatgccattgttgtgaagctgaactcaggcgattacaagacgattcacctgtccagcatccgaccaccgaggctggagggggagaacacccaggataagaacaagaaactgcgtcccctgtatgacattccttacatgtttgaggcccgggaatttcttcgaaaaaagcttattgggaagaaggtcaatgtgacggtggactacattagaccagccagcccagccacagagacagtgcctgccttttcagagcgtacctgtgccactgtcaccattggaggaataaacattgctgaggctcttgtcagcaaaggtctagccacagtgatcagataccggcaggatgatgaccagagatcatcacactacgatgaactgcttgctgcagaggccagagctattaagaatggcaaaggattgcatagcaagaaggaagtgcctatccaccgtgttgcagatatatctggggtgagtcgagtccctgaatcaagctgtgtggctcagaggctcaagagcgtgtctgcatatttgctgaaggacttcagcttatgtattttctctagctcgctccttttcaggcactgactgtgacttttccccaccccggggcatctacttaggtatctatagggagcctgttttattatctggaaaagcagaattaacttcattctttttctttacctgaactgtttctatgttgctttttcatttttaattactgtattttgagtttggaaggtagttcttcttggttgtattaaaataaaattgcctctttttaaa

SEQ ID NO: 363109 - DNA, 1085 bp, Homo sapiens
ttttaatagagatggggtcagcctggtcttgaactcctgggctcaagtgatcctcctgccttggcctcccaaagtgcagcaattataggcatgagccaccacacctggcctaggttgtaattttaaatggggttgcccgagacctcattaagagggagatactttatcacagactgaagcaggtgggagaggtagccaggaggacgtgaccagaggagcgttccaggcagacagaagagctagtgcgaagagttaagggaaaagccaggagactaatgtgattgtgttttccgttttactctgagggaactaaggctccattggacaggcttgagcaagggagagctctggcgcttacctaagcattctgcagggtcctgctggctgatcatttgagggcaactctgaccactccctttcttctctcgtccctccagatcacagaatacctgaatgcccaagagtcagccaagagcgccaggctgaacctgtggcgctatggagactttcgagctgatgatgcagacgaatttggctacagccgctaaggaggggatcgggtttggcccccagccccgctcacgccagtccctcttcctctgccgggagggtgttttcaactccaaaccccagagaggggttgtagattgggtccagctttgcttcagtgtgtggaaatgtctcgtggggtggcatcggggctgcggggtggggaccccaaggctttctggggcagacccttgtcctctgggatgatgggcactgctatccacagtctctgccagttggttttatttggaggtttgtgggctttttttaaaaaaaaaaagtcctcaaatcaggaagaaacatcaaagactatgtcctagtggagggagtaatcctaacacccaggctggccgccagctggcacctgcctctatcccagactgccctcgtcccagctctctgtccaactgttgattatgtgatttttctgatacgtccattctcaaatgccagtgtgttcacatcttcgctctggccagcccattctgtatttaaagcttttgaggcccaataaaatagtacgtgctgtctgcagc

SEQ ID NO: 363110 - DNA, 350 bp, Homo sapiens
ctggcaaccagtctttattcattttttaaaaaaggaaatccaaataagttagcaaaaaaaaaaaaaaaaaaaaagctttttttaaaaaaaaaaagtcctcaaatcaggaagaaacatcaaagactatgtcctagtggagggagtaatcctaacacccaggctggccgccagctggcacctgcctctatcccagactgccctcgtcccagctctctgtccaactgttgattatgtgatttttctgatacgtccattctcaaatgccagtgtgttcacatcttcgctctggccagcccattctgtatttaaagcttttgaggcccaataaaatagtacgtgctgtctgcagc

SEQ ID NO: 363111 - DNA, 255 bp, Homo sapiens
gtggaggtgcgcaaggagaaacagttccagaaagtggtatgtgatgtggagaggcggccccagcattgcgccaccaccctcacagagaaagggactgttccacaagccaggaagggagcagggaatccaccatcctgctgttcctgctgaggaaagataatggatttgggtttgttggtgtttttttgtttttgttttaaagctaattacatcccaaattaattggctgcgggtttggctgagaatgcagctgca

SEQ ID NO: 363112 - DNA, 214 bp, Homo sapiens
tgctgggattacaggcatgagccaccgtgcctggccaacctcactagggttctctggggagaaaattacaggcccctgctggccagactttcttgggagtctatggacaggagctggggcccaagtggttgttctctggcttgctctgacctgagtgtgtctctgctccaggatgatgcccgcacggacgccgtggacagcgtagttcgggata

SEQ ID NO: 363113 - DNA, 270 bp, Homo sapiens
tttagtagagatagagtttcaccatattggccagtctggtcttgaactcctaacctcgtgatccacccgcctcggcctcccaaagtgctgggattacaggcatgagccaccacgcctggcctcccagtgtcttttatgacttcacttcctcgccctcttctcacctctgccgactgaacatgcagggtctgggcccactatgaggagcagcccgtggaggaggtgatgccagtgctggaggagaaggagcgatctgctagctacaagccc

SEQ ID NO: 363114 - DNA, 1433 bp, Homo sapiens
gtcctgccagacaagggtgaacccagatgcctgggccagaaccacaggcaggcccggtgaccacagggatacttgttttggtgtgctcccctagccagcagctggagaaccccctggcctgtgggaacgtagtcagggaacccatgtcacagacagaagggcattgggaggaaatggaaaagcgattagagtccagttatactgcgattgttttcatgggaaccactaggtgtgccagcaccaggcccagagtgagctccccatctactgctggaccagcagggcacgttctctccaggcttcacccactggggagcctttgtacattgcaaagtggaaccaagtcatgggatgaacagggtggcccagagttagcattcccagaggcctggccacagagagctgtcctgtgagagagcaagggggcagcgagtatgtgacatgttggcctgctgcttcctctgcagagagaggtcctgccatccacccgcctgggtaccctatcacctgccttcagcactcgggtgctgccagctcaagccacggagtatgccttcgccttcatccaggtgccccaagatgatgatgcccgcacggacgccgtggacagcgtagttcgggatatccagaacactcagtgcctgctcaacgtggaacacctgagtgccggctgcccccatgtcaccctgcagtttgcagattccaagggcgatgtggggctgggcttggtgaaggaagggctggtcatggtggaggtgcgcaaggagaaacagttccagaaagtgatcacagaatacctgaatgcccaagagtcagccaagagcgccaggctgaacctgtggcgctatggagactttcgagctgatgatgcagacgaatttggctacagccgctaaggaggggatcgggtttggcccccagccccgctcacgccagtccctcttcctctgccgggagggtgttttcaactccaaaccccagagaggggttgtagattgggtccagctttgcttcagtgtgtggaaatgtctcgtggggtggcatcggggctgcggggtggggaccccaaggctttctggggcagacccttgtcctctgggatgatgggcactgctatccacagtctctgccagttggttttatttggaggtttgtgggctttttttaaaaaaaaaaagtcctcaaatcaggaagaaacatcaaagactatgtcctagtggagggagtaatcctaacacccaggctggccgccagctggcacctgcctctatcccagactgccctcgtcccagctctctgtccaactgttgattatgtgatttttctgatacgtccattctcaaatgccagtgtgttcacatcttcgctctggccagcccattctgtatttaaagcttttgaggcccaataaaatagtacgtgctgtctgcagc

SEQ ID NO: 363115 - DNA, 1023 bp, Homo sapiens
acacaacctgcattatggtgatacggcctctggaccattcattttctctttcttccccctacgtaggtcctctcagggtgcgccatcattgtccgaggtcagcctcgtggtgggcctcctcctgagcggcagatcaacctcagcaacattcgtgctggaaatcttgctcgccgggcagccgccacacaacctgatgcaaaggatacccctgatgaggtaggtgtttcctgaggccatcgtgagcctgtggacctaggtaatagcccactgtcttctgtcgctgatgccattttgatgtactctttctttgtattttgagtatttttatatcatagaactgctgattctggatgtgcccacaagcagcttgtatctgttgtttatatgtttactacctttagtggcagttgaagtcttagagctttttcttgtaccttttcccatagacttagatttgtcgtgttttcactactacttttcttggaatagtttaggaacatttcctgggtagccttaagcatttgaaatcaccattggttatggcagagctcttttattaatttatttttgaattcttcattcatttacattgttcagaatgcagaaggatatatagtgaaaaatcgagtacttcccctgagacacctgaggttactagggtcttgtgtctccttccagagatagttaaaacctgtatgatcagacactctcattttcataaatcgtagcatgctataaatgctaggcccatattttattattttattaaagattgtttttctttaaggttcagagggtacattttcatgtttgttacacgggtatattgtgtaatgttggggattgggcttctagtgtatccatcaccaaaatattgaacattgtatccaatagataatcttttaattctcacccccctcactccttctccccttttggagtccccagtgtctattatttctatctatatgtccatgtgtacccattgtttagttcccacttacaaaagttagaacatgtgat

SEQ ID NO: 363116 - DNA, 3102 bp, Homo sapiens
ttaatcaatacgccgtccacccgcccgtcagggaaggaggagaaggcctaagctgggcccccctgggcatttccagctcgagagttccttcgaaagaagctgattgggaaggaagtctgtttcacgatagaaaacaagactccccaggggcgagagtatggcatgatctaccttggaaaagataccaatggggaaaacattgcagaatcactggttgcagagggcttagccacccggagagaaggcatgagagctaataatcctgagcagaaccggctttcagaatgtgaagaacaagcaaaggcagccaagaaagggatgtggagtgaggggaacggttcacatactatccgggatctcaagtataccattgaaaacccaaggcactttgtggactcacaccaccagaagcctgttaatgctatcatcgagcatgtgcgggacggcagtgtggtcagggccctgctcctcccagattactacctggttacagtcatgctgtcaggcatcaagtgcccaacttttcgacgggaagcagatggcagtgaaactccagagccttttgctgcagaagccaaatttttcactgagtcgcgactgcttcagagagatgttcagatcattctggagagctgccacaaccagaacattctgggtaccatccttcatccaaatggcaacatcacagagctcctcctgaaggaaggtttcgcacgctgtgtggactggtcgattgcagtttacacccggggcgcagaaaagctgagggcggcagagaggtttgccaaagagcgcaggctgagaatatggagagactatgtggctcccacagctaatttggaccaaaaggacaagcagtttgttgccaaggtgatgcaggttctgaatgctgatgccattgttgtgaagctgaactcaggcgattacaagacgattcacctgtccagcatccgaccaccgaggctggagggggagaacacccaggataagaacaagaaactgcgtcccctgtatgacattccttacatgtttgaggcccgggaatttcttcgaaaaaagcttattgggaagaaggtcaatgtgacggtggactacattagaccagccagcccagccacagagacagtgcctgccttttcagagcgtacctgtgccactgtcaccattggaggaataaacattgctgaggctcttgtcagcaaaggtctagccacagtgatcagataccggcaggatgatgaccagagatcatcacactacgatgaactgcttgctgcagaggccagagctattaagaatggcaaaggattgcatagcaagaaggaagtgcctatccaccgtgttgcagatatatctggggatacccaaaaagcaaagcagttcctgccttttcttcagcgggcaggtcgttctgaagctgtggtggaatacgtcttcagtggttctcgtctcaaactctatttgccaaaggaaacttgccttatcaccttcttgcttgcaggcattgaatgccccagaggagcccgaaacctcccaggcttggtgcaggaaggagagcccttcagcgaggaagctacacttttcaccaaggaactggtgctgcagcgagaggtggaggtggaggtggagagcatggacaaggccggcaactttatcggctggctgcacatcgacggtgccaacctgtccgtcctgctggtggagcacgcgctctccaaggtccacttcaccgccgaacgcagctcctactacaagtccctgctgtctgccgaggaggccgcaaagcagaagaaagagaaggtctgggcccactatgaggagcagcccgtggaggaggtgatgccagtgctggaggagaaggagcgatctgctagctacaagcccgtgtttgtgaccgagatcactgatgacctgcacttctacgtgcaggatgtggagaccggcacccagttggagaagctgatggagaacatgcgcaatgacattgccagtcacccccctgtagagggctcctatgccccccgcaggggagagttctgcattgccaaatttgtagatggagaatggtaccgtgcccgagtagagaaagtcgagtctcctgccaaaatacatgtcttctacattgactacggcaacagagaggtcctgccatccacccgcctgggtaccctatcacctgccttcagcactcgggtgctgccagctcaagccacggagtatgccttcgccttcatccaggtgccccaagatgatgatgcccgcacggacgccgtggacagcgtagttcgggatatccagaacactcagtgcctgctcaacgtggaacacctgagtgccggctgcccccatgtcaccctgcagtttgcagattccaagggcgatgtggggctgggcttggtgaaggaagggctggtcatggtggaggtgcgcaaggagaaacagttccagaaagtgatcacagaatacctgaatgcccaagagtcagccaagagcgccaggctgaacctgtggcgctatggagactttcgagctgatgatgcagacgaatttggctacagccgctaaggaggggatcgggtttggcccccagccccgctcacgccagtccctcttcctctgccgggagggtgttttcaactccaaaccccagagaggggttgtagattgggtccagctttgcttcagtgtgtggaaatgtctcgtggggtggcatcggggctgcggggtggggaccccaaggctttctggggcagacccttgtcctctgggatgatgggcactgctatccacagtctctgccagttggttttatttggaggtttgtgggctttttttaaaaaaaaaaagtcctcaaatcaggaagaaacatcaaagactatgtcctagtggagggagtaatcctaacacccaggctggccgccagctggcacctgcctctatcccagactgccctcgtcccagctctctgtccaactgttgattatgtgatttttctgatacgtccattctcaaatgccagtgtgttcacatcttcgctctggccagcccattctgtatttaaagcttttgaggcccaataaaatagtacgtgctgtctgcagc

SEQ ID NO: 363117 - DNA, 3368 bp, Homo sapiens
  misc_feature (62)..(62): n is a, c, g, or t
gcatatctagaggatcccagtcgacggagactctcctagaactctcgctctgccatgtctgnccccgccccccatcctgctggggacccctgaacaagccagcttccttttccaaacacagtgcaaggggcctgggcagctgctcactgctgtgtcctcgtcacatggtgctagcattggcttactgaacataggacggccctctgagacctgatggattatggaggctacagaggggtggctcggcctcagacactcagcacagtccctgccccaggctgctgtgctgagagtctccgtcgaactagttcgacggagactctcgcccctgggcatttccagctcgagagttccttcgaaagaagctgattgggaaggaagtctgtttcacgatagaaaacaagactccccaggggcgagagtatggcatgatctaccttggaaaagataccaatggggaaaacattgcagaatcactggttgcagagggcttagccacccggagagaaggcatgagagctaataatcctgagcagaaccggctttcagaatgtgaagaacaagcaaaggcagccaagaaagggatgtggagtgaggggaacggttcacatactatccgggatctcaagtataccattgaaaacccaaggcactttgtggactcacaccaccagaagcctgttaatgctatcatcgagcatgtgcgggacggcagtgtggtcagggccctgctcctcccagattactacctggttacagtcatgctgtcaggcatcaagtgcccaacttttcgacgggaagcagatggcagtgaaactccagagccttttgctgcagaagccaaatttttcactgagtcgcgactgcttcagagagatgttcagatcattctggagagctgccacaaccagaacattctgggtaccatccttcatccaaatggcaacatcacagagctcctcctgaaggaaggtttcgcacgctgtgtggactggtcgattgcagtttacacccggggcgcagaaaagctgagggcggcagagaggtttgccaaagagcgcaggctgagaatatggagagactatgtggctcccacagctaatttggaccaaaaggacaagcagtttgttgccaaggtgatgcaggttctgaatgctgatgccattgttgtgaagctgaactcaggcgattacaagacgattcacctgtccagcatccgaccaccgaggctggagggggagaacacccaggataagaacaagaaactgcgtcccctgtatgacattccttacatgtttgaggcccgggaatttcttcgaaaaaagcttattgggaagaaggtcaatgtgacggtggactacattagaccagccagcccagccacagagacagtgcctgccttttcagagcgtacctgtgccactgtcaccattggaggaataaacattgctgaggctcttgtcagcaaaggtctagccacagtgatcagataccggcaggatgatgaccagagatcatcacactacgatgaactgcttgctgcagaggccagagctattaagaatggcaaaggattgcatagcaagaaggaagtgcctatccaccgtgttgcagatatatctggggatacccaaaaagcaaagcagttcctgccttttcttcagcgggcaggtcgttctgaagctgtggtggaatacgtcttcagtggttctcgtctcaaactctatttgccaaaggaaacttgccttatcaccttcttgcttgcaggcattgaatgccccagaggagcccgaaacctcccaggcttggtgcaggaaggagagcccttcagcgaggaagctacacttttcaccaaggaactggtgctgcagcgagaggtggaggtggaggtggagagcatggacaaggccggcaactttatcggctggctgcacatcgacggtgccaacctgtccgtcctgctggtggagcacgcgctctccaaggtccacttcaccgccgaacgcagctcctactacaagtccctgctgtctgccgaggaggccgcaaagcagaagaaagagaaggtctgggcccactatgaggagcagcccgtggaggaggtgatgccagtgctggaggagaaggagcgatctgctagctacaagcccgtgtttgtgaccgagatcactgatgacctgcacttctacgtgcaggatgtggagaccggcacccagttggagaagctgatggagaacatgcgcaatgacattgccagtcacccccctgtagagggctcctatgccccccgcaggggagagttctgcattgccaaatttgtagatggagaatggtaccgtgcccgagtagagaaagtcgagtctcctgccaaaatacatgtcttctacattgactacggcaacagagaggtcctgccatccacccgcctgggtaccctatcacctgccttcagcactcgggtgctgccagctcaagccacggagtatgccttcgccttcatccaggtgccccaagatgatgatgcccgcacggacgccgtggacagcgtagttcgggatatccagaacactcagtgcctgctcaacgtggaacacctgagtgccggctgcccccatgtcaccctgcagtttgcagattccaagggcgatgtggggctgggcttggtgaaggaagggctggtcatggtggaggtgcgcaaggagaaacagttccagaaagtgatcacagaatacctgaatgcccaagagtcagccaagagcgccaggctgaacctgtggcgctatggagactttcgagctgatgatgcagacgaatttggctacagccgctaaggaggggatcgggtttggcccccagccccgctcacgccagtccctcttcctctgccgggagggtgttttcaactccaaaccccagagaggggttgtagattgggtccagctttgcttcagtgtgtggaaatgtctcgtggggtggcatcggggctgcggggtggggaccccaaggctttctggggcagacccttgtcctctgggatgatgggcactgctatccacagtctctgccagttggttttatttggaggtttgtgggctttttttaaaaaaaaaaagtcctcaaatcaggaagaaacatcaaagactatgtcctagtggagggagtaatcctaacacccaggctggccgccagctggcacctgcctctatcccagactgccctcgtcccagctctctgtccaactgttgattatgtgatttttctgatacgtccattctcaaatgccagtgtgttcacatcttcgctctggccagcccattctgtatttaaagcttttgaggcccaataaaatagtacgtgctgtctgcagc

SEQ ID NO: 363118 - DNA, 3692 bp, Homo sapiens
cgcttgcgcggcgagtagaacgtgtggcggcggcggagatcgcgtctctttcgctccgtgtcccgctgctgctcctgtgagcgcccggcgagtccgtcccgtccaccgtccgcagctggtagccagcctgcccctcgcctcgactccctttcaccaacaccgacacccacattgacacctccagtccggccagccgctccactcgttgcctttgcatctccacacatggcgtcctccgcgcagagcggcggctcctccgggggacccgcggtccccaccgtgcagcggggcatcatcaagatggtcctctcagggtgcgccatcattgtccgaggtcagcctcgtggtgggcctcctcctgagcggcagatcaacctcagcaacattcgtgctggaaatcttgctcgccgggcagccgccacacaacctgatgcaaaggatacccctgatgagccctgggcatttccagctcgagagttccttcgaaagaagctgattgggaaggaagtctgtttcacgatagaaaacaagactccccaggggcgagagtatggcatgatctaccttggaaaagataccaatggggaaaacattgcagaatcactggttgcagagggcttagccacccggagagaaggcatgagagctaataatcctgagcagaaccggctttcagaatgtgaagaacaagcaaaggcagccaagaaagggatgtggagtgaggggaacggttcacatactatccgggatctcaagtataccattgaaaacccaaggcactttgtggactcacaccaccagaagcctgttaatgctatcatcgagcatgtgcgggacggcagtgtggtcagggccctgctcctcccagattactacctggttacagtcatgctgtcaggcatcaagtgcccaacttttcgacgggaagcagatggcagtgaaactccagagccttttgctgcagaagccaaatttttcactgagtcgcgactgcttcagagagatgttcagatcattctggagagctgccacaaccagaacattctgggtaccatccttcatccaaatggcaacatcacagagctcctcctgaaggaaggtttcgcacgctgtgtggactggtcgattgcagtttacacccggggcgcagaaaagctgagggcggcagagaggtttgccaaagagcgcaggctgagaatatggagagactatgtggctcccacagctaatttggaccaaaaggacaagcagtttgttgccaaggtgatgcaggttctgaatgctgatgccattgttgtgaagctgaactcaggcgattacaagacgattcacctgtccagcatccgaccaccgaggctggagggggagaacacccaggataagaacaagaaactgcgtcccctgtatgacattccttacatgtttgaggcccgggaatttcttcgaaaaaagcttattgggaagaaggtcaatgtgacggtggactacattagaccagccagcccagccacagagacagtgcctgccttttcagagcgtacctgtgccactgtcaccattggaggaataaacattgctgaggctcttgtcagcaaaggtctagccacagtgatcagataccggcaggatgatgaccagagatcatcacactacgatgaactgcttgctgcagaggccagagctattaagaatggcaaaggattgcatagcaagaaggaagtgcctatccaccgtgttgcagatatatctggggatacccaaaaagcaaagcagttcctgccttttcttcagcgggcaggtcgttctgaagctgtggtggaatacgtcttcagtggttctcgtctcaaactctatttgccaaaggaaacttgccttatcaccttcttgcttgcaggcattgaatgccccagaggagcccgaaacctcccaggcttggtgcaggaaggagagcccttcagcgaggaagctacacttttcaccaaggaactggtgctgcagcgagaggtggaggtggaggtggagagcatggacaaggccggcaactttatcggctggctgcacatcgacggtgccaacctgtccgtcctgctggtggagcacgcgctctccaaggtccacttcaccgccgaacgcagctcctactacaagtccctgctgtctgccgaggaggccgcaaagcagaagaaagagaaggtctgggcccactatgaggagcagcccgtggaggaggtgatgccagtgctggaggagaaggagcgatctgctagctacaagcccgtgtttgtgaccgagatcactgatgacctgcacttctacgtgcaggatgtggagaccggcacccagttggagaagctgatggagaacatgcgcaatgacattgccagtcacccccctgtagagggctcctatgccccccgcaggggagagttctgcattgccaaatttgtagatggagaatggtaccgtgcccgagtagagaaagtcgagtctcctgccaaaatacatgtcttctacattgactacggcaacagagaggtcctgccatccacccgcctgggtaccctatcacctgccttcagcactcgggtgctgccagctcaagccacggagtatgccttcgccttcatccaggtgccccaagatgatgatgcccgcacggacgccgtggacagcgtagttcgggatatccagaacactcagtgcctgctcaacgtggaacacctgagtgccggctgcccccatgtcaccctgcagtttgcagattccaagggcgatgtggggctgggcttggtgaaggaagggctggtcatggtggaggtgcgcaaggagaaacagttccagaaagtgatcacagaatacctgaatgcccaagagtcagccaagagcgccaggctgaacctgtggcgctatggagactttcgagctgatgatgcagacgaatttggctacagccgctaaggaggggatcgggtttggcccccagccccgctcacgccagtccctcttcctctgccgggagggtgttttcaactccaaaccccagagaggggttgtagattgggtccagctttgcttcagtgtgtggaaatgtctcgtggggtggcatcggggctgcggggtggggaccccaaggctttctggggcagacccttgtcctctgggatgatgggcactgctatccacagtctctgccagttggttttatttggaggtttgtgggctttttttaaaaaaaaaaagtcctcaaatcaggaagaaacatcaaagactatgtcctagtggagggagtaatcctaacacccaggctggccgccagctggcacctgcctctatcccagactgccctcgtcccagctctctgtccaactgttgattatgtgatttttctgatacgtccattctcaaatgccagtgtgttcacatcttcgctctggccagcccattctgtatttaaagcttttgaggcccaataaaatagtacgtgctgtctgcagcaaaaaaaaaaaaaagaataatgaaggagtcccaaaaaattaatagttagaataagaacaaaaaaaaaaacggcgggtttttttgtgggggggacaaagggttttaaaggcgagcagtcgatattgttttctcagcccgtttttaaaggggggagaaggcgggccctcagaggggggaatatgaaccggtatgtagag

SEQ ID NO: 363119 - DNA, 3003 bp, Homo sapiens
agccctgtgcagccccatcgacgacgccggtcctagattgccatcacactcctcgggtaggacgccgcatgtgccgcgatacggccgcagtcaccatcaccgaaaccatgagcggcgagggcgaaacccagcagcacggcacaggcgtgagacgctaataatcctgagcagaaccggctttcagaatgtgaagaacaagcaaaggcagccaagaaagggatgtggagtgaggggaacggttcacatactatccgggatctcaagtataccattgaaaacccaaggcactttgtggactcacaccaccagaagcctgttaatgctatcatcgagcatgtgcgggacggcagtgtggtcagggccctgctcctcccagattactacctggttacagtcatgctgtcaggcatcaagtgcccaacttttcgacgggaagcagatggcagtgaaactccagagccttttgctgcagaagccaaatttttcactgagtcgcgactgcttcagagagatgttcagatcattctggagagctgccacaaccagaacattctgggtaccatccttcatccaaatggcaacatcacagagctcctcctgaaggaaggtttcgcacgctgtgtggactggtcgattgcagtttacacccggggcgcagaaaagctgagggcggcagagaggtttgccaaagagcgcaggctgagaatatggagagactatgtggctcccacagctaatttggaccaaaaggacaagcagtttgttgccaaggtgatgcaggttctgaatgctgatgccattgttgtgaagctgaactcaggcgattacaagacgattcacctgtccagcatccgaccaccgaggctggagggggagaacacccaggataagaacaagaaactgcgtcccctgtatgacattccttacatgtttgaggcccgggaatttcttcgaaaaaagcttattgggaagaaggtcaatgtgacggtggactacattagaccagccagcccagccacagagacagtgcctgccttttcagagcgtacctgtgccactgtcaccattggaggaataaacattgctgaggctcttgtcagcaaaggtctagccacagtgatcagataccggcaggatgatgaccagagatcatcacactacgatgaactgcttgctgcagaggccagagctattaagaatggcaaaggattgcatagcaagaaggaagtgcctatccaccgtgttgcagatatatctggggatacccaaaaagcaaagcagttcctgccttttcttcagcgggcaggtcgttctgaagctgtggtggaatacgtcttcagtggttctcgtctcaaactctatttgccaaaggaaacttgccttatcaccttcttgcttgcaggcattgaatgccccagaggagcccgaaacctcccaggcttggtgcaggaaggagagcccttcagcgaggaagctacacttttcaccaaggaactggtgctgcagcgagaggtggaggtggaggtggagagcatggacaaggccggcaactttatcggctggctgcacatcgacggtgccaacctgtccgtcctgctggtggagcacgcgctctccaaggtccacttcaccgccgaacgcagctcctactacaagtccctgctgtctgccgaggaggccgcaaagcagaagaaagagaaggtctgggcccactatgaggagcagcccgtggaggaggtgatgccagtgctggaggagaaggagcgatctgctagctacaagcccgtgtttgtgaccgagatcactgatgacctgcacttctacgtgcaggatgtggagaccggcacccagttggagaagctgatggagaacatgcgcaatgacattgccagtcacccccctgtagagggctcctatgccccccgcaggggagagttctgcattgccaaatttgtagatggagaatggtaccgtgcccgagtagagaaagtcgagtctcctgccaaaatacatgtcttctacattgactacggcaacagagaggtcctgccatccacccgcctgggtaccctatcacctgccttcagcactcgggtgctgccagctcaagccacggagtatgccttcgccttcatccaggtgccccaagatgatgatgcccgcacggacgccgtggacagcgtagttcgggatatccagaacactcagtgcctgctcaacgtggaacacctgagtgccggctgcccccatgtcaccctgcagtttgcagattccaagggcgatgtggggctgggcttggtgaaggaagggctggtcatggtggaggtgcgcaaggagaaacagttccagaaagtgatcacagaatacctgaatgcccaagagtcagccaagagcgccaggctgaacctgtggcgctatggagactttcgagctgatgatgcagacgaatttggctacagccgctaaggaggggatcgggtttggcccccagccccgctcacgccagtccctcttcctctgccgggagggtgttttcaactccaaaccccagagaggggttgtagattgggtccagctttgcttcagtgtgtggaaatgtctcgtggggtggcatcggggctgcggggtggggaccccaaggctttctggggcagacccttgtcctctgggatgatgggcactgctatccacagtctctgccagttggttttatttggaggtttgtgggctttttttaaaaaaaaaaagtcctcaaatcaggaagaaacatcaaagactatgtcctagtggagggagtaatcctaacacccaggctggccgccagctggcacctgcctctatcccagactgccctcgtcccagctctctgtccaactgttgattatgtgatttttctgatacgtccattctcaaatgccagtgtgttcacatcttcgctctggccagcccattctgtatttaaagcttttgaggcccaataaaatagtacgtgctgtctgcagc

SEQ ID NO: 363120 - DNA, 3306 bp, Homo sapiens
cgcttgcgcggcgagtagaacgtgtggcggcggcggagatcgcgtctctttcgctccgtgtcccgctgctgctcctgtgagcgcccggcgagtccgtcccgtccaccgtccgcagctggtagccagcctgcccctcgcctcgactccctttcaccaacaccgacacccacattgacacctccagtccggccagccgctccactcgttgcctttgcatctccacacatggcgtcctccgcgcagagcggcggctcctccgggggacccgcggtccccaccgtgcagcggggcatcatcaagatggtcctctcagggtgcgccatcattgtccgaggtcagcctcgtggtgggcctcctcctgagcggcagatcaacctcagcaacattcgtgctggaaatcttgctcgccgggcagccgccacacaacctgatgcaaaggatacccctgatgagccctgggcatttccagctcgagagttccttcgaaagaagctgattgggaaggaagtctgtttcacgatagaaaacaagactccccaggggcgagagtatggcatgatctaccttggaaaagataccaatggggaaaacattgcagaatcactggttgcagagggcttagccacccggagagaaggcatgagagctaataatcctgagcagaaccggctttcagaatgtgaagaacaagcaaaggcagccaagaaagggatgtggagtgaggggaacggttcacatactatccgggatctcaagtataccattgaaaacccaaggcactttgtggactcacaccaccagaagcctgttaatgctatcatcgagcatgtgcgggacggcagtgtggtcagggccctgctcctcccagattactacctggttacagtcatgctgtcaggcatcaagtgcccaacttttcgacgggaagcagatggcagtgaaactccagagccttttgctgcagaagccaaatttttcactgagtcgcgactgcttcagagagatgttcagatcattctggagagctgccacaaccagaacattctgggtaccatccttcatccaaatggcaacatcacagagctcctcctgaaggaaggtttcgcacgctgtgtggactggtcgattgcagtttacacccggggcgcagaaaagctgagggcggcagagaggtttgccaaagagcgcaggctgagaatatggagagactatgtggctcccacagctaatttggaccaaaaggacaagcagtttgttgccaaggtgatgcaggttctgaatgctgatgccattgttgtgaagctgaactcaggcgattacaagacgattcacctgtccagcatccgaccaccgaggctggagggggagaacacccaggataagaacaagaaactgcgtcccctgtatgacattccttacatgtttgaggcccgggaatttcttcgaaaaaagcttattgggaagaaggtcaatgtgacggtggactacattagaccagccagcccagccacagagacagtgcctgccttttcagagcgtacctgtgccactgtcaccattggaggaataaacattgctgaggctcttgtcagcaaaggtctagccacagtgatcagataccggcaggatgatgaccagagatcatcacactacgatgaactgcttgctgcagaggccagagctattaagaatggcaaaggattgcatagcaagaaggaagtgcctatccaccgtgttgcagatatatctggggatacccaaaaagcaaagcagttcctgccttttcttcagcgggcaggtcgttctgaagctgtggtggaatacgtcttcagtggttctcgtctcaaactctatttgccaaaggaaacttgccttatcaccttcttgcttgcaggcattgaatgccccagaggagcccgaaacctcccaggcttggtgcaggaaggagagcccttcagcgaggaagctacacttttcaccaaggaactggtgctgcagcgagaggtctgggcccactatgaggagcagcccgtggaggaggtgatgccagtgctggaggagaaggagcgatctgctagctacaagcccgtgtttgtgaccgagatcactgatgacctgcacttctacgtgcaggatgtggagaccggcacccagttggagaagctgatggagaacatgcgcaatgacattgccagtcacccccctgtagagggctcctatgccccccgcaggggagagttctgcattgccaaatttgtagatggagaatggtaccgtgcccgagtagagaaagtcgagtctcctgccaaaatacatgtcttctacattgactacggcaacagagaggtcctgccatccacccgcctgggtaccctatcacctgccttcagcactcgggtgctgccagctcaagccacggagtatgccttcgccttcatccaggtgccccaagatgatgatgcccgcacggacgccgtggacagcgtagttcgggatatccagaacactcagtgcctgctcaacgtggaacacctgagtgccggctgcccccatgtcaccctgcagtttgcagattccaagggcgatgtggggctgggcttggtgaaggaagggctggtcatggtggaggtgcgcaaggagaaacagttccagaaagtgatcacagaatacctgaatgcccaagagtcagccaagagcgccaggctgaacctgtggcgctatggagactttcgagctgatgatgcagacgaatttggctacagccgctaaggaggggatcgggtttggcccccagccccgctcacgccagtccctcttcctctgccgggagggtgttttcaactccaaaccccagagaggggttgtagattgggtccagctttgcttcagtgtgtggaaatgtctcgtggggtggcatcggggctgcggggtggggaccccaaggctttctggggcagacccttgtcctctgggatgatgggcactgctatccacagtctctgccagttggttttatttggaggtttgtgggctttttttaaaaaaaaaaagtcctcaaatcaggaagaaacatcaaagactatgtcctagtggagggagtaatcctaacacccaggctggccgccagctggcacctgcctctatcccagactgccctcgtcccagctctctgtccaactgttgattatgtgatttttctgatacgtccattctcaaatgccagtgtgttcacatcttcgctctggccagcccattctgtatttaaagcttttgaggcccaataaaatagtacgtgctgtctgcagc

SEQ ID NO: 363121 - DNA, 3445 bp, Homo sapiens
cgcttgcgcggcgagtagaacgtgtggcggcggcggagatcgcgtctctttcgctccgtgtcccgctgctgctcctgtgagcgcccggcgagtccgtcccgtccaccgtccgcagctggtagccagcctgcccctcgcctcgactccctttcaccaacaccgacacccacattgacacctccagtccggccagccgctccactcgttgcctttgcatctccacacatggcgtcctccgcgcagagcggcggctcctccgggggacccgcggtccccaccgtgcagcggggcatcatcaagatggtcctctcagggtgcgccatcattgtccgaggtcagcctcgtggtgggcctcctcctgagcggcagatcaacctcagcaacattcgtgctggaaatcttgctcgccgggcagccgccacacaacctgatgcaaaggatacccctgatgagccctgggcatttccagctcgagagttccttcgaaagaagctgattgggaaggaagtctgtttcacgatagaaaacaagactccccaggggcgagagtatggcatgatctaccttggaaaagataccaatggggaaaacattgcagaatcactggttgcagagggcttagccacccggagagaaggcatgagagctaataatcctgagcagaaccggctttcagaatgtgaagaacaagcaaaggcagccaagaaagggatgtggagtgaggggaacggttcacatactatccgggatctcaagtataccattgaaaacccaaggcactttgtggactcacaccaccagaagcctgttaatgctatcatcgagcatgtgcgggacggcagtgtggtcagggccctgctcctcccagattactacctggttacagtcatgctgtcaggcatcaagtgcccaacttttcgacgggaagcagatggcagtgaaactccagagccttttgctgcagaagccaaatttttcactgagtcgcgactgcttcagagagatgttcagatcattctggagagctgccacaaccagaacattctgggtaccatccttcatccaaatggcaacatcacagagctcctcctgaaggaaggtttcgcacgctgtgtggactggtcgattgcagtttacacccggggcgcagaaaagctgagggcggcagagaggtttgccaaagagcgcaggctgagaatatggagagactatgtggctcccacagctaatttggaccaaaaggacaagcagtttgttgccaaggtgatgcaggttctgaatgctgatgccattgttgtgaagctgaactcaggcgattacaagacgattcacctgtccagcatccgaccaccgaggctggagggggagaacacccaggataagaacaagaaactgcgtcccctgtatgacattccttacatgtttgaggcccgggaatttcttcgaaaaaagcttattgggaagaaggtcaatgtgacggtggactacattagaccagccagcccagccacagagacagtgcctgccttttcagagcgtacctgtgccactgtcaccattggaggaataaacattgctgaggctcttgtcagcaaaggtctagccacagtgatcagataccggcaggatgatgaccagagatcatcacactacgatgaactgcttgctgcagaggccagagctattaagaatggcaaaggattgcatagcaagaaggaagtgcctatccaccgtgttgcagatatatctggggatacccaaaaagcaaagcagttcctgccttttcttcagcgggcaggtcgttctgaagctgtggtggaatacgtcttcagtggttctcgtctcaaactctatttgccaaaggaaacttgccttatcaccttcttgcttgcaggcattgaatgccccagaggagcccgaaacctcccaggcttggtgcaggaaggagagcccttcagcgaggaagctacacttttcaccaaggaactggtgctgcagcgagaggtggaggtggaggtggagagcatggacaaggccggcaactttatcggctggctgcacatcgacggtgccaacctgtccgtcctgctggtggagcacgcgctctccaaggtccacttcaccgccgaacgcagctcctactacaagtccctgctgtctgccgaggaggccgcaaagcagaagaaagagaaggtctgggcccactatgaggagcagcccgtggaggaggtgatgccagtgctggaggagaaggagcgatctgctagctacaagcccgtgtttgtgaccgagatcactgatgacctgcacttctacgtgcaggatgtggagaccggcacccagttggagaagctgatggagaacatgcgcaatgacattgccagtcacccccctgtagagggctcctatgccccccgcaggggagagttctgcattgccaaatttgtagatggagaatggtaccgtgcccgagtagagaaagtcgagtctcctgccaaaatacatgtcttctacattgactacggcaacagagaggtcctgccatccacccgcctgggtaccctatcacctgccttcagcactcgggtgctgccagctcaagccacggagtatgccttcgccttcatccaggtgccccaagatgatgatgcccgcacggacgccgtggacagcgtagttcgggatatccagaacactcagtgcctgctcaacgtggaacacctgagtgccggtgggcttggtgaaggaagggctggtcatggtggaggtgcgcaaggagaaacagttccagaaagtgatcacagaatacctgaatgcccaagagtcagccaagagcgccaggctgaacctgtggcgctatggagactttcgagctgatgatgcagacgaatttggctacagccgctaaggaggggatcgggtttggcccccagccccgctcacgccagtccctcttcctctgccgggagggtgttttcaactccaaaccccagagaggggttgtagattgggtccagctttgcttcagtgtgtggaaatgtctcgtggggtggcatcggggctgcggggtggggaccccaaggctttctggggcagacccttgtcctctgggatgatgggcactgctatccacagtctctgccagttggttttatttggaggtttgtgggctttttttaaaaaaaaaaagtcctcaaatcaggaagaaacatcaaagactatgtcctagtggagggagtaatcctaacacccaggctggccgccagctggcacctgcctctatcccagactgccctcgtcccagctctctgtccaactgttgattatgtgatttttctgatacgtccattctcaaatgccagtgtgttcacatcttcgctctggccagcccattctgtatttaaagcttttgaggcccaataaaatagtacgtgctgtctgcagc

SEQ ID NO: 363122 - DNA, 3471 bp, Homo sapiens
cgcttgcgcggcgagtagaacgtgtggcggcggcggagatcgcgtctctttcgctccgtgtcccgctgctgctcctgtgagcgcccggcgagtccgtcccgtccaccgtccgcagctggtagccagcctgcccctcgcctcgactccctttcaccaacaccgacacccacattgacacctccagtccggccagccgctccactcgttgcctttgcatctccacacatggcgtcctccgcgcagagcggcggctcctccgggggacccgcggtccccaccgtgcagcggggcatcatcaagatggtcctctcagggtgcgccatcattgtccgaggtcagcctcgtggtgggcctcctcctgagcggcagatcaacctcagcaacattcgtgctggaaatcttgctcgccgggcagccgccacacaacctgatgcaaaggatacccctgatgagccctgggcatttccagctcgagagttccttcgaaagaagctgattgggaaggaagtctgtttcacgatagaaaacaagactccccaggggcgagagtatggcatgatctaccttggaaaagataccaatggggaaaacattgcagaatcactggttgcagagggcttagccacccggagagaaggcatgagagctaataatcctgagcagaaccggctttcagaatgtgaagaacaagcaaaggcagccaagaaagggatgtggagtgaggggaacggttcacatactatccgggatctcaagtataccattgaaaacccaaggcactttgtggactcacaccaccagaagcctgttaatgctatcatcgagcatgtgcgggacggcagtgtggtcagggccctgctcctcccagattactacctggttacagtcatgctgtcaggcatcaagtgcccaacttttcgacgggaagcagatggcagtgaaactccagagccttttgctgcagaagccaaatttttcactgagtcgcgactgcttcagagagatgttcagatcattctggagagctgccacaaccagaacattctgggtaccatccttcatccaaatggcaacatcacagagctcctcctgaaggaaggtttcgcacgctgtgtggactggtcgattgcagtttacacccggggcgcagaaaagctgagggcggcagagaggtttgccaaagagcgcaggctgagaatatggagagactatgtggctcccacagctaatttggaccaaaaggacaagcagtttgttgccaaggtgatgcaggttctgaatgctgatgccattgttgtgaagctgaactcaggcgattacaagacgattcacctgtccagcatccgaccaccgaggctggagggggagaacacccaggataagaacaagaaactgcgtcccctgtatgacattccttacatgtttgaggcccgggaatttcttcgaaaaaagcttattgggaagaaggtcaatgtgacggtggactacattagaccagccagcccagccacagagacagtgcctgccttttcagagcgtacctgtgccactgtcaccattggaggaataaacattgctgaggctcttgtcagcaaaggtctagccacagtgatcagataccggcaggatgatgaccagagatcatcacactacgatgaactgcttgctgcagaggccagagctattaagaatggcaaaggattgcatagcaagaaggaagtgcctatccaccgtgttgcagatatatctggggatacccaaaaagcaaagcagttcctgccttttcttcagcgggcaggtcgttctgaagctgtggtggaatacgtcttcagtggttctcgtctcaaactctatttgccaaaggaaacttgccttatcaccttcttgcttgcaggcattgaatgccccagaggagcccgaaacctcccaggcttggtgcaggaaggagagcccttcagcgaggaagctacacttttcaccaaggaactggtgctgcagcgagaggtggaggtggaggtggagagcatggacaaggccggcaactttatcggctggctgcacatcgacggtgccaacctgtccgtcctgctggtggagcacgcgctctccaaggtccacttcaccgccgaacgcagctcctactacaagtccctgctgtctgccgaggaggccgcaaagcagaagaaagagaaggtctgggcccactatgaggagcagcccgtggaggaggtgatgccagtgctggaggagaaggagcgatctgctagctacaagcccgtgtttgtgaccgagatcactgatgacctgcacttctacgtgcaggatgtggagaccggcacccagttggagaagctgatggagaacatgcgcaatgacattgccagtcacccccctgtagagggctcctatgccccccgcaggggagagttctgcattgccaaatttgtagatggagaatggtaccgtgcccgagtagagaaagtcgagtctcctgccaaaatacatgtcttctacattgactacggcaacagagaggtcctgccatccacccgcctgggtaccctatcacctgccttcagcactcgggtgctgccagctcaagccacggagtatgccttcgccttcatccaggtgccccaagatgatgatgcccgcacggacgccgtggacagcgtagttcgggatatccagaacactcagtgcctgctcaacgtggaacacctgagtgccggctgcccccatgtcaccctgcagtttgcagattccaagggcgatgtggggctgggcttggtgaaggaagggctggtcatggtggaggtgcgcaaggagaaacagttccagaaagtgatcacagaatacctgaatgcccaagagtcagccaagagcgccaggctgaacctgtggcgctatggagactttcgagctgatgatgcagacgaatttggctacagccgctaaggaggggatcgggtttggcccccagccccgctcacgccagtccctcttcctctgccgggagggtgttttcaactccaaaccccagagaggggttgtagattgggtccagctttgcttcagtgtgtggaaatgtctcgtggggaccccaaggctttctggggcagacccttgtcctctgggatgatgggcactgctatccacagtctctgccagttggttttatttggaggtttgtgggctttttttaaaaaaaaaaagtcctcaaatcaggaagaaacatcaaagactatgtcctagtggagggagtaatcctaacacccaggctggccgccagctggcacctgcctctatcccagactgccctcgtcccagctctctgtccaactgttgattatgtgatttttctgatacgtccattctcaaatgccagtgtgttcacatcttcgctctggccagcccattctgtatttaaagcttttgaggcccaataaaatagtacgtgctgtctgcagc

SEQ ID NO: 363123 - DNA, 2663 bp, Homo sapiens
cgcttgcgcggcgagtagaacgtgtggcggcggcggagatcgcgtctctttcgctccgtgtcccgctgctgctcctgtgagcgcccggcgagtccgtcccgtccaccgtccgcagctggtagccagcctgcccctcgcctcgactccctttcaccaacaccgacacccacattgacacctccagtccggccagccgctccactcgttgcctttgcatctccacacatggcgtcaatggcaacatcacagagctcctcctgaaggaaggtttcgcacgctgtgtggactggtcgattgcagtttacacccggggcgcagaaaagctgagggcggcagagaggtttgccaaagagcgcaggctgagaatatggagagactatgtggctcccacagctaatttggaccaaaaggacaagcagtttgttgccaaggtgatgcaggttctgaatgctgatgccattgttgtgaagctgaactcaggcgattacaagacgattcacctgtccagcatccgaccaccgaggctggagggggagaacacccaggataagaacaagaaactgcgtcccctgtatgacattccttacatgtttgaggcccgggaatttcttcgaaaaaagcttattgggaagaaggtcaatgtgacggtggactacattagaccagccagcccagccacagagacagtgcctgccttttcagagcgtacctgtgccactgtcaccattggaggaataaacattgctgaggctcttgtcagcaaaggtctagccacagtgatcagataccggcaggatgatgaccagagatcatcacactacgatgaactgcttgctgcagaggccagagctattaagaatggcaaaggattgcatagcaagaaggaagtgcctatccaccgtgttgcagatatatctggggatacccaaaaagcaaagcagttcctgccttttcttcagcgggcaggtcgttctgaagctgtggtggaatacgtcttcagtggttctcgtctcaaactctatttgccaaaggaaacttgccttatcaccttcttgcttgcaggcattgaatgccccagaggagcccgaaacctcccaggcttggtgcaggaaggagagcccttcagcgaggaagctacacttttcaccaaggaactggtgctgcagcgagaggtggaggtggaggtggagagcatggacaaggccggcaactttatcggctggctgcacatcgacggtgccaacctgtccgtcctgctggtggagcacgcgctctccaaggtccacttcaccgccgaacgcagctcctactacaagtccctgctgtctgccgaggaggccgcaaagcagaagaaagagaaggtctgggcccactatgaggagcagcccgtggaggaggtgatgccagtgctggaggagaaggagcgatctgctagctacaagcccgtgtttgtgaccgagatcactgatgacctgcacttctacgtgcaggatgtggagaccggcacccagttggagaagctgatggagaacatgcgcaatgacattgccagtcacccccctgtagagggctcctatgccccccgcaggggagagttctgcattgccaaatttgtagatggagaatggtaccgtgcccgagtagagaaagtcgagtctcctgccaaaatacatgtcttctacattgactacggcaacagagaggtcctgccatccacccgcctgggtaccctatcacctgccttcagcactcgggtgctgccagctcaagccacggagtatgccttcgccttcatccaggtgccccaagatgatgatgcccgcacggacgccgtggacagcgtagttcgggatatccagaacactcagtgcctgctcaacgtggaacacctgagtgccggctgcccccatgtcaccctgcagtttgcagattccaagggcgatgtggggctgggcttggtgaaggaagggctggtcatggtggaggtgcgcaaggagaaacagttccagaaagtgatcacagaatacctgaatgcccaagagtcagccaagagcgccaggctgaacctgtggcgctatggagactttcgagctgatgatgcagacgaatttggctacagccgctaaggaggggatcgggtttggcccccagccccgctcacgccagtccctcttcctctgccgggagggtgttttcaactccaaaccccagagaggggttgtagattgggtccagctttgcttcagtgtgtggaaatgtctcgtggggtggcatcggggctgcggggtggggaccccaaggctttctggggcagacccttgtcctctgggatgatgggcactgctatccacagtctctgccagttggttttatttggaggtttgtgggctttttttaaaaaaaaaaagtcctcaaatcaggaagaaacatcaaagactatgtcctagtggagggagtaatcctaacacccaggctggccgccagctggcacctgcctctatcccagactgccctcgtcccagctctctgtccaactgttgattatgtgatttttctgatacgtccattctcaaatgccagtgtgttcacatcttcgctctggccagcccattctgtatttaaagcttttgaggcccaataaaatagtacgtgctgtctgcagc

SEQ ID NO: 363124 - DNA, 2169 bp, Homo sapiens
agggcattagagaaggaaaggaagaatggaaacgccacaggcatcctgctggataagaacaagaaactgcgtcccctgtatgacattccttacatgtttgaggcccgggaatttcttcgaaaaaagcttattgggaagaaggtcaatgtgacggtggactacattagaccagccagcccagccacagagacagtgcctgccttttcagagcgtacctgtgccactgtcaccattggaggaataaacattgctgaggctcttgtcagcaaaggtctagccacagtgatcagataccggcaggatgatgaccagagatcatcacactacgatgaactgcttgctgcagaggccagagctattaagaatggcaaaggattgcatagcaagaaggaagtgcctatccaccgtgttgcagatatatctggggatacccaaaaagcaaagcagttcctgccttttcttcagcgggcaggtcgttctgaagctgtggtggaatacgtcttcagtggttctcgtctcaaactctatttgccaaaggaaacttgccttatcaccttcttgcttgcaggcattgaatgccccagaggagcccgaaacctcccaggcttggtgcaggaaggagagcccttcagcgaggaagctacacttttcaccaaggaactggtgctgcagcgagaggtggaggtggaggtggagagcatggacaaggccggcaactttatcggctggctgcacatcgacggtgccaacctgtccgtcctgctggtggagcacgcgctctccaaggtccacttcaccgccgaacgcagctcctactacaagtccctgctgtctgccgaggaggccgcaaagcagaagaaagagaaggtctgggcccactatgaggagcagcccgtggaggaggtgatgccagtgctggaggagaaggagcgatctgctagctacaagcccgtgtttgtgaccgagatcactgatgacctgcacttctacgtgcaggatgtggagaccggcacccagttggagaagctgatggagaacatgcgcaatgacattgccagtcacccccctgtagagggctcctatgccccccgcaggggagagttctgcattgccaaatttgtagatggagaatggtaccgtgcccgagtagagaaagtcgagtctcctgccaaaatacatgtcttctacattgactacggcaacagagaggtcctgccatccacccgcctgggtaccctatcacctgccttcagcactcgggtgctgccagctcaagccacggagtatgccttcgccttcatccaggtgccccaagatgatgatgcccgcacggacgccgtggacagcgtagttcgggatatccagaacactcagtgcctgctcaacgtggaacacctgagtgccggctgcccccatgtcaccctgcagtttgcagattccaagggcgatgtggggctgggcttggtgaaggaagggctggtcatggtggaggtgcgcaaggagaaacagttccagaaagtgatcacagaatacctgaatgcccaagagtcagccaagagcgccaggctgaacctgtggcgctatggagactttcgagctgatgatgcagacgaatttggctacagccgctaaggaggggatcgggtttggcccccagccccgctcacgccagtccctcttcctctgccgggagggtgttttcaactccaaaccccagagaggggttgtagattgggtccagctttgcttcagtgtgtggaaatgtctcgtggggtggcatcggggctgcggggtggggaccccaaggctttctggggcagacccttgtcctctgggatgatgggcactgctatccacagtctctgccagttggttttatttggaggtttgtgggctttttttaaaaaaaaaaagtcctcaaatcaggaagaaacatcaaagactatgtcctagtggagggagtaatcctaacacccaggctggccgccagctggcacctgcctctatcccagactgccctcgtcccagctctctgtccaactgttgattatgtgatttttctgatacgtccattctcaaatgccagtgtgttcacatcttcgctctggccagcccattctgtatttaaagcttttgaggcccaataaaatagtacgtgctgtctgcagc

SEQ ID NO: 363125 - DNA, 3068 bp, Homo sapiens
cgcttgcgcggcgagtagaacgtgtggcggcggcggagatcgcgtctctttcgctccgtgtcccgctgctgctcctgtgagcgcccggcgagtccgtcccgtccaccgtccgcagctggtagccagcctgcccctcgcctcgactccctttcaccaacaccgacacccacattgacacctccagtccggccagccgctccactcgttgcctttgcatctccacacatggcgtcctccgcgcagagcggcggctcctccgggggacccgcggtccccaccgtgcagcggggcatcatcaagatggtcctctcagggtgcgccatcattgtccgaggtcagcctcgtggtgggcctcctcctgagcggcagatcaacctcagcaacattcgtgctggaaatcttgctcgccgggcagccgccacacaacctgatgcaaaggatacccctgatgagccctgggcatttccagctcgagagttccttcgaaagaagctgattgggaaggaagtctgtttcacgatagaaaacaagactccccaggggcgagagtatggcatgatctaccttggaaaagataccaatggggaaaacattgcagaatcactggttgcagagggcttagccacccggagagaaggcatgagagctaataatcctgagcagaaccggctttcagaatgtgaagaacaagcaaaggcagccaagaaagggatgtggagtgaggggaacggttcacatactatccgggatctcaagtataccattgaaaacccaaggcactttgtggactcacaccaccagaagcctgttaatgctatcatcgagcatgtgcgggacggcagtgtggtcagggccctgctcctcccagattactacctggttacagtcatgctgtcaggcatcaagtgcccaacttttcgacgggaagcagatggcagtgaaactccagagccttttgctgcagaagccaaatttttcactgagtcgcgactgcttcagagagatgttcagatcattctggagagctgccacaaccagaacattctgggtaccatccttcatccaaatggcaacatcacagagctcctcctgaaggaaggtttcgcacgctgtgtggactggtcgattgcagtttacacccggggcgcagaaaagctgagggcggcagagaggtttgccaaagagcgcaggctgagaatatggagagactatgtggctcccacagctaatttggaccaaaaggacaagcagtttgttgccaaggtgatgcaggttctgaatgctgatgccattgttgtgaagctgaactcaggcgattacaagacgattcacctgtccagcatccgaccaccgaggctggagggggagaacacccaggataagaacaagaaactgcgtcccctgtatgacattccttacatgtttgaggcccgggaatttcttcgaaaaaagcttattgggaagaaggtcaatgtgacggtggactacattagaccagccagcccagccacagagacagtgcctgccttttcagagcgtacctgtgccactgtcaccattggaggaataaacattgctgaggctcttgtcagcaaaggtctagccacagtgatcagataccggcaggatgatgaccagagatcatcacactacgatgaactgcttgctgcagaggccagagctattaagaatggcaaaggattgcatagcaagaaggaagtgcctatccaccgtgttgcagatatatctggggatacccaaaaagcaaagcagttcctgccttttcttcagcgggcaggtcgttctgaagctgtggtggaatacgtcttcagtggttctcgtctcaaactctatttgccaaaggaaacttgccttatcaccttcttgcttgcaggcattgaatgccccagaggagcccgaaacctcccaggcttggtgcaggaaggagagcccttcagcgaggaagctacacttttcaccaaggaactggtgctgcagcgagaggtggaggtggaggtggagagcatggacaaggccggcaactttatcggctggctgcacatcgacggtgccaacctgtccgtcctgctggtggagcacgcgctctccaaggtccacttcaccgccgaacgcagctcctactacaagtccctgctgtctgccgaggaggccgcaaagcagaagaaagagaaggtctgggcccactatgaggagcagcccgtggaggaggtgatgccagtgctggaggagaaggagcgatctgctagctacaagcccgtgtttgtgaccgagatcactgatgacctgcacttctacgtgcaggatgtggagaccggcacccagttggagaagctgatggagaacatgcgcaatgacattgccagtcacccccctgtagagggctcctatgccccccgcaggggagagttctgcattgccaaatttgtagatggagaatggtaccgtgcccgagtagagaaagtcgagtctcctgccaaaatacatgtcttctacattgactacggcaacagagaggtcctgccatccacccgcctgggtaccctatcacctgccttcagcactcgggtgctgccagctcaagccacggagtatgccttcgccttcatccaggtgccccaagatgatgatgcccgcacggacgccgtggacagcgtagttcgggatatccagaacactcagtgcctgctcaacgtggaacacctgagtgccggctgcccccatgtcaccctgcagtttgcagattccaagggcgatgtggggctgggcttggtgaaggaagggctggtcatggtggaggtgcgcaagaagaaacatcaaagactatgtcctagtggagggagtaatcctaacacccaggctggccgccagctggcacctgcctctatcccagactgccctcgtcccagctctctgtccaactgttgattatgtgatttttctgatacgtccattctcaaatgccagtgtgttcacatcttcgctctggccagcccattctgtatttaaagcttttgaggcccaataaaatagtacgtgctgtctgcagc

SEQ ID NO: 363126 - DNA, 2291 bp, Homo sapiens
gatcgctgtctctctttttctctaagaatccgtttgatgggaagcatgaatcttagttactatgaatactgttttcatcccagcctacctcactgcttctgaatgagaggagcccctttggctgctctgaaaactcttgaaatacttgatggcttgttatgttttcattatctaatgtgcattaatttaaataaaatagctctgttgttagaagaagagtcaaaaaggaaaagcttggctgggtgcagactgcttgtgtcacagaagtcaggaaagtttgcagaacttggtgtcctcagagggagttttcagttctgctggctgggctgaaaacctgaaactctaaaatccagtgactattcccctagcatatacgatgtgatattttgatgctcacttactctatcacctgtttaattagcttgagagactgaaaggatttgaaggcccttcgcatctatgtgactgagttctgagagtcgaaatgtccatgatttggcactctggaggatagagcacacagactttgtgttgatgcaccaaaaaaggatacccaaaaagcaaagcagttcctgccttttcttcagcgggcaggtcgttctgaagctgtggtggaatacgtcttcagtggttctcgtctcaaactctatttgccaaaggaaacttgccttatcaccttcttgcttgcaggcattgaatgccccagaggagcccgaaacctcccaggcttggtgcaggaaggagagcccttcagcgaggaagctacacttttcaccaaggaactggtgctgcagcgagaggtggaggtggaggtggagagcatggacaaggccggcaactttatcggctggctgcacatcgacggtgccaacctgtccgtcctgctggtggagcacgcgctctccaaggtccacttcaccgccgaacgcagctcctactacaagtccctgctgtctgccgaggaggccgcaaagcagaagaaagagaaggtctgggcccactatgaggagcagcccgtggaggaggtgatgccagtgctggaggagaaggagcgatctgctagctacaagcccgtgtttgtgaccgagatcactgatgacctgcacttctacgtgcaggatgtggagaccggcacccagttggagaagctgatggagaacatgcgcaatgacattgccagtcacccccctgtagagggctcctatgccccccgcaggggagagttctgcattgccaaatttgtagatggagaatggtaccgtgcccgagtagagaaagtcgagtctcctgccaaaatacatgtcttctacattgactacggcaacagagaggtcctgccatccacccgcctgggtaccctatcacctgccttcagcactcgggtgctgccagctcaagccacggagtatgccttcgccttcatccaggtgccccaagatgatgatgcccgcacggacgccgtggacagcgtagttcgggatatccagaacactcagtgcctgctcaacgtggaacacctgagtgccggctgcccccatgtcaccctgcagtttgcagattccaagggcgatgtggggctgggcttggtgaaggaagggctggtcatggtggaggtgcgcaaggagaaacagttccagaaagtgatcacagaatacctgaatgcccaagagtcagccaagagcgccaggctgaacctgtggcgctatggagactttcgagctgatgatgcagacgaatttggctacagccgctaaggaggggatcgggtttggcccccagccccgctcacgccagtccctcttcctctgccgggagggtgttttcaactccaaaccccagagaggggttgtagattgggtccagctttgcttcagtgtgtggaaatgtctcgtggggtggcatcggggctgcggggtggggaccccaaggctttctggggcagacccttgtcctctgggatgatgggcactgctatccacagtctctgccagttggttttatttggaggtttgtgggctttttttaaaaaaaaaaagtcctcaaatcaggaagaaacatcaaagactatgtcctagtggagggagtaatcctaacacccaggctggccgccagctggcacctgcctctatcccagactgccctcgtcccagctctctgtccaactgttgattatgtgatttttctgatacgtccattctcaaatgccagtgtgttcacatcttcgctctggccagcccattctgtatttaaagcttttgaggcccaataaaatagtacgtgctgtctgcagc

SEQ ID NO: 363127 - DNA, 2717 bp, Homo sapiens
cgcttgcgcggcgagtagaacgtgtggcggcggcggagatcgcgtctctttcgctccgtgtcccgctgctgctcctgtgagcgcccggcgagtccgtcccgtccaccgtccgcagctggtagccagcctgcccctcgcctcgactccctttcaccaacaccgacacccacattgacacctccagtccggccagccgctccactcgttgcctttgcatctccacacatggcgtcctccgcgcagagcggcggctcctccgggggacccgcggtccccaccgtgcagcggggcatcatcaagatggtcctctcagggtgcgccatcattgtccgaggtcagcctcgtggtgggcctcctcctgagcggcagatcaacctcagcaacattcgtgctggaaatcttgctcgccgggcagccgccacacaacctgatgcaaaggatacccctgatgagccctgggcatttccagctcgagagttccttcgaaagaagctgattgggaaggaagtctgtttcacgatagaaaacaagactccccaggggcgagagtatggcatgatctaccttggaaaagataccaatggggaaaacattgcagaatcactggttgcagagggcttagccacccggagagaaggcatgagagctaataatcctgagcagaaccggctttcagaatgtgaagaacaagcaaaggcagccaagaaagggatgtggagtgaggggaacggttcacatactatccgggatctcaagtataccattgaaaacccaaggcactttgtggactcacaccaccagaagcctgttaatgctatcatcgagcatgtgcgggacggcagtgtggtcagggccctgctcctcccagattactacctggttacagtcatgctgtcaggcatcaagtgcccaacttttcgacgggaagcagatggcagtgaaactccagagccttttgctgcagaagccaaatttttcactgagtcgcgactgcttcagagagatgttcagatcattctggagagctgccacaaccagaacattctgggtaccatccttcatccaaatggcaacatcacagagctcctcctgaaggaaggtttcgcacgctgtgtggactggtcgattgcagtttacacccggggcgcagaaaagctgagggcggcagagaggtttgccaaagagcgcaggctgagaatatggagagactatgtggctcccacagctaatttggaccaaaaggacaagcagtttgttgccaaggtgatgcaggttctgaatgctgatgccattgttgtgaagctgaactcaggcgattacaagacgattcacctgtccagcatccgaccaccgaggctggagggggagaacacccaggataagaacaagaaactgcgtcccctgtatgacattccttacatgtttgaggcccgggaatttcttcgaaaaaagcttattgggaagaaggtcaatgtgacggtggactacattagaccagccagcccagccacagagacagtgcctgccttttcagagcgtacctgtgccactgtcaccattggaggaataaacattgctgaggctcttgtcagcaaaggtctagccacagtgatcagataccggcaggatgatgaccagagatcatcacactacgatgaactgcttgctgcagaggccagagctattaagaatggcaaaggattgcatagcaagaaggaagtgcctatccaccgtgttgcagatatatctggggatacccaaaaagcaaagcagttcctgccttttcttcagcgggcaggtcgttctgaagctgtggtggaatacgtcttcagtggttctcgtctcaaactctatttgccaaaggaaacttgccttatcaccttcttgcttgcaggcattgaatgccccagaggagcccgaaacctcccaggcttggtgcaggaaggagagcccttcagcgaggaagctacacttttcaccaaggaactggtgctgcagcgagaggtggaggtggaggtggagagcatggacaaggccggcaactttatcggctggctgcacatcgacggtgccaacctgtccgtcctgctggtggagcacgcgctctccaaggtccacttcaccgccgaacgcagctcctactacaagtccctgctgtctgccgaggaggccgcaaagcagaagaaagagaaggtctgggcccactatgaggagcagcccgtggaggaggtgatgccagtgctggaggagaaggagcgatctgctagctacaagcccgtgtttgtgaccgagatcactgatgacctgcacttctacgtgcaggatgtggagaccggcacccagttggagaagctgatggagaacatgcgcaatgacattgccagtcacccccctgtagagggctcctatgccccccgcaggggagagttctgcattgccaaatttgtagatggagaatggtaccggccgagtagagaaagtcgagtctcctgccaaaatagagtgtcctgctaaccctggaataacggcacagagaggtactgcgcatcaccccgtcagggtacctatagctggctcaaactcggggctggaagtcagccaccgaagaggctccgctcatcagggcccaaacagaagtccgaacgaaccgggaagagagccgggaacagaaaccaggccgcacacgggaaccgaggcgggggccggaacccgtggat

SEQ ID NO: 363128 - DNA, 1382 bp, Homo sapiens
cggacgcgtgggtcgacccacgcgtccgctacaagtccctgctgtctgccgaggaggccgcaaagcagaagaaagagaaggtctgggcccactatgaggagcagcccgtggaggaggtgatgccagtgctggaggagaaggagcgatctgctagctacaagcccgtgtttgtgaccgagatcactgatgacctgcacttctacgtgcaggatgtggagaccggcacccagttggagaagctgatggagaacatgcgcaatgacattgccagtcacccccctgtagagggctcctatgccccccgcaggggagagttctgcattgccaaatttgtagatggagaatggtaccgtgcccgagtagagaaagtcgagtctcctgccaaaatacatgtcttctacattgactacggcaacagagaggtcctgccatccacccgcctgggtaccctatcacctgccttcagcactcgggtgctgccagctcaagccacggagtatgccttcgccttcatccaggtgccccaagatgatgatgcccgcacggacgccgtggacagcgtagttcgggatatccagaacactcagtgcctgctcaacgtggaacacctgagtgccggctgcccccatgtcaccctgcagtttgcagattccaagggcgatgtggggctgggcttggtgaaggaagggctggtcatggtggaggtgcgcaaggagaaacagttccagaaagtgatcacagaatacctgaatgcccaagagtcagccaagagcgccaggctgaacctgtggcgctatggagactttcgagctgatgatgcagacgaatttggctacagccgctaaggaggggatcgggtttggcccccagccccgctcacgccagtccctcttcctctgccgggagggtgttttcaactccaaaccccagagaggggttgtagattgggtccagctttgcttcagtgtgtggaaatgtctcgtggggtggcatcggggctgcggggtggggaccccaaggctttctggggcagacccttgtcctctgggatgatgggcactgctatccacagtctctgccagttggttttatttggaggtttgtgggctttttttaaaaaaaaaaagtcctcaaatcaggaagaaacatcaaagactatgtcctagtggagggagtaatcctaacacccaggctggccgccagctggcacctgcctctatcccagactgccctcgtcccagctctctgtccaactgttgattatgtgatttttctgatacgtccattctcaaatgccagtgtgttcacatcttcgctctggccagcccattctgtatttaaagcttttgaggcccaataaaatagtacgtgctgtctgcagc

SEQ ID NO: 363129 - DNA, 2350 bp, Homo sapiens
cgcttgcgcggcgagtagaacgtgtggcggcggcggagatcgcgtctctttcgctccgtgtcccgctgctgctcctgtgagcgcccggcgagtccgtcccgtccaccgtccgcagctggtagccagcctgcccctcgcctcgactccctttcaccaacaccgacacccacattgacacctccagtccggccagccgctccactcgttgcctttgcatctccacacatggcgtcctccgcgcagagcggcggctcctccgggggacccgcggtccccaccgtgcagcggggcatcatcaagatggtcctctcagggtgcgccatcattgtccgaggtcagcctcgtggtgggcctcctcctgagcggcagatcaacctcagcaacattcgtgctggaaatcttgctcgccgggcagccgccacacaacctgatgcaaaggatacccctgatgagccctgggcatttccagctcgagagttccttcgaaagaagctgattgggaaggaagtctgtttcacgatagaaaacaagactccccaggggcgagagtatggcatgatctaccttggaaaagataccaatggggaaaacattgcagaatcactggttgcagagggcttagccacccggagagaaggcatgagagctaataatcctgagcagaaccggctttcagaatgtgaagaacaagcaaaggcagccaagaaagggatgtggagtgaggggaacggttcacatactatccgggatctcaagtataccattgaaaacccaaggcactttgtggactcacaccaccagaagcctgttaatgctatcatcgagcatgtgcgggacggcagtgtggtcagggccctgctcctcccagattactacctggttacagtcatgctgtcaggcatcaagtgcccaacttttcgacgggaagcagatggcagtgaaactccagagccttttgctgcagaagccaaatttttcactgagtcgcgactgcttcagagagatgttcagatcattctggagagctgccacaaccagaacattctgggtaccatccttcatccaaatggcaacatcacagagctcctcctgaaggaaggtttcgcacgctgtgtggactggtcgattgcagtttacacccggggcgcagaaaagctgagggcggcagagaggtttgccaaagagcgcaggctgagaatatggagagactatgtggctcccacagctaatttggaccaaaaggacaagcagtttgttgccaaggtgatgcaggttctgaatgctgatgccattgttgtgaagctgaactcaggcgattacaagacgattcacctgtccagcatccgaccaccgaggctggagggggagaacacccaggataagaacaagaaactgcgtcccctgtatgacattccttacatgtttgaggcccgggaatttcttcgaaaaaagcttattgggaagaaggtcaatgtgacggtggactacattagaccagccagcccagccacagagacagtgcctgccttttcagagcgtacctgtgccactgtcaccattggaggaataaacattgctgaggctcttgtcagcaaaggtctagccacagtgatcagataccggcaggatgatgaccagagatcatcacactacgatgaactgcttgctgcagaggccagagctattaagaatggcaaaggattgcatagcaagaaggaagtgcctatccaccgtgttgcagatatatctggggatacccaaaaagcaaagcagttcctgccttttcttcagcgggcaggtcgttctgaagctgtggtggaatacgtcttcagtggttctcgtctcaaactctatttgccaaaggaaacttgccttatcaccttcttgcttgcaggcattgaatgccccagaggagcccgaaacctcccaggcttggtgcaggaaggagagcccttcagcgaggaagctacacttttcaccaaggaactggtgctgcagcgagaggtggaggtggaggtggagagcatggacaaggccggcaactttatcggctggctgcacatcgacggtgccaacctgtccgtcctgctggtggagcacgcgctctccaaggtccacttcaccgccgaacgcagctcctactacaagtccctgctgtctgccgaggaggccgcaaagcagaagaaagagaaggtgataaggcaagtatcctttggcacatagagtttgagacgagaaccactgaagacgtattccaccacagcttcagaacgaccttgcccgctgaagaaaaggcaggaactgctttgctttctgggtatccccagatatatctgaccgactatcgtga

SEQ ID NO: 363130 - DNA, 1638 bp, Homo sapiens
cgcttgcgcggcgagtagaacgtgtggcggcggcggagatcgcgtctctttcgctccgtgtcccgctgctgctcctgtgagcgcccggcgagtccgtcccgtccaccgtccgcagctggtagccagcctgcccctcgcctcgactccctttcaccaacaccgacacccacattgacacctccagtccggccagccgctccactcgttgcctttgcatctccacacatggcgtcctccgcgcagagcggcggctcctccgggggacccgcggtccccaccgtgcagcggggcatcatcaagatggtcctctcagggtgcgccatcattgtccgaggtcagcctcgtggtgggcctcctcctgagcggcagatcaacctcagcaacattcgtgctggaaatcttgctcgccgggcagccgccacacaacctgatgcaaaggatacccctgatgagccctgggcatttccagctcgagagttccttcgaaagaagctgattgggaaggaagtctgtttcacgatagaaaacaagactccccaggggcgagagtatggcatgatctaccttggaaaagataccaatggggaaaacattgcagaatcactggttgcagagggcttagccacccggagagaaggcatgagagctaataatcctgagcagaaccggctttcagaatgtgaagaacaagcaaaggcagccaagaaagggatgtggagtgaggggaacggttcacatactatccgggatctcaagtataccattgaaaacccaaggcactttgtggactcacaccaccagaagcctgttaatgctatcatcgagcatgtgcgggacggcagtgtggtcagggccctgctcctcccagattactacctggttacagtcatgctgtcaggcatcaagtgcccaacttttcgacgggaagcagatggcagtgaaactccagagccttttgctgcagaagccaaatttttcactgagtcgcgactgcttcagagagatgttcagatcattctggagagctgccacaaccagaacattctgggtaccatccttcatccaaatggcaacatcacagagctcctcctgaaggaaggtttcgcacgctgtgtggactggtcgattgcagtttacacccggggcgcagaaaagctgagggcggcagagaggtttgccaaagagcgcaggctgagaatatggagagactatgtggctcccacagctaatttggaccaaaaggacaagcagtttgttgccaaggtgatgcaggttctgaatgctgatgccattgttgtgaagctgaactcaggcgattacaagacgattcacctgtccagcatccgaccaccgaggctggagggggagaacacccaggataagaacaagaaactgcgtcccctgtatgacattccttacatgtttgaggcccgggaatttcttcgaaaaaagcttattgggaagaaggtcaatgtgacggtggactacattagaccagccagcccagccacagagacagtgcctgccttttcagagcgtacctgtgccactgtcaccattggaggaatgcggcccccagaatcacagcagattcagagagactcccagataattttattcttttatttgatgattgga

SEQ ID NO: 363131 - DNA, 850 bp, Homo sapiens
cgcttgcgcggcgagtagaacgtgtggcggcggcggagatcgcgtctctttcgctccgtgtcccgctgctgctcctgtgagcgcccggcgagtccgtcccgtccaccgtccgcagctggtagccagcctgcccctcgcctcgactccctttcaccaacaccgacacccacattgacacctccagtccggccagccgctccactcgttgcctttgcatctccacacatggcgtcctccgcgcagagcggcggctcctccgggggacccgcggtccccaccgtgcagcggggcatcatcaagatggtcctctcagggtgcgccatcattgtccgaggtcagcctcgtggtgggcctcctcctgagcggcagatcaacctcagcaacattcgtgctggaaatcttgctcgccgggcagccgccacacaacctgatgcaaaggatacccctgatgagccctgggcatttccagctcgagagttccttcgaaagaagctgattgggaaggaagtctgtttcacgatagaaaacaagactccccaggggcgagagtatggcatgatctaccttggaaaagataccaatggggaaaacattgcagaacattctgggtaccatccttcatccaaatggcaacatcacagagctcctcctgaaggaaggtttcgcacgctgtgtggactggtcgattgcagtttacacccggggcgcagaaaagctgagggcggcagagaggtttgccaaagagcgcaggctgagaatatggagagactatgtggctcccacagctaatttggaccaaaaggacaagcagtttgttgccaaggtgagtcattctcagcatcttgatatg

SEQ ID NO: 363132 - DNA, 387 bp, Homo sapiens
attggacaggcttgagcaagggagagctctggcgcttacctaagcattctgcagggtcctgctggctgatcatttgagggcaactctgaccactccctttcttctctcgtccctccagatcacagaatacctgaatgcccaagagtcagccaagagcgccagggtgagttcttaccttgggagcccccagagggtaccgagttgaggggtttggccctctgagttccggtgggtcccgtatccctgaagagctattgtctgttttttcttacagctgaacctgtggcgctatggagactttcgagctgatgatgcagacgaatttggctacagccgctaaggaggggatcgggtttggcccccagccccgctcacgccagtccctct

SEQ ID NO: 363133 - DNA, 492 bp, Homo sapiens
ttttaacctgctttttagaaatcagagaattcaaaattgaattaaaatattattattttttttaattttatagctatgacttcacacctatggattcttctgcagtttatgtgttaagtagtatggctcgccagcgtcgtgcatctttgtcttgtggaggacctggtggtcaagactttgcaagatctggattcagtaaaaactgtggctcacctggatcatcacagctctcttccaattctttgtatgctaaagctgtcaaaaaccacagctcagggactgtgagtgccacttctcctaataagtgcaaaagaccaatgaatgccttcatgctttttgccaaaaaatacagagttgaatatactcagatgtatccagggaaagataacaggtaaaaatagtgataattctgattacaataaatgagtaacacttcaatacggttcatggtaactggaatagttaagtaaacttattctttaatagctttta

SEQ ID NO: 363134 - DNA, 428 bp, Homo sapiens
atggttgaaactgttgctttattttagatcatctcctgtacacatcatagccactagcaaaagtttacattcctatgcacgccctccaccagtgtcctcttcttcgaagagtgaaccagccttccctcatcaccattggaaggaggaaacaccagtaagacacgaaagggtaagtttatttatgaggttaaacttttacaaagtttgtacaacagttgaagtacattaacattcctcataggaagtagtctcactgttctgttagtgatctggatttgattttatatacagctctgctatgtgttaggaaagcttattattaatgggaatgtgcgtataactaaagcttccaaaaactttgttttgtgtgtgtcttttttttctttttttttcttttttttttttttttagcaaattctcccacagcc

SEQ ID NO: 363135 - DNA, 1160 bp, Homo sapiens
agctcggcgtggtggcatgtgcctgtaatcccccctacttaggtggctgaggcgggagaatcgcttgaacccaggaggtggagtttgcagtgagccgagatcacgccactgcactgcagtctgggtgacagagtgtgactatgtctcaaaaaaaaaacaaaacaacattgtcatgtctctgatttattttaggtttgtgtactgcccaaattgcatggcttgacatcatttcttaatgtcgtttttattttaagtcagagcaccataacatggtgtgggaagtgaagacaaatcagatgcctaatgcagtacagaaactcctgttggtgatggacaagagagcctcaggaatgaatgactcattggagttgctgcagtgtaatgagaatttgccatcttcacctggatataactcctgtgatgaacacatggagcttggtaagcaaaattaaaagttatatagaaatctcactaagattcagataaatttttctacttagcccgcttctccaccaaccttgactggctagaaagggatatgaagtatttgtatattaggaattttcagcattcttttattgcttttaaaatactacttaaaaccaacatgagttgggctatttatggttattgtagacactcatttacagattgttaaattaaactactttactttgtgtgtaaagattggaccccactcgtggcttttcgaaagatgctacttttgaaatatacttgagagagctcagtaaaatatgcttagccactcttcgtggcagatttgctggtatgatgtggaaattacagtggacccttgaaacttgaggatctgacatttatggttgttactattgctaaactactcctggagatatgtgacctttagaaatgtgtaagtttgttgaggtgtgtttttgaattgtattgcttcaaggctggtgttcaggagtatggagctaatgagtcaccttggcttgctgcccagcttttcagcttggctttgcccccatttaatatatgggggtttccttcatgtttataaaaaccctggggagaagatacagctgtcttaattttacaaatgatgaaatggaggagattatgtactatggtaatgtttggaaatttagagatcttaagctcttgggacacataacctg

SEQ ID NO: 363136 - DNA, 4765 bp, Homo sapiens
agggggaagacgaagcttgaaagacttggtaatggcgacgggtttggtaagtaggaaagtttcggttgaggagtaagagctgccgcgggagcagtaacccgcgcgggggaggccgacgtcggtcggagagggggtacgagagctgctggtggtgttgtcgtggccggagcggcccgcgcctgggctgccggcacttcgcggcagtcagagcaccataacatggtgtgggaagtgaagacaaatcagatgcctaatgcagtacagaaactcctgttggtgatggacaagagagcctcaggaatgaatgactcattggagttgctgcagtgtaatgagaatttgccatcttcacctggatataactcctgtgatgaacacatggagcttgatgaccttcctgaacttcaggcagttcaaagtgatcctacccaatctggcatgtaccagctgagttcagatgtttcacatcaagaatacccaagatcatcttggaaccaaaatacctcagacataccagaaactacttaccgtgaaaatgaggtggactggctaacagaattggcaaatatcgcgaccagtccacaaagtccactgatgcagtgctcattttacaatagatcatctcctgtacacatcatagccactagcaaaagtttacattcctatgcacgccctccaccagtgtcctcttcttcgaagagtgaaccagccttccctcatcaccattggaaggaggaaacaccagtaagacacgaaagggcaaatagtgagtcagaatctggcattttctgcatgtcctccctgtcagatgatgatgatttgggatggtgcaattcctggccttcaactgtctggcactgttttttgaaaggcacacgactgtgctttcataagggaagcaataaggaatggcaagatgttgaagattttgctagagctgaaggctgtgataatgaggaagatcttcaaatgggcattcacaagggctatggttctgatggtctaaagttgttatcacatgaagaaagtgtatcatttggcgagtctgtactgaagttgacttttgatcctggtacagtagaagatggtttacttaccgtagagtgtaagctggaccaccctttctatgttaaaaataaaggttggtcatcattttatccaagcttgactgtggtacagcatggcattccatgttgtgaagttcatattggcgatgtatgtctacctcctggacaccccgatgccattaattttgatgattcaggtgtttttgatacatttaaaagctatgacttcacacctatggattcttctgcagtttatgtgttaagtagtatggctcgccagcgtcgtgcatctttgtcttgtggaggacctggtggtcaagactttgcaagatctggattcagtaaaaactgtggctcacctggatcatcacagctctcttccaattctttgtatgctaaagctgtcaaaaaccacagctcagggactgtgagtgccacttctcctaataagtgcaaaagaccaatgaatgccttcatgctttttgccaaaaaatacagagttgaatatactcagatgtatccagggaaagataacagagccataagtgtgatccttggtgacaggtggaagaaaatgaagaatgaagagagaagaatgtacacattagaagcaaaggctttggctgaagaacagaaacgtttaaatcctgactgttggaagaggaaaagaaccaattcagtatgtttcaataaatagtgtttaaaattatcttgccttatccgtgcaggtgtactggcatgttggagcagttgttacaacctttaagaggttgtgttgatgctgtctctagcatttttatacttcaaaacctaataatgttatcacatcatcatataaagactgcctttcctcaagggtcatttactctcatagcatggcaagtcgaaatctcaggcaaacttcaaaagaatgtttgttctaaacattgagttggaaaaataattttggaatgcagtgtttctagttgggttgaaagataagcattattaatccattaatatcacagtagaaaatttctctaataattttgggattgtctcaacagctttttttccttaattggtgagggaccaataaggctggaggtgttggggtatgttagctgtcattcatggggacttgtgccattggcacagaatttctagattgaaaaatttcaaggaggagaagaaataggcccaggaatggtggcaaacaagtctatatgataagctatcttggatagacttgtttcttataacttttccattactaaactagcatcttttaggttcagcgtttttagattaattgcaaaaaaattacatgtgatatagtggggtcaatttgaagtatcattgaaagatgaagggaagatatcaatatttttatagtaggagggctggccaaagatgttttaaattcattgtgtacatgtgcctgtttcttagtaaaatgcaggtcatatctgtttaaatttttcacaatttctttaaaaatagtggtcagtcagtagtcagatgagagggtggctgaactgaattttggcagttcttggttaatttagaatttcatgtgttcggacttttcctgtatcccttttctgttcatcctagtcaatgtcttatcattgcatacattttctggatgcttgagccatcagatatcagctagctttttaaaatcacctttaagaaagcagtattttctaatagtaaatttataaacatcttatacatcttagctttcatatataggattactatgtattgatttgtaaacattcactgagtttaattttatttccacagggctcacaacaacattaaaccaggatgcttatgttcttaagtctatatttgcatatacattgactcttgatggaaagacttaagaagatcaaggtctcaccatttgtcctcaattcgtgtgaccataagatactgatagcattgagtcttgaaatgatttaataatatgagtgaggatttgctttctccattagagcattaagctaaaactatcaacattttaaaccaaattgccttatttttcttccaaacttcatatatgtctatcaggtaataataggcttgaaaattgatatcctgtggtgctaaagtacagtagaaagagaggagaagtgtatacatgttttattttaaattgtacgaaaggggaatttaaaaaatatgtaactgctgtttatacattggctccttactgcttattaatctgtattgtacacatgatgaaatgaagcagaagctgggagtcggcctttcctctagtaaccaccacatggctcagcatctgtgccaaacataggcgctcctagtctggtcagtgccaagaggctaccagaacatggggcaggtggctggtgttggtgtcccagcctaagagccacctgctgcagttaccatggcatgctgagttgatgcaccaggtggcagcagccatccgttattatttccaatggagacctagcccaggccaaggtaaagttagttaatagcattgggatatagtcactgtaatggtgctattaacaaacagtcaacaccattgtattttttaacttcgtgttctgtatctcctcagccatgtatcttaaatatattttgtcatcataatctttatggtgggggcagactttgcacttactgcagtgcaacacttgcactttaattttcctccaactgtctaaaattagagcaaatacattggcaatacagctgcttttgctctgagctacaatcatggcttttcatgttacttaccaagtggtgtttctggttaggaatcacagctgtaaaattgatttcagttcatcacacttcttcatgatgttgcccctaaattttgcacactatattcttgtatattatttcaaataaatggaaaaaaaagttgcttatctctgacgtctactgattgattgattgattgattaatcttggctgaattttatttatgagttctcagaataacaggttcaggagatgagatggaaaacataaggcaaattcctaacactgctaattaggaggctgctgataggattttaaaaattaaaaacaatgttaatagtggaacaagagccatcagaaaataaggacttagattatctactatttatagagaattgctatacaataaaaatttttatttttcacgtggcatttttgttacacggttaaacagcccaaaggtctgcttttaataacatgacaaagtgtaacaaaagccttgctttatttaaagatccagtatgacatacttaaaaaggccatttaaccttgtatcttagcttgggatgtgccagtggttcctcaactttgttgtctattggaatcattttggggatttttttttttttaatagtggtgtctgtcaggctcccactcctagacatgttaattaatgtggagtaagtggggactttgggtttatgtacccataggaggacttggttatggatgggaaagacattttagccttgtacaaaaatctgaaagaggaaaacatctttctggaaaaatcaggtccatggaattgaaaggtggtgataactcaacattttttatgctaaagtataagtgctaaagaggtaaataaacgtcgataggaaataccgaacaatcaattcattcttaaaatagtagatagtagcagtcttttggagtatgtgtttaactgccaactatgaatgggt

SEQ ID NO: 363137 - DNA, 3860 bp, Homo sapiens
agctcggcgtggtggcatgtgcctgtaatcccccctacttaggtggctgaggcgggagaatcgcttgaacccaggaggtggagtttgcagtgagccgagatcacgccactgcactgcagtctgggtgacagagtgtgactatgtctcaaaaaaaaaacaaaacaacattgtcatgtctctgatttattttaggtttgtgtactgcccaaattgcatggcttgacatcatttcttaatgtcgtttttattttaagtcagagcaccataacatggtgtgggaagtgaagacaaatcagatgcctaatgcagtacagaaactcctgttggtgatggacaagagagcctcaggaatgaatgactcattggagttgctgcagtgtaatgagaatttgccatcttcacctggatataactcctgtgatgaacacatggagcttgatgaccttcctgaacttcaggcagttcaaagtgatcctacccaatctggcatgtaccagctgagttcagatgtttcacatcaagaatacccaagatcatcttggaaccaaaatacctcagacataccagaaactacttaccgtgaaaatgaggtggactggctaacagaattggcaaatatcgcgaccagtccacaaagtccactgatgcagtgctcattttacaatagatcatctcctgtacacatcatagccactagcaaaagtttacattcctatgcacgccctccaccagtgtcctcttcttcgaagagtgaaccagccttccctcatcaccattggaaggaggaaacaccagtaagacacgaaagggcaaatagtgagtcagaatctggcattttctgcatgtcctccctgtcagatgatgatgatttgggatggtgcaattcctggccttcaactgtctggcactgttttttgaaaggcacacgactgtgctttcataagggaagcaataaggaatggcaagatgttgaagattttgctagagctgaaggctgtgataatgaggaagatcttcaaatgggcattcacaagggctatggttctgatggtctaaagttgttatcacatgaagaaagtgtatcatttggcgagtctgtactgaagttgacttttgatcctggtacagtagaagatggtttacttaccgtagagtgtaagctggaccaccctttctatgttaaaaataaaggttggtcatcattttatccaagcttgactgtggtacagcatggcattccatgttgtgaagttcatattggcgatgtatgtctacctcctggacaccccgatgccattaattttgatgattcaggtgtttttgatacatttaaaagctatgacttcacacctatggattcttctgcagtttatgtgttaagtagtatggctcgccagcgtcgtgcatctttgtcttgtggaggacctggtggtcaagactttgcaagatctggattcagtaaaaactgtggctcacctggatcatcacagctctcttccaattctttgtatgctaaagctgtcaaaaaccacagctcagggactgtgagtgccacttctcctaataagtgcaaaagaccaatgaatgccttcatgctttttgccaaaaaatacagagttgaatatactcagatgtatccagggaaagataacagagccataagtgtgatccttggtgacaggtggaagaaaatgaagaatgaagagagaagaatgtacacattagaagcaaaggctttggctgaagaacagaaacgtttaaatcctgactgttggaagaggaaaagaaccaattcaggctcacaacaacattaaaccaggatgcttatgttcttaagtctatatttgcatatacattgactcttgatggaaagacttaagaagatcaaggtctcaccatttgtcctcaattcgtgtgaccataagatactgatagcattgagtcttgaaatgatttaataatatgagtgaggatttgctttctccattagagcattaagctaaaactatcaacattttaaaccaaattgccttatttttcttccaaacttcatatatgtctatcaggtaataataggcttgaaaattgatatcctgtggtgctaaagtacagtagaaagagaggagaagtgtatacatgttttattttaaattgtacgaaaggggaatttaaaaaatatgtaactgctgtttatacattggctccttactgcttattaatctgtattgtacacatgatgaaatgaagcagaagctgggagtcggcctttcctctagtaaccaccacatggctcagcatctgtgccaaacataggcgctcctagtctggtcagtgccaagaggctaccagaacatggggcaggtggctggtgttggtgtcccagcctaagagccacctgctgcagttaccatggcatgctgagttgatgcaccaggtggcagcagccatccgttattatttccaatggagacctagcccaggccaaggtaaagttagttaatagcattgggatatagtcactgtaatggtgctattaacaaacagtcaacaccattgtattttttaacttcgtgttctgtatctcctcagccatgtatcttaaatatattttgtcatcataatctttatggtgggggcagactttgcacttactgcagtgcaacacttgcactttaattttcctccaactgtctaaaattagagcaaatacattggcaatacagctgcttttgctctgagctacaatcatggcttttcatgttacttaccaagtggtgtttctggttaggaatcacagctgtaaaattgatttcagttcatcacacttcttcatgatgttgcccctaaattttgcacactatattcttgtatattatttcaaataaatggaaaaaaaagttgcttatctctgacgtctactgattgattgattgattgattaatcttggctgaattttatttatgagttctcagaataacaggttcaggagatgagatggaaaacataaggcaaattcctaacactgctaattaggaggctgctgataggattttaaaaattaaaaacaatgttaatagtggaacaagagccatcagaaaataaggacttagattatctactatttatagagaattgctatacaataaaaatttttatttttcacgtggcatttttgttacacggttaaacagcccaaaggtctgcttttaataacatgacaaagtgtaacaaaagccttgctttatttaaagatccagtatgacatacttaaaaaggccatttaaccttgtatcttagcttgggatgtgccagtggttcctcaactttgttgtctattggaatcattttggggatttttttttttttaatagtggtgtctgtcaggctcccactcctagacatgttaattaatgtggagtgcaagttgggcatcaggattttaaaaaaatcccctggtgattggtatgaatgtgcagccaaatttggaaaccactgagctacatgcttatttagtgaagaaggcagggttgggggaagcagggtacatgttataacttgatcatatccctttaaaagaagtggggactttgggtttatgtacccataggaggacttggttatggatgggaaagacattttagccttgtacaaaaatctgaaagaggaaaacatctttctggaaaaatcaggtccatggaattgaaaggtggtgataactcaacattttttatgctaaagtataagtgctaaagaggtaaataaacgtcgataggaaataccgaacaatcaattcattcttaaaatagtagatagtagcagtcttttggagtatgtgtttaactgccaactatgaatgggt

SEQ ID NO: 363138 - DNA, 3598 bp, Homo sapiens
agggggaagacgaagcttgaaagacttggtaatggcgacgggtttgtcagagcaccataacatggtgtgggaagtgaagacaaatcagatgcctaatgcagtacagaaactcctgttggtgatggacaagagagcctcaggaatgaatgactcattggagttgctgcagtgtaatgagaatttgccatcttcacctggatataactcctgtgatgaacacatggagcttgatgaccttcctgaacttcaggcagttcaaagtgatcctacccaatctggcatgtaccagctgagttcagatgtttcacatcaagaatacccaagatcatcttggaaccaaaatacctcagacataccagaaactacttaccgtgaaaatgaggtggactggctaacagaattggcaaatatcgcgaccagtccacaaagtccactgatgcagtgctcattttacaatagatcatctcctgtacacatcatagccactagcaaaacagccttccctcatcaccattggaaggaggaaacaccagtaagacacgaaagggcaaatagtgagtcagaatctggcattttctgcatgtcctccctgtcagatgatgatgatttgggatggtgcaattcctggccttcaactgtctggcactgttttttgaaaggcacacgactgtgctttcataagggaagcaataaggaatggcaagatgttgaagattttgctagagctgaaggctgtgataatgaggaagatcttcaaatgggcattcacaagggctatggttctgatggtctaaagttgttatcacatgaagaaagtgtatcatttggcgagtctgtactgaagttgacttttgatcctggtacagtagaagatggtttacttaccgtagagtgtaagctggaccaccctttctatgttaaaaataaaggttggtcatcattttatccaagcttgactgtggtacagcatggcattccatgttgtgaagttcatattggcgatgtatgtctacctcctggacaccccgatgccattaattttgatgattcaggtgtttttgatacatttaaaagctatgacttcacacctatggattcttctgcagtttatgtgttaagtagtatggctcgccagcgtcgtgcatctttgtcttgtggaggacctggtggtcaagactttgcaagatctggattcagtaaaaactgtggctcacctggatcatcacagctctcttccaattctttgtatgctaaagctgtcaaaaaccacagctcagggactgtgagtgccacttctcctaataagtgcaaaagaccaatgaatgccttcatgctttttgccaaaaaatacagagttgaatatactcagatgtatccagggaaagataacagagccataagtgtgatccttggtgacaggtggaagaaaatgaagaatgaagagagaagaatgtacacattagaagcaaaggctttggctgaagaacagaaacgtttaaatcctgactgttggaagaggaaaagaaccaattcaggctcacaacaacattaaaccaggatgcttatgttcttaagtctatatttgcatatacattgactcttgatggaaagacttaagaagatcaaggtctcaccatttgtcctcaattcgtgtgaccataagatactgatagcattgagtcttgaaatgatttaataatatgagtgaggatttgctttctccattagagcattaagctaaaactatcaacattttaaaccaaattgccttatttttcttccaaacttcatatatgtctatcaggtaataataggcttgaaaattgatatcctgtggtgctaaagtacagtagaaagagaggagaagtgtatacatgttttattttaaattgtacgaaaggggaatttaaaaaatatgtaactgctgtttatacattggctccttactgcttattaatctgtattgtacacatgatgaaatgaagcagaagctgggagtcggcctttcctctagtaaccaccacatggctcagcatctgtgccaaacataggcgctcctagtctggtcagtgccaagaggctaccagaacatggggcaggtggctggtgttggtgtcccagcctaagagccacctgctgcagttaccatggcatgctgagttgatgcaccaggtggcagcagccatccgttattatttccaatggagacctagcccaggccaaggtaaagttagttaatagcattgggatatagtcactgtaatggtgctattaacaaacagtcaacaccattgtattttttaacttcgtgttctgtatctcctcagccatgtatcttaaatatattttgtcatcataatctttatggtgggggcagactttgcacttactgcagtgcaacacttgcactttaattttcctccaactgtctaaaattagagcaaatacattggcaatacagctgcttttgctctgagctacaatcatggcttttcatgttacttaccaagtggtgtttctggttaggaatcacagctgtaaaattgatttcagttcatcacacttcttcatgatgttgcccctaaattttgcacactatattcttgtatattatttcaaataaatggaaaaaaaagttgcttatctctgacgtctactgattgattgattgattgattaatcttggctgaattttatttatgagttctcagaataacaggttcaggagatgagatggaaaacataaggcaaattcctaacactgctaattaggaggctgctgataggattttaaaaattaaaaacaatgttaatagtggaacaagagccatcagaaaataaggacttagattatctactatttatagagaattgctatacaataaaaatttttatttttcacgtggcatttttgttacacggttaaacagcccaaaggtctgcttttaataacatgacaaagtgtaacaaaagccttgctttatttaaagatccagtatgacatacttaaaaaggccatttaaccttgtatcttagcttgggatgtgccagtggttcctcaactttgttgtctattggaatcattttggggatttttttttttttaatagtggtgtctgtcaggctcccactcctagacatgttaattaatgtggagtgcaagttgggcatcaggattttaaaaaaatcccctggtgattggtatgaatgtgcagccaaatttggaaaccactgagctacatgcttatttagtgaagaaggcagggttgggggaagcagggtacatgttataacttgatcatatccctttaaaagaagtggggactttgggtttatgtacccataggaggacttggttatggatgggaaagacattttagccttgtacaaaaatctgaaagaggaaaacatctttctggaaaaatcaggtccatggaattgaaaggtggtgataactcaacattttttatgctaaagtataagtgctaaagaggtaaataaacgtcgataggaaataccgaacaatcaattcattcttaaaatagtagatagtagcagtcttttggagtatgtgtttaactgccaactatgaatgggt

SEQ ID NO: 363139 - DNA, 3866 bp, Homo sapiens
tattaacaagttcagaatttattagtaaaaagaaatactttaacacagagttgtgtaagtagtagctaaatatttatgtgatctatattatcattatggaaattattgtttatagtctgtataacaggttattaaagtatgtgagtaataagtccatattgcacacataaaatgcctttttcttcattaacttgttaatgtaaaaatatctcagtggcatatggatcactcctaggtgaggtacaaaacactagggggaataagaagcagaaaacacaaaccaaaccatgtttttccagtctgtgaacagaatgttaaatttatgattttcctctctcaaaattaattagctaaaattgaggacttctcttttaactgcagttataatattgttccttgtattagtaatttcctttttatgattttgagtgtgcttatttgcagatgaccttcctgaacttcaggcagttcaaagtgatcctacccaatctggcatgtaccagctgagttcagatgtttcacatcaagaatacccaagatcatcttggaaccaaaatacctcagacataccagaaactacttaccgtgaaaatgaggtggactggctaacagaattggcaaatatcgcgaccagtccacaaagtccactgatgcagtgctcattttacaatagatcatctcctgtacacatcatagccactagcaaaagtttacattcctatgcacgccctccaccagtgtcctcttcttcgaagagtgaaccagccttccctcatcaccattggaaggaggaaacaccagtaagacacgaaagggcaaatagtgagtcagaatctggcattttctgcatgtcctccctgtcagatgatgatgatttgggatggtgcaattcctggccttcaactgtctggcactgttttttgaaaggcacacgactgtgctttcataagggaagcaataaggaatggcaagatgttgaagattttgctagagctgaaggctgtgataatgaggaagatcttcaaatgggcattcacaagggctatggttctgatggtctaaagttgttatcacatgaagaaagtgtatcatttggcgagtctgtactgaagttgacttttgatcctggtacagtagaagatggtttacttaccgtagagtgtaagctggaccaccctttctatgttaaaaataaaggttggtcatcattttatccaagcttgactgtggtacagcatggcattccatgttgtgaagttcatattggcgatgtatgtctacctcctggacaccccgatgccattaattttgatgattcaggtgtttttgatacatttaaaagctatgacttcacacctatggattcttctgcagtttatgtgttaagtagtatggctcgccagcgtcgtgcatctttgtcttgtggaggacctggtggtcaagactttgcaagatctggattcagtaaaaactgtggctcacctggatcatcacagctctcttccaattctttgtatgctaaagctgtcaaaaaccacagctcagggactgtgagtgccacttctcctaataagtgcaaaagaccaatgaatgccttcatgctttttgccaaaaaatacagagttgaatatactcagatgtatccagggaaagataacagagccataagtgtgatccttggtgacaggtggaagaaaatgaagaatgaagagagaagaatgtacacattagaagcaaaggctttggctgaagaacagaaacgtttaaatcctgactgttggaagaggaaaagaaccaattcaggctcacaacaacattaaaccaggatgcttatgttcttaagtctatatttgcatatacattgactcttgatggaaagacttaagaagatcaaggtctcaccatttgtcctcaattcgtgtgaccataagatactgatagcattgagtcttgaaatgatttaataatatgagtgaggatttgctttctccattagagcattaagctaaaactatcaacattttaaaccaaattgccttatttttcttccaaacttcatatatgtctatcaggtaataataggcttgaaaattgatatcctgtggtgctaaagtacagtagaaagagaggagaagtgtatacatgttttattttaaattgtacgaaaggggaatttaaaaaatatgtaactgctgtttatacattggctccttactgcttattaatctgtattgtacacatgatgaaatgaagcagaagctgggagtcggcctttcctctagtaaccaccacatggctcagcatctgtgccaaacataggcgctcctagtctggtcagtgccaagaggctaccagaacatggggcaggtggctggtgttggtgtcccagcctaagagccacctgctgcagttaccatggcatgctgagttgatgcaccaggtggcagcagccatccgttattatttccaatggagacctagcccaggccaaggtaaagttagttaatagcattgggatatagtcactgtaatggtgctattaacaaacagtcaacaccattgtattttttaacttcgtgttctgtatctcctcagccatgtatcttaaatatattttgtcatcataatctttatggtgggggcagactttgcacttactgcagtgcaacacttgcactttaattttcctccaactgtctaaaattagagcaaatacattggcaatacagctgcttttgctctgagctacaatcatggcttttcatgttacttaccaagtggtgtttctggttaggaatcacagctgtaaaattgatttcagttcatcacacttcttcatgatgttgcccctaaattttgcacactatattcttgtatattatttcaaataaatggaaaaaaaagttgcttatctctgacgtctactgattgattgattgattgattaatcttggctgaattttatttatgagttctcagaataacaggttcaggagatgagatggaaaacataaggcaaattcctaacactgctaattaggaggctgctgataggattttaaaaattaaaaacaatgttaatagtggaacaagagccatcagaaaataaggacttagattatctactatttatagagaattgctatacaataaaaatttttatttttcacgtggcatttttgttacacggttaaacagcccaaaggtctgcttttaataacatgacaaagtgtaacaaaagccttgctttatttaaagatccagtatgacatacttaaaaaggccatttaaccttgtatcttagcttgggatgtgccagtggttcctcaactttgttgtctattggaatcattttggggatttttttttttttaatagtggtgtctgtcaggctcccactcctagacatgttaattaatgtggagtgcaagttgggcatcaggattttaaaaaaatcccctggtgattggtatgaatgtgcagccaaatttggaaaccactgagctacatgcttatttagtgaagaaggcagggttgggggaagcagggtacatgttataacttgatcatatccctttaaaagaagtggggactttgggtttatgtacccataggaggacttggttatggatgggaaagacattttagccttgtacaaaaatctgaaagaggaaaacatctttctggaaaaatcaggtccatggaattgaaaggtggtgataactcaacattttttatgctaaagtataagtgctaaagaggtaaataaacgtcgataggaaataccgaacaatcaattcattcttaaaatagtagatagtagcagtcttttggagtatgtgtttaactgccaactatgaatgggt

SEQ ID NO: 363140 - DNA, 3732 bp, Homo sapiens
agggggaagacgaagcttgaaagacttggtaatggcgacgggtttgtcagagcaccataacatggtgtgggaagtgaagacaaatcagatgcctaatgcagtacagaaactcctgttggtgatggacaagagagcctcaggaatgaatgactcattggagttgctgcagtgtaatgagaatttgccatcttcacctggatataactcctgtgatgaacacatggagcttgatgaccttcctgaacttcaggcagttcaaagtgatcctacccaatctggcatgtaccagctgagttcagatgtttcacatcaagaatacccaagatcatcttggaaccaaaatacctcagacataccagaaactacttaccgtgaaaatgaggtggactggctaacagaattggcaaatatcgcgaccagtccacaaagtccactgatgcagtgctcattttacaatagatcatctcctgtacacatcatagccactagcaaaagtttacattcctatgcacgccctccaccagtgtcctcttcttcgaagagtgaaccagccttccctcatcaccattggaaggaggaaacaccagtaagacacgaaagggcaaatagtgagtcagaatctggcattttctgcatgtcctccctgtcagatgatgatgatttgggatggtgcaattcctggccttcaactgtctggcactgttttttgaaaggcacacgactgtgctttcataagggaagcaataaggaatggcaagatgttgaagattttgctagagctgaaggctgtgataatgaggaagatcttcaaatgggcattcacaagggctatggttctgatggtctaaagttgttatcacatgaagaaagtgtatcatttggcgagtctgtactgaagttgacttttgatcctggtacagtagaagatggtttacttaccgtagagtgtaagctggaccaccctttctatgttaaaaataaaggttggtcatcattttatccaagcttgactgtggtacagcatggcattccatgttgtgaagttcatattggcgatgtatgtctacctcctggacaccccgatgccattaattttgatgattcaggtgtttttgatacatttaaaagctatgacttcacacctatggattcttctgcagtttatgtgttaagtagtatggctcgccagcgtcgtgcatctttgtcttgtggaggacctggtggtcaagactttgcaagatctggattcagtaaaaactgtggctcacctggatcatcacagctctcttccaattctttgtatgctaaagctgtcaaaaaccacagctcagggactgtgagtgccacttctcctaataagtgcaaaagaccaatgaatgccttcatgctttttgccaaaaaatacagagttgaatatactcagatgtatccagggaaagataacagacggagtctcgctgtgtcacccaagctggagtccagtggtacgatctcagctcactgcaacctccgccttccaggttcaaagccataagtgtgatccttggtgacaggtggaagaaaatgaagaatgaagagagaagaatgtacacattagaagcaaaggctttggctgaagaacagaaacgtttaaatcctgactgttggaagaggaaaagaaccaattcaggctcacaacaacattaaaccaggatgcttatgttcttaagtctatatttgcatatacattgactcttgatggaaagacttaagaagatcaaggtctcaccatttgtcctcaattcgtgtgaccataagatactgatagcattgagtcttgaaatgatttaataatatgagtgaggatttgctttctccattagagcattaagctaaaactatcaacattttaaaccaaattgccttatttttcttccaaacttcatatatgtctatcaggtaataataggcttgaaaattgatatcctgtggtgctaaagtacagtagaaagagaggagaagtgtatacatgttttattttaaattgtacgaaaggggaatttaaaaaatatgtaactgctgtttatacattggctccttactgcttattaatctgtattgtacacatgatgaaatgaagcagaagctgggagtcggcctttcctctagtaaccaccacatggctcagcatctgtgccaaacataggcgctcctagtctggtcagtgccaagaggctaccagaacatggggcaggtggctggtgttggtgtcccagcctaagagccacctgctgcagttaccatggcatgctgagttgatgcaccaggtggcagcagccatccgttattatttccaatggagacctagcccaggccaaggtaaagttagttaatagcattgggatatagtcactgtaatggtgctattaacaaacagtcaacaccattgtattttttaacttcgtgttctgtatctcctcagccatgtatcttaaatatattttgtcatcataatctttatggtgggggcagactttgcacttactgcagtgcaacacttgcactttaattttcctccaactgtctaaaattagagcaaatacattggcaatacagctgcttttgctctgagctacaatcatggcttttcatgttacttaccaagtggtgtttctggttaggaatcacagctgtaaaattgatttcagttcatcacacttcttcatgatgttgcccctaaattttgcacactatattcttgtatattatttcaaataaatggaaaaaaaagttgcttatctctgacgtctactgattgattgattgattgattaatcttggctgaattttatttatgagttctcagaataacaggttcaggagatgagatggaaaacataaggcaaattcctaacactgctaattaggaggctgctgataggattttaaaaattaaaaacaatgttaatagtggaacaagagccatcagaaaataaggacttagattatctactatttatagagaattgctatacaataaaaatttttatttttcacgtggcatttttgttacacggttaaacagcccaaaggtctgcttttaataacatgacaaagtgtaacaaaagccttgctttatttaaagatccagtatgacatacttaaaaaggccatttaaccttgtatcttagcttgggatgtgccagtggttcctcaactttgttgtctattggaatcattttggggatttttttttttttaatagtggtgtctgtcaggctcccactcctagacatgttaattaatgtggagtgcaagttgggcatcaggattttaaaaaaatcccctggtgattggtatgaatgtgcagccaaatttggaaaccactgagctacatgcttatttagtgaagaaggcagggttgggggaagcagggtacatgttataacttgatcatatccctttaaaagaagtggggactttgggtttatgtacccataggaggacttggttatggatgggaaagacattttagccttgtacaaaaatctgaaagaggaaaacatctttctggaaaaatcaggtccatggaattgaaaggtggtgataactcaacattttttatgctaaagtataagtgctaaagaggtaaataaacgtcgataggaaataccgaacaatcaattcattcttaaaatagtagatagtagcagtcttttggagtatgtgtttaactgccaactatgaatgggt

SEQ ID NO: 363141 - DNA, 3625 bp, Homo sapiens
agggggaagacgaagcttgaaagacttggtaatggcgacgggtttgtcagagcaccataacatggtgtgggaagtgaagacaaatcagatgcctaatgcagtacagaaactcctgttggtgatggacaagagagcctcaggaatgaatgactcattggagttgctgcagtgtaatgagaatttgccatcttcacctggatataactcctgtgatgaacacatggagcttgatgaccttcctgaacttcaggcagttcaaagtgatcctacccaatctggcatgtaccagctgagttcagatgtttcacatcaagaatacccaagatcatcttggaaccaaaatacctcagacataccagaaactacttaccgtgaaaatgaggtggactggctaacagaattggcaaatatcgcgaccagtccacaaagtccactgatgcagtgctcattttacaatagatcatctcctgtacacatcatagccactagcaaaagtttacattcctatgcacgccctccaccagtgtcctcttcttcgaagagtgaaccagccttccctcatcaccattggaaggaggaaacaccagtaagacacgaaagggcaaatagtgagtcagaatctggcattttctgcatgtcctccctgtcagatgatgatgatttgggatggtgcaattcctggccttcaactgtctggcactgttttttgaaaggcacacgactgtgctttcataagggaagcaataaggaatggcaagatgttgaagattttgctagagctgaaggctgtgataatgaggaagatcttcaaatgggcattcacaagggctatggttctgatggtctaaagttgttatcacatgaagaaagtgtatcatttggcgagtctgtactgaagttgacttttgatcctggtacagtagaagatggtttacttaccgtagagtgtaagctggaccaccctttctatgttaaaaataaaggttggtcatcattttatccaagcttgactgtggtacagcatggcattccatgttgtgaagttcatattggcgatgtatgtctacctcctggacaccccgatgccattaattttgatgattcaggtgtttttgatacatttaaaagctatgacttcacacctatggattcttctgcagtttatgtgttaagtagtatggctcgccagcgtcgtgcatctttgtcttgtggaggacctggtggtcaagactttgcaagatctggattcagtaaaaactgtggctcacctggatcatcacagctctcttccaattctttgtatgctaaagctgtcaaaaaccacagctcagggactgtgagtgccacttctcctaataagtgcaaaagaccaatgaatgccttcatgctttttgccaaaaaatacagagttgaatatactcagatgtatccagggaaagataacaggtggaagaaaatgaagaatgaagagagaagaatgtacacattagaagcaaaggctttggctgaagaacagaaacgtttaaatcctgactgttggaagaggaaaagaaccaattcaggctcacaacaacattaaaccaggatgcttatgttcttaagtctatatttgcatatacattgactcttgatggaaagacttaagaagatcaaggtctcaccatttgtcctcaattcgtgtgaccataagatactgatagcattgagtcttgaaatgatttaataatatgagtgaggatttgctttctccattagagcattaagctaaaactatcaacattttaaaccaaattgccttatttttcttccaaacttcatatatgtctatcaggtaataataggcttgaaaattgatatcctgtggtgctaaagtacagtagaaagagaggagaagtgtatacatgttttattttaaattgtacgaaaggggaatttaaaaaatatgtaactgctgtttatacattggctccttactgcttattaatctgtattgtacacatgatgaaatgaagcagaagctgggagtcggcctttcctctagtaaccaccacatggctcagcatctgtgccaaacataggcgctcctagtctggtcagtgccaagaggctaccagaacatggggcaggtggctggtgttggtgtcccagcctaagagccacctgctgcagttaccatggcatgctgagttgatgcaccaggtggcagcagccatccgttattatttccaatggagacctagcccaggccaaggtaaagttagttaatagcattgggatatagtcactgtaatggtgctattaacaaacagtcaacaccattgtattttttaacttcgtgttctgtatctcctcagccatgtatcttaaatatattttgtcatcataatctttatggtgggggcagactttgcacttactgcagtgcaacacttgcactttaattttcctccaactgtctaaaattagagcaaatacattggcaatacagctgcttttgctctgagctacaatcatggcttttcatgttacttaccaagtggtgtttctggttaggaatcacagctgtaaaattgatttcagttcatcacacttcttcatgatgttgcccctaaattttgcacactatattcttgtatattatttcaaataaatggaaaaaaaagttgcttatctctgacgtctactgattgattgattgattgattaatcttggctgaattttatttatgagttctcagaataacaggttcaggagatgagatggaaaacataaggcaaattcctaacactgctaattaggaggctgctgataggattttaaaaattaaaaacaatgttaatagtggaacaagagccatcagaaaataaggacttagattatctactatttatagagaattgctatacaataaaaatttttatttttcacgtggcatttttgttacacggttaaacagcccaaaggtctgcttttaataacatgacaaagtgtaacaaaagccttgctttatttaaagatccagtatgacatacttaaaaaggccatttaaccttgtatcttagcttgggatgtgccagtggttcctcaactttgttgtctattggaatcattttggggatttttttttttttaatagtggtgtctgtcaggctcccactcctagacatgttaattaatgtggagtgcaagttgggcatcaggattttaaaaaaatcccctggtgattggtatgaatgtgcagccaaatttggaaaccactgagctacatgcttatttagtgaagaaggcagggttgggggaagcagggtacatgttataacttgatcatatccctttaaaagaagtggggactttgggtttatgtacccataggaggacttggttatggatgggaaagacattttagccttgtacaaaaatctgaaagaggaaaacatctttctggaaaaatcaggtccatggaattgaaaggtggtgataactcaacattttttatgctaaagtataagtgctaaagaggtaaataaacgtcgataggaaataccgaacaatcaattcattcttaaaatagtagatagtagcagtcttttggagtatgtgtttaactgccaactatgaatgggt

SEQ ID NO: 363142 - DNA, 3765 bp, Homo sapiens
  misc_feature (14)..(14): n is a, c, g, or t
  misc_feature (54)..(54): n is a, c, g, or t
  misc_feature (63)..(63): n is a, c, g, or t
  misc_feature (113)..(113): n is a, c, g, or t
accccggaaaaaanacgcccccttttcaagaaaatttggtaatttccatcattnccttgaccnaaatgactcccaacccacagaaaggcacaaattttcccattgggatttantctgccctcccctttgctatgacttcacacctatggattcttctgcagtttatgtgttaagtagtatggctcgccagcgtcgtgcatctttgtcttgtggaggacctggtggtcaagactttgcaagatctggattcagtaaaaactgtggctcacctggatcatcacagctctcttccaattctttgtatgctaaagctgtcaaaaaccacagctcagggactgtgagtgccacttctcctaataagtgcaaaagaccaatgaatgccttcatgctttttgccaaaaaatacagagttgaatatactcagatgtatccagggaaagataacagagccataagtgtgatccttggtgacaggtggaagaaaatgaagaatgaagagagaagaatgtacacattagaagcaaaggctttggctgaagaacagaaacgtttaaatcctgactgttggaagaggaaaagaaccaattcagtatgtttcaataaatagtgtttaaaattatcttgccttatccgtgcaggtgtactggcatgttggagcagttgttacaacctttaagaggttgtgttgatgctgtctctagcatttttatacttcaaaacctaataatgttatcacatcatcatataaagactgcctttcctcaagggtcatttactctcatagcatggcaagtcgaaatctcaggcaaacttcaaaagaatgtttgttctaaacattgagttggaaaaataattttggaatgcagtgtttctagttgggttgaaagataagcattattaatccattaatatcacagtagaaaatttctctaataattttgggattgtctcaacagctttttttccttaattggtgagggaccaataaggctggaggtgttggggtatgttagctgtcattcatggggacttgtgccattggcacagaatttctagattgaaaaatttcaaggaggagaagaaataggcccaggaatggtggcaaacaagtctatatgataagctatcttggatagacttgtttcttataacttttccattactaaactagcatcttttaggttcagcgtttttagattaattgcaaaaaaattacatgtgatatagtggggtcaatttgaagtatcattgaaagatgaagggaagatatcaatatttttatagtaggagggctggccaaagatgttttaaattcattgtgtacatgtgcctgtttcttagtaaaatgcaggtcatatctgtttaaatttttcacaatttctttaaaaatagtggtcagtcagtagtcagatgagagggtggctgaactgaattttggcagttcttggttaatttagaatttcatgtgttcggacttttcctgtatcccttttctgttcatcctagtcaatgtcttatcattgcatacattttctggatgcttgagccatcagatatcagctagctttttaaaatcacctttaagaaagcagtattttctaatagtaaatttataaacatcttatacatcttagctttcatatataggattactatgtattgatttgtaaacattcactgagtttaattttatttccacagggctcacaacaacattaaaccaggatgcttatgttcttaagtctatatttgcatatacattgactcttgatggaaagacttaagaagatcaaggtctcaccatttgtcctcaattcgtgtgaccataagatactgatagcattgagtcttgaaatgatttaataatatgagtgaggatttgctttctccattagagcattaagctaaaactatcaacattttaaaccaaattgccttatttttcttccaaacttcatatatgtctatcaggtaataataggcttgaaaattgatatcctgtggtgctaaagtacagtagaaagagaggagaagtgtatacatgttttattttaaattgtacgaaaggggaatttaaaaaatatgtaactgctgtttatacattggctccttactgcttattaatctgtattgtacacatgatgaaatgaagcagaagctgggagtcggcctttcctctagtaaccaccacatggctcagcatctgtgccaaacataggcgctcctagtctggtcagtgccaagaggctaccagaacatggggcaggtggctggtgttggtgtcccagcctaagagccacctgctgcagttaccatggcatgctgagttgatgcaccaggtggcagcagccatccgttattatttccaatggagacctagcccaggccaaggtaaagttagttaatagcattgggatatagtcactgtaatggtgctattaacaaacagtcaacaccattgtattttttaacttcgtgttctgtatctcctcagccatgtatcttaaatatattttgtcatcataatctttatggtgggggcagactttgcacttactgcagtgcaacacttgcactttaattttcctccaactgtctaaaattagagcaaatacattggcaatacagctgcttttgctctgagctacaatcatggcttttcatgttacttaccaagtggtgtttctggttaggaatcacagctgtaaaattgatttcagttcatcacacttcttcatgatgttgcccctaaattttgcacactatattcttgtatattatttcaaataaatggaaaaaaaagttgcttatctctgacgtctactgattgattgattgattgattaatcttggctgaattttatttatgagttctcagaataacaggttcaggagatgagatggaaaacataaggcaaattcctaacactgctaattaggaggctgctgataggattttaaaaattaaaaacaatgttaatagtggaacaagagccatcagaaaataaggacttagattatctactatttatagagaattgctatacaataaaaatttttatttttcacgtggcatttttgttacacggttaaacagcccaaaggtctgcttttaataacatgacaaagtgtaacaaaagccttgctttatttaaagatccagtatgacatacttaaaaaggccatttaaccttgtatcttagcttgggatgtgccagtggttcctcaactttgttgtctattggaatcattttggggatttttttttttttaatagtggtgtctgtcaggctcccactcctagacatgttaattaatgtggagtgcaagttgggcatcaggattttaaaaaaatcccctggtgattggtatgaatgtgcagccaaatttggaaaccactgagctacatgcttatttagtgaagaaggcagggttgggggaagcagggtacatgttataacttgatcatatccctttaaaagaagtggggactttgggtttatgtacccataggaggacttggttatggatgggaaagacattttagccttgtacaaaaatctgaaagaggaaaacatctttctggaaaaatcaggtccatggaattgaaaggtggtgataactcaacattttttatgctaaagtataagtgctaaagaggtaaataaacgtcgataggaaataccgaacaatcaattcattcttaaaatagtagatagtagcagtcttttggagtatgtgtttaactgccaactatgaatgggt

SEQ ID NO: 363143 - DNA, 3709 bp, Homo sapiens
ttttaacctgctttttagaaatcagagaattcaaaattgaattaaaatattattattttttttaattttatagctatgacttcacacctatggattcttctgcagtttatgtgttaagtagtatggctcgccagcgtcgtgcatctttgtcttgtggaggacctggtggtcaagactttgcaagatctggattcagtaaaaactgtggctcacctggatcatcacagctctcttccaattctttgtatgctaaagctgtcaaaaaccacagctcagggactgtgagtgccacttctcctaataagtgcaaaagaccaatgaatgccttcatgctttttgccaaaaaatacagagttgaatatactcagatgtatccagggaaagataacagagccataagtgtgatccttggtgacaggtggaagaaaatgaagaatgaagagagaagaatgtacacattagaagcaaaggctttggctgaagaacagaaacgtttaaatcctgactgttggaagaggaaaagaaccaattcagtatgtttcaataaatagtgtttaaaattatcttgccttatccgtgcaggtgtactggcatgttggagcagttgttacaacctttaagaggttgtgttgatgctgtctctagcatttttatacttcaaaacctaataatgttatcacatcatcatataaagactgcctttcctcaagggtcatttactctcatagcatggcaagtcgaaatctcaggcaaacttcaaaagaatgtttgttctaaacattgagttggaaaaataattttggaatgcagtgtttctagttgggttgaaagataagcattattaatccattaatatcacagtagaaaatttctctaataattttgggattgtctcaacagctttttttccttaattggtgagggaccaataaggctggaggtgttggggtatgttagctgtcattcatggggacttgtgccattggcacagaatttctagattgaaaaatttcaaggaggagaagaaataggcccaggaatggtggcaaacaagtctatatgataagctatcttggatagacttgtttcttataacttttccattactaaactagcatcttttaggttcagcgtttttagattaattgcaaaaaaattacatgtgatatagtggggtcaatttgaagtatcattgaaagatgaagggaagatatcaatatttttatagtaggagggctggccaaagatgttttaaattcattgtgtacatgtgcctgtttcttagtaaaatgcaggtcatatctgtttaaatttttcacaatttctttaaaaatagtggtcagtcagtagtcagatgagagggtggctgaactgaattttggcagttcttggttaatttagaatttcatgtgttcggacttttcctgtatcccttttctgttcatcctagtcaatgtcttatcattgcatacattttctggatgcttgagccatcagatatcagctagctttttaaaatcacctttaagaaagcagtattttctaatagtaaatttataaacatcttatacatcttagctttcatatataggattactatgtattgatttgtaaacattcactgagtttaattttatttccacagggctcacaacaacattaaaccaggatgcttatgttcttaagtctatatttgcatatacattgactcttgatggaaagacttaagaagatcaaggtctcaccatttgtcctcaattcgtgtgaccataagatactgatagcattgagtcttgaaatgatttaataatatgagtgaggatttgctttctccattagagcattaagctaaaactatcaacattttaaaccaaattgccttatttttcttccaaacttcatatatgtctatcaggtaataataggcttgaaaattgatatcctgtggtgctaaagtacagtagaaagagaggagaagtgtatacatgttttattttaaattgtacgaaaggggaatttaaaaaatatgtaactgctgtttatacattggctccttactgcttattaatctgtattgtacacatgatgaaatgaagcagaagctgggagtcggcctttcctctagtaaccaccacatggctcagcatctgtgccaaacataggcgctcctagtctggtcagtgccaagaggctaccagaacatggggcaggtggctggtgttggtgtcccagcctaagagccacctgctgcagttaccatggcatgctgagttgatgcaccaggtggcagcagccatccgttattatttccaatggagacctagcccaggccaaggtaaagttagttaatagcattgggatatagtcactgtaatggtgctattaacaaacagtcaacaccattgtattttttaacttcgtgttctgtatctcctcagccatgtatcttaaatatattttgtcatcataatctttatggtgggggcagactttgcacttactgcagtgcaacacttgcactttaattttcctccaactgtctaaaattagagcaaatacattggcaatacagctgcttttgctctgagctacaatcatggcttttcatgttacttaccaagtggtgtttctggttaggaatcacagctgtaaaattgatttcagttcatcacacttcttcatgatgttgcccctaaattttgcacactatattcttgtatattatttcaaataaatggaaaaaaaagttgcttatctctgacgtctactgattgattgattgattgattaatcttggctgaattttatttatgagttctcagaataacaggttcaggagatgagatggaaaacataaggcaaattcctaacactgctaattaggaggctgctgataggattttaaaaattaaaaacaatgttaatagtggaacaagagccatcagaaaataaggacttagattatctactatttatagagaattgctatacaataaaaatttttatttttcacgtggcatttttgttacacggttaaacagcccaaaggtctgcttttaataacatgacaaagtgtaacaaaagccttgctttatttaaagatccagtatgacatacttaaaaaggccatttaaccttgtatcttagcttgggatgtgccagtggttcctcaactttgttgtctattggaatcattttggggatttttttttttttaatagtggtgtctgtcaggctcccactcctagacatgttaattaatgtggagtgcaagttgggcatcaggattttaaaaaaatcccctggtgattggtatgaatgtgcagccaaatttggaaaccactgagctacatgcttatttagtgaagaaggcagggttgggggaagcagggtacatgttataacttgatcatatccctttaaaagaagtggggactttgggtttatgtacccataggaggacttggttatggatgggaaagacattttagccttgtacaaaaatctgaaagaggaaaacatctttctggaaaaatcaggtccatggaattgaaaggtggtgataactcaacattttttatgctaaagtataagtgctaaagaggtaaataaacgtcgataggaaataccgaacaatcaattcattcttaaaatagtagatagtagcagtcttttggagtatgtgtttaactgccaactatgaatgggt

SEQ ID NO: 363144 - DNA, 3159 bp, Homo sapiens
aagtataaaaatgctagagacagcatcaacacaacctcttaaaggttgtaacaactgctccaacatgccagtacacctgcacggataaggcaagacatttttatacttcaaaacctaataatgttatcacatcatcatataaagactgcctttcctcaagggtcatttactctcatagcatggcaagtcgaaatctcaggcaaacttcaaaagaatgtttgttctaaacattgagttggaaaaataattttggaatgcagtgtttctagttgggttgaaagataagcattattaatccattaatatcacagtagaaaatttctctaataattttgggattgtctcaacagctttttttccttaattggtgagggaccaataaggctggaggtgttggggtatgttagctgtcattcatggggacttgtgccattggcacagaatttctagattgaaaaatttcaaggaggagaagaaataggcccaggaatggtggcaaacaagtctatatgataagctatcttggatagacttgtttcttataacttttccattactaaactagcatcttttaggttcagcgtttttagattaattgcaaaaaaattacatgtgatatagtggggtcaatttgaagtatcattgaaagatgaagggaagatatcaatatttttatagtaggagggctggccaaagatgttttaaattcattgtgtacatgtgcctgtttcttagtaaaatgcaggtcatatctgtttaaatttttcacaatttctttaaaaatagtggtcagtcagtagtcagatgagagggtggctgaactgaattttggcagttcttggttaatttagaatttcatgtgttcggacttttcctgtatcccttttctgttcatcctagtcaatgtcttatcattgcatacattttctggatgcttgagccatcagatatcagctagctttttaaaatcacctttaagaaagcagtattttctaatagtaaatttataaacatcttatacatcttagctttcatatataggattactatgtattgatttgtaaacattcactgagtttaattttatttccacagggctcacaacaacattaaaccaggatgcttatgttcttaagtctatatttgcatatacattgactcttgatggaaagacttaagaagatcaaggtctcaccatttgtcctcaattcgtgtgaccataagatactgatagcattgagtcttgaaatgatttaataatatgagtgaggatttgctttctccattagagcattaagctaaaactatcaacattttaaaccaaattgccttatttttcttccaaacttcatatatgtctatcaggtaataataggcttgaaaattgatatcctgtggtgctaaagtacagtagaaagagaggagaagtgtatacatgttttattttaaattgtacgaaaggggaatttaaaaaatatgtaactgctgtttatacattggctccttactgcttattaatctgtattgtacacatgatgaaatgaagcagaagctgggagtcggcctttcctctagtaaccaccacatggctcagcatctgtgccaaacataggcgctcctagtctggtcagtgccaagaggctaccagaacatggggcaggtggctggtgttggtgtcccagcctaagagccacctgctgcagttaccatggcatgctgagttgatgcaccaggtggcagcagccatccgttattatttccaatggagacctagcccaggccaaggtaaagttagttaatagcattgggatatagtcactgtaatggtgctattaacaaacagtcaacaccattgtattttttaacttcgtgttctgtatctcctcagccatgtatcttaaatatattttgtcatcataatctttatggtgggggcagactttgcacttactgcagtgcaacacttgcactttaattttcctccaactgtctaaaattagagcaaatacattggcaatacagctgcttttgctctgagctacaatcatggcttttcatgttacttaccaagtggtgtttctggttaggaatcacagctgtaaaattgatttcagttcatcacacttcttcatgatgttgcccctaaattttgcacactatattcttgtatattatttcaaataaatggaaaaaaaagttgcttatctctgacgtctactgattgattgattgattgattaatcttggctgaattttatttatgagttctcagaataacaggttcaggagatgagatggaaaacataaggcaaattcctaacactgctaattaggaggctgctgataggattttaaaaattaaaaacaatgttaatagtggaacaagagccatcagaaaataaggacttagattatctactatttatagagaattgctatacaataaaaatttttatttttcacgtggcatttttgttacacggttaaacagcccaaaggtctgcttttaataacatgacaaagtgtaacaaaagccttgctttatttaaagatccagtatgacatacttaaaaaggccatttaaccttgtatcttagcttgggatgtgccagtggttcctcaactttgttgtctattggaatcattttggggatttttttttttttaatagtggtgtctgtcaggctcccactcctagacatgttaattaatgtggagtgcaagttgggcatcaggattttaaaaaaatcccctggtgattggtatgaatgtgcagccaaatttggaaaccactgagctacatgcttatttagtgaagaaggcagggttgggggaagcagggtacatgttataacttgatcatatccctttaaaagaagtggggactttgggtttatgtacccataggaggacttggttatggatgggaaagacattttagccttgtacaaaaatctgaaagaggaaaacatctttctggaaaaatcaggtccatggaattgaaaggtggtgataactcaacattttttatgctaaagtataagtgctaaagaggtaaataaacgtcgataggaaataccgaacaatcaattcattcttaaaatagtagatagtagcagtcttttggagtatgtgtttaactgccaactatgaatgggt

SEQ ID NO: 363145 - DNA, 2140 bp, Homo sapiens
tgggtccgggccccccctcgagtttttttattattgaataattattttttccgtgagtttaattttatttccacagggctcacaacaacattaaaccaggatgcttatgttcttaagtctatatttgcatatacattgactcttgatggaaagacttaagaagatcaaggtctcaccatttgtcctcaattcgtgtgaccataagatactgatagcattgagtcttgaaatgatttaataatatgagtgaggatttgctttctccattagagcattaagctaaaactatcaacattttaaaccaaattgccttatttttcttccaaacttcatatatgtctatcaggtaataataggcttgaaaattgatatcctgtggtgctaaagtacagtagaaagagaggagaagtgtatacatgttttattttaaattgtacgaaaggggaatttaaaaaatatgtaactgctgtttatacattggctccttactgcttattaatctgtattgtacacatgatgaaatgaagcagaagctgggagtcggcctttcctctagtaaccaccacatggctcagcatctgtgccaaacataggcgctcctagtctggtcagtgccaagaggctaccagaacatggggcaggtggctggtgttggtgtcccagcctaagagccacctgctgcagttaccatggcatgctgagttgatgcaccaggtggcagcagccatccgttattatttccaatggagacctagcccaggccaaggtaaagttagttaatagcattgggatatagtcactgtaatggtgctattaacaaacagtcaacaccattgtattttttaacttcgtgttctgtatctcctcagccatgtatcttaaatatattttgtcatcataatctttatggtgggggcagactttgcacttactgcagtgcaacacttgcactttaattttcctccaactgtctaaaattagagcaaatacattggcaatacagctgcttttgctctgagctacaatcatggcttttcatgttacttaccaagtggtgtttctggttaggaatcacagctgtaaaattgatttcagttcatcacacttcttcatgatgttgcccctaaattttgcacactatattcttgtatattatttcaaataaatggaaaaaaaagttgcttatctctgacgtctactgattgattgattgattgattaatcttggctgaattttatttatgagttctcagaataacaggttcaggagatgagatggaaaacataaggcaaattcctaacactgctaattaggaggctgctgataggattttaaaaattaaaaacaatgttaatagtggaacaagagccatcagaaaataaggacttagattatctactatttatagagaattgctatacaataaaaatttttatttttcacgtggcatttttgttacacggttaaacagcccaaaggtctgcttttaataacatgacaaagtgtaacaaaagccttgctttatttaaagatccagtatgacatacttaaaaaggccatttaaccttgtatcttagcttgggatgtgccagtggttcctcaactttgttgtctattggaatcattttggggatttttttttttttaatagtggtgtctgtcaggctcccactcctagacatgttaattaatgtggagtgcaagttgggcatcaggattttaaaaaaatcccctggtgattggtatgaatgtgcagccaaatttggaaaccactgagctacatgcttatttagtgaagaaggcagggttgggggaagcagggtacatgttataacttgatcatatccctttaaaagaagtggggactttgggtttatgtacccataggaggacttggttatggatgggaaagacattttagccttgtacaaaaatctgaaagaggaaaacatctttctggaaaaatcaggtccatggaattgaaaggtggtgataactcaacattttttatgctaaagtataagtgctaaagaggtaaataaacgtcgataggaaataccgaacaatcaattcattcttaaaatagtagatagtagcagtcttttggagtatgtgtttaactgccaactatgaatgggt

SEQ ID NO: 363146 - DNA, 2079 bp, Homo sapiens
ggaaatggtttaatggtttccttaaagggtccaaaaatttggccaataaaccctttggacttcctggaaaggaaaaagactttaaaaaggattcaaggttcttccaccgtctcaccatttgtcctcaattcgtgtgaccataagatactgatagcattgagtcttgaaatgatttaataatatgagtgaggatttgctttctccattagagcattaagctaaaactatcaacattttaaaccaaattgccttatttttcttccaaacttcatatatgtctatcaggtaataataggcttgaaaattgatatcctgtggtgctaaagtacagtagaaagagaggagaagtgtatacatgttttattttaaattgtacgaaaggggaatttaaaaaatatgtaactgctgtttatacattggctccttactgcttattaatctgtattgtacacatgatgaaatgaagcagaagctgggagtcggcctttcctctagtaaccaccacatggctcagcatctgtgccaaacataggcgctcctagtctggtcagtgccaagaggctaccagaacatggggcaggtggctggtgttggtgtcccagcctaagagccacctgctgcagttaccatggcatgctgagttgatgcaccaggtggcagcagccatccgttattatttccaatggagacctagcccaggccaaggtaaagttagttaatagcattgggatatagtcactgtaatggtgctattaacaaacagtcaacaccattgtattttttaacttcgtgttctgtatctcctcagccatgtatcttaaatatattttgtcatcataatctttatggtgggggcagactttgcacttactgcagtgcaacacttgcactttaattttcctccaactgtctaaaattagagcaaatacattggcaatacagctgcttttgctctgagctacaatcatggcttttcatgttacttaccaagtggtgtttctggttaggaatcacagctgtaaaattgatttcagttcatcacacttcttcatgatgttgcccctaaattttgcacactatattcttgtatattatttcaaataaatggaaaaaaaagttgcttatctctgacgtctactgattgattgattgattgattaatcttggctgaattttatttatgagttctcagaataacaggttcaggagatgagatggaaaacataaggcaaattcctaacactgctaattaggaggctgctgataggattttaaaaattaaaaacaatgttaatagtggaacaagagccatcagaaaataaggacttagattatctactatttatagagaattgctatacaataaaaatttttatttttcacgtggcatttttgttacacggttaaacagcccaaaggtctgcttttaataacatgacaaagtgtaacaaaagccttgctttatttaaagatccagtatgacatacttaaaaaggccatttaaccttgtatcttagcttgggatgtgccagtggttcctcaactttgttgtctattggaatcattttggggatttttttttttttaatagtggtgtctgtcaggctcccactcctagacatgttaattaatgtggagtgcaagttgggcatcaggattttaaaaaaatcccctggtgattggtatgaatgtgcagccaaatttggaaaccactgagctacatgcttatttagtgaagaaggcagggttgggggaagcagggtacatgttataacttgatcatatccctttaaaagaagtggggactttgggtttatgtacccataggaggacttggttatggatgggaaagacattttagccttgtacaaaaatctgaaagaggaaaacatctttctggaaaaatcaggtccatggaattgaaaggtggtgataactcaacattttttatgctaaagtataagtgctaaagaggtaaataaacgtcgataggaaataccgaacaatcaattcattcttaaaatagtagatagtagcagtcttttggagtatgtgtttaactgccaactatgaatgggt

SEQ ID NO: 363147 - DNA, 4238 bp, Homo sapiens
  misc_feature (4238)..(4238): n is a, c, g, or t
agggggaagacgaagcttgaaagacttggtaatggcgacgggtttggtaagtaggaaagtttcggttgaggagtaagagctgccgcgggagcagtaacccgcgcgggggaggccgacgtcggtcggagagggggtacgagagctgctggtggtgttgtcgtggccggagcggcccgcgcctgggctgccggcacttcgcggcagtcagagcaccataacatggtgtgggaagtgaagacaaatcagatgcctaatgcagtacagaaactcctgttggtgatggacaagagagcctcaggaatgaatgactcattggagttgctgcagtgtaatgagaatttgccatcttcacctggatataactcctgtgatgaacacatggagcttgatgaccttcctgaacttcaggcagttcaaagtgatcctacccaatctggcatgtaccagctgagttcagatgtttcacatcaagaatacccaagatcatcttggaaccaaaatacctcagacataccagaaactacttaccgtgaaaatgaggtggactggctaacagaattggcaaatatcgcgaccagtccacaaagtccactgatgcagtgctcattttacaatagatcatctcctgtacacatcatagccactagcaaaagtttacattcctatgcacgccctccaccagtgtcctcttcttcgaagagtgaaccagccttccctcatcaccattggaaggaggaaacaccagtaagacacgaaagggcaaatagtgagtcagaatctggcattttctgcatgtcctccctgtcagatgatgatgatttgggatggtgcaattcctggccttcaactgtctggcactgttttttgaaaggcacacgactgtgctttcataagggaagcaataaggaatggcaagatgttgaagattttgctagagctgaaggctgtgataatgaggaagatcttcaaatgggcattcacaagggctatggttctgatggtctaaagttgttatcacatgaagaaagtgtatcatttggcgagtctgtactgaagttgacttttgatcctggtacagtagaagatggtttacttaccgtagagtgtaagctggaccaccctttctatgttaaaaataaaggttggtcatcattttatccaagcttgactgtggtacagcatggcattccatgttgtgaagttcatattggcgatgtatgtctacctcctggacaccccgatgccattaattttgatgattcaggtgtttttgatacatttaaaagctatgacttcacacctatggattcttctgcagtttatgtgttaagtagtatggctcgccagcgtcgtgcatctttgtcttgtggaggacctggtggtcaagactttgcaagatctggattcagtaaaaactgtggctcacctggatcatcacagctctcttccaattctttgtatgctaaagctgtcaaaaaccacagctcagggactgtgagtgccacttctcctaataagtgcaaaagaccaatgaatgccttcatgctttttgccaaaaaatacagagttgaatatactcagatgtatccagggaaagataacagagccataagtgtgatccttggtgacaggtggaagaaaatgaagaatgaagagagaagaatgtacacattagaagcaaaggctttggctgaagaacagaaacgtttaaatcctgactgttggaagaggaaaagaaccaattcagtatgtttcaataaatagtgtttaaaattatcttgccttatccgtgcaggtgtactggcatgttggagcagttgttacaacctttaagaggttgtgttgatgctgtctctagcatttttatacttcaaaacctaataatgttatcacatcatcatataaagactgcctttcctcaagggtcatttactctcatagcatggcaagtcgaaatctcaggcaaacttcaaaagaatgtttgttctaaacattgagttggaaaaataattttggaatgcagtgtttctagttgggttgaaagataagcattattaatccattaatatcacagtagaaaatttctctaataattttgggattgtctcaacagctttttttccttaattggtgagggaccaataaggctggaggtgttggggtatgttagctgtcattcatggggacttgtgccattggcacagaatttctagattgaaaaatttcaaggaggagaagaaataggcccaggaatggtggcaaacaagtctatatgataagctatcttggatagacttgtttcttataacttttccattactaaactagcatcttttaggttcagcgtttttagattaattgcaaaaaaattacatgtgatatagtggggtcaatttgaagtatcattgaaagatgaagggaagatatcaatatttttatagtaggagggctggccaaagatgttttaaattcattgtgtacatgtgcctgtttcttagtaaaatgcaggtcatatctgtttaaatttttcacaatttctttaaaaatagtggtcagtcagtagtcagatgagagggtggctgaactgaattttggcagttcttggttaatttagaatttcatgtgttcggacttttcctgtatcccttttctgttcatcctagtcaatgtcttatcattgcatacattttctggatgcttgagccatcagatatcagctagctttttaaaatcacctttaagaaagcagtattttctaatagtaaatttataaacatcttatacatcttagctttcatatataggattactatgtattgatttgtaaacattcactgagtttaattttatttccacagggctcacaacaacattaaaccaggatgcttatgttcttaagtctatatttgcatatacattgactcttgatggaaagacttaagaagatcaaggtctcaccatttgtcctcaattcgtgtgaccataagatactgatagcattgagtcttgaaatgatttaataatatgagtgaggatttgctttctccattagagcattaagctaaaactatcaacattttaaaccaaattgccttatttttcttccaaacttcatatatgtctatcaggtaataataggcttgaaaattgatatcctgtggtgctaaagtacagtagaaagagaggagaagtgtatacatgttttattttaaattgtacgaaaggggaatttaaaaaatatgtaactgctgtttatacattggctccttactgcttattaatctgtattgtacacatgatgaaatgaagcagaagctgggagtcggcctttcctctagtaaccaccacatggctcagcatctgtgccaaacataggcgctcctagtctggtcagtgccaagaggctaccagaacatggggcaggtggctggtgttggtgtcccagcctaagagccacctgctgcagttaccatggcatgctgagttgatgcaccaggtggcagcagccatccgttattatttccaatggagacctagcccaggccaaggtaaagttagttaatagcattgggatatagtcactgtaatggtgctattaacaaacagtcaacaccattgtattttttaacttcgtgttctgtatctcctcagccatgtatcttaaatatattttgtcatcataatctttatggtgggggcagactttgcacttactgcagtgcaacacttgcactttaattttcctccaactgtctaaaattagagcaaatacattggcaatacagctgcttttgctctgagctacaatcatggcttttcatgttacttaccaagtggtgtttctggttaggaatcacagctgtaaaattgatttcagttcatcacacttcttcatgatgttgcccctaaattttgcacactatattcttgtatattatttcaacaaaaacaacaaaacaacaccacaaaacaaacacaaccttgggtgcgggcgccgccctgggcccctggaaaaaggcttcctaaaacactctcggttggggcggcgcgggcgcccagtatggttaagggtgaccgggggccataagcggggttccaaaggaaacacgtggcaggacactggggtggggttcccccccaaataaaaaacgcgcggcggaaccggcggtctgaacaactccagggggtcgggggcatacgggctaccacgggccaggagcgattatagcgcgggggan

SEQ ID NO: 363148 - DNA, 1680 bp, Homo sapiens
acaaatttatttttatttataaatattgtcaactatttaatatttatatttcttttataaaaaatttttttttcaggttatatattcctttatttctttttttttttcacatatataatacaattgtcctcttttttacccccacgccaaatttccaaaatgcctctttttgtagccaaagctacaaacatggcagtgctgtttgttccaacttaaccactctcagtacatggcatgctgagttgatgcaccaggtggcagcagccatccgttattatttccaatggagacctagcccaggccaaggtaaagttagttaatagcattgggatatagtcactgtaatggtgctattaacaaacagtcaacaccattgtattttttaacttcgtgttctgtatctcctcagccatgtatcttaaatatattttgtcatcataatctttatggtgggggcagactttgcacttactgcagtgcaacacttgcactttaattttcctccaactgtctaaaattagagcaaatacattggcaatacagctgcttttgctctgagctacaatcatggcttttcatgttacttaccaagtggtgtttctggttaggaatcacagctgtaaaattgatttcagttcatcacacttcttcatgatgttgcccctaaattttgcacactatattcttgtatattatttcaaataaatggaaaaaaaagttgcttatctctgacgtctactgattgattgattgattgattaatcttggctgaattttatttatgagttctcagaataacaggttcaggagatgagatggaaaacataaggcaaattcctaacactgctaattaggaggctgctgataggattttaaaaattaaaaacaatgttaatagtggaacaagagccatcagaaaataaggacttagattatctactatttatagagaattgctatacaataaaaatttttatttttcacgtggcatttttgttacacggttaaacagcccaaaggtctgcttttaataacatgacaaagtgtaacaaaagccttgctttatttaaagatccagtatgacatacttaaaaaggccatttaaccttgtatcttagcttgggatgtgccagtggttcctcaactttgttgtctattggaatcattttggggatttttttttttttaatagtggtgtctgtcaggctcccactcctagacatgttaattaatgtggagtgcaagttgggcatcaggattttaaaaaaatcccctggtgattggtatgaatgtgcagccaaatttggaaaccactgagctacatgcttatttagtgaagaaggcagggttgggggaagcagggtacatgttataacttgatcatatccctttaaaagaagtggggactttgggtttatgtacccataggaggacttggttatggatgggaaagacattttagccttgtacaaaaatctgaaagaggaaaacatctttctggaaaaatcaggtccatggaattgaaaggtggtgataactcaacattttttatgctaaagtataagtgctaaagaggtaaataaacgtcgataggaaataccgaacaatcaattcattcttaaaatagtagatagtagcagtcttttggagtatgtgtttaactgccaactatgaatgggt

SEQ ID NO: 363149 - DNA, 3407 bp, Homo sapiens
agggggaagacgaagcttgaaagacttggtaatggcgacgggtttggtaagtaggaaagtttcggttgaggagtaagagctgccgcgggagcagtaacccgcgcgggggaggccgacgtcggtcggagagggggtacgagagctgctggtggtgttgtcgtggccggagcggcccgcgcctgggctgccggcacttcgcggcagtcagagcaccataacatggtgtgggaagtgaagacaaatcagatgcctaatgcagtacagaaactcctgttggtgatggacaagagagcctcaggaatgaatgactcattggagttgctgcagtgtaatgagaatttgccatcttcacctggatataactcctgtgatgaacacatggagcttgatgaccttcctgaacttcaggcagttcaaagtgatcctacccaatctggcatgtaccagctgagttcagatgtttcacatcaagaatacccaagatcatcttggaaccaaaatacctcagacataccagaaactacttaccgtgaaaatgaggtggactggctaacagaattggcaaatatcgcgaccagtccacaaagtccactgatgcagtgctcattttacaatagatcatctcctgtacacatcatagccactagcaaaagtttacattcctatgcacgccctccaccagtgtcctcttcttcgaagagtgaaccagccttccctcatcaccattggaaggaggaaacaccagtaagacacgaaagggcaaatagtgagtcagaatctggcattttctgcatgtcctccctgtcagatgatgatgatttgggatggtgcaattcctggccttcaactgtctggcactgttttttgaaaggcacacgactgtgctttcataagggaagcaataaggaatggcaagatgttgaagattttgctagagctgaaggctgtgataatgaggaagatcttcaaatgggcattcacaagggctatggttctgatggtctaaagttgttatcacatgaagaaagtgtatcatttggcgagtctgtactgaagttgacttttgatcctggtacagtagaagatggtttacttaccgtagagtgtaagctggaccaccctttctatgttaaaaataaaggttggtcatcattttatccaagcttgactgtggtacagcatggcattccatgttgtgaagttcatattggcgatgtatgtctacctcctggacaccccgatgccattaattttgatgattcaggtgtttttgatacatttaaaagctatgacttcacacctatggattcttctgcagtttatgtgttaagtagtatggctcgccagcgtcgtgcatctttgtcttgtggaggacctggtggtcaagactttgcaagatctggattcagtaaaaactgtggctcacctggatcatcacagctctcttccaattctttgtatgctaaagctgtcaaaaaccacagctcagggactgtgagtgccacttctcctaataagtgcaaaagaccaatgaatgccttcatgctttttgccaaaaaatacagagttgaatatactcagatgtatccagggaaagataacagagccataagtgtgatccttggtgacaggtggaagaaaatgaagaatgaagagagaagaatgtacacattagaagcaaaggctttggctgaagaacagaaacgtttaaatcctgactgttggaagaggaaaagaaccaattcagtatgtttcaataaatagtgtttaaaattatcttgccttatccgtgcaggtgtactggcatgttggagcagttgttacaacctttaagaggttgtgttgatgctgtctctagcatttttatacttcaaaacctaataatgttatcacatcatcatataaagactgcctttcctcaagggtcatttactctcatagcatggcaagtcgaaatctcaggcaaacttcaaaagaatgtttgttctaaacattgagttggaaaaataattttggaatgcagtgtttctagttgggttgaaagataagcattattaatccattaatatcacagtagaaaatttctctaataattttgggattgtctcaacagctttttttccttaattggtgagggaccaataaggctggaggtgttggggtatgttagctgtcattcatggggacttgtgccattggcacagaatttctagattgaaaaatttcaaggaggagaagaaataggcccaggaatggtggcaaacaagtctatatgataagctatcttggatagacttgtttcttataacttttccattactaaactagcatcttttaggttcagcgtttttagattaattgcaaaaaaattacatgtgatatagtggggtcaatttgaagtatcattgaaagatgaagggaagatatcaatatttttatagtaggagggctggccaaagatgttttaaattcattgtgtacatgtgcctgtttcttagtaaaatgcaggtcatatctgtttaaatttttcacaatttctttaaaaatagtggtcagtcagtagtcagatgagagggtggctgaactgaattttggcagttcttggttaatttagaatttcatgtgttcggacttttcctgtatcccttttctgttcatcctagtcaatgtcttatcattgcatacattttctggatgcttgagccatcagatatcagctagctttttaaaatcacctttaagaaagcagtattttctaatagtaaatttataaacatcttatacatcttagctttcatatataggattactatgtattgatttgtaaacattcactgagtttaattttatttccacagggctcacaacaacattaaaccaggatgcttatgttcttaagtctatatttgcatatacattgactcttgatggaaagacttaagaagatcaaggtctcaccatttgtcctcaattcgtgtgaccataagatactgatagcattgagtcttgaaatgatttaataatatgagtgaggatttgctttctccattagagcattaagctaaaactatcaacattttaaaccaaattgccttatttttcttccaaacttcatatatgtctatcaggtaataataggcttgaaaattgatatcctgtggtgctaaagtacagtagaaagagaggagaagtgtatacatgttttattttaaattgtacgaaaggggaatttaaaaaatatgtaactgctgtttatacattggctccttacttttttttttttcagaacccaggaccccttcacctttgagtgatcttactccctcgtacatgcacaaatacacactcatgcacacacacactcacacacatgcatacacttaggtttcatgcccattttctatcac

SEQ ID NO: 363150 - DNA, 1167 bp, Homo sapiens
caagcccggagtccgggctgcggtcacatgatggggggaagggaggggaacgcgatgaatggcgaaagagggtgggggatggacttggcgtgaaccgggaggcaccgctctgtgtgacccaaagaggaggcttggcaggcgattccagtctccgcctttcaacctatgctgccaccgcaggccgattgaaacaaaacaaaacaaaccaggcgaagtggacagccaggtttttgtagctttaaatgctgcgtgctgtctagggtgtttcactctccgctgtgcactctacactcgagttcattcttagggagttttcagctacagtcgtttttagaaggagcactgacagcgagtcagagcaccataacatggtgtgggaagtgaagacaaatcagatgcctaatgcagtacagaaactcctgttggtgatggacaagagagcctcaggaatgaatgactcattggagttgctgcagtgtaatgagaatttgccatcttcacctggatataactcctgtgatgaacacatggagcttgatgaccttcctgaacttcaggcagttcaaagtgatcctacccaatctggcatgtaccagctgagttcagatgtttcacatcaagaatacccaagatcatcttggaaccaaaatacctcagacataccagaaactacttaccgtgaaaatgaggtggactggctaacagaattggcaaatatcgcgaccagtccacaaagtccactgatgcagtgctcattttacaatagatcatctcctgtacacatcatagccactagcaaaagtttacattcctatgcacgccctccaccagtgtcctcttcttcgaagagtgaaccagccttccctcatcaccattggaaggaggaaacaccagtaagacacgaaagggtaagtttatttatgaggttaaacttttacaaagtttgtacaacagttgaagtacattaacattcctcataggaagtagtctcactgttctgttagtgatctggatttgattttatatacagctctgctatgtgttaggaaagcttattattaatgggaatgtgcgtataactaaagcttccaaaaactttgttttgtgtgtgtcttttttttctttttttttcttttttttttttttttagcaaattctcccacagcc

SEQ ID NO: 363151 - DNA, 728 bp, Homo sapiens
aatagttaagtaaacttattctttaatagcttttattcaactcttaggttgacttttttgtttgtttttgagacggagtctcgctgtgtcacccaagctggagtccagtggtacgatctcagctcactgcaacctccgccttccaggttcaagtgattatcctgcctcagcctctcaagtagctgagactacaggcgcccaccaccatacctggctaattttttgtatttttagtagagacagggtttcaccatgttggccaggctgatctcgaactcctgacctcgtgatccacccaccttggcctcctaaagtgccgtgattacaggcgtgagccactgtgcccggccaggttgactttaaagtaaaaagtttaagtggaatttttagggttatatgtaattattttataatacatagacaattaggttatctaccttagtagtaaggatctaccttttattatttgtgccatagcccaggctgcagtacagcggcgcaactcactgtagcctgtatctcccaggctcaatcctcccacctcagcttcctgaatggctgggattacaggcacatgccaccacacccagttaatttttgtattttttgtagagatagggttgtgccatgttgcccaggctggtctcaaactcctgggttcaagccatctgcctgcctcccaaagtgcaagatctaccttttaaaatcatgttatttatctgttggag

SEQ ID NO: 363152 - DNA, 4922 bp, Homo sapiens
agggggaagacgaagcttgaaagacttggtaatggcgacgggtttggtaagtaggaaagtttcggttgaggagtaagagctgccgcgggagcagtaacccgcgcgggggaggccgacgtcggtcggagagggggtacgagagctgctggtggtgttgtcgtggccggagcggcccgcgcctgggctgccggcacttcgcggcagtcagagcaccataacatggtgtgggaagtgaagacaaatcagatgcctaatgcagtacagaaactcctgttggtgatggacaagagagcctcaggaatgaatgactcattggagttgctgcagtgtaatgagaatttgccatcttcacctggatataactcctgtgatgaacacatggagcttgatgaccttcctgaacttcaggcagttcaaagtgatcctacccaatctggcatgtaccagctgagttcagatgtttcacatcaagaatacccaagatcatcttggaaccaaaatacctcagacataccagaaactacttaccgtgaaaatgaggtggactggctaacagaattggcaaatatcgcgaccagtccacaaagtccactgatgcagtgctcattttacaatagatcatctcctgtacacatcatagccactagcaaaagtttacattcctatgcacgccctccaccagtgtcctcttcttcgaagagtgaaccagccttccctcatcaccattggaaggaggaaacaccagtaagacacgaaagggcaaatagtgagtcagaatctggcattttctgcatgtcctccctgtcagatgatgatgatttgggatggtgcaattcctggccttcaactgtctggcactgttttttgaaaggcacacgactgtgctttcataagggaagcaataaggaatggcaagatgttgaagattttgctagagctgaaggctgtgataatgaggaagatcttcaaatgggcattcacaagggctatggttctgatggtctaaagttgttatcacatgaagaaagtgtatcatttggcgagtctgtactgaagttgacttttgatcctggtacagtagaagatggtttacttaccgtagagtgtaagctggaccaccctttctatgttaaaaataaaggttggtcatcattttatccaagcttgactgtggtacagcatggcattccatgttgtgaagttcatattggcgatgtatgtctacctcctggacaccccgatgccattaattttgatgattcaggtgtttttgatacatttaaaagctatgacttcacacctatggattcttctgcagtttatgtgttaagtagtatggctcgccagcgtcgtgcatctttgtcttgtggaggacctggtggtcaagactttgcaagatctggattcagtaaaaactgtggctcacctggatcatcacagctctcttccaattctttgtatgctaaagctgtcaaaaaccacagctcagggactgtgagtgccacttctcctaataagtgcaaaagaccaatgaatgccttcatgctttttgccaaaaaatacagagttgaatatactcagatgtatccagggaaagataacagagccataagtgtgatccttggtgacaggtggaagaaaatgaagaatgaagagagaagaatgtacacattagaagcaaaggctttggctgaagaacagaaacgtttaaatcctgactgttggaagaggaaaagaaccaattcagtatgtttcaataaatagtgtttaaaattatcttgccttatccgtgcaggtgtactggcatgttggagcagttgttacaacctttaagaggttgtgttgatgctgtctctagcatttttatacttcaaaacctaataatgttatcacatcatcatataaagactgcctttcctcaagggtcatttactctcatagcatggcaagtcgaaatctcaggcaaacttcaaaagaatgtttgttctaaacattgagttggaaaaataattttggaatgcagtgtttctagttgggttgaaagataagcattattaatccattaatatcacagtagaaaatttctctaataattttgggattgtctcaacagctttttttccttaattggtgagggaccaataaggctggaggtgttggggtatgttagctgtcattcatggggacttgtgccattggcacagaatttctagattgaaaaatttcaaggaggagaagaaataggcccaggaatggtggcaaacaagtctatatgataagctatcttggatagacttgtttcttataacttttccattactaaactagcatcttttaggttcagcgtttttagattaattgcaaaaaaattacatgtgatatagtggggtcaatttgaagtatcattgaaagatgaagggaagatatcaatatttttatagtaggagggctggccaaagatgttttaaattcattgtgtacatgtgcctgtttcttagtaaaatgcaggtcatatctgtttaaatttttcacaatttctttaaaaatagtggtcagtcagtagtcagatgagagggtggctgaactgaattttggcagttcttggttaatttagaatttcatgtgttcggacttttcctgtatcccttttctgttcatcctagtcaatgtcttatcattgcatacattttctggatgcttgagccatcagatatcagctagctttttaaaatcacctttaagaaagcagtattttctaatagtaaatttataaacatcttatacatcttagctttcatatataggattactatgtattgatttgtaaacattcactgagtttaattttatttccacagggctcacaacaacattaaaccaggatgcttatgttcttaagtctatatttgcatatacattgactcttgatggaaagacttaagaagatcaaggtctcaccatttgtcctcaattcgtgtgaccataagatactgatagcattgagtcttgaaatgatttaataatatgagtgaggatttgctttctccattagagcattaagctaaaactatcaacattttaaaccaaattgccttatttttcttccaaacttcatatatgtctatcaggtaataataggcttgaaaattgatatcctgtggtgctaaagtacagtagaaagagaggagaagtgtatacatgttttattttaaattgtacgaaaggggaatttaaaaaatatgtaactgctgtttatacattggctccttactgcttattaatctgtattgtacacatgatgaaatgaagcagaagctgggagtcggcctttcctctagtaaccaccacatggctcagcatctgtgccaaacataggcgctcctagtctggtcagtgccaagaggctaccagaacatggggcaggtggctggtgttggtgtcccagcctaagagccacctgctgcagttaccatggcatgctgagttgatgcaccaggtggcagcagccatccgttattatttccaatggagacctagcccaggccaaggtaaagttagttaatagcattgggatatagtcactgtaatggtgctattaacaaacagtcaacaccattgtattttttaacttcgtgttctgtatctcctcagccatgtatcttaaatatattttgtcatcataatctttatggtgggggcagactttgcacttactgcagtgcaacacttgcactttaattttcctccaactgtctaaaattagagcaaatacattggcaatacagctgcttttgctctgagctacaatcatggcttttcatgttacttaccaagtggtgtttctggttaggaatcacagctgtaaaattgatttcagttcatcacacttcttcatgatgttgcccctaaattttgcacactatattcttgtatattatttcaaataaatggaaaaaaaagttgcttatctctgacgtctactgattgattgattgattgattaatcttggctgaattttatttatgagttctcagaataacaggttcaggagatgagatggaaaacataaggcaaattcctaacactgctaattaggaggctgctgataggattttaaaaattaaaaacaatgttaatagtggaacaagagccatcagaaaataaggacttagattatctactatttatagagaattgctatacaataaaaatttttatttttcacgtggcatttttgttacacggttaaacagcccaaaggtctgcttttaataacatgacaaagtgtaacaaaagccttgctttatttaaagatccagtatgacatacttaaaaaggccatttaaccttgtatcttagcttgggatgtgccagtggttcctcaactttgttgtctattggaatcattttggggatttttttttttttaatagtggtgtctgtcaggctcccactcctagacatgttaattaatgtggagtgcaagttgggcatcaggattttaaaaaaatcccctggtgattggtatgaatgtgcagccaaatttggaaaccactgagctacatgcttatttagtgaagaaggcagggttgggggaagcagggtacatgttataacttgatcatatccctttaaaagaagtggggactttgggtttatgtacccataggaggacttggttatggatgggaaagacattttagccttgtacaaaaatctgaaagaggaaaacatctttctggaaaaatcaggtccatggaattgaaaggtggtgataactcaacattttttatgctaaagtataagtgctaaagaggtaaataaacgtcgataggaaataccgaacaatcaattcattcttaaaatagtagatagtagcagtcttttggagtatgtgtttaactgccaactatgaatgggt

SEQ ID NO: 363153 - DNA, 3652 bp, Homo sapiens
agggggaagacgaagcttgaaagacttggtaatggcgacgggtttgtcagagcaccataacatggtgtgggaagtgaagacaaatcagatgcctaatgcagtacagaaactcctgttggtgatggacaagagagcctcaggaatgaatgactcattggagttgctgcagtgtaatgagaatttgccatcttcacctggatataactcctgtgatgaacacatggagcttgatgaccttcctgaacttcaggcagttcaaagtgatcctacccaatctggcatgtaccagctgagttcagatgtttcacatcaagaatacccaagatcatcttggaaccaaaatacctcagacataccagaaactacttaccgtgaaaatgaggtggactggctaacagaattggcaaatatcgcgaccagtccacaaagtccactgatgcagtgctcattttacaatagatcatctcctgtacacatcatagccactagcaaaagtttacattcctatgcacgccctccaccagtgtcctcttcttcgaagagtgaaccagccttccctcatcaccattggaaggaggaaacaccagtaagacacgaaagggcaaatagtgagtcagaatctggcattttctgcatgtcctccctgtcagatgatgatgatttgggatggtgcaattcctggccttcaactgtctggcactgttttttgaaaggcacacgactgtgctttcataagggaagcaataaggaatggcaagatgttgaagattttgctagagctgaaggctgtgataatgaggaagatcttcaaatgggcattcacaagggctatggttctgatggtctaaagttgttatcacatgaagaaagtgtatcatttggcgagtctgtactgaagttgacttttgatcctggtacagtagaagatggtttacttaccgtagagtgtaagctggaccaccctttctatgttaaaaataaaggttggtcatcattttatccaagcttgactgtggtacagcatggcattccatgttgtgaagttcatattggcgatgtatgtctacctcctggacaccccgatgccattaattttgatgattcaggtgtttttgatacatttaaaagctatgacttcacacctatggattcttctgcagtttatgtgttaagtagtatggctcgccagcgtcgtgcatctttgtcttgtggaggacctggtggtcaagactttgcaagatctggattcagtaaaaactgtggctcacctggatcatcacagctctcttccaattctttgtatgctaaagctgtcaaaaaccacagctcagggactgtgagtgccacttctcctaataagtgcaaaagaccaatgaatgccttcatgctttttgccaaaaaatacagagttgaatatactcagatgtatccagggaaagataacagagccataagtgtgatccttggtgacaggtggaagaaaatgaagaatgaagagagaagaatgtacacattagaagcaaaggctttggctgaagaacagaaacgtttaaatcctgactgttggaagaggaaaagaaccaattcaggctcacaacaacattaaaccaggatgcttatgttcttaagtctatatttgcatatacattgactcttgatggaaagacttaagaagatcaaggtctcaccatttgtcctcaattcgtgtgaccataagatactgatagcattgagtcttgaaatgatttaataatatgagtgaggatttgctttctccattagagcattaagctaaaactatcaacattttaaaccaaattgccttatttttcttccaaacttcatatatgtctatcaggtaataataggcttgaaaattgatatcctgtggtgctaaagtacagtagaaagagaggagaagtgtatacatgttttattttaaattgtacgaaaggggaatttaaaaaatatgtaactgctgtttatacattggctccttactgcttattaatctgtattgtacacatgatgaaatgaagcagaagctgggagtcggcctttcctctagtaaccaccacatggctcagcatctgtgccaaacataggcgctcctagtctggtcagtgccaagaggctaccagaacatggggcaggtggctggtgttggtgtcccagcctaagagccacctgctgcagttaccatggcatgctgagttgatgcaccaggtggcagcagccatccgttattatttccaatggagacctagcccaggccaaggtaaagttagttaatagcattgggatatagtcactgtaatggtgctattaacaaacagtcaacaccattgtattttttaacttcgtgttctgtatctcctcagccatgtatcttaaatatattttgtcatcataatctttatggtgggggcagactttgcacttactgcagtgcaacacttgcactttaattttcctccaactgtctaaaattagagcaaatacattggcaatacagctgcttttgctctgagctacaatcatggcttttcatgttacttaccaagtggtgtttctggttaggaatcacagctgtaaaattgatttcagttcatcacacttcttcatgatgttgcccctaaattttgcacactatattcttgtatattatttcaaataaatggaaaaaaaagttgcttatctctgacgtctactgattgattgattgattgattaatcttggctgaattttatttatgagttctcagaataacaggttcaggagatgagatggaaaacataaggcaaattcctaacactgctaattaggaggctgctgataggattttaaaaattaaaaacaatgttaatagtggaacaagagccatcagaaaataaggacttagattatctactatttatagagaattgctatacaataaaaatttttatttttcacgtggcatttttgttacacggttaaacagcccaaaggtctgcttttaataacatgacaaagtgtaacaaaagccttgctttatttaaagatccagtatgacatacttaaaaaggccatttaaccttgtatcttagcttgggatgtgccagtggttcctcaactttgttgtctattggaatcattttggggatttttttttttttaatagtggtgtctgtcaggctcccactcctagacatgttaattaatgtggagtgcaagttgggcatcaggattttaaaaaaatcccctggtgattggtatgaatgtgcagccaaatttggaaaccactgagctacatgcttatttagtgaagaaggcagggttgggggaagcagggtacatgttataacttgatcatatccctttaaaagaagtggggactttgggtttatgtacccataggaggacttggttatggatgggaaagacattttagccttgtacaaaaatctgaaagaggaaaacatctttctggaaaaatcaggtccatggaattgaaaggtggtgataactcaacattttttatgctaaagtataagtgctaaagaggtaaataaacgtcgataggaaataccgaacaatcaattcattcttaaaatagtagatagtagcagtcttttggagtatgtgtttaactgccaactatgaatgggt

SEQ ID NO: 363154 - DNA, 3959 bp, Homo sapiens
caagcccggagtccgggctgcggtcacatgatggggggaagggaggggaacgcgatgaatggcgaaagagggtgggggatggacttggcgtgaaccgggaggcaccgctctgtgtgacccaaagaggaggcttggcaggcgattccagtctccgcctttcaacctatgctgccaccgcaggccgattgaaacaaaacaaaacaaaccaggcgaagtggacagccaggtttttgtagctttaaatgctgcgtgctgtctagggtgtttcactctccgctgtgcactctacactcgagttcattcttagggagttttcagctacagtcgtttttagaaggagcactgacagcgagtcagagcaccataacatggtgtgggaagtgaagacaaatcagatgcctaatgcagtacagaaactcctgttggtgatggacaagagagcctcaggaatgaatgactcattggagttgctgcagtgtaatgagaatttgccatcttcacctggatataactcctgtgatgaacacatggagcttgatgaccttcctgaacttcaggcagttcaaagtgatcctacccaatctggcatgtaccagctgagttcagatgtttcacatcaagaatacccaagatcatcttggaaccaaaatacctcagacataccagaaactacttaccgtgaaaatgaggtggactggctaacagaattggcaaatatcgcgaccagtccacaaagtccactgatgcagtgctcattttacaatagatcatctcctgtacacatcatagccactagcaaaagtttacattcctatgcacgccctccaccagtgtcctcttcttcgaagagtgaaccagccttccctcatcaccattggaaggaggaaacaccagtaagacacgaaagggcaaatagtgagtcagaatctggcattttctgcatgtcctccctgtcagatgatgatgatttgggatggtgcaattcctggccttcaactgtctggcactgttttttgaaaggcacacgactgtgctttcataagggaagcaataaggaatggcaagatgttgaagattttgctagagctgaaggctgtgataatgaggaagatcttcaaatgggcattcacaagggctatggttctgatggtctaaagttgttatcacatgaagaaagtgtatcatttggcgagtctgtactgaagttgacttttgatcctggtacagtagaagatggtttacttaccgtagagtgtaagctggaccaccctttctatgttaaaaataaaggttggtcatcattttatccaagcttgactgtggtacagcatggcattccatgttgtgaagttcatattggcgatgtatgtctacctcctggacaccccgatgccattaattttgatgattcaggtgtttttgatacatttaaaagctatgacttcacacctatggattcttctgcagtttatgtgttaagtagtatggctcgccagcgtcgtgcatctttgtcttgtggaggacctggtggtcaagactttgcaagatctggattcagtaaaaactgtggctcacctggatcatcacagctctcttccaattctttgtatgctaaagctgtcaaaaaccacagctcagggactgtgagtgccacttctcctaataagtgcaaaagaccaatgaatgccttcatgctttttgccaaaaaatacagagttgaatatactcagatgtatccagggaaagataacagagccataagtgtgatccttggtgacaggtggaagaaaatgaagaatgaagagagaagaatgtacacattagaagcaaaggctttggctgaagaacagaaacgtttaaatcctgactgttggaagaggaaaagaaccaattcaggctcacaacaacattaaaccaggatgcttatgttcttaagtctatatttgcatatacattgactcttgatggaaagacttaagaagatcaaggtctcaccatttgtcctcaattcgtgtgaccataagatactgatagcattgagtcttgaaatgatttaataatatgagtgaggatttgctttctccattagagcattaagctaaaactatcaacattttaaaccaaattgccttatttttcttccaaacttcatatatgtctatcaggtaataataggcttgaaaattgatatcctgtggtgctaaagtacagtagaaagagaggagaagtgtatacatgttttattttaaattgtacgaaaggggaatttaaaaaatatgtaactgctgtttatacattggctccttactgcttattaatctgtattgtacacatgatgaaatgaagcagaagctgggagtcggcctttcctctagtaaccaccacatggctcagcatctgtgccaaacataggcgctcctagtctggtcagtgccaagaggctaccagaacatggggcaggtggctggtgttggtgtcccagcctaagagccacctgctgcagttaccatggcatgctgagttgatgcaccaggtggcagcagccatccgttattatttccaatggagacctagcccaggccaaggtaaagttagttaatagcattgggatatagtcactgtaatggtgctattaacaaacagtcaacaccattgtattttttaacttcgtgttctgtatctcctcagccatgtatcttaaatatattttgtcatcataatctttatggtgggggcagactttgcacttactgcagtgcaacacttgcactttaattttcctccaactgtctaaaattagagcaaatacattggcaatacagctgcttttgctctgagctacaatcatggcttttcatgttacttaccaagtggtgtttctggttaggaatcacagctgtaaaattgatttcagttcatcacacttcttcatgatgttgcccctaaattttgcacactatattcttgtatattatttcaaataaatggaaaaaaaagttgcttatctctgacgtctactgattgattgattgattgattaatcttggctgaattttatttatgagttctcagaataacaggttcaggagatgagatggaaaacataaggcaaattcctaacactgctaattaggaggctgctgataggattttaaaaattaaaaacaatgttaatagtggaacaagagccatcagaaaataaggacttagattatctactatttatagagaattgctatacaataaaaatttttatttttcacgtggcatttttgttacacggttaaacagcccaaaggtctgcttttaataacatgacaaagtgtaacaaaagccttgctttatttaaagatccagtatgacatacttaaaaaggccatttaaccttgtatcttagcttgggatgtgccagtggttcctcaactttgttgtctattggaatcattttggggatttttttttttttaatagtggtgtctgtcaggctcccactcctagacatgttaattaatgtggagtgcaagttgggcatcaggattttaaaaaaatcccctggtgattggtatgaatgtgcagccaaatttggaaaccactgagctacatgcttatttagtgaagaaggcagggttgggggaagcagggtacatgttataacttgatcatatccctttaaaagaagtggggactttgggtttatgtacccataggaggacttggttatggatgggaaagacattttagccttgtacaaaaatctgaaagaggaaaacatctttctggaaaaatcaggtccatggaattgaaaggtggtgataactcaacattttttatgctaaagtataagtgctaaagaggtaaataaacgtcgataggaaataccgaacaatcaattcattcttaaaatagtagatagtagcagtcttttggagtatgtgtttaactgccaactatgaatgggt

SEQ ID NO: 363155 - DNA, 4462 bp, Homo sapiens
agggggaagacgaagcttgaaagacttggtaatggcgacgggtttgtcagagcaccataacatggtgtgggaagtgaagacaaatcagatgcctaatgcagtacagaaactcctgttggtgatggacaagagagcctcaggaatgaatgactcattggagttgctgcagtgtaatgagaatttgccatcttcacctggatataactcctgtgatgaacacatggagcttgatgaccttcctgaacttcaggcagttcaaagtgatcctacccaatctggcatgtaccagctgagttcagatgtttcacatcaagaatacccaagatcatcttggaaccaaaatacctcagacataccagaaactacttaccgtgaaaatgaggtggactggctaacagaattggcaaatatcgcgaccagtccacaaagtccactgatgcagtgctcattttacaatagatcatctcctgtacacatcatagccactagcaaaagtttacattcctatgcacgccctccaccagtgtcctcttcttcgaagagtgaaccagccttccctcatcaccattggaaggaggaaacaccagtaagacacgaaagggcaaatagtgagtcagaatctggcattttctgcatgtcctccctgtcagatgatgatgatttgggatggtgcaattcctggccttcaactgtctggcactgttttttgaaaggcacacgactgtgctttcataagggaagcaataaggaatggcaagatgttgaagattttgctagagctgaaggctgtgataatgaggaagatcttcaaatgggcattcacaagctatgacttcacacctatggattcttctgcagtttatgtgttaagtagtatggctcgccagcgtcgtgcatctttgtcttgtggaggacctggtggtcaagactttgcaagatctggattcagtaaaaactgtggctcacctggatcatcacagctctcttccaattctttgtatgctaaagctgtcaaaaaccacagctcagggactgtgagtgccacttctcctaataagtgcaaaagaccaatgaatgccttcatgctttttgccaaaaaatacagagttgaatatactcagatgtatccagggaaagataacagagccataagtgtgatccttggtgacaggtggaagaaaatgaagaatgaagagagaagaatgtacacattagaagcaaaggctttggctgaagaacagaaacgtttaaatcctgactgttggaagaggaaaagaaccaattcagtatgtttcaataaatagtgtttaaaattatcttgccttatccgtgcaggtgtactggcatgttggagcagttgttacaacctttaagaggttgtgttgatgctgtctctagcatttttatacttcaaaacctaataatgttatcacatcatcatataaagactgcctttcctcaagggtcatttactctcatagcatggcaagtcgaaatctcaggcaaacttcaaaagaatgtttgttctaaacattgagttggaaaaataattttggaatgcagtgtttctagttgggttgaaagataagcattattaatccattaatatcacagtagaaaatttctctaataattttgggattgtctcaacagctttttttccttaattggtgagggaccaataaggctggaggtgttggggtatgttagctgtcattcatggggacttgtgccattggcacagaatttctagattgaaaaatttcaaggaggagaagaaataggcccaggaatggtggcaaacaagtctatatgataagctatcttggatagacttgtttcttataacttttccattactaaactagcatcttttaggttcagcgtttttagattaattgcaaaaaaattacatgtgatatagtggggtcaatttgaagtatcattgaaagatgaagggaagatatcaatatttttatagtaggagggctggccaaagatgttttaaattcattgtgtacatgtgcctgtttcttagtaaaatgcaggtcatatctgtttaaatttttcacaatttctttaaaaatagtggtcagtcagtagtcagatgagagggtggctgaactgaattttggcagttcttggttaatttagaatttcatgtgttcggacttttcctgtatcccttttctgttcatcctagtcaatgtcttatcattgcatacattttctggatgcttgagccatcagatatcagctagctttttaaaatcacctttaagaaagcagtattttctaatagtaaatttataaacatcttatacatcttagctttcatatataggattactatgtattgatttgtaaacattcactgagtttaattttatttccacagggctcacaacaacattaaaccaggatgcttatgttcttaagtctatatttgcatatacattgactcttgatggaaagacttaagaagatcaaggtctcaccatttgtcctcaattcgtgtgaccataagatactgatagcattgagtcttgaaatgatttaataatatgagtgaggatttgctttctccattagagcattaagctaaaactatcaacattttaaaccaaattgccttatttttcttccaaacttcatatatgtctatcaggtaataataggcttgaaaattgatatcctgtggtgctaaagtacagtagaaagagaggagaagtgtatacatgttttattttaaattgtacgaaaggggaatttaaaaaatatgtaactgctgtttatacattggctccttactgcttattaatctgtattgtacacatgatgaaatgaagcagaagctgggagtcggcctttcctctagtaaccaccacatggctcagcatctgtgccaaacataggcgctcctagtctggtcagtgccaagaggctaccagaacatggggcaggtggctggtgttggtgtcccagcctaagagccacctgctgcagttaccatggcatgctgagttgatgcaccaggtggcagcagccatccgttattatttccaatggagacctagcccaggccaaggtaaagttagttaatagcattgggatatagtcactgtaatggtgctattaacaaacagtcaacaccattgtattttttaacttcgtgttctgtatctcctcagccatgtatcttaaatatattttgtcatcataatctttatggtgggggcagactttgcacttactgcagtgcaacacttgcactttaattttcctccaactgtctaaaattagagcaaatacattggcaatacagctgcttttgctctgagctacaatcatggcttttcatgttacttaccaagtggtgtttctggttaggaatcacagctgtaaaattgatttcagttcatcacacttcttcatgatgttgcccctaaattttgcacactatattcttgtatattatttcaaataaatggaaaaaaaagttgcttatctctgacgtctactgattgattgattgattgattaatcttggctgaattttatttatgagttctcagaataacaggttcaggagatgagatggaaaacataaggcaaattcctaacactgctaattaggaggctgctgataggattttaaaaattaaaaacaatgttaatagtggaacaagagccatcagaaaataaggacttagattatctactatttatagagaattgctatacaataaaaatttttatttttcacgtggcatttttgttacacggttaaacagcccaaaggtctgcttttaataacatgacaaagtgtaacaaaagccttgctttatttaaagatccagtatgacatacttaaaaaggccatttaaccttgtatcttagcttgggatgtgccagtggttcctcaactttgttgtctattggaatcattttggggatttttttttttttaatagtggtgtctgtcaggctcccactcctagacatgttaattaatgtggagtgcaagttgggcatcaggattttaaaaaaatcccctggtgattggtatgaatgtgcagccaaatttggaaaccactgagctacatgcttatttagtgaagaaggcagggttgggggaagcagggtacatgttataacttgatcatatccctttaaaagaagtggggactttgggtttatgtacccataggaggacttggttatggatgggaaagacattttagccttgtacaaaaatctgaaagaggaaaacatctttctggaaaaatcaggtccatggaattgaaaggtggtgataactcaacattttttatgctaaagtataagtgctaaagaggtaaataaacgtcgataggaaataccgaacaatcaattcattcttaaaatagtagatagtagcagtcttttggagtatgtgtttaactgccaactatgaatgggt

SEQ ID NO: 363156 - DNA, 1966 bp, Homo sapiens
  misc_feature (54)..(54): n is a, c, g, or t
tgaagcctctgtctccagggctcaagcaatcctcctgcctcagcctcccgagtngctgggattccaggcatgtgccaccatgcgcagctaacttttttctatattttttgcagatacgggcttctgccatgtcgcccaggctggtctcagactcctggactcaagccatccacctgccttggcctcccaaagtgttgggattacaggcatgagccaccacgcctggcctaaaaacttttatctgtgaattttctatttcttcctcccactgggttttcatctctagccagtcactatatttgacttgctgatttgtattttctttttaggattttacagtttttggaggcagtctgtcaggagcacatgcccaaaagatctgcaaaatcatggaccaggccataacggtgggggctccagtgattgggctgaatgactctgggggagcacggatccaagaaggagtggagtctttggctggctatgcagacatctttctgaggaatgttacggcatccggagtcatccctcagatttctctgatcatgggcccatgtgctggtggggccgtctactccccagccctaacagacttcacgttcatggtaaaggacacctcctacctgttcatcactggccctgatgttgtgaagtctgtcaccaatgaggatgttacccaggaggagctcggtggtgccaagacccacaccaccatgtcaggtgtggcccacagagcttttgaaaatgatgttgatgccttgtgtaatctccgggatttcttcaactacctgcccctgagcagtcaggacccggctcccgtccgtgagtgccacgatcccagtgaccgtctggttcctgagcttgacacaattgtccctttggaatcaaccaaagcctacaacatggtggacatcatacactctgttgttgatgagcgtgaattttttgagatcatgcccaattatgccaagaacatcattgttggttttgcaagaatgaatgggaggactgttggaattgttggcaaccaacctaaggtggcctcaggatgcttggatattaattcatctgtgaaaggggctcgttttgtcagattctgtgatgcattcaatattccactcatcacttttgttgatgtccctggctttctacctggtaagtttttgacagagtgggggctaggagagttgcctttcccagtaaggtgcccactttatttggagatcttcttgcagaactccccgaggacttgtgacttctccatgtattctgggtgtccagaagatagggctgtgtaaggaatggccctctccagaggtgggaaagacctcacagctgagagtggcaggataaccatgtgaggacttgtgggtatctagtaactcttcctcatgtctaggcacagcacaggaatacgggggcatcatccggcatggtgccaagcttctctacgcatttgctgaggcaactgtacccaaagtcacagtcatcaccaggaaggcctatggaggtgcctatgatgtcatgagctctaagcacctttgtggtgataccaactatgcctggcccaccgcagagattgcagtcatgggagcaaagggcgctgtggagatcatcttcaaagggcatgagaatgtggaagctgctcaggcagagtacatcgagaagtttgccaaccctttccctgcagcagtgcgagggtttgtggatgacatcatccaaccttcttccacacgtgcccgaatctgctgtgacctggatgtcttggccagcaagaaggtacaacgtccttggagaaaacatgcaaatattccattgtaaacaaatcaaaggaaaagaaaccaagaactgaattactgtctgcccattcacatcccattcctgccttttgcaatcatgaaacctgggaatccaaatagttggataacttagaataactaagtttattaaattctagaaagatctc

SEQ ID NO: 363157 - DNA, 975 bp, Homo sapiens
  misc_feature (521)..(521): n is a, c, g, or t
agcagtggtatcaactcagagtggctattacggccggggggtaggggacgcgccggcacagcaaaaatggcggcggcattacgggtggcggcggtcggggcaaggctcagcgttctggcgagcggtctccgcgccgcggtccgcagcctttgcagccaggccacctctgttaacgaacgcaaaaaaaaaaaaaaaaaaaaaaaaaagttttgtgggggggcctggggccccaggaagaaggtttttaaaaacccccttctgtgggggcgggggggccccaattgtggtgttaggtacacacgtgtggccaaagggggtgttcccaggggaaaacccgggggcaagggaacaatggtgtggggtgggttctctccccaataaaaaaaaggcccggggggaacccccgggaggggttttgtggacaacaccccaaatagcgcagggtcggggggggccagatcgaaggcgctctactcacaaaggcacgctctaaaggcgggcctagaatataaattcagccngcgcgggagggtagaaaacaagagtaaatatatgaacacgaggaagaactcacatagtgctaataaggagtatgcataatgatataaagactatatataagcaacatgacgaatgatagagtaatacatagatgaaggagatacaaaatgcacgaacagacagagagagaagtgatactaagccgacacaatgagcggagatgaagaggaaaagagatgaaatgacgagaacaaagcgagagaaagacagtgcaaagcatagggaagagataatgagcgacaaggatgcgagagcgactgaacggccggagacacagagaagagaacgcacgagaaagacggaagagcgaacggagacagacgagaaccagaaccggagtatccacgcgacaacaaaagagaaacggagacacaccaacacaaacaacaacttgagatgaaagcacggactacg

SEQ ID NO: 363158 - DNA, 303 bp, Homo sapiens
atacaagggggaattcacagggcctaccatctctgtatcaggttgggcactgcttatactgctggccccagggatggtgcccaggctgagcagaaggttgaggggtggcatcatctcgggatgcagatgatccactcccttttctgtgcttcaccagggtttgtggatgacatcatccaaccttcttccacacgtgcccgaatctgctgtgacctggatgtcttggccagcaagaaggtacaacgtctgaatttttttttggtttgttgggtaggtagggttgtgtgaagtatctataagcgg

SEQ ID NO: 363159 - DNA, 3048 bp, Homo sapiens
  misc_feature (2594)..(2594): n is a, c, g, or t
agcgccgtacccacgctttagcacatgcgtactcaggtgcgccggtaggggacgcgccggcacagcaaaaatggcggcggcattacgggtggcggcggtcggggcaaggctcagcgttctggcgagcggtctccgcgccgcggtccgcagcctttgcagccaggccacctctgttaacgaacgcatcgaaaacaagcgccggaccgcgctgctgggagggggccaacgccgtattgacgcgcagcacaagcgaggaaagctaacagccagggagaggatcagtctcttgctggaccctggcagctttgttgagagcgacatgtttgtggaacacagatgtgcagattttggaatggctgctgataagaataagtttcctggagacagcgtggtcactggacgaggccgaatcaatggaagattggtttatgtcttcagtcaggattttacagtttttggaggcagtctgtcaggagcacatgcccaaaagatctgcaaaatcatggaccaggccataacggtgggggctccagtgattgggctgaatgactctgggggagcacggatccaagaaggagtggagtctttggctggctatgcagacatctttctgaggaatgttacggcatccggagtcatccctcagatttctctgatcatgggcccatgtgctggtggggccgtctactccccagccctaacagacttcacgttcatggtaaaggacacctcctacctgttcatcactggccctgatgttgtgaagtctgtcaccaatgaggatgttacccaggaggagctcggtggtgccaagacccacaccaccatgtcaggtgtggcccacagagcttttgaaaatgatgttgatgccttgtgtaatctccgggatttcttcaactacctgcccctgagcagtcaggacccggctcccgtccgtgagtgccacgatcccagtgaccgtctggttcctgagcttgacacaattgtccctttggaatcaaccaaagcctacaacatggtggacatcatacactctgttgttgatgagcgtgaattttttgagatcatgcccaattatgccaagaacatcattgttggttttgcaagaatgaatgggaggactgttggaattgttggcaaccaacctaaggtggcctcaggatgcttggatattaattcatctgtgaaaggggctcgttttgtcagattctgtgatgcattcaatattccactcatcacttttgttgatgtccctggctttctacctggcacagcacaggaatacgggggcatcatccggcatggtgccaagcttctctacgcatttgctgaggcaactgtacccaaagtcacagtcatcaccaggaaggcctatggaggtgcctatgatgtcatgagctctaagcacctttgtggtgataccaactatgcctggcccaccgcagagattgcagtcatgggagcaaagggcgctgtggagatcatcttcaaagggcatgagaatgtggaagctgctcaggcagagtacatcgagaagtttgccaaccctttccctgcagcagtgcgagggtttgtggatgacatcatccaaccttcttccacacgtgcccgaatctgctgtgacctggatgtcttggccagcaagaaggtacaacgtccttggagaaaacatgcaaatattccattgtaaacaaatcaaaggaaaagaaaccaagaactgaattactgtctgcccattcacatcccattcctgccttttgcaatcatgaaacctgggaatccaaatagttggataacttagaataactaagtttattaaattctagaaagatctcttttgtgccttactgtaaaattatttacttttttaaacattttaagttgtattttttgagcataaattcgatttttttaggtggaaatctgaaaaatcaatacaactagaaagaaaaatagtacacagtgttatcatctagagctgatttttatttcacacctctgggtattgttctttttcctctcgagttagtttttttatccataggtgagatatatagtaagtttttaaggcaaagtatttcttaggcttaagtttccttattttaaaaatagggtaatatgccctatctatctcctaattcctccatgaattgaggattacaatgtgatgtttgcaattgtggtatatgtgtttagcagtacagatgctcaataaggcatagcaccctatgttgactcaggttatttccagaaaaaaaaaaaaaaaaaaaaaaaaaaaagttttgtgggggggcctggggccccaggaagaaggtttttaaaaacccccttctgtgggggcgggggggccccaattgtggtgttaggtacacacgtgtggccaaagggggtgttcccaggggaaaacccgggggcaagggaacaatggtgtggggtgggttctctccccaataaaaaaaaggcccggggggaacccccgggaggggttttgtggacaacaccccaaatagcgcagggtcggggggggccagatcgaaggcgctctactcacaaaggcacgctctaaaggcgggcctagaatataaattcagccngcgcgggagggtagaaaacaagagtaaatatatgaacacgaggaagaactcacatagtgctaataaggagtatgcataatgatataaagactatatataagcaacatgacgaatgatagagtaatacatagatgaaggagatacaaaatgcacgaacagacagagagagaagtgatactaagccgacacaatgagcggagatgaagaggaaaagagatgaaatgacgagaacaaagcgagagaaagacagtgcaaagcatagggaagagataatgagcgacaaggatgcgagagcgactgaacggccggagacacagagaagagaacgcacgagaaagacggaagagcgaacggagacagacgagaaccagaaccggagtatccacgcgacaacaaaagagaaacggagacacaccaacacaaacaacaacttgagatgaaagcacggactacg

SEQ ID NO: 363160 - DNA, 2079 bp, Homo sapiens
agcgccgtacccacgctttagcacatgcgtactcaggtgcgccggtaggggacgcgccggcacagcaaaaatggcggcggcattacgggtggcggcggtcggggcaaggctcagcgttctggcgagcggtctccgcgccgcggtccgcagcctttgcagccaggccacctctgttaacgaacgcatcgaaaacaagcgccggaccgcgctgctgggagggggccaacgccgtattgacgcgcagcacaagcgaggaaagctaacagccagggagaggatcagtctcttgctggaccctggcagctttgttgagagcgacatgtttgtggaacacagatgtgcagattttggaatggctgctgataagaataagtttcctggagacagcgtggtcactggacgaggccgaatcaatggaagattggtttatgtcttcagtcaggattttacagtttttggaggcagtctgtcaggagcacatgcccaaaagatctgcaaaatcatggaccaggccataacggtgggggctccagtgattgggctgaatgactctgggggagcacggatccaagaaggagtggagtctttggctggctatgcagacatctttctgaggaatgttacggcatccggagtcatccctcagatttctctgatcatgggcccatgtgctggtggggccgtctactccccagccctaacagacttcacgttcatggtaaaggacacctcctacctgttcatcactggccctgatgttgtgaagtctgtcaccaatgaggatgttacccaggaggagctcggtggtgccaagacccacaccaccatgtcaggtgtggcccacagagcttttgaaaatgatgttgatgccttgtgtaatctccgggatttcttcaactacctgcccctgagcagtcaggacccggctcccgtccgtgagtgccacgatcccagtgaccgtctggttcctgagcttgacacaattgtccctttggaatcaaccaaagcctacaacatggtggacatcatacactctgttgttgatgagcgtgaattttttgagatcatgcccaattatgccaagaacatcattgttggttttgcaagaatgaatgggaggactgttggaattgttggcaaccaacctaaggtggcctcaggatgcttggatattaattcatctgtgaaaggggctcgttttgtcagattctgtgatgcattcaatattccactcatcacttttgttgatgtccctggctttctacctggtaagtttttgacagagtgggggctaggagagttgcctttcccagtaaggtgcccactttatttggagatcttcttgcagaactccccgaggacttgtgacttctccatgtattctgggtgtccagaagatagggctgtgtaaggaatggccctctccagaggtgggaaagacctcacagctgagagtggcaggataaccatgtgaggacttgtgggtatctagtaactcttcctcatgtctaggcacagcacaggaatacgggggcatcatccggcatggtgccaagcttctctacgcatttgctgaggcaactgtacccaaagtcacagtcatcaccaggaaggcctatggaggtgcctatgatgtcatgagctctaagcacctttgtggtgataccaactatgcctggcccaccgcagagattgcagtcatgggagcaaagggcgctgtggagatcatcttcaaagggcatgagaatgtggaagctgctcaggcagagtacatcgagaagtttgccaaccctttccctgcagcagtgcgagggtttgtggatgacatcatccaaccttcttccacacgtgcccgaatctgctgtgacctggatgtcttggccagcaagaaggtacaacgtccttggagaaaacatgcaaatattccattgtaaacaaatcaaaggaaaagaaaccaagaactgaattactgtctgcccattcacatcccattcctgccttttgcaatcatgaaacctgggaatccaaatagttggataacttagaataactaagtttattaaattctagaaagatctc

SEQ ID NO: 363161 - DNA, 1811 bp, Homo sapiens
tggagctaaccggaaagaggccccctgcgcgggtgtttttaacactcggcacgaggcattacgggtggcggcggtcggggcaaggctcagcgttctggcgagcggtctccgcgccgcggtccgcagcctttgcagccaggccacctctgttaacgaacgcatcgaaaacaagcgccggaccgcgctgctgggagggggccaacgccgtattgacgcgcagcacaagcgaggaaagctaacagccagggagaggatcagtctcttgctggaccctggcagctttgttgagagcgacatgtttgtggaacacagatgtgcagattttggaatggctgctgataagaataagtttcctggagacagcgtggtcactggacgaggccgaatcaatggaagattggtttatgtcttcagtcaggattttacagtttttggaggcagtctgtcaggagcacatgcccaaaagatctgcaaaatcatggaccaggccataacggtgggggctccagtgattgggctgaatgactctgggggagcacggatccaagaaggagtggagtctttggctggctatgcagacatctttctgaggaatgttacggcatccggagtcatccctcagatttctctgatcatgggcccatgtgctggtggggccgtctactccccagccctaacagacttcacgttcatggtaaaggacacctcctacctgttcatcactggccctgatgttgtgaagtctgtcaccaatgaggatgttacccaggaggagctcggtggtgccaagacccacaccaccatgtcaggtgtggcccacagagcttttgaaaatgatgttgatgccttgtgtaatctccgggatttcttcaactacctgcccctgagcagtcaggacccggctcccgtccgtgagtgccacgatcccagtgaccgtctggttcctgagcttgacacaattgtccctttggaatcaaccaaagcctacaacatggtggacatcatacactctgttgttgatgagcgtgaattttttgagatcatgcccaattatgccaagaacatcattgttggttttgcaagaatgaatgggaggactgttggaattgttggcaaccaacctaaggtggcctcaggatgcttggatattaattcatctgtgaaaggggctcgttttgtcagattctgtgatgcattcaatattccactcatcacttttgttgatgtccctggctttctacctggcacagcacaggaatacgggggcatcatccggcatggtgccaagcttctctacgcatttgctgaggcaactgtacccaaagtcacagtcatcaccaggaaggcctatggaggtgcctatgatgtcatgagctctaagcacctttgtggtgataccaactatgcctggcccaccgcagagattgcagtcatgggagcaaagggcgctgtggagatcatcttcaaagggcatgagaatgtggaagctgctcaggcagagtacatcgagaagtttgccaaccctttccctgcagcagtgcgagggtttgtggatgacatcatccaaccttcttccacacgtgcccgaatctgctgtgacctggatgtcttggccagcaagaaggtacaacgtccttggagaaaacatgcaaatattccattgtaaacaaatcaaaggaaaagaaaccaagaactgaattactgtctgcccattcacatcccattcctgccttttgcaatcatgaaacctgggaatccaaatagttggataacttagaataactaagtttattaaattctagaaagatctc

SEQ ID NO: 363162 - DNA, 1891 bp, Homo sapiens
agcagtggtatcaactcagagtggctattacggccggggggtaggggacgcgccggcacagcaaaaatggcggcggcattacgggtggcggcggtcggggcaaggctcagcgttctggcgagcggtctccgcgccgcggtccgcagcctttgcagccaggccacctctgttaacgaacgcatcgaaaacaagcgccggaccgcgctgctgggagggggccaacgccgtattgacgcgcagcacaagcgaggaaagctaacagccagggagaggatcagtctcttgctggaccctggcagctttgttgagagcgacatgtttgtggaacacagatgtgcagattttggaatggctgctgataagaataagtttcctggagacagcgtggtcactggacgaggccgaatcaatggaagattggtttatgtcttcagtcagcaaataataggctgggcacagtggctcccgcttgtcatctcagcactttgggaggccgaggattttacagtttttggaggcagtctgtcaggagcacatgcccaaaagatctgcaaaatcatggaccaggccataacggtgggggctccagtgattgggctgaatgactctgggggagcacggatccaagaaggagtggagtctttggctggctatgcagacatctttctgaggaatgttacggcatccggagtcatccctcagatttctctgatcatgggcccatgtgctggtggggccgtctactccccagccctaacagacttcacgttcatggtaaaggacacctcctacctgttcatcactggccctgatgttgtgaagtctgtcaccaatgaggatgttacccaggaggagctcggtggtgccaagacccacaccaccatgtcaggtgtggcccacagagcttttgaaaatgatgttgatgccttgtgtaatctccgggatttcttcaactacctgcccctgagcagtcaggacccggctcccgtccgtgagtgccacgatcccagtgaccgtctggttcctgagcttgacacaattgtccctttggaatcaaccaaagcctacaacatggtggacatcatacactctgttgttgatgagcgtgaattttttgagatcatgcccaattatgccaagaacatcattgttggttttgcaagaatgaatgggaggactgttggaattgttggcaaccaacctaaggtggcctcaggatgcttggatattaattcatctgtgaaaggggctcgttttgtcagattctgtgatgcattcaatattccactcatcacttttgttgatgtccctggctttctacctggcacagcacaggaatacgggggcatcatccggcatggtgccaagcttctctacgcatttgctgaggcaactgtacccaaagtcacagtcatcaccaggaaggcctatggaggtgcctatgatgtcatgagctctaagcacctttgtggtgataccaactatgcctggcccaccgcagagattgcagtcatgggagcaaagggcgctgtggagatcatcttcaaagggcatgagaatgtggaagctgctcaggcagagtacatcgagaagtttgccaaccctttccctgcagcagtgcgagggtttgtggatgacatcatccaaccttcttccacacgtgcccgaatctgctgtgacctggatgtcttggccagcaagaaggtacaacgtccttggagaaaacatgcaaatattccattgtaaacaaatcaaaggaaaagaaaccaagaactgaattactgtctgcccattcacatcccattcctgccttttgcaatcatgaaacctgggaatccaaatagttggataacttagaataactaagtttattaaattctagaaagatctc

SEQ ID NO: 363163 - DNA, 1337 bp, Homo sapiens
cgtccctgctcctggcttttggcctgctctgcctgccctggcttcaagagggcagtgccttcccaaccattcccttatccaggctttttgacaacgctatgcagacatctttctgaggaatgttacggcatccggagtcatccctcagatttctctgatcatgggcccatgtgctggtggggccgtctactccccagccctaacagacttcacgttcatggtaaaggacacctcctacctgttcatcactggccctgatgttgtgaagtctgtcaccaatgaggatgttacccaggaggagctcggtggtgccaagacccacaccaccatgtcaggtgtggcccacagagcttttgaaaatgatgttgatgccttgtgtaatctccgggatttcttcaactacctgcccctgagcagtcaggacccggctcccgtccgtgagtgccacgatcccagtgaccgtctggttcctgagcttgacacaattgtccctttggaatcaaccaaagcctacaacatggtggacatcatacactctgttgttgatgagcgtgaattttttgagatcatgcccaattatgccaagaacatcattgttggttttgcaagaatgaatgggaggactgttggaattgttggcaaccaacctaaggtggcctcaggatgcttggatattaattcatctgtgaaaggggctcgttttgtcagattctgtgatgcattcaatattccactcatcacttttgttgatgtccctggctttctacctggcacagcacaggaatacgggggcatcatccggcatggtgccaagcttctctacgcatttgctgaggcaactgtacccaaagtcacagtcatcaccaggaaggcctatggaggtgcctatgatgtcatgagctctaagcacctttgtggtgataccaactatgcctggcccaccgcagagattgcagtcatgggagcaaagggcgctgtggagatcatcttcaaagggcatgagaatgtggaagctgctcaggcagagtacatcgagaagtttgccaaccctttccctgcagcagtgcgagggtttgtggatgacatcatccaaccttcttccacacgtgcccgaatctgctgtgacctggatgtcttggccagcaagaaggtacaacgtccttggagaaaacatgcaaatattccattgtaaacaaatcaaaggaaaagaaaccaagaactgaattactgtctgcccattcacatcccattcctgccttttgcaatcatgaaacctgggaatccaaatagttggataacttagaataactaagtttattaaattctagaaagatctc

SEQ ID NO: 363164 - DNA, 1344 bp, Homo sapiens
tggggggtagcgtgagaggaggggatggaggatctgtcaggagcacatgcccaaaagatctgatcatggaccaggccataacggtgggggctccagtgattgggctgaatgactctgggggagcacggatccaagaaggagtggagtctttggctggctatgcagacatctttctgaggaatgttacggcatccggagtcatccctcagatttctctgatcatgggcccatgtgctggtggggccgtctactccccagccctaacagacttcacgttcatggtaaaggacacctcctacctgttcatcactggccctgatgttgtgaagtctgtcaccaatgaggatgttacccaggaggagctcggtggtgccaagacccacaccaccatgtcaggtgtggcccacagagcttttctgagcagtcaggacccggctcccgtccgtgagtgccacgatcccagtgaccgtctggttcctgagcttgacacaattgtccctttggaatcaaccaaagcctacaacatggtggacatcatacactctgttgttgatgagcgtgaattttttgagatcatgcccaattatgccaagaacatcattgttggttttgcaagaatgaatgggaggactgttggaattgttggcaaccaacctaaggtggcctcaggatgcttggatattaattcatctgtgaaaggggctcgttttgtcagattctgtgatgcattcaatattccactcatcacttttgttgatgtccctggctttctacctggcacagcacaggaatacgggggcatcatccggcatggtgccaagcttctctacgcatttgctgaggcaactgtacccaaagtcacagtcatcaccaggaaggcctatggaggtgcctatgatgtcatgagctctaagcacctttgtggtgataccaactatgcctggcccaccgcagagattgcagtcatgggagcaaagggcgctgtggagatcatcttcaaagggcatgagaatgtggaagctgctcaggcagagtacatcgagaagtttgccaaccctttccctgcagcagtgcgagggtttgtggatgacatcatccaaccttcttccacacgtgcccgaatctgctgtgacctggatgtcttggccagcaagaaggtacaacgtccttggagaaaacatgcaaatattccattgtaaacaaatcaaaggaaaagaaaccaagaactgaattactgtctgcccattcacatcccattcctgccttttgcaatcatgaaacctgggaatccaaatagttggataacttagaataactaagtttattaaattctagaaagatctc

SEQ ID NO: 363165 - DNA, 614 bp, Homo sapiens
ggggctccagtgattgggctgaatgactctgggggagcacggatccaagaaggagtggagtctttggctggctatgcagacatctttctggtgagaaacctgttaatagagaataaaaaaatacagggcttaagttctctaagccatggcctggccagagcttctccaactctcctcattgttctctgccgcattgtgtctgttctgtgggtcctttctgtgtcactgggggtgggatgaagggtagatgaaaagcaagagagagtgggaagagagggttttcattttttctaacagagggccactcacaggggaaattacagttaaagatcgttcataagggaaaagcacttgaaaatgtttttctttttttgaaagcaagggagaggaaatatgaaaagttaaaatgaactgatgtgcttgaattagaagttttaaaaaatgtagcaccttttttattttttagttaaaacactacaggattattaaataaagtccaagccacagtgcaaagaagaatgaaatcaccccagatcctaccattcagaaacatttggcgaacctcattactgatatctctttgcttatttacagactgaaattatgagagaaag

SEQ ID NO: 363166 - DNA, 1835 bp, Homo sapiens
agcgccgtacccacgctttagcacatgcgtactcaggtgcgccggtaggggacgcgccggcacagcaaaaatggcggcggcattacgggtggcggcggtcggggcaaggctcagcgttctggcgagcggtctccgcgccgcggtccgcagcctttgcagccaggccacctctgttaacgaacgcatcgaaaacaagcgccggaccgcgctgctgggagggggccaacgccgtattgacgcgcagcacaagcgaggaaagctaacagccagggagaggatcagtctcttgctggaccctggcagctttgttgagagcgacatgtttgtggaacacagatgtgcagattttggaatggctgctgataagaataagtttcctggagacagcgtggtcactggacgaggccgaatcaatggaagattggtttatgtcttcagtcaggattttacagtttttggaggcagtctgtcaggagcacatgcccaaaagatctgcaaaatcatggaccaggccataacggtgggggctccagtgattgggctgaatgactctgggggagcacggatccaagaaggagtggagtctttggctggctatgcagacatctttctgaggaatgttacggcatccggagtcatccctcagatttctctgatcatgggcccatgtgctggtggggccgtctactccccagccctaacagacttcacgttcatggtaaaggacacctcctacctgttcatcactggccctgatgttgtgaagtctgtcaccaatgaggatgttacccaggaggagctcggtggtgccaagacccacaccaccatgtcaggtgtggcccacagagcttttgaaaatgatgttgatgccttgtgtaatctccgggatttcttcaactacctgcccctgagcagtcaggacccggctcccgtccgtgagtgccacgatcccagtgaccgtctggttcctgagcttgacacaattgtccctttggaatcaaccaaagcctacaacatggtggacatcatacactctgttgttgatgagcgtgaattttttgagatcatgcccaattatgccaagaacatcattgttggttttgcaagaatgaatgggaggactgttggaattgttggcaaccaacctaaggtggcctcaggatgcttggatattaattcatctgtgaaaggggctcgttttgtcagattctgtgatgcattcaatattccactcatcacttttgttgatgtccctggctttctacctggcacagcacaggaatacgggggcatcatccggcatggtgccaagcttctctacgcatttgctgaggcaactgtacccaaagtcacagtcatcaccaggaaggcctatggaggtgcctatgatgtcatgagctctaagcacctttgtggtgataccaactatgcctggcccaccgcagagattgcagtcatgggagcaaagggcgctgtggagatcatcttcaaagggcatgagaatgtggaagctgctcaggcagagtacatcgagaagtttgccaaccctttccctgcagcagtgcgagggtttgtggatgacatcatccaaccttcttccacacgtgcccgaatctgctgtgacctggatgtcttggccagcaagaaggtacaacgtccttggagaaaacatgcaaatattccattgtaaacaaatcaaaggaaaagaaaccaagaactgaattactgtctgcccattcacatcccattcctgccttttgcaatcatgaaacctgggaatccaaatagttggataacttagaataactaagtttattaaattctagaaagatctc

SEQ ID NO: 363167 - DNA, 1831 bp, Homo sapiens
agcagtggtatcaactcagagtggctattacggccggggggtaggggacgcgccggcacagcaaaaatggcggcggcattacgggtggcggcggtcggggcaaggctcagcgttctggcgagcggtctccgcgccgcggtccgcagcctttgcagccaggccacctctgttaacgaacgcatcgaaaacaagcgccggaccgcgctgctgggagggggccaacgccgtattgacgcgcagcacaagcgaggaaagctaacagccagggagaggatcagtctcttgctggaccctggcagctttgttgagagcgacatgtttgtggaacacagatgtgcagattttggaatggctgctgataagaataagtttcctggagacagcgtggtcactggacgaggccgaatcaatggaagattggtttatgtcttcagtcaggattttacagtttttggaggcagtctgtcaggagcacatgcccaaaagatctgcaaaatcatggaccaggccataacggtgggggctccagtgattgggctgaatgactctgggggagcacggatccaagaaggagtggagtctttggctggctatgcagacatctttctgaggaatgttacggcatccggagtcatccctcagatttctctgatcatgggcccatgtgctggtggggccgtctactccccagccctaacagacttcacgttcatggtaaaggacacctcctacctgttcatcactggccctgatgttgtgaagtctgtcaccaatgaggatgttacccaggaggagctcggtggtgccaagacccacaccaccatgtcaggtgtggcccacagagcttttgaaaatgatgttgatgccttgtgtaatctccgggatttcttcaactacctgcccctgagcagtcaggacccggctcccgtccgtgagtgccacgatcccagtgaccgtctggttcctgagcttgacacaattgtccctttggaatcaaccaaagcctacaacatggtggacatcatacactctgttgttgatgagcgtgaattttttgagatcatgcccaattatgccaagaacatcattgttggttttgcaagaatgaatgggaggactgttggaattgttggcaaccaacctaaggtggcctcaggatgcttggatattaattcatctgtgaaaggggctcgttttgtcagattctgtgatgcattcaatattccactcatcacttttgttgatgtccctggctttctacctggcacagcacaggaatacgggggcatcatccggcatggtgccaagcttctctacgcatttgctgaggcaactgtacccaaagtcacagtcatcaccaggaaggcctatggaggtgcctatgatgtcatgagctctaagcacctttgtggtgataccaactatgcctggcccaccgcagagattgcagtcatgggagcaaagggcgctgtggagatcatcttcaaagggcatgagaatgtggaagctgctcaggcagagtacatcgagaagtttgccaaccctttccctgcagcagtgcgagggtttgtggatgacatcatccaaccttcttccacacgtgcccgaatctgctgtgacctggatgtcttggccagcaagaaggtacaacgtccttggagaaaacatgcaaatattccattgtaaacaaatcaaaggaaaagaaaccaagaactgaattactgtctgcccattcacatcccattcctgccttttgcaatcatgaaacctgggaatccaaatagttggataacttagaataactaagtttattaaattctagaaagatctc

SEQ ID NO: 363168 - DNA, 1734 bp, Homo sapiens
agcgccgtacccacgctttagcacatgcgtactcaggtgcgccggtaggggacgcgccggcacagcaaaaatggcggcggcattacgggtggcggcggtcggggcaaggctcagcgttctggcgagcggtctccgcgccgcggtccgcagcctttgcagccaggccacctctgttaacgaacgcatcgaaaacaagcgccggaccgcgctgctgggagggggccaacgccgtattgacgcgcagcacaagcgaggaaagctaacagccagggagaggatcagtctcttgctggaccctggcagctttgttgagagcgacatgtttgtggaacacagatgtgcagattttggaatggctgctgataagaataagtttcctggagacagcgtggtcactggacgaggccgaatcaatggaagattggtttatgtcttcagtcaggattttacagtttttggaggcagtctgtcaggagcacatgcccaaaagatctgcaaaatcatggaccaggccataacggtgggggctccagtgattgggctgaatgactctgggggagcacggatccaagaaggagtggagtctttggctggctatgcagacatctttctgaggaatgttacggcatccggagtcatccctcagatttctctgatcatgggcccatgtgctggtggggccgtctactccccagccctaacagacttcacgttcatggtaaaggacacctcctacctgttcatcactggccctgatgttgtgaagtctgtcaccaatgaggatgttacccaggaggagctcggtggtgccaagacccacaccaccatgtcaggtgtggcccacagagcttttgaaaatgatgttgatgccttgtgtaatctccgggatttcttcaactacctgcccctgagcagtcaggacccggctcccgtccgtgagtgccacgatcccagtgaccgtctggttcctgagcttgacacaattgtccctttggaatcaaccaaagcctacaacatggtggacatcatacactctgttgttgatgagcgtgaattttttgagatcatgcccaattatgccaagaacatcattgttggttttgcaagaatgaatgggaggactgttggaattgttggcaaccaacctaaggtggcctcaggatgcttggatattaattcatctgtgaaaggggctcgttttgtcagattctgtgatgcattcaatattccactcatcacttttgttgatgtccctggctttctacctggcctatggaggtgcctatgatgtcatgagctctaagcacctttgtggtgataccaactatgcctggcccaccgcagagattgcagtcatgggagcaaagggcgctgtggagatcatcttcaaagggcatgagaatgtggaagctgctcaggcagagtacatcgagaagtttgccaaccctttccctgcagcagtgcgagggtttgtggatgacatcatccaaccttcttccacacgtgcccgaatctgctgtgacctggatgtcttggccagcaagaaggtacaacgtccttggagaaaacatgcaaatattccattgtaaacaaatcaaaggaaaagaaaccaagaactgaattactgtctgcccattcacatcccattcctgccttttgcaatcatgaaacctgggaatccaaatagttggataacttagaataactaagtttattaaattctagaaagatctc

SEQ ID NO: 363169 - DNA, 1681 bp, Homo sapiens
cggacgcgtgggtcgacggacgcgtgggtcctcgaaaacaagcgccggaccgcgctgctgggagggggccaacgccgtattgacgcgcagcacaagcgaggaaagctaacagccagggagaggatcagtctcttgctggaccctggcagctttgttgagagcgacatgtttgtggaacacagatgtgcagattttggaatggctgctgataagaataagtttcctggagacagcgtggtcactggacgaggccgaatcaatggaagattggtttatgtcttcagtcaggattttacagtttttggaggcagtctgtcaggagcacatgcccaaaagatctgcaaaatcatggaccaggccataacggtgggggctccagtgattgggctgaatgactctgggggagcacggatccaagaaggagtggagtctttggctggctatgcagacatctttctgaggaatgttacggcatccggagtcatccctcagatttctctgatcatgggcccatgtgctggtggggccgtctactccccagccctaacagacttcacgttcatggtaaaggacacctcctacctgttcatcactggccctgatgttgtgaagtctgtcaccaatgaggatgttacccaggaggagctcggtggtgccaagacccacaccaccatgtcaggtgtggcccacagagcttttgaaaatgatgttgatgccttgtgtaatctccgggatttcttcaactacctgcccctgagcagtcaggacccggctcccgtccgtgagtgccacgatcccagtgaccgtctggttcctgagcttgacacaattgtccctttggaatcaaccaaagcctacaacatggtggacatcatacactctgttgttgatgagcgtgaattttttgagatcatgcccaattatgccaagaacatcattgttggttttgcaagaatgaatgggaggactgttggaattgttggcaaccaacctaaggtggcctcaggatgcttggatattaattcatctgtgaaaggggctcgttttgtcagattctgtgatgcattcaatattccactcatcacttttgttgatgtccctggctttctacctggcacagcacaggaatacgggggcatcatccggcatggtgccaagcttctctacgcatttgctgaggcaactgtacccaaagtcacagtcatcaccaggaaggcctatggaggtgcctatgatgtcatgagctctaagcacctttgtggtgataccaactatgcctggcccaccgcagagattgcagtcatgggagcaaagggcgctgtggagatcatcttcaaagggcatgagaatgtggaagctgctcaggcagagtacatcgagaagtttgccaaccctttccctgcagcagtgcgagggtttgtggatgacatcatccaaccttcttccacacgtgcccgaatctgctgtgacctggatgtcttggccagcaagaaggtacaacgtccttggagaaaacatgcaaatattccattgtaaacaaatcaaaggaaaagaaaccaagaactgaattactgtctgcccattcacatcccattcctgccttttgcaatcatgaaacctgggaatccaaatagttggataacttagaataactaagtttattaaattctagaaagatctc

SEQ ID NO: 363170 - DNA, 1781 bp, Homo sapiens
agcgccgtacccacgctttagcacatgcgtactcaggtgcgccggtaggggacgcgccggcacagcaaaaatggcggcggcattacgggtggcggcggtcggggcaaggctcagcgttctggcgagcggtctccgcgccgcggtccgcagcctttgcagccaggccacctctgttaacgaacgcatcgaaaacaagcgccggaccgcgctgctgggagggggccaacgccgtattgacgcgcagcacaagcgaggaaagctaacagccagggagaggatcagtctcttgctggaccctggcagctttgttgagagcgacatgtttgtggaacacagatgtgcagattttggaatggctgctgataagaataagtttcctggagacagcgtggtcactggacgaggccgaatcaatggaagattggtttatgtcttcagtcaggattttacagtttttggaggcagtctgtcaggagcacatgcccaaaagatctgcaaaatcatggaccaggccataacggtgggggctccagtgattgggctgaatgactctgggggagcacggatccaagaaggagtggagtctttggctggctatgcagacatctttctgaggaatgttacggcatccggagtcatccctcagatttctctgatcatgggcccatgtgctggtggggccgtctactccccagccctaacagacttcacgttcatggtaaaggacacctcctacctgttcatcactggccctgatgttgtgaagtctgtcaccaatgaggatgttacccaggaggagctcggtggtgccaagacccacaccaccatgtcaggtgtggcccacagagcttttctgagcagtcaggacccggctcccgtccgtgagtgccacgatcccagtgaccgtctggttcctgagcttgacacaattgtccctttggaatcaaccaaagcctacaacatggtggacatcatacactctgttgttgatgagcgtgaattttttgagatcatgcccaattatgccaagaacatcattgttggttttgcaagaatgaatgggaggactgttggaattgttggcaaccaacctaaggtggcctcaggatgcttggatattaattcatctgtgaaaggggctcgttttgtcagattctgtgatgcattcaatattccactcatcacttttgttgatgtccctggctttctacctggcacagcacaggaatacgggggcatcatccggcatggtgccaagcttctctacgcatttgctgaggcaactgtacccaaagtcacagtcatcaccaggaaggcctatggaggtgcctatgatgtcatgagctctaagcacctttgtggtgataccaactatgcctggcccaccgcagagattgcagtcatgggagcaaagggcgctgtggagatcatcttcaaagggcatgagaatgtggaagctgctcaggcagagtacatcgagaagtttgccaaccctttccctgcagcagtgcgagggtttgtggatgacatcatccaaccttcttccacacgtgcccgaatctgctgtgacctggatgtcttggccagcaagaaggtacaacgtccttggagaaaacatgcaaatattccattgtaaacaaatcaaaggaaaagaaaccaagaactgaattactgtctgcccattcacatcccattcctgccttttgcaatcatgaaacctgggaatccaaatagttggataacttagaataactaagtttattaaattctagaaagatctc

SEQ ID NO: 363171 - DNA, 380 bp, Homo sapiens
agtaagaaatcagcatgctattaatatatcagctcctgaaaattattttgaaatttcagaggtttatgaaatccaaaggtccaggagcaactatatgacaggctaggaaattactaggacactgaagttcttagctctcagcgctaacgctggagatgagtctatactcatctcttgtctcccagacgactagtagagtagagtaactggaacatagaaaccttggtttttgtttttaaagagatgaatacacaagtgaaaaaagcttttaaattttagaaaatgcatttgtaagcttgtagccaaagattttccatgattttttaaatcatagaaagttctcagtgggacctcaaaagcatccctaaattagcgggctt

SEQ ID NO: 363172 - DNA, 3557 bp, Homo sapiens
cgcggccgccggcctcctaggagcgctgcacctggtgatgaccctcgtagtggctgcggcgcgggccgagaaggaagcattcgttcagtcagagagcataatagaagtactgcgttttgatgatggagggctactacaggtaatttttttttaagtagacaagttattgttaagccttgaataatatctggttattatttttcttttaaaaatgtaattggtttatctgaaatatatttatattttatgagctttgaagataggtcagtagagtctttagtaatataaaaacctctgtagttacgtgagttttcttttagattaaatatttctttaaaatgcaaactcattgtggtattaaaaccttgtaaataagtacattatcattcttatctttacgtaagaggtgttgagaaatgtaatagagagtggttgcatagtatttgcctagagtcagctttgtatattttaaaactgaataaaaactgaacataatgagctctaattttataaagccttcctactaaaaaatgatcttaagtctcttttttctagttctttaatctgtttcaaggtgagaacttggagaacctatgggaacaaatgttttaaatatctccctttaggtggttgtttataggatctggatggcagacaaatcaggactgaatttctggaaaattccctaagtgtgtttgctctgtattgattgaggaaggatttgtgtctgttaggaactggacatctaggttgcaggttgataatccattctaaaaattctggagcatgatttgtatttttgctgagggaggctgctaatttgtatctagatggagttggctatggaaaagcttgtgaactgggatgtgattcactaatagtctttggatctgctcagatgcttggacaggagcttgggtgagatctcagaattctgtggcaaaggtaattttggtctagaaaaatgttgagggcaagtagtatcaattggttacttaagccacaaaaaaacctaagactcctacagaatgtctaatattgagatgctatataatgtagtatatggcccctaaatagctgaatagaagacccttttgaatagatgtaaaattgttcattttaatgttgaagagtgtttctcagaaacaatttttattttgacataatgttatctttttctgactgtaatttaccaataggtttaacgattttaaataactcctggtttcttatgctatgattagaacagaaaaatgtacatgtagcatttctatggcagaatatatatcctttctctaatttaaatttaagctaaagcagggagagtgtcaaagcaacaaccttgttttacattatttaaaatgtgaattttgcccaagaacattccttcttagatctgcaattcatgtacattcatgtggcttggccatagtaattttttttttttttttgagacagggtctcgcactgtcacccaggcctggagtgcagtggcgcgatctcggctcaccacaagctctgcctcccgggttcacaccattctcctgcctaggcctcccaagtagctgggactactggcgcctgccaccatgcccagctaattttttttgtatttttagtacagacggggtttcaccatgttagccaggatggtctcaatctcctgacctcatgatccgcccgcctcggcctcccaaagtgctaggattacaggtgtgagccaccgcgcccggccaactcatagtaatttttttaatcctcaaaaatcaactgataagaaatcagtaaaaaaataaattttaaaaattgccaaaaagattagacttgttttctttatttttagataaggaaaattaggtttatggaagttaaataatttattctgtagtactcaattgctagagcaggaattcagtgtccagtaagtaccatactcaccatgtctaatttcaaaactctccacggcacgatgcatgtgcagtgctctcagatattccatgggtttgcacttgttatgaatataaattataacccccatagattatgttttctatagttgatgctttggccattgtcattcctgtttggctggactaagatttagcatccagaatacgtaaagatcagaccgttcctaagatgacacggactctgaggaatctgcatctcaacagaagaaatccacattaaggccataaccacaggatgccctggtcaggtatctcaaaccatcattcccatcctaactgatcagaatggttggctcttctaacctgttcctttgaaagattataaaatggaataacaaaagattctttcatttacaagcataatttaataaacctgaatctgcttcctaatctaactttctttttaaaaaaaatagaggcaggggtggacacagtggttcacgcctgtggtcccaacaccttgggaggctgagacgggtcagtcgcttgagtccaggagttcaagaccagcctgggaaatgtagggaaaccttgtctctacaaaaaattagccaggtgtgttggcacacacctgtggtcccagctactctggtgtctgaggcaggaggatcgcttgagcctgggaggtcgagacttcagtgagctgtgattgtgccactgtactccagcctgggcagcagagtgagatcctgtatcaacaactacaaaaagtgttccctgagttcaagtcccttaaatttattttgcacctcattttaaaggggggttgagagtcctgagctaaagtggtgagcaaagcccccattattgcccagccattcctcctctaagaggttcacgcccttggccaaagtcctcaaaacctggagcatctcagccccagctccgcattggaatcaccttgagagctttaaaaatttctggtgacaggtactttcctaagggcattacaggaacgaactcacctgggcctcaccagcaactgatggcatggtacccaagggtcccattgtacaggtggtgggatgtggtggggacaggggccaggtgtaccgcaggcagggagatggtggctgagctggggtaaaaaatgcatgcctgtccccacagggccagtggacccccatgtcctgaccttggaggtccagagagcacatcagaacttggccagcatacggagctccacagctgactgaccacacagttcatagagacagggtctcactctattgcccaggctggtttgcagtggcgcaatgacagctcactgcaaccttgacctcccgggcccaagtgaacctctcgcctcagactccagagtagctgggactacaggcacatgccaccatacccatccaattttttgtattttttatagagacagaggtctatgttgcccaggctggccttgaattcctggcctcaagccatcttctcgccttggtctcccaaagtgctgggattacagatgtgagtcaccatgctcggcctaacttttttttttttgagatggggtctcgctctgtcacccaggctggagcgcggtggcgcagtctcggctcactgcaagctctgcctcctgggttc

SEQ ID NO: 363173 - DNA, 552 bp, Homo sapiens
tctcatgttatcataattgcaagaaagatctgaaagaagcgagtggtctgagcctgccctgcttgggtctgttttgcaaagaagaggagggtggggaggggagctgcagtaagagccttaaaaagatgtctcagaaactggcacatcatgatctagacgagggcccacaattttgttaaattaccaagtttggtttttaataatttctcaatattatgcgccaagatctaattttaaaactgtatgaggactttgtgctgaaaatagagtatttttttaaagtaaggctgtcttggtttaaaagcagattacagaaatgtaagtcaacttaagaacagtgaatgaatgtaaaaacattcagttgagaccatatgcattttctgtgctgtttgtacttgaggtatgtaacatttgtatacctgaacttattttaaagatgaactgaaatgcacatagccaagtcttgagatacaagattgaatgtgtatttcttaaaaatacaactttgtgttgtactttgaaataaatgatgcttttttcaaaaaaaaaaat

SEQ ID NO: 363174 - DNA, 485 bp, Homo sapiens
cgcggccgccggcctcctaggagcgctgcacctggtgatgaccctcgtagtggctgcggcgcgggccgagaaggaaggtgggtgtcccccggcggcgtccctgcggcggggctgtcaccccgctctcgcggaggccgggagggctgggccgggaggaagggccgcggccggggctccggcgcaaagttgggcggtcgggtaccgtcccgagccgggacctcgcggcgcccgccgcacggagtggccttcgctctccgtgattccttcccgtgccttcccccgtctcctgtcactgccatttcaaaacttcctgacttctcgtacgttcttgccacttggcccgctaggtaggaggggcatattttttggctttattgcggcgaataggtacattttaggacacttctgttttcttggttgcggttggttgcatgcagacagagcttactttaaaatgtggtaaaaatagcgagacacagcttaaa

SEQ ID NO: 363175 - DNA, 215 bp, Homo sapiens
gggcagtacggatgtgaaaccttcattagaactaccatatactccccctttggaaagtaagcaacgtagaaatctcccaagcaagattcctcttccaactgcaatgacaagtggatccaaatcacgaaatgcccagaaaacaaaaggtacaagtaagttagtggataacagaccacctgcccgcccatccgtacgggcccggggtaccgagctcg

SEQ ID NO: 363176 - DNA, 6127 bp, Homo sapiens
cgcggccgccggcctcctaggagcgctgcacctggtgatgaccctcgtagtggctgcggcgcgggccgagaaggaagcattcgttcagtcagagagcataatagaagtactgcgttttgatgatggagggctactacagaccgagacaacacttggactcagttcatatcagcagaaaagtatatctctctaccgggggaattgcaggcccatacgatttgagccaccaatgctggatttccatgaacaaccagttggaatgccaaaaatggaaaaagtctacttacataatcctagttctgaagaaacgattactttagtatcaatatctgctacaacatcacattttcatgcatcattttttcaaaataggaaaattcttccaggaggaaatacatcatttgatgtagtttttcttgcaagagtagtaggaaatgtagaaaatactttatttattaatacatctaatcatggggtatttacttaccaggtatttggtgttggagttccaaatccatatcgattgaggccgttccttggggccagagtccctgtgaatagcagtttctcacctataataaacatccacaatcctcacagtgagcctttacaggttgtagaaatgtactctagtggaggagaccttcacctagaactcccaacgggtcaacaaggaggtaccagaaaactgtgggaaattcctccttatgaaaccaagggagtgatgagagccagtttttcatctagagaagcagataatcacacagccttcataagaataaagactaatgcttcagacagcacagagtttatcattcttcctgttgaggttgaagttacaacagctcctggaatttattcctcaactgaaatgttagattttggtacactaagaacacaagatctaccaaaagttttaaaccttcatttattaaattcaggaacaaaagatgtaccaataacaagtgttcgacctacaccacaaaatgatgctataacggtacactttaaaccaattacattaaaagcatcagaaagtaaatacaccaaggttgcaagcattagttttgatgcatcgaaggcaaaaaagccatctcagttttctgggaaaataacagttaaagcaaaggaaaagagttattctaaacttgaaataccatatcaagcagaagttttagatggttatttgggatttgatcatgctgcaacattatttcacatccgagacagccctgctgatcctgtggaaaggccaatttaccttactaacactttcagttttgcgatcctcattcacgatgtgttgctaccagaagaagccaaaacaatgtttaaagttcacaacttcagcaaaccagtcttaattcttcctaatgaatcaggatacatttttaccctgctttttatgccttccacatcatccatgcacattgataacaacattttacttattaccaatgcttctaaatttcatttacccgtgcgggtatacacaggctttttagattactttgtattgccccccaaaatagaggaacgtttcatagattttggagtactgagtgctacagaagcaagtaatattttatttgcaattataaacagcaatccaattgagttggctataaaaagttggcatatcataggagacggtttatcaatagaacttgtagctgtggaaagaggcaatagaactacaataatttcaagcctgccagagtttgaaaaatcctctttatcagatcaatcatcggtaacattagcttcaggctattttgcagtcttcagagtcaaacttactgcaaaaaaattagaggggattcatgatggagccatccagatcacaacagactatgagatcctgacaatccctgtgaaggctgtgattgcagtaggctcactgacctgcttccctaagcacgtggttcttccaccttcctttccagggaaaatagttcatcaaagtttaaatattatgaattccttctcacagaaggtaaaaatacagcaaatacgatctttgtcagaagatgtgcgattttactataaacgattacggggcaataaggaagacttggagccaggaaaaaaatcaaagattgcaaacatttattttgatcctggactacagtgtggggatcattgctatgttggcttgccttttctatccaaatctgaacccaaagtgcagcctggtgtagccatgcaggaagatatgtgggatgctgactgggatttgcatcaaagcctgttcaagggatggacaggaataaaggaaaattcaggtcatagattgagtgctatatttgaagtaaatacagaccttcaaaaaaatataatatcaaaaatcactgctgagctctcctggccttccatacttagctcaccccggcacttgaaatttccacttactaatacaaactgctcctcagaagaagagattactttagaaaatcctgcagatgttcctgtctatgttcagtttattcctctggctttatattccaacccttcagtgtttgtagataagttagtatcaaggtttaacttgagtaaggtggcaaagatagatttgagaacactagaatttcaagtcttcagaaacagtgctcatccactgcagagttcaacaggatttatggagggcctctctcgacatttaattttaaacctaattttaaaacctggagaaaagaaatctgtcaaagtaaagtttactccagttcacaacagaactgtttcttcacttatcatagtcagaaataacctgactgtgatggatgctgtgatggtccaaggacaaggaacaactgagaacttgagggtggcaggcaagcttccaggtccaggaagctccttacgctttaaaatcacggaagcattgttaaaagattgtacagatagtttaaaactaagagaaccaaatttcacattgaaaagaacatttaaggtagagaatacaggacaacttcaaattcacatagaaaccattgaaatcagtggatactcatgtgaaggatatggctttaaagttgttaattgtcaagagtttactctaagtgccaatgcttctagagatataatcatatttgcactgtttcttttggtcattggaacagcctatttggaagctcaaggaatatgggagccatttcgaaggcggctatcctttgaggcctcgaacccgcccttcgatgtgggaaggccatttgatctcaggagaatcgttggtatttcatctgaaggaaacttgaacacactcagctgtgaccccggtcacagtagggggttctgtggagcaggcggttcatcatcccgacccagtgccgggagtcataagcagtgtggcccatcggtccacccacacagcagtcacagcaatagaaactcagctgacgtggaaaacgtcagagccaaaaacagttcaagtacctctagtaggacttctgctcaagcagcttcttcacagtctgctaacaaaacaagcccccttgtcttagattcgaacacagtgactcaaggtcatacagcgggcagaaagtccaaaggggcaaagcagagccagcacggcagccagcaccatgcccacagcccgctggagcagcaccctcagcctcctctgccaccgccagtgcctcagccccaggagctgcagcctgaaaggctgtctcccgcccccctcgcacacccttcccacccagaacgtgccagcagcgcgaggcacagttccgaggactcggacatcaccagtctcatagaagccatggacaaagacttcgaccaccatgactccccagccctagaagtgtttacagagcagcctccatcgccattgccaaaaagcaaagggaaaggaaaacctcttcagcgcaaggtgaaaccacctaagaagcaagaggaaaaggagaagaagggaaagggaaagccacaggaagatgagctgaaggactctttggctgatgatgatagctcctccaccaccacagagacctccaaccctgacacagaaccgctcctcaaggaggatacagaaaagcaaaagggaaaacaagccatgcctgaaaaacatgaaagtgaaatgtctcaagtgaagcaaaaaagcaaaaaactcttaaatattaagaaagaaatcccaacagatgtgaaacccagttcattagaactaccatatactccccctttggaaagtaagcaacgtagaaatctcccaagcaagattcctcttccaactgcaatgacaagtggatccaaatcacgaaatgcccagaaaacaaaaggtacaagtaagttagtggataacagaccacctgccctagcaaaattcctcccgaatagtcaagaattaggcaacaccagtagctcagagggtgaaaaagactctcctccaccggagtgggattccgttccagttcacaaacctggcagctctactgatagtctttataaactttctctgcaaaccctcaacgcagacattttcttaaaacaacgccagacctcaccgacacctgcttccccgtctcccccagctgccccctgcccctttgtggcccggggcagctacagcagcatcgtcaacagcagctccagcagtgaccctaaaataaaacagccaaatggaagcaaacacaagttgacaaaggcagcctcgctcccgggcaagaacggcaaccccacttttgctgcagtcacggctggctacgacaagagcccaggtgggaatggctttgctaaagtttcttcaaacaaaacaggtttctccagcagccttggcatttcacacgctcctgttgacagcgatggctcagacagctcgggtttgtggagtcccgtcagcaacccaagcagccctgacttcactcccctcaattcgttctccgcctttggaaactcttttaatctaactggtgaagttttcagcaaactcggattatctcgatcgtgcaatcaggcctcacagaggagctggaacgagtttaatagtggcccttcatacctttgggagtcgccagcgacagatcccagtccttcctggccagccagttccggctccccgacccacacagccacatcggtcctcggtaacaccagcggcctgtggtccaccactccattcagcagctccatttggtccagcaaccttagcagcgcccttcccttcaccactccagcaaacacgctggcaagcatcggcctcatgggcacagaaaactcccctgctcctcacgctccctccacctccagtccagctgacgacttgggacagacctacaacccgtggcggatatggagccccacgattggaagaagaagctcggacccttggtctaattcgcactttcctcacgagaattaaattaagcaaaaaacaaacaaacatagtgggccctcgtctagatcatgatgtgccagtttctgagacatctttttaaggctcttactgcagctcccctccccaccctcctcttctttgcaaaacagacccaagcagggcaggctcagaccactcgcttctttcagatctttcttgcaattatgataacatgagatttgctgttgtgcttttagagaaaagtctggactcagccacaaactctaataagacctgtacatctgagaacctttcccgttactgcgttttcaccacctgtcttccccatgctttatttatctgtatgaacacagatttgacattacagctaaggaaataatttgagttgattcagaaatcctggcatgtgacaattttgttaaattaccaagtttggtttttaataatttctcaatattatgcgccaagatctaattttaaaactgtatgaggactttgtgctgaaaatagagtatttttttaaagtaaggctgtcttggtttaaaagcagattacagaaatgtaagtcaacttaagaacagtgaatgaatgtaaaaacattcagttgagaccatatgcattttctgtgctgtttgtacttgaggtatgtaacatttgtatacctgaacttattttaaagatgaactgaaatgcacatagccaagtcttgagatacaagattgaatgtgtatttcttaaaaatacaactttgtgttgtactttgaaataaatgatgcttttttcaaaaaaaaaaat

SEQ ID NO: 363177 - DNA, 2903 bp, Homo sapiens
acgaagggtgatctgtgcacgaagggtgatctgtgcacgaagggtgatctgtgcacgaagtggggttctgtggagcaggcggttcatcatcccgacccagtgccgggagtcataagcagtgtggcccatcggtccacccacacagcagtcacagcaatagaaactcagctgacgtggaaaacgtcagagccaaaaacagttcaagtacctctagtaggacttctgctcaagcagcttcttcacagtctgctaacaaaacaagcccccttgtcttagattcgaacacagtgactcaaggtcatacagcgggcagaaagtccaaaggggcaaagcagagccagcacggcagccagcaccatgcccacagcccgctggagcagcaccctcagcctcctctgccaccgccagtgcctcagccccaggagctgcagcctgaaaggctgtctcccgcccccctcgcacacccttcccacccagaacgtgccagcagcgcgaggcacagttccgaggactcggacatcaccagtctcatagaagccatggacaaagacttcgaccaccatgactccccagccctagaagtgtttacagagcagcctccatcgccattgccaaaaagcaaagggaaaggaaaacctcttcagcgcaaggtgaaaccacctaagaagcaagaggaaaaggagaagaagggaaagggaaagccacaggaagatgagctgaaggactctttggctgatgatgatagctcctccaccaccacagagacctccaaccctgacacagaaccgctcctcaaggaggatacagaaaagcaaaagggaaaacaagccatgcctgaaaaacatgaaagtgaaatgtctcaagtgaagcaaaaaagcaaaaaactcttaaatattaagaaagaaatcccaacagatgtgaaacccagttcattagaactaccatatactccccctttggaaagtaagcaacgtagaaatctcccaagcaagattcctcttccaactgcaatgacaagtggatccaaatcacgaaatgcccagaaaacaaaaggtacaagtaagttagtggataacagaccacctgccctagcaaaattcctcccgaatagtcaagaattaggcaacaccagtagctcagagggtgaaaaagactctcctccaccggagtgggattccgttccagttcacaaacctggcagctctactgatagtctttataaactttctctgcaaaccctcaacgcagacattttcttaaaacaacgccagacctcaccgacacctgcttccccgtctcccccagctgccccctgcccctttgtggcccggggcagctacagcagcatcgtcaacagcagctccagcagtgaccctaaaataaaacagccaaatggaagcaaacacaagttgacaaaggcagcctcgctcccgggcaagaacggcaaccccacttttgctgcagtcacggctggctacgacaagagcccaggtgggaatggctttgctaaagtttcttcaaacaaaacaggtttctccagcagccttggcatttcacacgctcctgttgacagcgatggctcagacagctcgggtttgtggagtcccgtcagcaacccaagcagccctgacttcactcccctcaattcgttctccgcctttggaaactcttttaatctaactggtgaagttttcagcaaactcggattatctcgatcgtgcaatcaggcctcacagaggagctggaacgagtttaatagtggcccttcatacctttgggagtcgccagcgacagatcccagtccttcctggccagccagttccggctccccgacccacacagccacatcggtcctcggtaacaccagcggcctgtggtccaccactccattcagcagctccatttggtccagcaaccttagcagcgcccttcccttcaccactccagcaaacacgctggcaagcatcggcctcatgggcacagaaaactcccctgctcctcacgctccctccacctccagtccagctgacgacttgggacagacctacaacccgtggcggatatggagccccacgattggaagaagaagctcggacccttggtctaattcgcactttcctcacgagaattaaattaagcaaaaaacaaacaaacatagtgggccctcgtctagatcatgatgtgccagtttctgagacatctttttaaggctcttactgcagctcccctccccaccctcctcttctttgcaaaacagacccaagcagggcaggctcagaccactcgcttctttcagatctttcttgcaattatgataacatgagatttgctgttgtgcttttagagaaaagtctggactcagccacaaactctaataagacctgtacatctgagaacctttcccgttactgcgttttcaccacctgtcttccccatgctttatttatctgtatgaacacagatttgacattacagctaaggaaataatttgagttgattcagaaatcctggcatgtgacaattttgttaaattaccaagtttggtttttaataatttctcaatattatgcgccaagatctaattttaaaactgtatgaggactttgtgctgaaaatagagtatttttttaaagtaaggctgtcttggtttaaaagcagattacagaaatgtaagtcaacttaagaacagtgaatgaatgtaaaaacattcagttgagaccatatgcattttctgtgctgtttgtacttgaggtatgtaacatttgtatacctgaacttattttaaagatgaactgaaatgcacatagccaagtcttgagatacaagattgaatgtgtatttcttaaaaatacaactttgtgttgtactttgaaataaatgatgcttttttcaaaaaaaaaaat

SEQ ID NO: 363178 - DNA, 1982 bp, Homo sapiens
attcctcttccaactgcaatgacaagtggaatctcgctgggagatttctacgtgcttactttccaagcaagattcctcttccaactgcaatgacaagtggatccaaatcacgaaatgcccagaaaacaaaaggtacaagtaagttagtggataacagaccacctgccctagcaaaattcctcccgaatagtcaagaattaggcaacaccagtagctcagagggtgaaaaagactctcctccaccggagtgggattccgttccagttcacaaacctggcagctctactgatagtctttataaactttctctgcaaaccctcaacgcagacattttcttaaaacaacgccagacctcaccgacacctgcttccccgtctcccccagctgccccctgcccctttgtggcccggggcagctacagcagcatcgtcaacagcagctccagcagtgaccctaaaataaaacagccaaatggaagcaaacacaagttgacaaaggcagcctcgctcccgggcaagaacggcaaccccacttttgctgcagtcacggctggctacgacaagagcccaggtgggaatggctttgctaaagtttcttcaaacaaaacaggtttctccagcagccttggcatttcacacgctcctgttgacagcgatggctcagacagctcgggtttgtggagtcccgtcagcaacccaagcagccctgacttcactcccctcaattcgttctccgcctttggaaactcttttaatctaactggtgaagttttcagcaaactcggattatctcgatcgtgcaatcaggcctcacagaggagctggaacgagtttaatagtggcccttcatacctttgggagtcgccagcgacagatcccagtccttcctggccagccagttccggctccccgacccacacagccacatcggtcctcggtaacaccagcggcctgtggtccaccactccattcagcagctccatttggtccagcaaccttagcagcgcccttcccttcaccactccagcaaacacgctggcaagcatcggcctcatgggcacagaaaactcccctgctcctcacgctccctccacctccagtccagctgacgacttgggacagacctacaacccgtggcggatatggagccccacgattggaagaagaagctcggacccttggtctaattcgcactttcctcacgagaattaaattaagcaaaaaacaaacaaacatagtgggccctcgtctagatcatgatgtgccagtttctgagacatctttttaaggctcttactgcagctcccctccccaccctcctcttctttgcaaaacagacccaagcagggcaggctcagaccactcgcttctttcagatctttcttgcaattatgataacatgagatttgctgttgtgcttttagagaaaagtctggactcagccacaaactctaataagacctgtacatctgagaacctttcccgttactgcgttttcaccacctgtcttccccatgctttatttatctgtatgaacacagatttgacattacagctaaggaaataatttgagttgattcagaaatcctggcatgtgacaattttgttaaattaccaagtttggtttttaataatttctcaatattatgcgccaagatctaattttaaaactgtatgaggactttgtgctgaaaatagagtatttttttaaagtaaggctgtcttggtttaaaagcagattacagaaatgtaagtcaacttaagaacagtgaatgaatgtaaaaacattcagttgagaccatatgcattttctgtgctgtttgtacttgaggtatgtaacatttgtatacctgaacttattttaaagatgaactgaaatgcacatagccaagtcttgagatacaagattgaatgtgtatttcttaaaaatacaactttgtgttgtactttgaaataaatgatgcttttttcaaaaaaaaaaat

SEQ ID NO: 363179 - DNA, 5622 bp, Homo sapiens
cgcggccgccggcctcctaggagcgctgcacctggtgatgaccctcgtagtggctgcggcgcgggccgagaaggaagcattcgttcagtcagagagcataatagaagtactgcgttttgatgatggagggctactacagaccgagacaacacttggactcagttcatatcagcagaaaagtatatctctctaccgggggaattgcaggcccatacgatttgagccaccaatgctggatttccatgaacaaccagttggaatgccaaaaatggaaaaagtctacttacataatcctagttctgaagaaacgattactttagtatcaatatctgctacaacatcacattttcatgcatcattttttcaaaataggaaaattcttccaggaggaaatacatcatttgatgtagtttttcttgcaagagtagtaggaaatgtagaaaatactttatttattaatacatctaatcatggggtatttacttaccaggtatttggtgttggagttccaaatccatatcgattgaggccgttccttggggccagagtccctgtgaatagcagtttctcacctataataaacatccacaatcctcacagtgagcctttacaggttgtagaaatgtactctagtggaggagaccttcacctagaactcccaacgggtcaacaaggaggtaccagaaaactgtgggaaattcctccttatgaaaccaagggagtgatgagagccagtttttcatctagagaagcagataatcacacagccttcataagaataaagactaatgcttcagacagcacagagtttatcattcttcctgttgaggttgaagttacaacagctcctggaatttattcctcaactgaaatgttagattttggtacactaagaacacaagatctaccaaaagttttaaaccttcatttattaaattcaggaacaaaagatgtaccaataacaagtgttcgacctacaccacaaaatgatgctataacggtacactttaaaccaattacattaaaagcatcagaaagtaaatacaccaaggttgcaagcattagttttgatgcatcgaaggcaaaaaagccatctcagttttctgggaaaataacagttaaagcaaaggaaaagagttattctaaacttgaaataccatatcaagcagaagttttagatggttatttgggatttgatcatgctgcaacattatttcacatccgagacagccctgctgatcctgtggaaaggccaatttaccttactaacactttcagttttgcgatcctcattcacgatgtgttgctaccagaagaagccaaaacaatgtttaaagttcacaacttcagcaaaccagtcttaattcttcctaatgaatcaggatacatttttaccctgctttttatgccttccacatcatccatgcacattgataacaacattttacttattaccaatgcttctaaatttcatttacccgtgcgggtatacacaggctttttagattactttgtattgccccccaaaatagaggaacgtttcatagattttggagtactgagtgctacagaagcaagtaatattttatttgcaattataaacagcaatccaattgagttggctataaaaagttggcatatcataggagacggtttatcaatagaacttgtagctgtggaaagaggcaatagaactacaataatttcaagcctgccagagtttgaaaaatcctctttatcagatcaatcatcggtaacattagcttcaggctattttgcagtcttcagagtcaaacttactgcaaaaaaattagaggggattcatgatggagccatccagatcacaacagactatgagatcctgacaatccctgtgaaggctgtgattgcagtaggctcactgacctgcttccctaagcacgtggttcttccaccttcctttccagggaaaatagttcatcaaagtttaaatattatgaattccttctcacagaaggtaaaaatacagcaaatacgatctttgtcagaagatgtgcgattttactataaacgattacggggcaataaggaagacttggagccaggaaaaaaatcaaagattgcaaacatttattttgatcctggactacagtgtggggatcattgctatgttggcttgccttttctatccaaatctgaacccaaagtgcagcctggtgtagccatgcaggaagatatgtgggatgctgactgggatttgcatcaaagcctgttcaagggatggacaggaataaaggaaaattcaggtcatagattgagtgctatatttgaagtaaatacagaccttcaaaaaaatataatatcaaaaatcactgctgagctctcctggccttccatacttagctcaccccggcacttgaaatttccacttactaatacaaactgctcctcagaagaagagattactttagaaaatcctgcagatgttcctgtctatgttcagtttattcctctggctttatattccaacccttcagtgtttgtagataagttagtatcaaggtttaacttgagtaaggtggcaaagatagatttgagaacactagaatttcaagtcttcagaaacagtgctcatccactgcagagttcaacaggatttatggagggcctctctcgacatttaattttaaacctaattttaaaacctggagaaaagaaatctgtcaaagtaaagtttactccagttcacaacagaactgtttcttcacttatcatagtcagaaataacctgactgtgatggatgctgtgatggtccaaggacaaggaacaactgagaacttgagggtggcaggcaagcttccaggtccaggaagctccttacgctttaaaatcacggaagcattgttaaaagattgtacagatagtttaaaactaagagaaccaaatttcacattgaaaagaacatttaaggtagagaatacaggacaacttcaaattcacatagaaaccattgaaatcagtggatactcatgtgaaggatatggctttaaagttgttaattgtcaagagtttactctaagtgccaatgcttctagagatataatcatattgtttactcctgattttacagcttctagagttattcgggaactgaagtttataacaaccagtggctctgagtttgtatttatattgaatgcatcccttccttaccatatgttagcaacctgtgcagaagccctacccagacctaactgggaactggctctgtatatcatcatctcaggaataatgagtgcactgtttcttttggtcattggaacagcctatttggaagctcaaggaatatgggagccatttcgaaggcggctatcctttgaggcctcgaacccgcccttcgatgtgggaaggccatttgatctcaggagaatcgttggtatttcatctgaaggaaacttgaacacactcagctgtgaccccggtcacagtagggggttctgtggagcaggcggttcatcatcccgacccagtgccgggagtcataagcagtgtggcccatcggtccacccacacagcagtcacagcaatagaaactcagctgacgtggaaaacgtcagagccaaaaacagttcaagtacctctagtaggacttctgctcaagcagcttcttcacagtctgctaacaaaacaagcccccttgtcttagattcgaacacagtgactcaaggtcatacagcgggcagaaagtccaaaggggcaaagcagagccagcacggcagccagcaccatgcccacagcccgctggagcagcaccctcagcctcctctgccaccgccagtgcctcagccccaggagctgcagcctgaaaggctgtctcccgcccccctcgcacacccttcccacccagaacgtgccagcagcgcgaggcacagttccgaggactcggacatcaccagtctcatagaagccatggacaaagacttcgaccaccatgactccccagccctagaagtgtttacagagcagcctccatcgccattgccaaaaagcaaagggaaaggaaaacctcttcagcgcaaggtgaaaccacctaagaagcaagaggaaaaggagaagaagggaaagggaaagccacaggaagatgagctgaaggactctttggctgatgatgatagctcctccaccaccacagagacctccaaccctgacacagaaccgctcctcaaggaggatacagaaaagcaaaagggaaaacaagccatgcctgaaaaacatgaaagtgaaatgtctcaagtgaagcaaaaaagcaaaaaactcttaaatattaagaaagaaatcccaacagatgtgaaacccagttcattagaactaccatatactccccctttggaaagtaagcaacgtagaaatctcccaagcaagattcctcttccaactgcaatgacaagtggatccaaatcacgaaatgcccagaaaacaaaaggtacaagtaagttagtggataacagaccacctgccctagcaaaattcctcccgaatagtcaagaattaggcaacaccagtagctcagagggtgaaaaagactctcctccaccggagtgggattccgttccagttcacaaacctggcagctctactgatagtctttataaactttctctgcaaaccctcaacgcagacattttcttaaaacaacgccagacctcaccgacacctgcttccccgtctcccccagctgccccctgcccctttgtggcccggggcagctacagcagcatcgtcaacagcagctccagcagtgaccctaaaataaaacagccaaatggaagcaaacacaagttgacaaaggcagcctcgctcccgggcaagaacggcaaccccacttttgctgcagtcacggctggctacgacaagagcccaggtgggaatggctttgctaaagtttcttcaaacaaaacaggtttctccagcagccttggcatttcacacgctcctgttgacagcgatggctcagacagctcgggtttgtggagtcccgtcagcaacccaagcagccctgacttcactcccctcaattcgttctccgcctttggaaactcttttaatctaactggtgaagttttcagcaaactcggattatctcgatcgtgcaatcaggcctcacagaggagctggaacgagtttaatagtggcccttcatacctttgggagtcgccagcgacagatcccagtccttcctggccagccagttccggctccccgacccacacagccacatcggtcctcggtaacaccagcggcctgtggtccaccactccattcagcagctccatttggtccagcaaccttagcagcgcccttcccttcaccactccagcaaacacgctggcaagcatcggcctcatgggcacagaaaactcccctgctcctcacgctccctccacctccagtccagctgacgacttgggacagacctacaacccgtggcggatatggagccccacgattggaagaagaagctcggacccttggtctaattcgcactttcctcacgagaattaaattaagcaaaaaacaaacaaacatagtgggccctcgactattaaactcgttccagctcctctgtgagccctgagtgcacg

SEQ ID NO: 363180 - DNA, 1817 bp, Homo sapiens
caaaagtgtgatcgaagcctctgccagtccctaaattgtgatccctgccctggtctctttcatagtgatcttttgttttcttacctttctccagaaagccctctatctctgtctgattaagcagtctgaggccccagagcatgtgacatgaggctgagcgatgctctgtgagctgccccgctgcagagaagcccactcagggctcagtcctgccagccccacacctccccgagacagggcactgctgatgaggaatgagttctctctttgcttctttttcaagtgaccctaaaataaaacagccaaatggaagcaaacacaagttgacaaaggcagcctcgctcccgggcaagaacggcaaccccacttttgctgcagtcacggctggctacgacaagagcccaggtgggaatggctttgctaaagtttcttcaaacaaaacaggtttctccagcagccttggcatttcacacgctcctgttgacagcgatggctcagacagctcgggtttgtggagtcccgtcagcaacccaagcagccctgacttcactcccctcaattcgttctccgcctttggaaactcttttaatctaactggtgaagttttcagcaaactcggattatctcgatcgtgcaatcaggcctcacagaggagctggaacgagtttaatagtggcccttcatacctttgggagtcgccagcgacagatcccagtccttcctggccagccagttccggctccccgacccacacagccacatcggtcctcggtaacaccagcggcctgtggtccaccactccattcagcagctccatttggtccagcaaccttagcagcgcccttcccttcaccactccagcaaacacgctggcaagcatcggcctcatgggcacagaaaactcccctgctcctcacgctccctccacctccagtccagctgacgacttgggacagacctacaacccgtggcggatatggagccccacgattggaagaagaagctcggacccttggtctaattcgcactttcctcacgagaattaaattaagcaaaaaacaaacaaacatagtgggccctcgtctagatcatgatgtgccagtttctgagacatctttttaaggctcttactgcagctcccctccccaccctcctcttctttgcaaaacagacccaagcagggcaggctcagaccactcgcttctttcagatctttcttgcaattatgataacatgagatttgctgttgtgcttttagagaaaagtctggactcagccacaaactctaataagacctgtacatctgagaacctttcccgttactgcgttttcaccacctgtcttccccatgctttatttatctgtatgaacacagatttgacattacagctaaggaaataatttgagttgattcagaaatcctggcatgtgacaattttgttaaattaccaagtttggtttttaataatttctcaatattatgcgccaagatctaattttaaaactgtatgaggactttgtgctgaaaatagagtatttttttaaagtaaggctgtcttggtttaaaagcagattacagaaatgtaagtcaacttaagaacagtgaatgaatgtaaaaacattcagttgagaccatatgcattttctgtgctgtttgtacttgaggtatgtaacatttgtatacctgaacttattttaaagatgaactgaaatgcacatagccaagtcttgagatacaagattgaatgtgtatttcttaaaaatacaactttgtgttgtactttgaaataaatgatgcttttttcaaaaaaaaaaat

SEQ ID NO: 363181 - DNA, 964 bp, Homo sapiens
cacggcagtgaccgtatcatggtccagctgttccgtgtgttaaaatgaagtgggctagggcatttgtaatcttagagctgaatcctatcatcactgcgcccgctcataaggggatggccatggctaggtttatagattgttgggtggttggtgtaaatgagtgaggcaggagtccgaggaggttagtttgtggcaataaaaatgattaaggatactagtatccttaatctctagatcatgatgtgccagtttctgagacatctttttaaggctcttactgcagctcccctccccaccctcctcttctttgcaaaacagacccaagcagggcaggctcagaccactcgcttctttcagatctttcttgcaattatgataacatgagatttgctgttgtgcttttagagaaaagtctggactcagccacaaactctaataagacctgtacatctgagaacctttcccgttactgcgttttcaccacctgtcttccccatgctttatttatctgtatgaacacagatttgacattacagctaaggaaataatttgagttgattcagaaatcctggcatgtgacaattttgttaaattaccaagtttggtttttaataatttctcaatattatgcgccaagatctaattttaaaactgtatgaggactttgtgctgaaaatagagtatttttttaaagtaaggctgtcttggtttaaaagcagattacagaaatgtaagtcaacttaagaacagtgaatgaatgtaaaaacattcagttgagaccatatgcattttctgtgctgtttgtacttgaggtatgtaacatttgtatacctgaacttattttaaagatgaactgaaatgcacatagccaagtcttgagatacaagattgaatgtgtatttcttaaaaatacaactttgtgttgtactttgaaataaatgatgcttttttcaaaaaaaaaaat

SEQ ID NO: 363182 - DNA, 4473 bp, Homo sapiens
cgcggccgccggcctcctaggagcgctgcacctggtgatgaccctcgtagtggctgcggcgcgggccgagaaggaagcattcgttcagtcagagagcataatagaagtactgcgttttgatgatggagggctactacagaccgagacaacacttggactcagttcatatcagcagaaaagtatatctctctaccgggggaattgcaggcccatacgatttgagccaccaatgctggatttccatgaacaaccagttggaatgccaaaaatggaaaaagtctacttacataatcctagttctgaagaaacgattactttagtatcaatatctgctacaacatcacattttcatgcatcattttttcaaaataggaaaattcttccaggaggaaatacatcatttgatgtagtttttcttgcaagagtagtaggaaatgtagaaaatactttatttattaatacatctaatcatggggtatttacttaccaggtatttggtgttggagttccaaatccatatcgattgaggccgttccttggggccagagtccctgtgaatagcagtttctcacctataataaacatccacaatcctcacagtgagcctttacaggttgtagaaatgtactctagtggaggagaccttcacctagaactcccaacgggtcaacaaggaggtaccagaaaactgtgggaaattcctccttatgaaaccaagggagtgatgagagccagtttttcatctagagaagcagataatcacacagccttcataagaataaagactaatgcttcagacagcacagagtttatcattcttcctgttgaggttgaagttacaacagctcctggaatttattcctcaactgaaatgttagattttggtacactaagaacacaagatctaccaaaagttttaaaccttcatttattaaattcaggaacaaaagatgtaccaataacaagtgttcgacctacaccacaaaatgatgctataacggtacactttaaaccaattacattaaaagcatcagaaagtaaatacaccaaggttgcaagcattagttttgatgcatcgaaggcaaaaaagccatctcagttttctgggaaaataacagttaaagcaaaggaaaagagttattctaaacttgaaataccatatcaagcagaagttttagatggttatttgggatttgatcatgctgcaacattatttcacatccgagacagccctgctgatcctgtggaaaggccaatttaccttactaacactttcagttttgcgatcctcattcacgatgtgttgctaccagaagaagccaaaacaatgtttaaagttcacaacttcagcaaaccagtcttaattcttcctaatgaatcaggatacatttttaccctgctttttatgccttccacatcatccatgcacattgataacaacattttacttattaccaatgcttctaaatttcatttacccgtgcgggtatacacaggctttttagattactttgtattgccccccaaaatagaggaacgtttcatagattttggagtactgagtgctacagaagcaagtaatattttatttgcaattataaacagcaatccaattgagttggctataaaaagttggcatatcataggagacggtttatcaatagaacttgtagctgtggaaagaggcaatagaactacaataatttcaagcctgccagagtttgaaaaatcctctttatcagatcaatcatcggtaacattagcttcaggctattttgcagtcttcagagtcaaacttactgcaaaaaaattagaggggattcatgatggagccatccagatcacaacagactatgagatcctgacaatccctgtgaaggctgtgattgcagtaggctcactgacctgcttccctaagcacgtggttcttccaccttcctttccagggaaaatagttcatcaaagtttaaatattatgaattccttctcacagaaggtaaaaatacagcaaatacgatctttgtcagaagatgtgcgattttactataaacgattacggggcaataaggaagacttggagccaggaaaaaaatcaaagattgcaaacatttattttgatcctggactacagtgtggggatcattgctatgttggcttgccttttctatccaaatctgaacccaaagtgcagcctggtgtagccatgcaggaagatatgtgggatgctgactgggatttgcatcaaagcctgttcaagggatggacaggaataaaggaaaattcaggtcatagattgagtgctatatttgaagtaaatacagaccttcaaaaaaatataatatcaaaaatcactgctgagctctcctggccttccatacttagctcaccccggcacttgaaatttccacttactaatacaaactgctcctcagaagaagagattactttagaaaatcctgcagatgttcctgtctatgttcagtttattcctctggctttatattccaacccttcagtgtttgtagataagttagtatcaaggtttaacttgagtaaggtggcaaagatagatttgagaacactagaatttcaagtcttcagaaacagtgctcatccactgcagagttcaacaggatttatggagggcctctctcgacatttaattttaaacctaattttaaaacctggagaaaagaaatctgtcaaagtaaagtttactccagttcacaacagaactgtttcttcacttatcatagtcagaaataacctgactgtgatggatgctgtgatggtccaaggacaaggaacaactgagaacttgagggtggcaggcaagcttccaggtccaggaagctccttacgctttaaaatcacggaagcattgttaaaagattgtacagatagtttaaaactaagagaaccaaatttcacattgaaaagaacatttaaggtagagaatacaggacaacttcaaattcacatagaaaccattgaaatcagtggatactcatgtgaaggatatggctttaaagttgttaattgtcaagagtttactctaagtgccaatgcttctagagatataatcatattgtttactcctgattttacagcttctagagttattcgggaactgaagtttataacaaccagtggctctgagtttgtatttatattgaatgcatcccttccttaccatatgttagcaacctgtgcagaagccctacccagacctaactgggaactggctctgtatatcatcatctcaggaataatgagtgcactgtttcttttggtcattggaacagcctatttggaagctcaaggaatatgggagccatttcgaaggcggctatcctttgaggcctcgaacccgcccttcgatgtgggaaggccatttgatctcaggagaatcgttggtatttcatctgaaggaaacttgaacacactcagctgtgaccccggtcacagtagggggttctgtggagcaggcggttcatcatcccgacccagtgccgggagtcataagcagtgtggcccatcggtccacccacacagcagtcacagcaatagaaactcagctgacgtggaaaacgtcagagccaaaaacagttcaagtacctctagtaggacttctgctcaagcagcttcttcacagtctgctaacaaaacaagcccccttgtcttagattcgaacacagtgactcaaggtcatacagcgggcagaaagtccaaaggggcaaagcagagccagcacggcagccagcaccatgcccacagcccgctggagcagcaccctcagcctcctctgccaccgccagtgcctcagccccaggagctgcagcctgaaaggctgtctcccgcccccctcgcacacccttcccacccagaacgtgccagcagcgcgaggcacagttccgaggactcggacatcaccagtctcatagaagccatggacaaagacttcgaccaccatgactccccagccctagaagtgtttacagagcagcctccatcgccattgccaaaaagcaaaggtaatcatctcccactgccggagatccgtgatgtgtgagggaaaagccagtgcgtgcttaaggagctattaagattatagttgtggtaaacaactaattcagtaggttcctctggctcagatttatctccagtgttggacttcaacttttccataaaaatgcaattagaggtatctgtcataaaagatatatttgtatttcttagattgtttaccaaaatcagaaattctgtggacatctgcttttcttttcagctgcctgagattgtgttattgtgatagatttagcttttgttttattgttaaaataattttgagcacaggagtaaaatggagatcatctgccttttaactccaaattaggatttctttactttagagcaggggttggcagactacagttagcgggccaaatcaccacctggttttataaataaagt

SEQ ID NO: 363183 - DNA, 362 bp, Homo sapiens
attttccaggtccccaggcagcggcctcagctgtccacccctggaggatgtggaagaccctcctcccctacctgaggtgggagaagtgaagacattgactgtccgccacacaacacagcagggaccgggcacgctcttgctcccctcaaatccccgagtgcagagagatgtggctgctttctctttaaaacctgttaaacagaacacatctaagagctttcgtttgttttctttgtagaagggcttgagttatgcatagtcttagagaacattcaaagtgatttggaagagcgctaatcaaaacaccacactaacgagcccgtttgtttttaatttccagctactgatagtctttataaact

SEQ ID NO: 363184 - DNA, 649 bp, Homo sapiens
tgaataaatatgtgtacattttttgttttaggtttaacttgagtaaggtggcaaagatagatttgagaacactagaatttcaagtcttcagaaacagtgtaagtattcaaacttcatactattccaaagaaattattttataatatgatcaatataaatatgaaagaaaattattggctactcttaaatttggctgaagggtaagttactgaagaagtcagagcagtccagtaattatttcagaggcaaaataaatcaggaagagtaggtgggatttagatcaaggtgaggcacattgagtaaaaggttcgtatttatgggcattaaacattaagcccatgaaggtttgtaataataattacagaaattctgagaatatatagatgaggtaaatattaatacatcattgatttttattaagcatcaaaatattgagctcagtcatttacattttcattctggatactttgtaattaaattgtaagccatccatgaatgctaaacccatgactggctgtgtttgtatttagcatggtaatatgcatgattttcactcaatggataatcttttatttataaacatatacataaactggtttgttctaggaaccaaactattttctattatttaggccaggctgagcaacca

SEQ ID NO: 363185 - DNA, 201 bp, Homo sapiens
gtcattttattaatccttctcagcaattaagtgtccattttttacaggatacagaaaagcaaaagggaaaacaagccatgcctgaaaaacatgaaagtgaaatgtctcaagtgaagcaaaaaagcaaaaaactcttaaatattaagaaagaaatcccaacagatgtgaaacccaggtgagagaaataagtgtacagagaaa

SEQ ID NO: 363186 - DNA, 6313 bp, Homo sapiens
cgcggccgccggcctcctaggagcgctgcacctggtgatgaccctcgtagtggctgcggcgcgggccgagaaggaagcattcgttcagtcagagagcataatagaagtactgcgttttgatgatggagggctactacagaccgagacaacacttggactcagttcatatcagcagaaaagtatatctctctaccgggggaattgcaggcccatacgatttgagccaccaatgctggatttccatgaacaaccagttggaatgccaaaaatggaaaaagtctacttacataatcctagttctgaagaaacgattactttagtatcaatatctgctacaacatcacattttcatgcatcattttttcaaaataggaaaattcttccaggaggaaatacatcatttgatgtagtttttcttgcaagagtagtaggaaatgtagaaaatactttatttattaatacatctaatcatggggtatttacttaccaggtatttggtgttggagttccaaatccatatcgattgaggccgttccttggggccagagtccctgtgaatagcagtttctcacctataataaacatccacaatcctcacagtgagcctttacaggttgtagaaatgtactctagtggaggagaccttcacctagaactcccaacgggtcaacaaggaggtaccagaaaactgtgggaaattcctccttatgaaaccaagggagtgatgagagccagtttttcatctagagaagcagataatcacacagccttcataagaataaagactaatgcttcagacagcacagagtttatcattcttcctgttgaggttgaagttacaacagctcctggaatttattcctcaactgaaatgttagattttggtacactaagaacacaagatctaccaaaagttttaaaccttcatttattaaattcaggaacaaaagatgtaccaataacaagtgttcgacctacaccacaaaatgatgctataacggtacactttaaaccaattacattaaaagcatcagaaagtaaatacaccaaggttgcaagcattagttttgatgcatcgaaggcaaaaaagccatctcagttttctgggaaaataacagttaaagcaaaggaaaagagttattctaaacttgaaataccatatcaagcagaagttttagatggttatttgggatttgatcatgctgcaacattatttcacatccgagacagccctgctgatcctgtggaaaggccaatttaccttactaacactttcagttttgcgatcctcattcacgatgtgttgctaccagaagaagccaaaacaatgtttaaagttcacaacttcagcaaaccagtcttaattcttcctaatgaatcaggatacatttttaccctgctttttatgccttccacatcatccatgcacattgataacaacattttacttattaccaatgcttctaaatttcatttacccgtgcgggtatacacaggctttttagattactttgtattgccccccaaaatagaggaacgtttcatagattttggagtactgagtgctacagaagcaagtaatattttatttgcaattataaacagcaatccaattgagttggctataaaaagttggcatatcataggagacggtttatcaatagaacttgtagctgtggaaagaggcaatagaactacaataatttcaagcctgccagagtttgaaaaatcctctttatcagatcaatcatcggtaacattagcttcaggctattttgcagtcttcagagtcaaacttactgcaaaaaaattagaggggattcatgatggagccatccagatcacaacagactatgagatcctgacaatccctgtgaaggctgtgattgcagtaggctcactgacctgcttccctaagcacgtggttcttccaccttcctttccagggaaaatagttcatcaaagtttaaatattatgaattccttctcacagaaggtaaaaatacagcaaatacgatctttgtcagaagatgtgcgattttactataaacgattacggggcaataaggaagacttggagccaggaaaaaaatcaaagattgcaaacatttattttgatcctggactacagtgtggggatcattgctatgttggcttgccttttctatccaaatctgaacccaaagtgcagcctggtgtagccatgcaggaagatatgtgggatgctgactgggatttgcatcaaagcctgttcaagggatggacaggaataaaggaaaattcaggtcatagattgagtgctatatttgaagtaaatacagaccttcaaaaaaatataatatcaaaaatcactgctgagctctcctggccttccatacttagctcaccccggcacttgaaatttccacttactaatacaaactgctcctcagaagaagagattactttagaaaatcctgcagatgttcctgtctatgttcagtttattcctctggctttatattccaacccttcagtgtttgtagataagttagtatcaaggtttaacttgagtaaggtggcaaagatagatttgagaacactagaatttcaagtcttcagaaacagtgctcatccactgcagagttcaacaggatttatggagggcctctctcgacatttaattttaaacctaattttaaaacctggagaaaagaaatctgtcaaagtaaagtttactccagttcacaacagaactgtttcttcacttatcatagtcagaaataacctgactgtgatggatgctgtgatggtccaaggacaaggaacaactgagaacttgagggtggcaggcaagcttccaggtccaggaagctccttacgctttaaaatcacggaagcattgttaaaagattgtacagatagtttaaaactaagagaaccaaatttcacattgaaaagaacatttaaggtagagaatacaggacaacttcaaattcacatagaaaccattgaaatcagtggatactcatgtgaaggatatggctttaaagttgttaattgtcaagagtttactctaagtgccaatgcttctagagatataatcatattgtttactcctgattttacagcttctagagttattcgggaactgaagtttataacaaccagtggctctgagtttgtatttatattgaatgcatcccttccttaccatatgttagcaacctgtgcagaagccctacccagacctaactgggaactggctctgtatatcatcatctcaggaataatgagtgcactgtttcttttggtcattggaacagcctatttggaagctcaaggaatatgggagccatttcgaaggcggctatcctttgaggcctcgaacccgcccttcgatgtgggaaggccatttgatctcaggagaatcgttggtatttcatctgaaggaaacttgaacacactcagctgtgaccccggtcacagtagggggttctgtggagcaggcggttcatcatcccgacccagtgccgggagtcataagcagtgtggcccatcggtccacccacacagcagtcacagcaatagaaactcagctgacgtggaaaacgtcagagccaaaaacagttcaagtacctctagtaggacttctgctcaagcagcttcttcacagtctgctaacaaaacaagcccccttgtcttagattcgaacacagtgactcaaggtcatacagcgggcagaaagtccaaaggggcaaagcagagccagcacggcagccagcaccatgcccacagcccgctggagcagcaccctcagcctcctctgccaccgccagtgcctcagccccaggagctgcagcctgaaaggctgtctcccgcccccctcgcacacccttcccacccagaacgtgccagcagcgcgaggcacagttccgaggactcggacatcaccagtctcatagaagccatggacaaagacttcgaccaccatgactccccagccctagaagtgtttacagagcagcctccatcgccattgccaaaaagcaaagggaaaggaaaacctcttcagcgcaaggtgaaaccacctaagaagcaagaggaaaaggagaagaagggaaagggaaagccacaggaagatgagctgaaggactctttggctgatgatgatagctcctccaccaccacagagacctccaaccctgacacagaaccgctcctcaaggaggatacagaaaagcaaaagggaaaacaagccatgcctgaaaaacatgaaagtgaaatgtctcaagtgaagcaaaaaagcaaaaaactcttaaatattaagaaagaaatcccaacagatgtgaaacccagttcattagaactaccatatactccccctttggaaagtaagcaacgtagaaatctcccaagcaagattcctcttccaactgcaatgacaagtggatccaaatcacgaaatgcccagaaaacaaaaggtacaagtaagttagtggataacagaccacctgccctagcaaaattcctcccgaatagtcaagaattaggcaacaccagtagctcagagggtgaaaaagactctcctccaccggagtgggattccgttccagttcacaaacctggcagctctactgatagtctttataaactttctctgcaaaccctcaacgcagacattttcttaaaacaacgccagacctcaccgacacctgcttccccgtctcccccagctgccccctgcccctttgtggcccggggcagctacagcagcatcgtcaacagcagctccagcagtgaccctaaaataaaacagccaaatggaagcaaacacaagttgacaaaggcagcctcgctcccgggcaagaacggcaaccccacttttgctgcagtcacggctggctacgacaagagcccaggtgggaatggctttgctaaagtttcttcaaacaaaacaggtttctccagcagccttggcatttcacacgctcctgttgacagcgatggctcagacagctcgggtttgtggagtcccgtcagcaacccaagcagccctgacttcactcccctcaattcgttctccgcctttggaaactcttttaatctaactggtgaagttttcagcaaactcggattatctcgatcgtgcaatcaggcctcacagaggagctggaacgagtttaatagtggcccttcatacctttgggagtcgccagcgacagatcccagtccttcctggccagccagttccggctccccgacccacacagccacatcggtcctcggtaacaccagcggcctgtggtccaccactccattcagcagctccatttggtccagcaaccttagcagcgcccttcccttcaccactccagcaaacacgctggcaagcatcggcctcatgggcacagaaaactcccctgctcctcacgctccctccacctccagtccagctgacgacttgggacagacctacaacccgtggcggatatggagccccacgattggaagaagaagctcggacccttggtctaattcgcactttcctcacgagaattaaattaagcaaaaaacaaacaaacatagtgggccctcgtctagatcatgatgtgccagtttctgagacatctttttaaggctcttactgcagctcccctccccaccctcctcttctttgcaaaacagacccaagcagggcaggctcagaccactcgcttctttcagatctttcttgcaattatgataacatgagatttgctgttgtgcttttagagaaaagtctggactcagccacaaactctaataagacctgtacatctgagaacctttcccgttactgcgttttcaccacctgtcttccccatgctttatttatctgtatgaacacagatttgacattacagctaaggaaataatttgagttgattcagaaatcctggcatgtgacaattttgttaaattaccaagtttggtttttaataatttctcaatattatgcgccaagatctaattttaaaactgtatgaggactttgtgctgaaaatagagtatttttttaaagtaaggctgtcttggtttaaaagcagattacagaaatgtaagtcaacttaagaacagtgaatgaatgtaaaaacattcagttgagaccatatgcattttctgtgctgtttgtacttgaggtatgtaacatttgtatacctgaacttattttaaagatgaactgaaatgcacatagccaagtcttgagatacaagattgaatgtgtatttcttaaaaatacaactttgtgttgtactttgaaataaatgatgcttttttcaaaaaaaaaaat

SEQ ID NO: 363187 - DNA, 6196 bp, Homo sapiens
cgcggccgccggcctcctaggagcgctgcacctggtgatgaccctcgtagtggctgcggcgcgggccgagaaggaagcattcgttcagtcagagagcataatagaagtactgcgttttgatgatggagggctactacagaccgagacaacacttggactcagttcatatcagcagaaaagtatatctctctaccgggggaattgcaggcccatacgatttgagccaccaatgctggatttccatgaacaaccagttggaatgccaaaaatggaaaaagtctacttacataatcctagttctgaagaaacgattactttagtatcaatatctgctacaacatcacattttcatgcatcattttttcaaaatagggtatttggtgttggagttccaaatccatatcgattgaggccgttccttggggccagagtccctgtgaatagcagtttctcacctataataaacatccacaatcctcacagtgagcctttacaggttgtagaaatgtactctagtggaggagaccttcacctagaactcccaacgggtcaacaaggaggtaccagaaaactgtgggaaattcctccttatgaaaccaagggagtgatgagagccagtttttcatctagagaagcagataatcacacagccttcataagaataaagactaatgcttcagacagcacagagtttatcattcttcctgttgaggttgaagttacaacagctcctggaatttattcctcaactgaaatgttagattttggtacactaagaacacaagatctaccaaaagttttaaaccttcatttattaaattcaggaacaaaagatgtaccaataacaagtgttcgacctacaccacaaaatgatgctataacggtacactttaaaccaattacattaaaagcatcagaaagtaaatacaccaaggttgcaagcattagttttgatgcatcgaaggcaaaaaagccatctcagttttctgggaaaataacagttaaagcaaaggaaaagagttattctaaacttgaaataccatatcaagcagaagttttagatggttatttgggatttgatcatgctgcaacattatttcacatccgagacagccctgctgatcctgtggaaaggccaatttaccttactaacactttcagttttgcgatcctcattcacgatgtgttgctaccagaagaagccaaaacaatgtttaaagttcacaacttcagcaaaccagtcttaattcttcctaatgaatcaggatacatttttaccctgctttttatgccttccacatcatccatgcacattgataacaacattttacttattaccaatgcttctaaatttcatttacccgtgcgggtatacacaggctttttagattactttgtattgccccccaaaatagaggaacgtttcatagattttggagtactgagtgctacagaagcaagtaatattttatttgcaattataaacagcaatccaattgagttggctataaaaagttggcatatcataggagacggtttatcaatagaacttgtagctgtggaaagaggcaatagaactacaataatttcaagcctgccagagtttgaaaaatcctctttatcagatcaatcatcggtaacattagcttcaggctattttgcagtcttcagagtcaaacttactgcaaaaaaattagaggggattcatgatggagccatccagatcacaacagactatgagatcctgacaatccctgtgaaggctgtgattgcagtaggctcactgacctgcttccctaagcacgtggttcttccaccttcctttccagggaaaatagttcatcaaagtttaaatattatgaattccttctcacagaaggtaaaaatacagcaaatacgatctttgtcagaagatgtgcgattttactataaacgattacggggcaataaggaagacttggagccaggaaaaaaatcaaagattgcaaacatttattttgatcctggactacagtgtggggatcattgctatgttggcttgccttttctatccaaatctgaacccaaagtgcagcctggtgtagccatgcaggaagatatgtgggatgctgactgggatttgcatcaaagcctgttcaagggatggacaggaataaaggaaaattcaggtcatagattgagtgctatatttgaagtaaatacagaccttcaaaaaaatataatatcaaaaatcactgctgagctctcctggccttccatacttagctcaccccggcacttgaaatttccacttactaatacaaactgctcctcagaagaagagattactttagaaaatcctgcagatgttcctgtctatgttcagtttattcctctggctttatattccaacccttcagtgtttgtagataagttagtatcaaggtttaacttgagtaaggtggcaaagatagatttgagaacactagaatttcaagtcttcagaaacagtgctcatccactgcagagttcaacaggatttatggagggcctctctcgacatttaattttaaacctaattttaaaacctggagaaaagaaatctgtcaaagtaaagtttactccagttcacaacagaactgtttcttcacttatcatagtcagaaataacctgactgtgatggatgctgtgatggtccaaggacaaggaacaactgagaacttgagggtggcaggcaagcttccaggtccaggaagctccttacgctttaaaatcacggaagcattgttaaaagattgtacagatagtttaaaactaagagaaccaaatttcacattgaaaagaacatttaaggtagagaatacaggacaacttcaaattcacatagaaaccattgaaatcagtggatactcatgtgaaggatatggctttaaagttgttaattgtcaagagtttactctaagtgccaatgcttctagagatataatcatattgtttactcctgattttacagcttctagagttattcgggaactgaagtttataacaaccagtggctctgagtttgtatttatattgaatgcatcccttccttaccatatgttagcaacctgtgcagaagccctacccagacctaactgggaactggctctgtatatcatcatctcaggaataatgagtgcactgtttcttttggtcattggaacagcctatttggaagctcaaggaatatgggagccatttcgaaggcggctatcctttgaggcctcgaacccgcccttcgatgtgggaaggccatttgatctcaggagaatcgttggtatttcatctgaaggaaacttgaacacactcagctgtgaccccggtcacagtagggggttctgtggagcaggcggttcatcatcccgacccagtgccgggagtcataagcagtgtggcccatcggtccacccacacagcagtcacagcaatagaaactcagctgacgtggaaaacgtcagagccaaaaacagttcaagtacctctagtaggacttctgctcaagcagcttcttcacagtctgctaacaaaacaagcccccttgtcttagattcgaacacagtgactcaaggtcatacagcgggcagaaagtccaaaggggcaaagcagagccagcacggcagccagcaccatgcccacagcccgctggagcagcaccctcagcctcctctgccaccgccagtgcctcagccccaggagctgcagcctgaaaggctgtctcccgcccccctcgcacacccttcccacccagaacgtgccagcagcgcgaggcacagttccgaggactcggacatcaccagtctcatagaagccatggacaaagacttcgaccaccatgactccccagccctagaagtgtttacagagcagcctccatcgccattgccaaaaagcaaagggaaaggaaaacctcttcagcgcaaggtgaaaccacctaagaagcaagaggaaaaggagaagaagggaaagggaaagccacaggaagatgagctgaaggactctttggctgatgatgatagctcctccaccaccacagagacctccaaccctgacacagaaccgctcctcaaggaggatacagaaaagcaaaagggaaaacaagccatgcctgaaaaacatgaaagtgaaatgtctcaagtgaagcaaaaaagcaaaaaactcttaaatattaagaaagaaatcccaacagatgtgaaacccagttcattagaactaccatatactccccctttggaaagtaagcaacgtagaaatctcccaagcaagattcctcttccaactgcaatgacaagtggatccaaatcacgaaatgcccagaaaacaaaaggtacaagtaagttagtggataacagaccacctgccctagcaaaattcctcccgaatagtcaagaattaggcaacaccagtagctcagagggtgaaaaagactctcctccaccggagtgggattccgttccagttcacaaacctggcagctctactgatagtctttataaactttctctgcaaaccctcaacgcagacattttcttaaaacaacgccagacctcaccgacacctgcttccccgtctcccccagctgccccctgcccctttgtggcccggggcagctacagcagcatcgtcaacagcagctccagcagtgaccctaaaataaaacagccaaatggaagcaaacacaagttgacaaaggcagcctcgctcccgggcaagaacggcaaccccacttttgctgcagtcacggctggctacgacaagagcccaggtgggaatggctttgctaaagtttcttcaaacaaaacaggtttctccagcagccttggcatttcacacgctcctgttgacagcgatggctcagacagctcgggtttgtggagtcccgtcagcaacccaagcagccctgacttcactcccctcaattcgttctccgcctttggaaactcttttaatctaactggtgaagttttcagcaaactcggattatctcgatcgtgcaatcaggcctcacagaggagctggaacgagtttaatagtggcccttcatacctttgggagtcgccagcgacagatcccagtccttcctggccagccagttccggctccccgacccacacagccacatcggtcctcggtaacaccagcggcctgtggtccaccactccattcagcagctccatttggtccagcaaccttagcagcgcccttcccttcaccactccagcaaacacgctggcaagcatcggcctcatgggcacagaaaactcccctgctcctcacgctccctccacctccagtccagctgacgacttgggacagacctacaacccgtggcggatatggagccccacgattggaagaagaagctcggacccttggtctaattcgcactttcctcacgagaattaaattaagcaaaaaacaaacaaacatagtgggccctcgtctagatcatgatgtgccagtttctgagacatctttttaaggctcttactgcagctcccctccccaccctcctcttctttgcaaaacagacccaagcagggcaggctcagaccactcgcttctttcagatctttcttgcaattatgataacatgagatttgctgttgtgcttttagagaaaagtctggactcagccacaaactctaataagacctgtacatctgagaacctttcccgttactgcgttttcaccacctgtcttccccatgctttatttatctgtatgaacacagatttgacattacagctaaggaaataatttgagttgattcagaaatcctggcatgtgacaattttgttaaattaccaagtttggtttttaataatttctcaatattatgcgccaagatctaattttaaaactgtatgaggactttgtgctgaaaatagagtatttttttaaagtaaggctgtcttggtttaaaagcagattacagaaatgtaagtcaacttaagaacagtgaatgaatgtaaaaacattcagttgagaccatatgcattttctgtgctgtttgtacttgaggtatgtaacatttgtatacctgaacttattttaaagatgaactgaaatgcacatagccaagtcttgagatacaagattgaatgtgtatttcttaaaaatacaactttgtgttgtactttgaaataaatgatgcttttttcaaaaaaaaaaat

SEQ ID NO: 363188 - DNA, 6044 bp, Homo sapiens
cgcggccgccggcctcctaggagcgctgcacctggtgatgaccctcgtagtggctgcggcgcgggccgagaaggaagcattcgttcagtcagagagcataatagaagtactgcgttttgatgatggagggctactacagaccgagacaacacttggactcagttcatatcagcagaaaagtatatctctctaccgggggaattgcaggcccatacgatttgagccaccaatgctggatttccatgaacaaccagttggaatgccaaaaatggaaaaagtctacttacataatcctagttctgaagaaacgattactttagtatcaatatctgctacaacatcacattttcatgcatcattttttcaaaataggaaaattcttccaggaggaaatacatcatttgatgtagtttttcttgcaagagtagtaggaaatgtagaaaatactttatttattaatacatctaatcatggggtatttacttaccaggtatttggtgttggagttccaaatccatatcgattgaggccgttccttggggccagagtccctgtgaatagcagtttctcacctataataaacatccacaatcctcacagtgagcctttacaggttgtagaaatgtactctagtggaggagaccttcacctagaactcccaacgggtcaacaaggaggtaccagaaaactgtgggaaattcctccttatgaaaccaagggagtgatgagagccagtttttcatctagagaagcagataatcacacagccttcataagaataaagactaatgcttcagacagcacagagtttatcattcttcctgttgaggttgaagttacaacagctcctggaatttattcctcaactgaaatgttagattttggtacactaagaacacaagatctaccaaaagttttaaaccttcatttattaaattcaggaacaaaagatgtaccaataacaagtgttcgacctacaccacaaaatgatgctataacggtacactttaaaccaattacattaaaagcatcagaaagtaaatacaccaaggttgcaagcattagttttgatgcatcgaaggcaaaaaagccatctcagttttctgggaaaataacagttaaagcaaaggaaaagagttattctaaacttgaaataccatatcaagcagaagttttagatggttatttgggatttgatcatgctgcaacattatttcacatccgagacagccctgctgatcctgtggaaaggccaatttaccttactaacactttcagttttgcgatcctcattcacgatgtgttgctaccagaagaagccaaaacaatgtttaaagttcacaacttcagcaaaccagtcttaattcttcctaatgaatcaggatacatttttaccctgctttttatgccttccacatcatccatgcacattgataacaacattttacttattaccaatgcttctaaatttcatttacccgtgcgggtatacacaggctttttagattactttgtattgccccccaaaatagaggaacgtttcatagattttggagtactgagtgctacagaagcaagtaatattttatttgcaattataaacagcaatccaattgagttggctataaaaagttggcatatcataggagacggtttatcaatagaacttgtagctgtggaaagaggcaatagaactacaataatttcaagcctgccagagtttgaaaaatcctctttatcagatcaatcatcggtaacattagcttcaggctattttgcagtcttcagagtcaaacttactgcaaaaaaattagaggggattcatgatggagccatccagatcacaacagactatgagatcctgacaatccctgtgaaggctgtgattgcagtaggctcactgacctgcttccctaagcacgtggttcttccaccttcctttccagggaaaatagttcatcaaagtttaaatattatgaattccttctcacagaaggtaaaaatacagcaaatacgatctttgtcagaagatgtgcgattttactataaacgattacggggcaataaggaagacttggagccaggaaaaaaatcaaagattgcaaacatttattttgatcctggactacagtgtggggatcattgctatgttggcttgccttttctatccaaatctgaacccaaagtgcagcctggtgtagccatgcaggaagatatgtgggatgctgactgggatttgcatcaaagcctgttcaagggatggacaggaataaaggaaaattcaggtcatagattgagtgctatatttgaagtaaatacagaccttcaaaaaaatataatatcaaaaatcactgctgagctctcctggccttccatacttagctcaccccggcacttgaaatttccacttactaatacaaactgctcctcagaagaagagattactttagaaaatcctgcagatgttcctgtctatgttcagtttattcctctggctttatattccaacccttcagtgtttgtagataagttagtatcaaggtttaacttgagtaaggtggcaaagatagatttgagaacactagaatttcaagtcttcagaaacagtgctcatccactgcagagttcaacaggatttatggagggcctctctcgacatttaattttaaacctaattttaaaacctggagaaaagaaatctgtcaaagtaaagtttactccagttcacaacagaactgtttcttcacttatcatagtcagaaataacctgactgtgatggatgctgtgatggtccaaggacaaggaacaactgagaacttgagggtggcaggcaagcttccaggtccaggaagctccttacgctttaaaatcacggaagcattgttaaaagattgtacagatagtttaaaactaagagaaccaaatttcacattgaaaagaacatttaaggtagagaatacaggacaacttcaaattcacatagaaaccattgaaatcagtggatactcatgtgaaggatatggctttaaagttgttaattgtcaagagtttactctaagtgccaatgcttctagagatataatcatattgtttactcctgattttacagcttctagagttattcgggaactgaagtttataacaaccagtggctctgagtttgtatttatattgaatgcatcccttccttaccatatgttagcaacctgtgcagaagccctacccagacctaactgggaactggctctgtatatcatcatctcaggaataatgagtgcactgtttcttttggtcattggaacagcctatttggaagctcaaggaatatgggagccatttcgaaggcggctatcctttgaggcctcgaacccgcccttcgatgtgggaaggccatttgatctcaggagaatcgttggtatttcatctgaaggaaacttgaacacactcagctgtgaccccggtcacagtagggggttctgtggagcaggcggttcatcatcccgacccagtgccgggagtcataagcagtgtggcccatcggtccacccacacagcagtcacagcaatagaaactcagctgacgtggaaaacgtcagagccaaaaacagttcaagtacctctagtaggacttctgctcaagcagcttcttcacagtctgctaacaaaacaagcccccttgtcttagattcgaacacagtgactcaaggtcatacagcgggcagaaagtccaaaggggcaaagcagagccagcacggcagccagcaccatgcccacagcccgctggagcagcaccctcagcctcctctgccaccgccagtgcctcagccccaggagctgcagcctgaaaggctgtctcccgcccccctcgcacacccttcccacccagaacgtgccagcagcgcgaggcacagttccgaggactcggacatcaccagtctcatagaagccatggacaaagacttcgaccaccatgactccccagccctagaagtgtttacagagcagcctccatcgccattgccaaaaagcaaagggaaaggaaaacctcttcagcgcaaggtgaaaccacctaagaagcaagaggaaaaggagaagaagggaaagggaaagccacaggaagatgagctgaaggactctttggctgatgatgatagctcctccaccaccacagagacctccaaccctgacacagaaccgctcctcaaggaggatacagaaaagcaaaagggaaaacaagccatgcctgaaaaacatgaaagtgaaatgtctcaagtgaagcaaaaaagcaaaaaactcttaaatattaagaaagaaatcccaacagatgtgaaacccagttcattagaactaccatatactccccctttggaaagtaagcaacgtagaaatctcccaagcaagattcctcttccaactgcaatgacaagtggatccaaatcacgaaatgcccagaaaacaaaaggtacaagtaagttagtggataacagaccacctgccctagcaaaattcctcccgaatagtcaagaattaggcaacaccagtagctcagagggtgaaaaagactctcctccaccggagtgggattccgttccagttcacaaacctggcagctctactgatagtctttataaactttctctgcaaaccctcaacgcagacattttcttaaaacaacgccagacctcaccgacacctgcttccccgtctcccccagctgccccctgcccctttgtggcccggggcagctacagcagcatcgtcaacagcagctccagcagtgaccctaaaataaaacagccaaatggaagcaaacacaagttgacaaaggcagcctcgctcccgggcaagaacggcaaccccacttttgctgcagtcacggctggctacgacaagagcccaggtgggaatggctttgctaaagtttcttcaaacaaaacaggtttctccagcagccttggcatttcacacgctcctgttgacagcgatggctcagacagctcgggtttgtggagtcccgtcagcaacccaagcagccctgacttcactcccctcaattcgttctccgcctttggaaactcttttaatctaactggtgaagttttcagcaaactcggattatctcgatcgtgcaatcaggcctcacgctccctccacctccagtccagctgacgacttgggacagacctacaacccgtggcggatatggagccccacgattggaagaagaagctcggacccttggtctaattcgcactttcctcacgagaattaaattaagcaaaaaacaaacaaacatagtgggccctcgtctagatcatgatgtgccagtttctgagacatctttttaaggctcttactgcagctcccctccccaccctcctcttctttgcaaaacagacccaagcagggcaggctcagaccactcgcttctttcagatctttcttgcaattatgataacatgagatttgctgttgtgcttttagagaaaagtctggactcagccacaaactctaataagacctgtacatctgagaacctttcccgttactgcgttttcaccacctgtcttccccatgctttatttatctgtatgaacacagatttgacattacagctaaggaaataatttgagttgattcagaaatcctggcatgtgacaattttgttaaattaccaagtttggtttttaataatttctcaatattatgcgccaagatctaattttaaaactgtatgaggactttgtgctgaaaatagagtatttttttaaagtaaggctgtcttggtttaaaagcagattacagaaatgtaagtcaacttaagaacagtgaatgaatgtaaaaacattcagttgagaccatatgcattttctgtgctgtttgtacttgaggtatgtaacatttgtatacctgaacttattttaaagatgaactgaaatgcacatagccaagtcttgagatacaagattgaatgtgtatttcttaaaaatacaactttgtgttgtactttgaaataaatgatgcttttttcaaaaaaaaaaat

SEQ ID NO: 363189 - DNA, 1137 bp, Homo sapiens
cttttctgtagccttacccccttacccacttgaccctctgcctgccgggctcagtgctggacgctttctgttttgtcgcagtcggtcctcggtaacaccagcggcctgtggtccaccactccattcagcagctccatttggtccagcaaccttagcagcgcccttcccttcaccactccagcaaacacgctggcaagcatcggcctcatgggcacagaaaactcccctgctcctcacgctccctccacctccagtccagctgacgacttgggacagacctacaacccgtggcggatatggagccccacgattggaagaagaagctcggacccttggtctaattcgcactttcctcacgagaattaaattaagcaaaaaacaaacaaacatagtgggccctcgtctagatcatgatgtgccagtttctgagacatctttttaaggctcttactgcagctcccctccccaccctcctcttctttgcaaaacagacccaagcagggcaggctcagaccactcgcttctttcagatctttcttgcaattatgataacatgagatttgctgttgtgcttttagagaaaagtctggactcagccacaaactctaataagacctgtacatctgagaacctttcccgttactgcgttttcaccacctgtcttccccatgctttatttatctgtatgaacacagatttgacattacagctaaggaaataatttgagttgattcagaaatcctggcatgtgacaattttgttaaattaccaagtttggtttttaataatttctcaatattatgcgccaagatctaattttaaaactgtatgaggactttgtgctgaaaatagagtatttttttaaagtaaggctgtcttggtttaaaagcagattacagaaatgtaagtcaacttaagaacagtgaatgaatgtaaaaacattcagttgagaccatatgcattttctgtgctgtttgtacttgaggtatgtaacatttgtatacctgaacttattttaaagatgaactgaaatgcacatagccaagtcttgagatacaagattgaatgtgtatttcttaaaaatacaactttgtgttgtactttgaaataaatgatgcttttttcaaaaaaaaaaat

SEQ ID NO: 363190 - DNA, 3545 bp, Homo sapiens
cgcggccgccggcctcctaggagcgctgcacctggtgatgaccctcgtagtggctgcggcgcgggccgagaaggaagcattcgttcagtcagagagcataatagaagtactgcgttttgatgatggagggctactacagaccgagacaacacttggactcagttcatatcagcagaaaagtatatctctctaccgggggaattgcaggcccatacgatttgagccaccaatgctggatttccatgaacaaccagttggaatgccaaaaatggaaaaagtctacttacataatcctagttctgaagaaacgattactttagtatcaatatctgctacaacatcacattttcatgcatcattttttcaaaataggaaaattcttccaggaggaaatacatcatttgatgtagtttttcttgcaagagtagtaggaaatgtagaaaatactttatttattaatacatctaatcatggggtatttacttaccaggtatttggtgttggagttccaaatccatatcgattgaggccgttccttggggccagagtccctgtgaatagcagtttctcacctataataaacatccacaatcctcacagtgagcctttacaggttgtagaaatgtactctagtggaggagaccttcacctagaactcccaacgggtcaacaaggaggtaccagaaaactgtgggaaattcctccttatgaaaccaagggagtgatgagagccagtttttcatctagagaagcagataatcacacagccttcataagaataaagactaatgcttcagacagcacagagtttatcattcttcctgttgaggttgaagttacaacagctcctggaatttattcctcaactgaaatgttagattttggtacactaagaacacaagatctaccaaaagttttaaaccttcatttattaaattcaggaacaaaagatgtaccaataacaagtgttcgacctacaccacaaaatgatgctataacggtacactttaaaccaattacattaaaagcatcagaaagtaaatacaccaaggttgcaagcattagttttgatgcatcgaaggcaaaaaagccatctcagttttctgggaaaataacagttaaagcaaaggaaaagagttattctaaacttgaaataccatatcaagcagaagttttagatggttatttgggatttgatcatgctgcaacattatttcacatccgagacagccctgctgatcctgtggaaaggccaatttaccttactaacactttcagttttgcgatcctcattcacgatgtgttgctaccagaagaagccaaaacaatgtttaaagttcacaacttcagcaaaccagtcttaattcttcctaatgaatcaggatacatttttaccctgctttttatgccttccacatcatccatgcacattgataacaacattttacttattaccaatgcttctaaatttcatttacccgtgcgggtatacacaggctttttagattactttgtattgccccccaaaatagaggaacgtttcatagattttggagtactgagtgctacagaagcaagtaatattttatttgcaattataaacagcaatccaattgagttggctataaaaagttggcatatcataggagacggtttatcaatagaacttgtagctgtggaaagaggcaatagaactacaataatttcaagcctgccagagtttgaaaaatcctctttatcagatcaatcatcggtaacattagcttcaggctattttgcagtcttcagagtcaaacttactgcaaaaaaattagaggggattcatgatggagccatccagatcacaacagactatgagatcctgacaatccctgtgaaggctgtgattgcagtaggctcactgacctgcttccctaagcacgtggttcttccaccttcctttccagggaaaatagttcatcaaagtttaaatattatgaattccttctcacagaaggtaaaaatacagcaaatacgatctttgtcagaagatgtgcgattttactataaacgattacggggcaataaggaagacttggagccaggaaaaaaatcaaagattgcaaacatttattttgatcctggactacagtgtggggatcattgctatgttggcttgccttttctatccaaatctgaacccaaagtgcagcctggtgtagccatgcaggaagatatgtgggatgctgactgggatttgcatcaaagcctgttcaagggatggacaggaataaaggaaaattcaggtcatagattgagtgctatatttgaagtaaatacagaccttcaaaaaaatataatatcaaaaatcactgctgagctctcctggccttccatacttagctcaccccggcacttgaaatttccacttactaatacaaactgctcctcagaagaagagattactttagaaaatcctgcagatgttcctgtctatgttcagtttattcctctggctttatattccaacccttcagtgtttgtagataagttagtatcaaggtttaacttgagtaaggtggcaaagatagatttgagaacactagaatttcaagtcttcagaaacagtgctcatccactgcagagttcaacaggatttatggagggcctctctcgacatttaattttaaacctaattttaaaacctggagaaaagaaatctgtcaaagtaaagtttactccagttcacaacagaactgtttcttcacttatcatagtcagaaataacctgactgtgatggatgctgtgatggtccaaggacaaggaacaactgagaacttgagggtggcaggcaagcttccaggtccaggaagctccttacgctttaaaatcacggaagcattgttaaaagattgtacagatagtttaaaactaagagaaccaaatttcacattgaaaagaacatttaaggtagagaatacaggacaacttcaaattcacatagaaaccattgaaatcagtggatactcatgtgaaggatatggctttaaagttgttaattgtcaagagtttactctaagtgccaatgcttctagagatataatcatattgtttactcctgattttacagcttctagagttattcgggaactgaagtttataacaaccagtggctctgagtttgtatttatattgaatgcatcccttccttaccatatgttagcaacctgtgcagaagccctacccagacctaactgggaactggctctgtatatcatcatctcaggaataatgagtgcactgtttcttttggtcattggaacagcctatttggaagctcaaggaatatgggagccatttcgaaggcggctatcctttgaggcctcgaacccgcccttcgatgtgggaaggccatttgatctcaggagaatcgttggtatttcatctgaaggaaagtatgttcacatgctggcaataaattccctagtgtacatagatttggctgataaaattacaataaaaaataagtttcttttcatctttgctcaggagaaaaaaaaaaaat

SEQ ID NO: 363191 - DNA, 343 bp, Homo sapiens
gtttagagtgagccagaattgggatgttttggcatgttttgttctgggaaactgaggatagaaggtaggatgtgttataccctcccttattatttactgaaccttagtagaaaatgaaggaaagaagtttttggtatacagatatgtatagataagcttttcaggcacttagatttggggttttgttttaaagcatattgtaaatgatattgctgtctgagttctggactctttttatctatgtttaactttttaaaactggtctttgtattagtttgctagggctgccataacaaagtatcatacactggggtggctgaaacaacaaaaatgtgttttctca

SEQ ID NO: 363192 - DNA, 404 bp, Homo sapiens
gcccagtagagagaggttttggagctcacctgcctcaggttcaaatcctggccctgctattccctgggtgtgtgagtgtggacaagtcttctcatcctcagctataaaatgggggtgctgggccaggtgcggtggctctcgcctgtaatcccagcactttgggaggccaaggcaggtggatcacctgaggtcaggagttcaagaccagcctggccaacacggtgaaaccctgtctctactaaaaatacaaaaatgagccgggtatgatggcaggcacctgtaatcccagctactctggaggctgaggcaggagaatcacttgatcccgggaggtgaaggttgcagtgagcggagattgcaccactgcactctagcctgggcgacagagcaagactccgtctcaa

SEQ ID NO: 363193 - DNA, 288 bp, Homo sapiens
tgaaactatctgggaaggtggtattcctacgcagacagaactggtttatattgcttacaacatcggtggtgggaacggaagacagcttgccttgtctcgcttcagtgtggggttcctctacccttaagaatttctgaccaggtaaactatctctccattcctgtgagttcagacctgtctcacaaacttgtgacaaaagaagtctgaggacttgggaatgaatctagattccttgctccctccattagcccccttctccctgtaaatatatgtgtcagtaatgtgata

SEQ ID NO: 363194 - DNA, 1073 bp, Homo sapiens
tgggggagcagagggcagcacttcctccagctccaaaagagtgcacccaccccaacgttaccaatacactcgtgcaggcggaaagctccgacgccggtgtgcgtctacgctgggggcgtggcctgactgcgcggccagacgccagcgccatggaggagtacgctcgggagccctgcccatggcgaattgtggatgattgcggtggagccttcactatgggtgtcatcggtggcggagtcttccaggccatcaagggtttccgcaatgcccctgttggaattcggcaccggttgagaggtagtgccaatgctgtgaggatccgagccccccagattggaggtagcttcgcagtgtgggggggcctgttctccaccattgactgtggcctggtgcggcttcggggcaaggaggatccctggaactctatcaccagtggagcattgaccggggctgtgctggctgcccgcagtggcccactggccatggtgggctcagcaatgatggggggcatcctgttggccctcattgagggcgttggcatcctcctcactcgctacacagcccagcagttccgaaatgcgcccccattcctggaggaccccagccagctgccccctaaggatggcaccccggccccaggctaccccagctatcagcagtaccactgaggaagccactgccaccatgggagctacttctcggttccctccccgatggtctacctcgaagggagggctggctcccagttagccctgggaccctccagagagggtttctactctgctccctagtcccagggtgggggtggggcaccccagctgccctgacagatgggtcccctttttctctctcagggcaccccagccccacactcacatgtacgaagttctcaccccagctcctttgtgtggcaccctgatgagtatttaaagcccgttttgaaatgccaaaaaaaaaaaaaaaaaaaaagcgggggctttttggggggcgaaaacggttataaaggcctggtcatttttccggccatttgtaaggggaatccgcggcccatggggaatgaacgcagctaaaag

SEQ ID NO: 363195 - DNA, 1704 bp, Homo sapiens
tgggggagcagagggcagcacttcctccagctccaaaagagtgcacccaccccaacgttaccaatacactcgtgcaggcggaaagctccgacgccggtgtgcgtctacgctgggggcgtggcctgactgcgcggccagacgccagcgccatggaggagtacgctcgggagccctggtacggcaatgggcacaggcatccggaatattgctgcgacgccaaggccagccgtgggggtcgggcgggggaggcatcggccgcacagagccatgtaccagactcgggggactcttaacgtatctcccgctacccccactcggttcctgtcattcgggctccgttatgaggggccacaaccagagaaggtgcggcgaaggccgaaccacgccatgtttctcctgacttcgtaatctcctagccctgttaacgaaaaaagacacgctggacgatccatcccggctaggggtggtacggtgttgaccggaaatccccagagttgccgccagtggtttttcccaggtcgcctttgtcagtggggggcggggcacggatgaacctgttgagggccggcggggacggtggatgcttcccgcggtcgctcttggtttttcccagttgtgccggattgaaaaggggcggggcatggttggacgggctcaccgtcggagaaggggtgcgacgcggtcctgctttgctgacagtctgtcttggctagttaacacgcctatgtcgcttattgaaacgtcaactctgcgtgtgccaattcatttaatctttgatcacagtaaaaccgttggctgattccttgcccatggcgaattgtggatgattgcggtggagccttcactatgggtgtcatcggtggcggagtcttccaggccatcaagggtttccgcaatgcccctgttggaattcggcaccggttgagaggtagtgccaatgctgtgaggatccgagccccccagattggaggtagcttcgcagtgtgggggggcctgttctccaccattgactgtggcctggtgcggcttcggggcaaggaggatccctggaactctatcaccagtggagcattgaccggggctgtgctggctgcccgcagtggcccactggccatggtgggctcagcaatgatggggggcatcctgttggccctcattgagggcgttggcatcctcctcactcgctacacagcccagcagttccgaaatgcgcccccattcctggaggaccccagccagctgccccctaaggatggcaccccggccccaggctaccccagctatcagcagtaccactgaggaagccactgccaccatgggagctacttctcggttccctccccgatggtctacctcgaagggagggctggctcccagttagccctgggaccctccagagagggtttctactctgctccctagtcccagggtgggggtggggcaccccagctgccctgacagatgggtcccctttttctctctcagggcaccccagccccacactcacatgtacgaagttctcaccccagctcctttgtgtggcaccctgatgagtatttaaagcccgttttgaaatgccaaaaaaaaaaaaaaaaaaaaagcgggggctttttggggggcgaaaacggttataaaggcctggtcatttttccggccatttgtaaggggaatccgcggcccatggggaatgaacgcagctaaaag

SEQ ID NO: 363196 - DNA, 1223 bp, Homo sapiens
tgggggagcagagggcagcacttcctccagctccaaaagagtgcacccaccccaacgttaccaatacactcgtgcaggcggaaagctccgacgccggtgtgcgtctacgctgggggcgtggcctgactgcgcggccagacgccagcgccatggaggagtacgctcgggagccctgcccatggcgaattgtggatgattgcggtggagccttcactatgggtgtcatcggtggcggagtcttccaggccatcaagggtttccgcaatgcccctgtttgcagattgctgtctgaagctcccttgtttatctactcttgctcaagatctgtgtctcccaccgttaatgtgagctctgagagggcagagagcagacctaccttgttcatggctgtatccctgcatatggcatggtgcttggcacatataggaattcggcaccggttgagaggtagtgccaatgctgtgaggatccgagccccccagattggaggtagcttcgcagtgtgggggggcctgttctccaccattgactgtggcctggtgcggcttcggggcaaggaggatccctggaactctatcaccagtggagcattgaccggggctgtgctggctgcccgcagtggcccactggccatggtgggctcagcaatgatggggggcatcctgttggccctcattgagggcgttggcatcctcctcactcgctacacagcccagcagttccgaaatgcgcccccattcctggaggaccccagccagctgccccctaaggatggcaccccggccccaggctaccccagctatcagcagtaccactgaggaagccactgccaccatgggagctacttctcggttccctccccgatggtctacctcgaagggagggctggctcccagttagccctgggaccctccagagagggtttctactctgctccctagtcccagggtgggggtggggcaccccagctgccctgacagatgggtcccctttttctctctcagggcaccccagccccacactcacatgtacgaagttctcaccccagctcctttgtgtggcaccctgatgagtatttaaagcccgttttgaaatgccaaaaaaaaaaaaaaaaaaaaagcgggggctttttggggggcgaaaacggttataaaggcctggtcatttttccggccatttgtaaggggaatccgcggcccatggggaatgaacgcagctaaaag

SEQ ID NO: 363197 - DNA, 1480 bp, Homo sapiens
gcgattctcctgcctcagcctcctgagtagctgggactacaggtatttatttatttggtagagacggggtttcaacgtgttgcttaggctggtctcgaactcctgaactcaagtgatccacacacctcggcctcccacagtgctgggattacaggtgttagccactgcgcattttacctagaggcagattctggctcagaaacccggatagaggaaaatgacaggaatttaattggcagacggaagacagccttgaagttgagagaattcttttaacataattctttttctctgaccacctcccctcccagaagatcgcaaatgccatgactttaaatgccatctattagccaaggtctctgcaatttatatatgtagccccgtccctcccctagactcctggaactctcctccctggatctttgcccaagtttgtcatcctcaaggtctcagcacagattccccctccttcaagaggcctttcctgacccctcagccccagtcatatttcttcatggcatttcctctacagtgcagattgctgtctgaagctcccttgtttatctactcttgctcaagatctgtgtctcccaccgttaatgtgagctctgagagggcagagagcagacctaccttgttcatggctgtatccctgcatatggcatggtgcttggcacatataggaattcggcaccggttgagaggtagtgccaatgctgtgaggatccgagccccccagattggaggtagcttcgcagtgtgggggggcctgttctccaccattgactgtggcctggtgcggcttcggggcaaggaggatccctggaactctatcaccagtggagcattgaccggggctgtgctggctgcccgcagtggcccactggccatggtgggctcagcaatgatggggggcatcctgttggccctcattgagggcgttggcatcctcctcactcgctacacagcccagcagttccgaaatgcgcccccattcctggaggaccccagccagctgccccctaaggatggcaccccggccccaggctaccccagctatcagcagtaccactgaggaagccactgccaccatgggagctacttctcggttccctccccgatggtctacctcgaagggagggctggctcccagttagccctgggaccctccagagagggtttctactctgctccctagtcccagggtgggggtggggcaccccagctgccctgacagatgggtcccctttttctctctcagggcaccccagccccacactcacatgtacgaagttctcaccccagctcctttgtgtggcaccctgatgagtatttaaagcccgttttgaaatgccaaaaaaaaaaaaaaaaaaaaagcgggggctttttggggggcgaaaacggttataaaggcctggtcatttttccggccatttgtaaggggaatccgcggcccatggggaatgaacgcagctaaaag

SEQ ID NO: 363198 - DNA, 463 bp, Homo sapiens
tgggggagcagagggcagcacttcctccagctccaaaagagtgcacccaccccaacgttaccaatacactcgtgcaggcggaaagctccgacgccggtgtgcgtctacgctgggggcgtggcctgactgcgcggccagacgccagcgccatggaggagtacgctcgggagccctgcccatggcgaattgtggatgattgcggtggagccttcactatgggtgtcatcggtggcggagtcttccaggccatcaagggtttccgcaatgcccctgttgtgagtccaggccttccctgggttggtgtggggttagctatcttgcccacaagggaggctgctctgaaaactgcttggagctgccagtcacgtgcacttattcattctggtgcccactcacctactatgtgccgagcctggctcctgtatctgggattttgtagggattgcaaacatggcctctgtct

SEQ ID NO: 363199 - DNA, 581 bp, Homo sapiens
tcgattggccaatgagagtgcgtccttggcgtgacatgcggtatagcgacccaatcgctgcccggtaataggcggaaagctccgacgccggtgtgcgtctacgctgggggcgtggcctgactgcgcggccagacgccagcgccatggaggagtacgctcgggagccctggtacggcaatgggcacaggcatccggaatattgctgcgacgccaaggccagccgtgggggtcgggcgggggaggcatcggccgcacagagccatgtaccagactcgggggactcttaacgtatctcccgctacccccactcggttcctgtcattcgggctccgttatgaggggccacaaccagagaaggtgcggcgaaggccgaaccacgccatgtttctcctgacttcgtaatctcctagccctgttaacgaaaaaagacacgctggacgatccatcccggctaggggtggtacggtgttgaccggaaatccccagagttgccgccagtggtttttcccaggtcgcctttgtcagtggggggcggggcacggatgaacctgttgagggccggcggggacggtggatgcttc

SEQ ID NO: 363200 - DNA, 968 bp, Homo sapiens
ccatatacggcagtagctcggtcaactcggacgagggcagcgccatggaggagtacgctcgggagccctgcccatggcgaattgtggatgattgcggtggagccttcactatgggtgtcatcggtggcggagtcttccaggccatcaagggtttccgcaatgcccctgttggaattcggcaccggttgagaggtagtgccaatgctgtgaggatccgagccccccagattggaggtagcttcgcagtgtgggggggcctgttctccaccattgactgtggcctggtgcggcttcggggcaaggaggatccctggaactctatcaccagtggagcattgaccggggctgtgctggctgcccgcagtggcccactggccatggtgggctcagcaatgatggggggcatcctgttggccctcattgagggcgttggcatcctcctcactcgctacacagcccagcagttccgaaatgcgcccccattcctggaggaccccagccagctgccccctaaggatggcaccccggccccaggctaccccagctatcagcagtaccactgaggaagccactgccaccatgggagctacttctcggttccctccccgatggtctacctcgaagggagggctggctcccagttagccctgggaccctccagagagggtttctactctgctccctagtcccagggtgggggtggggcaccccagctgccctgacagatgggtcccctttttctctctcagggcaccccagccccacactcacatgtacgaagttctcaccccagctcctttgtgtggcaccctgatgagtatttaaagcccgttttgaaatgccaaaaaaaaaaaaaaaaaaaaagcgggggctttttggggggcgaaaacggttataaaggcctggtcatttttccggccatttgtaaggggaatccgcggcccatggggaatgaacgcagctaaaag

SEQ ID NO: 363201 - DNA, 1176 bp, Homo sapiens
tgggggagcagagggcagcacttcctccagctccaaaagagtgcacccaccccaacgttaccaatacactcgtgcaggcggaaagctccgacgccggtgtgcgtctacgctgggggcgtggcctgactgcgcggccagacgccagcgccatggaggagtacgctcgggagccctgcccatggcgaattgtggatgattgcggtggagccttcactatgggtgtcatcggtggcggagtcttccaggccatcaagggtttccgcaatgcccctgttatctgtgtctcccaccgttaatgtgagctctgagagggcagagagcagacctaccttgttcatggctgtatccctgcatatggcatggtgcttggcacatataggaattcggcaccggttgagaggtagtgccaatgctgtgaggatccgagccccccagattggaggtagcttcgcagtgtgggggggcctgttctccaccattgactgtggcctggtgcggcttcggggcaaggaggatccctggaactctatcaccagtggagcattgaccggggctgtgctggctgcccgcagtggcccactggccatggtgggctcagcaatgatggggggcatcctgttggccctcattgagggcgttggcatcctcctcactcgctacacagcccagcagttccgaaatgcgcccccattcctggaggaccccagccagctgccccctaaggatggcaccccggccccaggctaccccagctatcagcagtaccactgaggaagccactgccaccatgggagctacttctcggttccctccccgatggtctacctcgaagggagggctggctcccagttagccctgggaccctccagagagggtttctactctgctccctagtcccagggtgggggtggggcaccccagctgccctgacagatgggtcccctttttctctctcagggcaccccagccccacactcacatgtacgaagttctcaccccagctcctttgtgtggcaccctgatgagtatttaaagcccgttttgaaatgccaaaaaaaaaaaaaaaaaaaaagcgggggctttttggggggcgaaaacggttataaaggcctggtcatttttccggccatttgtaaggggaatccgcggcccatggggaatgaacgcagctaaaag

SEQ ID NO: 363202 - DNA, 1411 bp, Homo sapiens
tgggggagcagagggcagcacttcctccagctccaaaagagtgcacccaccccaacgttaccaatacactcgtgcaggcggaaagctccgacgccggtgtgcgtctacgctgggggcgtggcctgactgcgcggccagacgccagcgccatggaggagtacgctcgggagccctggtacggcaatgggcacaggcatccggaatattgctgcgacgccaaggccagccgtgggggtcgggcgggggaggcatcggccgcacagagccatgtaccagactcgggggactcttaacgtatctcccgctacccccactcggttcctgtcattcgggctccgttatgaggggccacaaccagagaagcccatggcgaattgtggatgattgcggtggagccttcactatgggtgtcatcggtggcggagtcttccaggccatcaagggtttccgcaatgcccctgtttgcagattgctgtctgaagctcccttgtttatctactcttgctcaagatctgtgtctcccaccgttaatgtgagctctgagagggcagagagcagacctaccttgttcatggctgtatccctgcatatggcatggtgcttggcacatataggaattcggcaccggttgagaggtagtgccaatgctgtgaggatccgagccccccagattggaggtagcttcgcagtgtgggggggcctgttctccaccattgactgtggcctggtgcggcttcggggcaaggaggatccctggaactctatcaccagtggagcattgaccggggctgtgctggctgcccgcagtggcccactggccatggtgggctcagcaatgatggggggcatcctgttggccctcattgagggcgttggcatcctcctcactcgctacacagcccagcagttccgaaatgcgcccccattcctggaggaccccagccagctgccccctaaggatggcaccccggccccaggctaccccagctatcagcagtaccactgaggaagccactgccaccatgggagctacttctcggttccctccccgatggtctacctcgaagggagggctggctcccagttagccctgggaccctccagagagggtttctactctgctccctagtcccagggtgggggtggggcaccccagctgccctgacagatgggtcccctttttctctctcagggcaccccagccccacactcacatgtacgaagttctcaccccagctcctttgtgtggcaccctgatgagtatttaaagcccgttttgaaatgccaaaaaaaaaaaaaaaaaaaaagcgggggctttttggggggcgaaaacggttataaaggcctggtcatttttccggccatttgtaaggggaatccgcggcccatggggaatgaacgcagctaaaag

SEQ ID NO: 363203 - DNA, 1694 bp, Homo sapiens
tgggggagcagagggcagcacttcctccagctccaaaagagtgcacccaccccaacgttaccaatacactcgtgcaggcggaaagctccgacgccggtgtgcgtctacgctgggggcgtggcctgactgcgcggccagacgccagcgccatggaggagtacgctcgggagccctgcccatggcgaattgtggatgattgcggtggagccttcactatgggtgtcatcggtggcggagtcttccaggccatcaagggtttccgcaatgcccctgttagacggggtttcaacgtgttgcttaggctggtctcgaactcctgaactcaagtgatccacacacctcggcctcccacagtgctgggattacaggtgttagccactgcgcattttacctagaggcagattctggctcagaaacccggatagaggaaaatgacaggaatttaattggcagacggaagacagccttgaagttgagagaattcttttaacataattctttttctctgaccacctcccctcccagaagatcgcaaatgccatgactttaaatgccatctattagccaaggtctctgcaatttatatatgtagccccgtccctcccctagactcctggaactctcctccctggatctttgcccaagtttgtcatcctcaaggtctcagcacagattccccctccttcaagaggcctttcctgacccctcagccccagtcatatttcttcatggcatttcctctacagtgcagattgctgtctgaagctcccttgtttatctactcttgctcaagatctgtgtctcccaccgttaatgtgagctctgagagggcagagagcagacctaccttgttcatggctgtatccctgcatatggcatggtgcttggcacatataggaattcggcaccggttgagaggtagtgccaatgctgtgaggatccgagccccccagattggaggtagcttcgcagtgtgggggggcctgttctccaccattgactgtggcctggtgcggcttcggggcaaggaggatccctggaactctatcaccagtggagcattgaccggggctgtgctggctgcccgcagtggcccactggccatggtgggctcagcaatgatggggggcatcctgttggccctcattgagggcgttggcatcctcctcactcgctacacagcccagcagttccgaaatgcgcccccattcctggaggaccccagccagctgccccctaaggatggcaccccggccccaggctaccccagctatcagcagtaccactgaggaagccactgccaccatgggagctacttctcggttccctccccgatggtctacctcgaagggagggctggctcccagttagccctgggaccctccagagagggtttctactctgctccctagtcccagggtgggggtggggcaccccagctgccctgacagatgggtcccctttttctctctcagggcaccccagccccacactcacatgtacgaagttctcaccccagctcctttgtgtggcaccctgatgagtatttaaagcccgttttgaaatgccaaaaaaaaaaaaaaaaaaaaagcgggggctttttggggggcgaaaacggttataaaggcctggtcatttttccggccatttgtaaggggaatccgcggcccatggggaatgaacgcagctaaaag

SEQ ID NO: 363204 - DNA, 349 bp, Homo sapiens
ttttttttgagacaaggtcttgtgctgcccaggctggagggcagtggtgcaatcatggctcactgcagcctcgacctcctaggctcaaagcaatcctcccacttcagcctcccaagtagctgggactacaggtgtgtgctaccacacccaactaatttttgtattttttgtagagatgggggtctcaatatgttgcacaggctggtctcaaactcctgggctcaagtgatccttccacctcagtctcccctaaattgttaggtttacaggcatgagccaccacaccaagcctagaatggaattcttaaaacttaactgtatacagactttcacaactcaaagaaaaaaa

SEQ ID NO: 363205 - DNA, 416 bp, Homo sapiens
aaagaacagtgggccagacatggtggctcacacctgtaattccagcactttgggagggtaagggggacggatcacttgagaacaggagttccagaccagcctggtcagcatgccgaaaccctgtctctactaaaaatacaaacaacaacaacaaaaaatcagcaggatatggtggcacatgcctgtattcccagctactctggaagtcgaagcacaagaatgtcctgaacccaggaggtagaggatgcagtaagccgagatcatgccactgcactccagcttgggtgacagagcgagactctgtcttgaaaacaaaaacaaacaaataaaaaaagaacagtcatcagtcaactcttaggatgcattatttcaacttcttacaccatagcattttgtgcagcttaacaaagtgaact

SEQ ID NO: 363206 - DNA, 222 bp, Homo sapiens
atttgctgaatgatagaattagaaaaattaccatttgagaatcatcatagtaatatttaattcagctaaggaacatcaaaggatgctaacattagtctgggcacagtggctcacacctgtaatcccaacactttgggaggctgaggtgggaggactgcttgaggccaagagtttgagatcaacctgggcaacataatgagaccccatccctccaaaaaaaaa

SEQ ID NO: 363207 - DNA, 657 bp, Homo sapiens
atagctcgtaccctgcgtctttctactgcggttgtcatcttgatagtggcccgtttcattcatgtgcacagtcagctcgactagggtgtcataggccgcgctgcactgtcggcatcggaatctgctggcccctgtgaacacagtcccgcacatcttgctgctctgtcggtacaactgcaccgagctgaacaggctgggtttcgagacggaccgagaaggcaagttctgctgcaggcttttggacagagcgtcttggtgccaatcaaaatcactcttgttgctgccgtttcgggtgtcacagttcctcctctcactattggacagcttgaagccaaggcccaggcctgaccagtaggaatccgacaggatgttggcgtagacagcggtcattttatccatgcaattgtgtgcttcgtttggaagcctgacgtgagtgtgtgctttcttgtctgaggcatctctgccgcagacactcttgatgtccgacacctgatcactggcgtcactcagcagagactcgttctcggcatcctgattggacaaatgacttcctggagagttctggtagctgaagcagcctttttgctctgggcccgtttctagctcctcgtccgtccctgtgtcattgccaccctgcagttgagctaactgaaccgc

SEQ ID NO: 363208 - DNA, 376 bp, Homo sapiens
gtaggaatccgacaggatgttggcgtagacagcggtcattttatccatgcaattgtgtgcttcgtttggaagcctgacgtgagtgtgtgctttcttgtctgaggcatctctgccgcagacactcttgatgtccgacacctgatcactggcgtcactcagcagagactcgttctcggcatcctgattggacaaatgacttcctggagagttctggtagctgaagcagcctttttgctctgggcccgtttctagctcctcgtccgtccctgtgtcattgccaccctgcagttgagctaactgaaccgctgtcctcctcctcctcctcttcttttatttcctcctcttctttcagctgttcctcctgggcgtagcctgc

SEQ ID NO: 363209 - DNA, 342 bp, Homo sapiens
gttcatcagctatcactagtgatagtgtattttatgtgtggcccaagatcacattcttccaatgtggtccagggaagccaaaagactggacaaccctgatttagagtgagtgagacagtgcaaaggaccttctacaatgaaccaaggtaggcagaaatgaaagcaagtggagcaggtgcccacctggaaactggccatcaacacagggtagcaataagaagagggtgaaaaatcactaatgtcagctgtcagtgagactacaaaaagcacccctagggctctaatccaataggcaacagtagtaacattataaaatttatctttaaaagattgatctgacag

SEQ ID NO: 363210 - DNA, 2118 bp, Homo sapiens
ggcggtcgctcctcagccgcccacgacccggagcgaaggtctcgcgaggcctgggcgctgcggcggcaggaggaggacggggaaggacggagccgagccgcggctgcctccctcgctcactccctcgcgcactcgcccgccccctccctccctcccctcccttccccggccccggctctggccccggcccattcgctgttgggtcttctgctagggaggatgtcgggttcgtcgctgcccagcgccctggccctctcgctgttgctggtctctggctccctcctcccagggccaggcgccgctcagaacgagccaaggattgtcaccagtgaagaggtcattattcgagacagccctgttctccctgtcaccctgcagtgtaacctcacctccagctctcacacccttacatacagctactggacaaagaatggggtggaactgagtgccactcgtaagaatgccagcaacatggagtacaggatcaataagccgagagctgaggattcaggcgaataccactgcgtatatcactttgtcagcgctcctaaagcaaacgccaccattgaagtgaaagccgctcctgacatcactggccataaacggagtgagaacaagaatgaagggcaggatgccactatgtattgcaagtcagttggctacccccacccagactggatatggcgcaagaaggagaacgggatgcccatggacattgtcaatacctctggccgcttcttcatcatcaacaaggaaaattacactgagttgaacattgtgaacctgcagatcacggaagaccctggcgagtatgaatgtaatgccaccaacgccattggctccgcctctgttgtcactgtcctcagggtgcggagccacctggccccactctggcctttcttgggaattctggctgaaattatcatccttgtggtgatcattgttgtgtatgagaagaggaagaggccagatgaggttcctgacgatgatgaaccagctggaccaatgaaaaccaactctaccaacaatcacaaagataaaaacttgcgccagagaaacacaaattaagtactgcttacaatatctttaggttcctgaaactggtggcaacatgacctgctaaaattttctgcttggacctctttggttctctcccctttcaagtgagcaacaccacaatgactgtctaaagcatgccttatttagcctctcctgtaagggtgatctagccaggtacattttaaacaatgcttcagtgtagaaggtgtaaactattttgggcttgatgtgctgtgaatgttgcttttttttttcctttgttaaaatatttaaatagaagtgaaaaggtcctctgaggatcagatcatgcatgcgccattttttacttaatgcagctgttaaattggcaaagctctaaaatgcactgctgccatctagtgatacacttttgtaaagtacagcaaaacctacagatatatacagtatataaatatatatatatatatatttatatttttgggggtgggagaaatccaaaataaagtaaatgcttgtttcatttttaagctgctgatattcattccttattgtatgttgtcagatgaggaaattgtgcagttctggtacataaagatgagtaatataaactgaaatctataattttaagggcttaacctgtgactttaataagctggaacagtccactgaatgggtataatgaattgcagtatatacgtatgattgctttttaagtgattatcttttcttctgttaagtcatgtaaattcataaatccttttgcactgatgtgttgaaccttattcttgtacattcattcaatcaaggcaaacttttataatttttcttttgtttccaatgaccttgaaatgttatagcatggtaatattctatgcaactatagttatactttttggtttgacactgtattttttcacattgatttactggttgatgatagattttataacctaacggttctcatgcggtgcgtaattgtagatgcatgtacttgtgtgttttgtgtaattattgaagtgcaatgatgtataaaaaagtggattcacctgtttttaaaaataaaacattgataaaaaaatg

SEQ ID NO: 363211 - DNA, 2466 bp, Homo sapiens
ggcggtcgctcctcagccgcccacgacccggagcgaaggtctcgcgaggcctgggcgctgcggcggcaggaggaggacggggaaggacggagccgagccgcggctgcctccctcgctcactccctcgcgcactcgcccgccccctccctccctcccctcccttccccggccccggctctggccccggcccattcgctgttgggtcttctgctagggaggatgtcgggttcgtcgctgcccagcgccctggccctctcgctgttgctggtctctggctccctcctcccagggccaggcgccgctcagaacgctgggtttgtcaagtcgcccatgtcagaaactaagctcacgggggacgcctttgagctgtactgtgacgtggtcgggagccccacgccagagatccagtggtggtacgcagaagtcaaccgggcagagtctttcagacagctgtgggacggtgctcggaagcgccgtgtcaccgtaaacaccgcctacgggtcaaacggcgtgagtgtgctgagaataacccggctcaccttggaggactctgggacttacgagtgcagggccagcaacgaccccaagaggaatgacttgaggcaaaacccctccataacatggattcgagcccaggccaccataagcgtccttcagaagccaaggattgtcaccagtgaagaggtcattattcgagacagccctgttctccctgtcaccctgcagtgtaacctcacctccagctctcacacccttacatacagctactggacaaagaatggggtggaactgagtgccactcgtaagaatgccagcaacatggagtacaggatcaataagccgagagctgaggattcaggcgaataccactgcgtatatcactttgtcagcgctcctaaagcaaacgccaccattgaagtgaaagccgctcctgacatcactggccataaacggagtgagaacaagaatgaagggcaggatgccactatgtattgcaagtcagttggctacccccacccagactggatatggcgcaagaaggagaacgggatgcccatggacattgtcaatacctctggccgcttcttcatcatcaacaaggaaaattacactgagttgaacattgtgaacctgcagatcacggaagaccctggcgagtatgaatgtaatgccaccaacgccattggctccgcctctgttgtcactgtcctcagggtgcggagccacctggccccactctggcctttcttgggaattctggctgaaattatcatccttgtggtgatcattgttgtgtatgagaagaggaagaggccagatgaggttcctgacgatgatgaaccagctggaccaatgaaaaccaactctaccaacaatcacaaagataaaaacttgcgccagagaaacacaaattaagtactgcttacaatatctttaggttcctgaaactggtggcaacatgacctgctaaaattttctgcttggacctctttggttctctcccctttcaagtgagcaacaccacaatgactgtctaaagcatgccttatttagcctctcctgtaagggtgatctagccaggtacattttaaacaatgcttcagtgtagaaggtgtaaactattttgggcttgatgtgctgtgaatgttgcttttttttttcctttgttaaaatatttaaatagaagtgaaaaggtcctctgaggatcagatcatgcatgcgccattttttacttaatgcagctgttaaattggcaaagctctaaaatgcactgctgccatctagtgatacacttttgtaaagtacagcaaaacctacagatatatacagtatataaatatatatatatatatatttatatttttgggggtgggagaaatccaaaataaagtaaatgcttgtttcatttttaagctgctgatattcattccttattgtatgttgtcagatgaggaaattgtgcagttctggtacataaagatgagtaatataaactgaaatctataattttaagggcttaacctgtgactttaataagctggaacagtccactgaatgggtataatgaattgcagtatatacgtatgattgctttttaagtgattatcttttcttctgttaagtcatgtaaattcataaatccttttgcactgatgtgttgaaccttattcttgtacattcattcaatcaaggcaaacttttataatttttcttttgtttccaatgaccttgaaatgttatagcatggtaatattctatgcaactatagttatactttttggtttgacactgtattttttcacattgatttactggttgatgatagattttataacctaacggttctcatgcggtgcgtaattgtagatgcatgtacttgtgtgttttgtgtaattattgaagtgcaatgatgtataaaaaagtggattcacctgtttttaaaaataaaacattgataaaaaaatg

SEQ ID NO: 363212 - DNA, 907 bp, Homo sapiens
  misc_feature (334)..(334): n is a, c, g, or t
  misc_feature (338)..(338): n is a, c, g, or t
  misc_feature (857)..(857): n is a, c, g, or t
gtctgtctgtttctgttgttgtcttctttctcttgttctttttttggttgtctgttagtttttgtttctatttgtttgtcttgttctgtctatttcgcttgttgttgcgtgtttatgtgtcttgtgctgttttcttgttgtgttctgtgttttcgcgcggcttgtgtagttgttttggctaattagccgggtcgatatttgtcatagcatgcatatttgtagtgtgggttaaacacagcattagccgcttggtgttattttttgctccgcgagcgttattattcgttctgggtgttttggcgccatcatatggtgtcccccgcgctcgttttgngggntttgctttccggactaggtgatccctcggttgaccgtttttgttcctcgccttcagccggtgtttgtgtttatgttggctcctgtttccgctgttttttttattcggcctcctttttgggggccgccctttgttaaacaaaaattgggggtgtggtgatattgggtccccccctgggtgattttttgttggtgcgccgccccccttttttttttttttgtgtttgttttgtttgtggttgtttttttttttttataatttttcttttgtttccaatgaccttgaaatgttatagcatggtaatattctatgcaactatagttatactttttggtttgacactgtattttttcacattgatttactggttgatgatagattttataacctaacggttctcatgcggtgcgtaattgtagatgcatgtacttgtgtgttttgtgtaattattgaagtgcaatgatgtataaaaaagtggattcacctgtttttaaaaataaaacattgataaaaaaatganaaaaaaaaataagggcggcggctcgcgatctggaattagcccacgcgtcc

SEQ ID NO: 363213 - DNA, 427 bp, Homo sapiens
ggctctagagatcccctctgtgtggtacataaagatgagtaatataaactgaaatctataattttaagggcttaacctgtgactttaataagctggaacagtccactgaatgggtataatgaattgcagtatatacgtatgattgctttttaagtgattatcttttcttctgttaagtcatgtaaattcataaatccttttgcactgatgtgttgaaccttattcttgtacattcattcaatcaaggcaaacttttataatttttcttttgtttccaatgaccttgaaatgttatagcatggtaatattctatgcaactatagttatactttttggtttgacactgtattttttcacattgtcaactgctgtgaatgctgtatggtgtgtgtactcttctgttactgatatgtaagtctggcaatgt

SEQ ID NO: 363214 - DNA, 2463 bp, Homo sapiens
  misc_feature (2)..(3): n is a, c, g, or t
  misc_feature (5)..(5): n is a, c, g, or t
  misc_feature (61)..(61): n is a, c, g, or t
gnngngggggcggatgaggagggggcgcagctcttagggagggtggcacaagaccggcgtntgtgttccgggcgacggggatggtggtgtccgtcaggccccccgggagctggggtcgtccaggattctactgaggccccgtaggactggtgacatccttaaaaataagggggaaattggggggaagagagtcctgaggaacactaatgggcagagtacagtggcacgatcttggctcactgcaacctccgcctcctgggttcaagtgattcttctgtctcagcctcccgagtacctgggactacagctgggtttgtcaagtcgcccatgtcagaaactaagctcacgggggacgcctttgagctgtactgtgacgtggtcgggagccccacgccagagatccagtggtggtacgcagaagtcaaccgggcagagtctttcagacagctgtgggacggtgctcggaagcgccgtgtcaccgtaaacaccgcctacgggtcaaacggcgtgagtgtgctgagaataacccggctcaccttggaggactctgggacttacgagtgcagggccagcaacgaccccaagaggaatgacttgaggcaaaacccctccataacatggattcgagcccaggccaccataagcgtccttcagaagccaaggattgtcaccagtgaagaggtcattattcgagacagccctgttctccctgtcaccctgcagtgtaacctcacctccagctctcacacccttacatacagctactggacaaagaatggggtggaactgagtgccactcgtaagaatgccagcaacatggagtacaggatcaataagccgagagctgaggattcaggcgaataccactgcgtatatcactttgtcagcgctcctaaagcaaacgccaccattgaagtgaaagccgctcctgacatcactggccataaacggagtgagaacaagaatgaagggcaggatgccactatgtattgcaagtcagttggctacccccacccagactggatatggcgcaagaaggagaacgggatgcccatggacattgtcaatacctctggccgcttcttcatcatcaacaaggaaaattacactgagttgaacattgtgaacctgcagatcacggaagaccctggcgagtatgaatgtaatgccaccaacgccattggctccgcctctgttgtcactgtcctcagggtgcggagccacctggccccactctggcctttcttgggaattctggctgaaattatcatccttgtggtgatcattgttgtgtatgagaagaggaagaggccagatgaggttcctgacgatgatgaaccagctggaccaatgaaaaccaactctaccaacaatcacaaagataaaaacttgcgccagagaaacacaaattaagtactgcttacaatatctttaggttcctgaaactggtggcaacatgacctgctaaaattttctgcttggacctctttggttctctcccctttcaagtgagcaacaccacaatgactgtctaaagcatgccttatttagcctctcctgtaagggtgatctagccaggtacattttaaacaatgcttcagtgtagaaggtgtaaactattttgggcttgatgtgctgtgaatgttgcttttttttttcctttgttaaaatatttaaatagaagtgaaaaggtcctctgaggatcagatcatgcatgcgccattttttacttaatgcagctgttaaattggcaaagctctaaaatgcactgctgccatctagtgatacacttttgtaaagtacagcaaaacctacagatatatacagtatataaatatatatatatatatatttatatttttgggggtgggagaaatccaaaataaagtaaatgcttgtttcatttttaagctgctgatattcattccttattgtatgttgtcagatgaggaaattgtgcagttctggtacataaagatgagtaatataaactgaaatctataattttaagggcttaacctgtgactttaataagctggaacagtccactgaatgggtataatgaattgcagtatatacgtatgattgctttttaagtgattatcttttcttctgttaagtcatgtaaattcataaatccttttgcactgatgtgttgaaccttattcttgtacattcattcaatcaaggcaaacttttataatttttcttttgtttccaatgaccttgaaatgttatagcatggtaatattctatgcaactatagttatactttttggtttgacactgtattttttcacattgatttactggttgatgatagattttataacctaacggttctcatgcggtgcgtaattgtagatgcatgtacttgtgtgttttgtgtaattattgaagtgcaatgatgtataaaaaagtggattcacctgtttttaaaaataaaacattgataaaaaaatg

SEQ ID NO: 363215 - DNA, 2861 bp, Homo sapiens
tgagggtctgcattcaggaagaggctgcctaacgctaaacaactgggttgtttgtttgccataggcccagggaagaataggaggtggagaaagtctaatcgaacccaggatagaatcctgtgtgagagagaaatttgctactctttcagttgaaatttgaactctgaatcccaagagaaggcaccagtaggtcatttaatacttcttgttgaggcttgcaaaagacactgcatttctaacaaagcgtttgcccatccaaaagagagatcctgatttggcatataaaactactgcctcttctggttatctttcatcacttgcctgagtttaaaaaggtaataaatggtttgtgttctaagggaaagaggctcttcccaagacctgaggctttctcattcctaccagctgggcccattgctaaaatgctttccagtgggcttgcttctgcctggccagcacctgggctgccccagcttgtaattagcctgcctttgcttcataagcttcccagggtgtggttcttcttctaaaagcttgtatgaattgctgtactgtctctttatagtttaaaaatgaatccttttttgttctttgcaactcatttgcttttttcttttcttttctttaaattactattaacacctgttgattctttttttttttctgattggcctgtcactgcattcctgctccccctccctctagctgggtttgtcaagtcgcccatgtcagaaactaagctcacgggggacgcctttgagctgtactgtgacgtggtcgggagccccacgccagagatccagtggtggtacgcagaagtcaaccgggcagagtctttcagacagctgtgggacggtgctcggaagcgccgtgtcaccgtaaacaccgcctacgggtcaaacggcgtgagtgtgctgagaataacccggctcaccttggaggactctgggacttacgagtgcagggccagcaacgaccccaagaggaatgacttgaggcaaaacccctccataacatggattcgagcccaggccaccataagcgtccttcagaagccaaggattgtcaccagtgaagaggtcattattcgagacagccctgttctccctgtcaccctgcagtgtaacctcacctccagctctcacacccttacatacagctactggacaaagaatggggtggaactgagtgccactcgtaagaatgccagcaacatggagtacaggatcaataagccgagagctgaggattcaggcgaataccactgcgtatatcactttgtcagcgctcctaaagcaaacgccaccattgaagtgaaagccgctcctgacatcactggccataaacggagtgagaacaagaatgaagggcaggatgccactatgtattgcaagtcagttggctacccccacccagactggatatggcgcaagaaggagaacgggatgcccatggacattgtcaatacctctggccgcttcttcatcatcaacaaggaaaattacactgagttgaacattgtgaacctgcagatcacggaagaccctggcgagtatgaatgtaatgccaccaacgccattggctccgcctctgttgtcactgtcctcagggtgcggagccacctggccccactctggcctttcttgggaattctggctgaaattatcatccttgtggtgatcattgttgtgtatgagaagaggaagaggccagatgaggttcctgacgatgatgaaccagctggaccaatgaaaaccaactctaccaacaatcacaaagataaaaacttgcgccagagaaacacaaattaagtactgcttacaatatctttaggttcctgaaactggtggcaacatgacctgctaaaattttctgcttggacctctttggttctctcccctttcaagtgagcaacaccacaatgactgtctaaagcatgccttatttagcctctcctgtaagggtgatctagccaggtacattttaaacaatgcttcagtgtagaaggtgtaaactattttgggcttgatgtgctgtgaatgttgcttttttttttcctttgttaaaatatttaaatagaagtgaaaaggtcctctgaggatcagatcatgcatgcgccattttttacttaatgcagctgttaaattggcaaagctctaaaatgcactgctgccatctagtgatacacttttgtaaagtacagcaaaacctacagatatatacagtatataaatatatatatatatatatttatatttttgggggtgggagaaatccaaaataaagtaaatgcttgtttcatttttaagctgctgatattcattccttattgtatgttgtcagatgaggaaattgtgcagttctggtacataaagatgagtaatataaactgaaatctataattttaagggcttaacctgtgactttaataagctggaacagtccactgaatgggtataatgaattgcagtatatacgtatgattgctttttaagtgattatcttttcttctgttaagtcatgtaaattcataaatccttttgcactgatgtgttgaaccttattcttgtacattcattcaatcaaggcaaacttttataatttttcttttgtttccaatgaccttgaaatgttatagcatggtaatattctatgcaactatagttatactttttggtttgacactgtattttttcacattgatttactggttgatgatagattttataacctaacggttctcatgcggtgcgtaattgtagatgcatgtacttgtgtgttttgtgtaattattgaagtgcaatgatgtataaaaaagtggattcacctgtttttaaaaataaaacattgataaaaaaatg

SEQ ID NO: 363216 - DNA, 1853 bp, Homo sapiens
gcctgcagttcgacttaagatcccgactacatacttccgagaacgagccaaggattgtcaccagtgaagaggtcattattcgagacagccctgttctccctgtcaccctgcagtgtaacctcacctccagctctcacacccttacatacagctactggacaaagaatggggtggaactgagtgccactcgtaagaatgccagcaacatggagtacaggatcaataagccgagagctgaggattcaggcgaataccactgcgtatatcactttgtcagcgctcctaaagcaaacgccaccattgaagtgaaagccgctcctgacatcactggccataaacggagtgagaacaagaatgaagggcaggatgccactatgtattgcaagtcagttggctacccccacccagactggatatggcgcaagaaggagaacgggatgcccatggacattgtcaatacctctggccgcttcttcatcatcaacaaggaaaattacactgagttgaacattgtgaacctgcagatcacggaagaccctggcgagtatgaatgtaatgccaccaacgccattggctccgcctctgttgtcactgtcctcagggtgcggagccacctggccccactctggcctttcttgggaattctggctgaaattatcatccttgtggtgatcattgttgtgtatgagaagaggaagaggccagatgaggttcctgacgatgatgaaccagctggaccaatgaaaaccaactctaccaacaatcacaaagataaaaacttgcgccagagaaacacaaattaagtactgcttacaatatctttaggttcctgaaactggtggcaacatgacctgctaaaattttctgcttggacctctttggttctctcccctttcaagtgagcaacaccacaatgactgtctaaagcatgccttatttagcctctcctgtaagggtgatctagccaggtacattttaaacaatgcttcagtgtagaaggtgtaaactattttgggcttgatgtgctgtgaatgttgcttttttttttcctttgttaaaatatttaaatagaagtgaaaaggtcctctgaggatcagatcatgcatgcgccattttttacttaatgcagctgttaaattggcaaagctctaaaatgcactgctgccatctagtgatacacttttgtaaagtacagcaaaacctacagatatatacagtatataaatatatatatatatatatttatatttttgggggtgggagaaatccaaaataaagtaaatgcttgtttcatttttaagctgctgatattcattccttattgtatgttgtcagatgaggaaattgtgcagttctggtacataaagatgagtaatataaactgaaatctataattttaagggcttaacctgtgactttaataagctggaacagtccactgaatgggtataatgaattgcagtatatacgtatgattgctttttaagtgattatcttttcttctgttaagtcatgtaaattcataaatccttttgcactgatgtgttgaaccttattcttgtacattcattcaatcaaggcaaacttttataatttttcttttgtttccaatgaccttgaaatgttatagcatggtaatattctatgcaactatagttatactttttggtttgacactgtattttttcacattgatttactggttgatgatagattttataacctaacggttctcatgcggtgcgtaattgtagatgcatgtacttgtgtgttttgtgtaattattgaagtgcaatgatgtataaaaaagtggattcacctgtttttaaaaataaaacattgataaaaaaatg

SEQ ID NO: 363217 - DNA, 1736 bp, Homo sapiens
tcctctttctgctgtggtttcttacctggtgttggaggcagcatttactaggttgttggacttttctgagtctccaggcagtaggacctgcactcacttcgtggaagtcggggaagtctggaggaccaagcgtaagccagccttgcctggctctgtcagaagttgatctgctgttgttcacacgcaagccaaatcattaatcaaatgttcctagacactgcttcctcattctgcctggtgcctaaaaagaacggagagcagtgtcaccctctcttgaacattagctcagttactcactctcacctttgtgtattctcacttttttgcaggacattgtcaatacctctggccgcttcttcatcatcaacaaggaaaattacactgagttgaacattgtgaacctgcagatcacggaagaccctggcgagtatgaatgtaatgccaccaacgccattggctccgcctctgttgtcactgtcctcagggtgcggagccacctggccccactctggcctttcttgggaattctggctgaaattatcatccttgtggtgatcattgttgtgtatgagaagaggaagaggccagatgaggttcctgacgatgatgaaccagctggaccaatgaaaaccaactctaccaacaatcacaaagataaaaacttgcgccagagaaacacaaattaagtactgcttacaatatctttaggttcctgaaactggtggcaacatgacctgctaaaattttctgcttggacctctttggttctctcccctttcaagtgagcaacaccacaatgactgtctaaagcatgccttatttagcctctcctgtaagggtgatctagccaggtacattttaaacaatgcttcagtgtagaaggtgtaaactattttgggcttgatgtgctgtgaatgttgcttttttttttcctttgttaaaatatttaaatagaagtgaaaaggtcctctgaggatcagatcatgcatgcgccattttttacttaatgcagctgttaaattggcaaagctctaaaatgcactgctgccatctagtgatacacttttgtaaagtacagcaaaacctacagatatatacagtatataaatatatatatatatatatttatatttttgggggtgggagaaatccaaaataaagtaaatgcttgtttcatttttaagctgctgatattcattccttattgtatgttgtcagatgaggaaattgtgcagttctggtacataaagatgagtaatataaactgaaatctataattttaagggcttaacctgtgactttaataagctggaacagtccactgaatgggtataatgaattgcagtatatacgtatgattgctttttaagtgattatcttttcttctgttaagtcatgtaaattcataaatccttttgcactgatgtgttgaaccttattcttgtacattcattcaatcaaggcaaacttttataatttttcttttgtttccaatgaccttgaaatgttatagcatggtaatattctatgcaactatagttatactttttggtttgacactgtattttttcacattgatttactggttgatgatagattttataacctaacggttctcatgcggtgcgtaattgtagatgcatgtacttgtgtgttttgtgtaattattgaagtgcaatgatgtataaaaaagtggattcacctgtttttaaaaataaaacattgataaaaaaatg

SEQ ID NO: 363218 - DNA, 1154 bp, Homo sapiens
gtgacattgcagaaataaagatatcgcacacggctcgaaacacgaaaaccaactctaccaacaatcacaaagataaaaacttgcgccagagaaacacaaattaagtactgcttacaatatctttaggttcctgaaactggtggcaacatgacctgctaaaattttctgcttggacctctttggttctctcccctttcaagtgagcaacaccacaatgactgtctaaagcatgccttatttagcctctcctgtaagggtgatctagccaggtacattttaaacaatgcttcagtgtagaaggtgtaaactattttgggcttgatgtgctgtgaatgttgcttttttttttcctttgttaaaatatttaaatagaagtgaaaaggtcctctgaggatcagatcatgcatgcgccattttttacttaatgcagctgttaaattggcaaagctctaaaatgcactgctgccatctagtgatacacttttgtaaagtacagcaaaacctacagatatatacagtatataaatatatatatatatatatttatatttttgggggtgggagaaatccaaaataaagtaaatgcttgtttcatttttaagctgctgatattcattccttattgtatgttgtcagatgaggaaattgtgcagttctggtacataaagatgagtaatataaactgaaatctataattttaagggcttaacctgtgactttaataagctggaacagtccactgaatgggtataatgaattgcagtatatacgtatgattgctttttaagtgattatcttttcttctgttaagtcatgtaaattcataaatccttttgcactgatgtgttgaaccttattcttgtacattcattcaatcaaggcaaacttttataatttttcttttgtttccaatgaccttgaaatgttatagcatggtaatattctatgcaactatagttatactttttggtttgacactgtattttttcacattgatttactggttgatgatagattttataacctaacggttctcatgcggtgcgtaattgtagatgcatgtacttgtgtgttttgtgtaattattgaagtgcaatgatgtataaaaaagtggattcacctgtttttaaaaataaaacattgataaaaaaatg

SEQ ID NO: 363219 - DNA, 1038 bp, Homo sapiens
gagctcggtaccctcttctccgaaaggcaacatgacctgctaaaattttctgcttggacctctttggttctctcccctttcaagtgagcaacaccacaatgactgtctaaagcatgccttatttagcctctcctgtaagggtgatctagccaggtacattttaaacaatgcttcagtgtagaaggtgtaaactattttgggcttgatgtgctgtgaatgttgcttttttttttcctttgttaaaatatttaaatagaagtgaaaaggtcctctgaggatcagatcatgcatgcgccattttttacttaatgcagctgttaaattggcaaagctctaaaatgcactgctgccatctagtgatacacttttgtaaagtacagcaaaacctacagatatatacagtatataaatatatatatatatatatttatatttttgggggtgggagaaatccaaaataaagtaaatgcttgtttcatttttaagctgctgatattcattccttattgtatgttgtcagatgaggaaattgtgcagttctggtacataaagatgagtaatataaactgaaatctataattttaagggcttaacctgtgactttaataagctggaacagtccactgaatgggtataatgaattgcagtatatacgtatgattgctttttaagtgattatcttttcttctgttaagtcatgtaaattcataaatccttttgcactgatgtgttgaaccttattcttgtacattcattcaatcaaggcaaacttttataatttttcttttgtttccaatgaccttgaaatgttatagcatggtaatattctatgcaactatagttatactttttggtttgacactgtattttttcacattgatttactggttgatgatagattttataacctaacggttctcatgcggtgcgtaattgtagatgcatgtacttgtgtgttttgtgtaattattgaagtgcaatgatgtataaaaaagtggattcacctgtttttaaaaataaaacattgataaaaaaatg

SEQ ID NO: 363220 - DNA, 2468 bp, Homo sapiens
ggcggtcgctcctcagccgcccacgacccggagcgaaggtctcgcgaggcctgggcgctgcggcggcaggaggaggacggggaaggacggagccgagccgcggctgcctccctcgctcactccctcgcgcactcgcccgccccctccctccctcccctcccttccccggccccggctctggccccggcccattcgctgttgggtcttctgctagggaggatgtcgggttcgtcgctgcccagcgccctggccctctcgctgttgctggtctctggctccctcctcccagggccaggcgccgctcagaacgagccaaggattgtcaccagtgaagaggtcattattcgagacagccctgttctccctgtcaccctgcagtgtaacctcacctccagctctcacacccttacatacagctactggacaaagaatggggtggaactgagtgccactcgtaagaatgccagcaacatggagtacaggatcaataagccgagagctgaggattcaggcgaataccactgcgtatatcactttgtcagcgctcctaaagcaaacgccaccattgaagtgaaagccgctcctgacatcactggccataaacggagtgagaacaagaatgaagggcaggatgccactatgtattgcaagtcagttggctacccccacccagactggatatggcgcaagaaggagaacgggatgcccatggacattgtcaatacctctggccgcttcttcatcatcaacaaggaaaattacactgagttgaacattgtgaacctgcagatcacggaagaccctggcgagtatgaatgtaatgccaccaacgccattggctccgcctctgttgtcactgtcctcagggtgcggagccacctggccccactctggcctttcttgggaattctggctgaaattatcatccttgtggtgatcattgttgtgtatgagaagaggaagaggccagatgaggttcctgacgatgatgaaccagctggaccaatgaaaaccaactctaccaacaatcacaaagataaaaacttgcgccagagaaacacaaattaagtactgcttacaatatctttaggttcctgaaactggtggcaacatgacctgctaaaattttctgcttggacctctttggttctctcccctttcaagtgagcaacaccacaatgactgtctaaagcatgccttatttagcctctcctgtaagggtgatctagccaggtacattttaaacaatgcttcagtgtagaaggtgtaaactattttgggcttgatgtgctgtgaatgttgcttttttttttcctttgttaaaatatttaaatagaagtgaaaaggtcctctgaggatcagatcatgcatgcgccattttttacttaatgcagctgttaaattggcaaagctctaaaatgcactgctgccatctagtgatacacttttgtaaagtacagcaaaacctacagatatatacagtatataaatatatatatatatatatttatatttttgggggtgggagaaatccaaaataaagtaaatgcttgtttcatttttaagctgctgatattcattccttattgtatgttgtcagatgaggaaattgtgcagttctggtacataaagatgagtaatataaactgaaatctataattttaagggcttaacctgtgactttaataagctggaacagtccactgaatgggtataatgaattgcagtatatacgtatgattgctttttaagtgattatcttttcttctgttaagtcatgtaaattcataaatccttttgcactgatgtgttgaaccttattcttgtacattcattcaatcaaggcaaacttttataatttttcttttgtttccaatgaccttgaaatgttatagcatggtaatattctatgcaactatagttatactttttggtttgacactgtattttttcacattgatttactggttgatgatagattttataacctaacggttctcatgcggtgcgtaattgtagatgcatgtacttgtgtgttttgtgtaattattgaagtgcaatgatgtataaaaaagtggattcacctgtttttaaaaataaaacattgataaaaaaatgaaaaaaaaaaaaaaaaaaaaaaaaaaaaaaaaaaaaaaaaaaaaaaaaaaaaaaaaaaaaaaaaaaaaaaaaaaaaaaaaaaaaaaaaaaaaaaaacaaaaagaaaaaaaaacatactatagaccaccagcactgttatctacaacacccggcgtcgactaccgacgcagtccctcacatcgcagcacgccatcctgactgcggaccacacccactctacttatcgcacacacactacgcgcggccggacatcccttagcggacagccacaccatctcatcgcggcaccggacaatccccagtcgaacacacacccaactcactccaagcgcgccctcctccgaccactc

SEQ ID NO: 363221 - DNA, 998 bp, Homo sapiens
  misc_feature (859)..(859): n is a, c, g, or t
  misc_feature (867)..(867): n is a, c, g, or t
  misc_feature (917)..(917): n is a, c, g, or t
  misc_feature (970)..(970): n is a, c, g, or t
  misc_feature (996)..(996): n is a, c, g, or t
ggcggtcgctcctcagccgcccacgacccggagcgaaggtctcgcgaggcctgggcgctgcggcggcaggaggaggacggggaaggacggagccgagccgcggctgcctccctcgctcactccctcgcgcactcgcccgccccctccctccctcccctcccttccccggccccggctctggccccggcccattcgctgttgggtcttctgctagggaggatgtcgggttcgtcgctgcccagcgccctggccctctcgctgttgctggtctctggctccctcctcccagggccaggcgccgctcagaacgagccaaggattgtcaccagtgaagaggtcattattcgagacagccctgttctccctgtcaccctgcagtgtaacctcacctccagctctcacacccttacatacagctactggacaaagaatggggtggaactgagtgccactcgtaagaatgccagcaacatggagtacaggatcaataagccgagagctgaggattcaggcgaataccactgcgtatatcactttgtcagcgctcctaaagcaaacgccaccattgaagtgaaagccgctcctgacatcactggccataaacggagtgagaacaagaatgaagggcaggatgccactatgtattgcaagtcagttggctacccccacccagactggatatggcgcaagaaggagaacgggatgcccatggacattgtcaatacctctggccgcttctttgctatgtgacccccagagccctcagtgatccagaaccaaggcctccccagccctctaaaacagtgcctccccactatcctgtggtgtgttgccccacttcgggtcctcagatgtgtancaagcggncagcccgagggagagccacacttgggagccagcgaaacgccggaagtcantgacaccagatcccaaggagaagcagacatgtgacatcagactgggggtttcnggcttgaatactggcagcattgagantg

SEQ ID NO: 363222 - DNA, 624 bp, Homo sapiens
  misc_feature (594)..(594): n is a, c, g, or t
ggcggtcgctcctcagccgcccacgacccggagcgaaggtctcgcgaggcctgggcgctgcggcggcaggaggaggacggggaaggacggagccgagccgcggctgcctccctcgctcactccctcgcgcactcgcccgccccctccctccctcccctcccttccccggccccggctctggccccggcccattcgctgttgggtcttctgctagggaggatgtcgggttcgtcgctgcccagcgccctggccctctcgctgttgctggtctctggctccctcctcccagggccaggcgccgctcagaacgagccaaggattgtcaccagtgaagaggtcattattcgagacagccctgttctccctgtcaccctgcagtgtaacctcacctccagctctcacacccttacatacagctactggacaaagaatggggtggaactgagtgccactcgtaagaatgccagcaacatggagtacaggatcaataagccgagagctgaggattcaggcgaataccactgcgtatatcactttgtcagcgctcctaaagcaaacgccaccattgaagtgaaagccgctcctgacatcttnatctggggcccagcctgctggtccggctcg

SEQ ID NO: 363223 - DNA, 577 bp, Homo sapiens
ttaagctgctgatattcattccttattgtatgttgtcagatgaggaaattgtgcagttctggtacataaagatgagtaatataaactgaaatctataattttaagggcttaacctgtgactttaataagctggaacagtccactgaatgggtataatgaattgcagtatatacgtatgattgctttttaagtgattatcttttcttctgttaagtcatgtaaattcataaatccttttgcactgatgtgttgaaccttattcttgtacattcattcaatcaaggcaaacttttataatttttcttttgtttccaatgaccttgaaatgttatagcatggtaatattctatgcaactatagttatactttttggtttgacactgtattttttcacattgatttactggttgatgatagattttataacctaacggttctcatgcggtgcgtaattgtagatgcatgtacttgtgtgttttgtgtaattattgaagtgcaatgatgtataaaaaagtggattcacctgtttttaaaaataaaacattgataaaaaaatgtttggataatactctttatt

SEQ ID NO: 363224 - DNA, 2044 bp, Homo sapiens
ggcggtcgctcctcagccgcccacgacccggagcgaaggtctcgcgaggcctgggcgctgcggcggcaggaggaggacggggaaggacggagccgagccgcggctgcctccctcgctcactccctcgcgcactcgcccgccccctccctccctcccctcccttccccggccccggctctggccccggcccattcgctgttgggtcttctgctagggaggatgtcgggttcgtcgctgcccagcgccctggccctctcgctgttgctggtctctggctccctcctcccagggccaggcgccgctcagaacgagccaaggattgtcaccagtgaagaggtcattattcgagacagccctgttctccctgtcaccctgcagtgtaacctcacctccagctctcacacccttacatacagctactggacaaagaatggggtggaactgagtgccactcgtaagaatgccagcaacatggagtacaggatcaataagccgagagctgaggattcaggcgaataccactgcgtatatcactttgtcagcgctcctaaagcaaacgccaccattgaagtgaaagccgctcctgacatcactggccataaacggagtgagaacaagaatgaagggcaggatgccactatgtattgcaagtcagttggctacccccacccagactggatatggcgcaagaaggagaacgggatgcccatggacattgtcaatacctctggccgcttcttcatcatcaacaaggaaaattacactgagttgaacattgtgaacctgcagatcacggaagaccctggcgagtatgaatgtaatgccacctggccccactctggcctttcttgggaattctggctgaaattatcatccttgtggtgatcattgttgtgtatgagaagaggaagaggccagatgaggttcctgacggaaaaccaactctaccaacaatcacaaagataaaaacttgcgccagagaaacacaaattaagtactgcttacaatatctttaggttcctgaaactggtggcaacatgacctgctaaaattttctgcttggacctctttggttctctcccctttcaagtgagcaacaccacaatgactgtctaaagcatgccttatttagcctctcctgtaagggtgatctagccaggtacattttaaacaatgcttcagtgtagaaggtgtaaactattttgggcttgatgtgctgtgaatgttgcttttttttttcctttgttaaaatatttaaatagaagtgaaaaggtcctctgaggatcagatcatgcatgcgccattttttacttaatgcagctgttaaattggcaaagctctaaaatgcactgctgccatctagtgatacacttttgtaaagtacagcaaaacctacagatatatacagtatataaatatatatatatatatatttatatttttgggggtgggagaaatccaaaataaagtaaatgcttgtttcatttttaagctgctgatattcattccttattgtatgttgtcagatgaggaaattgtgcagttctggtacataaagatgagtaatataaactgaaatctataattttaagggcttaacctgtgactttaataagctggaacagtccactgaatgggtataatgaattgcagtatatacgtatgattgctttttaagtgattatcttttcttctgttaagtcatgtaaattcataaatccttttgcactgatgtgttgaaccttattcttgtacattcattcaatcaaggcaaacttttataatttttcttttgtttccaatgaccttgaaatgttatagcatggtaatattctatgcaactatagttatactttttggtttgacactgtattttttcacattgatttactggttgatgatagattttataacctaacggttctcatgcggtgcgtaattgtagatgcatgtacttgtgtgttttgtgtaattattgaagtgcaatgatgtataaaaaagtggattcacctgtttttaaaaataaaacattgataaaaaaatg

SEQ ID NO: 363225 - DNA, 1964 bp, Homo sapiens
ggcggtcgctcctcagccgcccacgacccggagcgaaggtctcgcgaggcctgggcgctgcggcggcaggaggaggacggggaaggacggagccgagccgcggctgcctccctcgctcactccctcgcgcactcgcccgccccctccctccctcccagccaaggattgtcaccagtgaagaggtcattattcgagacagccctgttctccctgtcaccctgcagtgtaacctcacctccagctctcacacccttacatacagctactggacaaagaatggggtggaactgagtgccactcgtaagaatgccagcaacatggagtacaggatcaataagccgagagctgaggattcaggcgaataccactgcgtatatcactttgtcagcgctcctaaagcaaacgccaccattgaagtgaaagccgctcctgacatcactggccataaacggagtgagaacaagaatgaagggcaggatgccactatgtattgcaagtcagttggctacccccacccagactggatatggcgcaagaaggagaacgggatgcccatggacattgtcaatacctctggccgcttcttcatcatcaacaaggaaaattacactgagttgaacattgtgaacctgcagatcacggaagaccctggcgagtatgaatgtaatgccaccaacgccattggctccgcctctgttgtcactgtcctcagggtgcggagccacctggccccactctggcctttcttgggaattctggctgaaattatcatccttgtggtgatcattgttgtgtatgagaagaggaagaggccagatgaggttcctgacgatgatgaaccagctggaccaatgaaaaccaactctaccaacaatcacaaagataaaaacttgcgccagagaaacacaaattaagtactgcttacaatatctttaggttcctgaaactggtggcaacatgacctgctaaaattttctgcttggacctctttggttctctcccctttcaagtgagcaacaccacaatgactgtctaaagcatgccttatttagcctctcctgtaagggtgatctagccaggtacattttaaacaatgcttcagtgtagaaggtgtaaactattttgggcttgatgtgctgtgaatgttgcttttttttttcctttgttaaaatatttaaatagaagtgaaaaggtcctctgaggatcagatcatgcatgcgccattttttacttaatgcagctgttaaattggcaaagctctaaaatgcactgctgccatctagtgatacacttttgtaaagtacagcaaaacctacagatatatacagtatataaatatatatatatatatatttatatttttgggggtgggagaaatccaaaataaagtaaatgcttgtttcatttttaagctgctgatattcattccttattgtatgttgtcagatgaggaaattgtgcagttctggtacataaagatgagtaatataaactgaaatctataattttaagggcttaacctgtgactttaataagctggaacagtccactgaatgggtataatgaattgcagtatatacgtatgattgctttttaagtgattatcttttcttctgttaagtcatgtaaattcataaatccttttgcactgatgtgttgaaccttattcttgtacattcattcaatcaaggcaaacttttataatttttcttttgtttccaatgaccttgaaatgttatagcatggtaatattctatgcaactatagttatactttttggtttgacactgtattttttcacattgatttactggttgatgatagattttataacctaacggttctcatgcggtgcgtaattgtagatgcatgtacttgtgtgttttgtgtaattattgaagtgcaatgatgtataaaaaagtggattcacctgtttttaaaaataaaacattgataaaaaaatg

SEQ ID NO: 363226 - DNA, 2067 bp, Homo sapiens
  misc_feature (832)..(832): n is a, c, g, or t
  misc_feature (837)..(837): n is a, c, g, or t
  misc_feature (839)..(839): n is a, c, g, or t
  misc_feature (845)..(845): n is a, c, g, or t
  misc_feature (849)..(849): n is a, c, g, or t
ggcggtcgctcctcagccgcccacgacccggagcgaaggtctcgcgaggcctgggcgctgcggcggcaggaggaggacggggaaggacggagccgagccgcggctgcctccctcgctcactccctcgcgcactcgcccgccccctccctccctcccctcccttccccggccccggctctggccccggcccattcgctgttgggtcttctgctagggaggatgtcgggttcgtcgctgcccagcgccctggccctctcgctgttgctggtctctggctccctcctcccagggccaggcgccgctcagaacgagccaaggattgtcaccagtgaagaggtcattattcgagacagccctgttctccctgtcaccctgcagtgtaacctcacctccagctctcacacccttacatacagctactggacaaagaatggggtggaactgagtgccactcgtaagaatgccagcaacatggagtacaggatcaataagccgagagctgaggattcaggcgaataccactgcgtatatcactttgtcagcgctcctaaagcaaacgccaccattgaagtgaaagccgctcctgacatcactggccataaacggagtgagaacaagaatgaagggcaggatgccactatgtattgcaagtcagttggctacccccacccagactggatatggcgcaagaaggagaacgggatgcccatggacattgtcaatacctctggccgcttcttcatcatcaacaaggaaaattacactgagttgaacattgtgaacctgcagatcacggaagaccctggcgagtatgaatgtaatgccacctggncccantntgggcntttnttggggattttgggctgaattatcatccttgtggtgatcattgttgtgtatgagaagaggaagaggccagatgaggttcctgacgatgatgaaccagctggaccaatgaaaaccaactctaccaacaatcacaaagataaaaacttgcgccagagaaacacaaattaagtactgcttacaatatctttaggttcctgaaactggtggcaacatgacctgctaaaattttctgcttggacctctttggttctctcccctttcaagtgagcaacaccacaatgactgtctaaagcatgccttatttagcctctcctgtaagggtgatctagccaggtacattttaaacaatgcttcagtgtagaaggtgtaaactattttgggcttgatgtgctgtgaatgttgcttttttttttcctttgttaaaatatttaaatagaagtgaaaaggtcctctgaggatcagatcatgcatgcgccattttttacttaatgcagctgttaaattggcaaagctctaaaatgcactgctgccatctagtgatacacttttgtaaagtacagcaaaacctacagatatatacagtatataaatatatatatatatatatttatatttttgggggtgggagaaatccaaaataaagtaaatgcttgtttcatttttaagctgctgatattcattccttattgtatgttgtcagatgaggaaattgtgcagttctggtacataaagatgagtaatataaactgaaatctataattttaagggcttaacctgtgactttaataagctggaacagtccactgaatgggtataatgaattgcagtatatacgtatgattgctttttaagtgattatcttttcttctgttaagtcatgtaaattcataaatccttttgcactgatgtgttgaaccttattcttgtacattcattcaatcaaggcaaacttttataatttttcttttgtttccaatgaccttgaaatgttatagcatggtaatattctatgcaactatagttatactttttggtttgacactgtattttttcacattgatttactggttgatgatagattttataacctaacggttctcatgcggtgcgtaattgtagatgcatgtacttgtgtgttttgtgtaattattgaagtgcaatgatgtataaaaaagtggattcacctgtttttaaaaataaaacattgataaaaaaatg

SEQ ID NO: 363227 - DNA, 2170 bp, Homo sapiens
  misc_feature (2120)..(2120): n is a, c, g, or t
ggcggtcgctcctcagccgcccacgacccggagcgaaggtctcgcgaggcctgggcgctgcggcggcaggaggaggacggggaaggacggagccgagccgcggctgcctccctcgctcactccctcgcgcactcgcccgccccctccctccctcccctcccttccccggccccggctctggccccggcccattcgctgttgggtcttctgctagggaggatgtcgggttcgtcgctgcccagcgccctggccctctcgctgttgctggtctctggctccctcctcccagggccaggcgccgctcagaacgagccaaggattgtcaccagtgaagaggtcattattcgagacagccctgttctccctgtcaccctgcagtgtaacctcacctccagctctcacacccttacatacagctactggacaaagaatggggtggaactgagtgccactcgtaagaatgccagcaacatggagtacaggatcaataagccgagagctgaggattcaggcgaataccactgcgtatatcactttgtcagcgctcctaaagcaaacgccaccattgaagtgaaagccgctcctgacatcactggccataaacggagtgagaacaagaatgaagggcaggatgccactatgtattgcaagtcagttggctacccccacccagactggatatggcgcaagaaggagaacgggatgcccatggacattgtcaatacctctggccgcttcttcatcatcaacaaggaaaattacactgagttgaacattgtgaacctgcagatcacggaagaccctggcgagtatgaatgtaatgccaccaacgccattggctccgcctctgttgtcactgtcctcagggtgcggagccacctggccccactctggcctttcttgggaattctggctgaaattatcatccttgtggtgatcattgttgtgtatgagaagaggaagaggccagatgaggttcctgacgatgatgaaccagctggaccaatgaaaaccaactctaccaacaatcacaaagataaaaacttgcgccagagaaacacaaattaagtactgcttacaatatctttaggttcctgaaactggtggcaacatgacctgctaaaattttctgcttggacctctttggttctctcccctttcaagtgagcaacaccacaatgactgtctaaagcatgccttatttagcctctcctgtaagggtgatctagccaggtacattttaaacaatgcttcagtgtagaaggtgtaaactattttgggcttgatgtgctgtgaatgttgcttttttttttcctttgttaaaatatttaaatagaagtgaaaaggtcctctgaggatcagatcatgcatgcgccattttttacttaatgcagctgttaaattggcaaagctctaaaatgcactgctgccatctagtgatacacttttgtaaagtacagcaaaacctacagatatatacagtatataaatatatatatatatatatttatatttttgggggtgggagaaatccaaaataaagtaaatgcttgtttcatttttaagctgctgatattcattccttattgtatgttgtcagatgaggaaattgtgcagttctggtacataaagatgagtaatataaactgaaatctataattttaagggcttaacctgtgactttaataagctggaacagtccactgaatgggtataatgaattgcagtatatacgtatgattgctttttaagtgattatcttttcttctgttaagtcatgtaaattcataaatccttttgcactgatgtgttgaaccttattcttgtacattcattcaatcaaggcaaacttttataatttttcttttgtttccaatgaccttgaaatgttatagcatggtaatattctatgcaactatagttatactttttggtttgacactgtattttttcacattgatttactggttgatgatagattttataacctaacggttctcatgcggtgcgtaattgtagatgcatgtacttgtgtgttttgtgtaattattgaagtgcaatgatgtataaaaaagtggattcacctgtttttaaaaataaaacattgataaaaaaatganaaaaaaaaataagggcggcggctcgcgatctggaattagcccacgcgtcc

SEQ ID NO: 363228 - DNA, 931 bp, Homo sapiens
ggcggtcgctcctcagccgcccacgacccggagcgaaggtctcgcgaggcctgggcgctgcggcggcaggaggaggacggggaaggacggagccgagccgcggctgcctccctcgctcactccctcgcgcactcgcccgccccctccctccctcccctcccttccccggccccggctctggccccggcccattcgctgttgggtcttctgctagggaggatgtcgggttcgtcgctgcccagcgccctggccctctcgctgttgctggtctctggctccctcctcccagggccaggcgccgctcagaacgagccaaggattgtcaccagtgaagaggtcattattcgagacagccctgttctccctgtcaccctgcagtgtaacctcacctccagctctcacacccttacatacagctactggacaaagaatggggtggaactgagtgccactcgtaagaatgccagcaacatggagtacaggatcaataagccgagagctgaggattcaggcgaataccactgcgtatatcactttgtcagcgctcctaaagcaaacgccaccattgaagtgaaagccgctcctgacatcactggccataaacggagtgagaacaagaatgaagggcaggatgccactatgtattgcaagtcagttggctacccccacccagactggatatggcgcaagaaggagaacgggatgcccatggtgagtaggaggcaggcccgggtctctggttgctggagttttccctgcagaggtccagacacgtgggtcagttactgtagtagctgtatcctcggatgtgtgcatggcgagggtcaccctttctagagtcacggtttacagcatgaatcaagaggtcattgacagtctcttccagcacaaaaatccctgtacgtgatttgttaaagctgtccctctggta

SEQ ID NO: 363229 - DNA, 812 bp, Homo sapiens
ggcggtcgctcctcagccgcccacgacccggagcgaaggtctcgcgaggcctgggcgctgcggcggcaggaggaggacggggaaggacggagccgagccgcggctgcctccctcgctcactccctcgcgcactcgcccgccccctccctccctcccctcccttccccggccccggctctggccccggcccattcgctgttgggtcttctgctagggaggatgtcgggttcgtcgctgcccagcgccctggccctctcgctgttgctggtctctggctccctcctcccagggccaggcgccgctcagaacgagccaaggattgtcaccagtgaagaggtcattattcgagacagccctgttctccctgtcaccctgcagtgtaacctcacctccagctctcacacccttacatacagctactggacaaagaatggggtggaactgagtgccactcgtaagaatgccagcaacatggagtacaggtgagagtggtgggcagctcctgggaaggtgggagggagtgtggctgagcttacttgacattcataatccatagttgcgccatgcagaagggacatgagatatatttggttctccctttgagagtccaatccagtatctcaggtaaggcccagtagtctagaaaagattcccaaaggattctaatgagcagccagattggagaatcatagatgatcccctcactataatcatagagaaactgaggctgtgaagtagtgatttgttcagggtaacaatgttagtcaataggagagtcacacttagaatgtagtctcttgacctaatccagt

SEQ ID NO: 363230 - DNA, 330 bp, Homo sapiens
tgggagttgggtgataggaggaggtttttgaataaaatgaagaaatctcaagctgagcttgacatatggagaggaaactaacatgcgtataaaagaggcaaaccatagcaggccagtttattctgctgtgttctggatgctctggcttggagtcactctaattggagccatggctaattttgtgctttgtgcgatgtgaggatttgctaaataaagactatgtaaacctttcatctcaagcatcccagttactctgtctctctggaaactctggggactaggaagctcaggagttactaacaatgagtattaaaatcagaaagatatgga

SEQ ID NO: 363231 - DNA, 805 bp, Homo sapiens
tttttttttctattattcttttactattttttctattaccattttttctagtaccattttttctattattcttttactataattgtatataatatggcagctgcttgccacatgtactatgtggagagatgtaccaccctgcatcagcttttaccctacagaaggaaatcagcgttccattatattttattgttatcaacagtttaggaatacatagctttgcttttgcctttttctttccttccccttgtttcccctcgcctcagagaaaagaaggaaaaaaaaattcatctttcctacccccctctttttggatgataggacttgaagacaatctgaaataccacataaactcacttccagatgttttttgtttcatatgcaattgaattgggctcagactgtgtttttaagctgtatggtaaaaatatcactgtcttctagggccttattggggggcagggagagacgtgacactttgtcagaagggattgagtctgctaacttaaactctccttgattcaggaatacaaagtctccagctgtgaacagagactcatcagtgaaatagagtacaggctagaaaggtctcctgtggatgaatcaggtgatgaagttcagtatggagatgtgcctgtggaaaatggaatggcaccattctttgagatgaagctgaaacattacaagatctttgagggaatgccagtaactttcacatgtagagtggctggaaatccaaagccaaaggtgagctgggagatggaggctttttaagagtcattctctgaggaaaggtttagcttcc

SEQ ID NO: 363232 - DNA, 4370 bp, Homo sapiens
cctgagtcacccggcgggcgaggtataaagcccgatacctgccccgcgcccggtccgcggagcccgctgcagctcccgctcgctccggacgcggaatcgggcagcagcgggaggcggcccggagagccgagggaccctctgaagctccagcaactccagaaccaaatccgactggagcaggaggccggcgctcggcagcctccgccagccccgcgcagcgcgccgccctcgcccccccttcccgccgccgcccgccttccccgagctcgcggcctgcacgccgcccgcgtccccggagcccatgagcgcgctggcctcccgctccgcccccgccatgcagtcctccggctccttcaactacgcgcgccccaagcagttcatcgccgcgcagaacctcgggcccgcgtcgggccacggcacgccggcctccagccccagctcgtccagcctcccgtcgcccatgtccccgacgccgaggcagttcggccgcgcccccgtgccgcccttcgcgcagcccttcggcgctgagcccgaggccccgtggggctcctcctcgccgtcgccccgcgccccgccacccccggtcttcagccccacggctgccttcccggtgcccgacgtgttcccactgccgccgccaccaccgccgctcccgagcccgggacaggcgtcccactgctcgtcgcctgccacccgcttcggccacggccagacgcccgcggccttcctcagcgctctgctgccctcgcagccgccgccggcggccgtcaacgccctggggctgcccaagggtgtcacccccgcaggatttccaaagaaggccagtagaactgctagaatagcctccgatgaggaaattcaaggcacaaaggatgctgttattcaagacctggaacgaaaacttcgcttcaaggaggacctcctgaacaatggccagccgaggttaacatacgaagaaagaatggctcgtcgactgctaggtgctgacagtgcaactgtctttaatattcaggagccagaagaggaaacagctaatcaggaatacaaagtctccagctgtgaacagagactcatcagtgaaatagagtacaggctagaaaggtctcctgtggatgaatcaggtgatgaagttcagtatggagatgtgcctgtggaaaatggaatggcaccattctttgagatgaagctgaaacattacaagatctttgagggaatgccagtaactttcacatgtagagtggctggaaatccaaagccaaagatctattggtttaaagatgggaagcagatctctccaaagagtgatcactacaccattcaaagagatctcgatgggacctgctccctccataccacagcctccaccctagatgatgatgggaattatacaattatggctgcaaaccctcagggccgcatcagttgtactggacggctaatggtacaggctgtcaaccaaagaggtcgaagtccccggtctccctcaggccatcctcatgtcagaaggcctcgttctagatcaagggacagtggagacgaaaatgaaccaattcaggagcgattcttcagacctcacttcttgcaggctcctggagatctgactgttcaagaaggaaaactctgcagaatggactgcaaagtcagtgggttaccaaccccagatctaagctggcaactagatggaaagcccgtacgccctgacagtgctcacaagatgctggtgcgtgagaacggggtgcactctctgatcatagagccagtcacgtcacgtgatgccggcatctacacatgtatagctaccaaccgagcaggacagaactcattcagcctggagcttgtggttgctgctaaagaagcacacaaaccccctgtgtttattgagaagctccaaaacacaggagttgctgatgggtacccagtgcggctggaatgtcgtgtattgggagtgccaccacctcagatattttggaagaaagaaaatgaatcactcactcacagcactgaccgagtgagcatgcaccaggacaaccacggctacatctgcctgctcattcagggagccacaaaagaagatgctgggtggtatactgtgtcagccaagaatgaagcagggattgtgtcctgtactgccaggctggacgtttacacccagtggcatcagcagtcacagagcaccaagccaaaaaaagtacggccctcagccagtcgctatgcagcactttcggaccagggactagacatcaaagcagcgttccaacctgaggccaacccatctcacctgacactgaatactgccttggtagaaagtgaggacctgtaatccagcattcttgttaaagctgaaacactgaaacagccattgccttgaccaacatattcctttgtcacattatgtaaaaggcagaaacatacctttgactataagaaattaaaaaaaaacaccaaaataatatttttcttacttgatataccaaacttagtttaagtagataatgctaatacaaatatacacattgcacagaaaatacacatttactgtccaatttaaaactttggaattgctgtgattaaagtgatcaaaatgccaaaatactaaaggaaatcaattgttcacaggtaactacaatttgtattatctacaagtgcctttaaacacaagatataggtgctgtgtagcctgatagtgtgaaatgtttaatgagggagttgtaccacaaacagtactacaatgattctgaagcacagtgtattcagacagatacagtgaaccaagtgcaatatgtaaggatgaaagaagaagagatgacaaagaaatccaagtaaatgccttgtctttgcaaatgtttttatattaaatcataaggaaggaactacttgccttaaatgttaatatcaaaagagttttctaacaaggttaataccttagttcttaacattttttttctttatgtgtagtgttttcatgctaccttggtaggaaacttatttacaaaccatattaaaaggctaatttaaatataaataatataaagtgctctgaataaagcagaaatatattacagttcattccacagaaagcatccaaaccacccaaatgaccaaggcatatatagtatttggaggaatcaggggtttggaaggagtagggaggagaatgaaggaaaatgcaaccagcatgattatagtgtgttcatttagataaaagtagaaggcacaggagaggtagcaaaggccaggcttttctttggttttcttcaaacataggtgaaaaaaacactgccattcacaagtcaaggaacccagggccagctggaagtgtggagcacacatgctgtggagcacacatgctgtggagattgcagtgtgtctgaggtttgtgtagtagtggaagattttaggtatgtagagcaagttgaaaatggattgagactgcatggtggcataaatgagaaattgcctgtagcatctagtctacttgaaggaagtggagacataaggagagacaaaaacaggtttgtgccataaagtattttttcaaagacaccaagatgtggtaaatgaaaattattagttcacttccctgctgccatgaaactttgccttaagaaggtgctggattccaaggtttgtaaaggcatctcggtaaagactgctttttgaatgcatatgattttgcatcagctagactgagttgattctgaccagacttgatggttttaagtcggaaccgataaattttaaaaaggagaaaaaataatttgacctagtagtataaaacatgaggctttaatggtactttgctatgaaaagaaaacactgtattccttatgcaaaacacatgtatctttcattatttataagtggcctctcttagctcagttactcaattcatacgtagtattttttaaaataattttatatctgtgtaccaccccatatatttcatattactgtttcacatgtacagctttctacttctttgtaagaacaccaaccaaccaaggtttaagtgattaataggcttgagcaccgggtggcagatgttctatgcagtgtggttcaagtttctttgaccgcacttatatgcattgctaatatggaatttaagataccatacacagtctctcatggacctatctctattgtagaattatgacttatgtcttacttggcaaatttttctgaatgtgacctttttttgctgatttgctgggtttgggattaactagcattattttgccacctttatattgtatttataaaaaaaaagtactatcaatcaatcatactactttggattgttgtgctggtgtaatgtggatttaacatcaataaatatttgacaaataatagttgcagttttgtgaagc

SEQ ID NO: 363233 - DNA, 2905 bp, Homo sapiens
tttaaaatcattaaatactttatttaagaacagtttgtttaccaagttaggacagtggttatgatttctcaatttacacatattccttttgaaaatcttagaaaaaatgtttcaccaatgttaaggtacaactcttgaatatgcagcgtagtcttctctctttattctgaataacagaagcacgtaaattaaattatcctctttgcacaattattccccccaaaactaatttataacatataattatctccctaaaaagcagttacaaaccataaattgaatatgaataaaatatgaaaaagagcacaaattttaaagccctccatgcaaaaaaaaattaatacattggctttacctataaaccttattttgttaatgctaagcacagaacccttatgggctcataggagtcagcaaacagctacagatgagtcttcttgttaagaattcattcaatgcttctcagaatagcagattttaaaaaatgaattcactgaggttcttaaacctctgaacataaggcaacagttcacaactgatttcagaaatagaaggtaagtattaaattacaaattctactaggtcagtgggagtgggcggattcacctggagtggagcagtgaaggtttattttacctctttcaagatctctccatatattccaccagtttgagataggctgggggaggaggtggaatagcttaaaaggttatatttcttattttaaagtataaaaacatacacttaaaggctaaacctatctataacctacatcttaatgtcagcaaaacatactgctttctacccaaatcaccaattgaatcagcctcgctcatgatttcagagcataaggtgtccagagaagaaaactcaagactgaatgggctgccataatggggaagtacaggtagccaaaggccagcaattgagacagcattagagaaactatctactatgtctgaataagctcccctaccttacaagcatcaactactacattgaaaccattctgagtgctgcatttcctatatgtgcctagacttggtaatgcctgataaattctgtatattaccacgtcttgcatttaatagacaatttgtttaatgatactaactttactcacacttaattgactttctcatatcctgagattaatctaagaaaactatttcaaagataaatttaaaataatttttaaggaacccagaatttttatttagaacactgctttgacttttgttattactttgtatttattagtatatcctattcataattttgcactgactttcaatataaaattaaatctctgcttacacaaaataactgtcagctccaaatcaacatgaatggagtgacattgaaaatatcatactattcccgataaaaagagtttaatgcaaaataattattacctggtatttcacattcggtttgtgtctttatctctactcccaggcaaatattctcacttaagaccagtgccttcactgcttcttgtaaagacatttaatttaatgttattgcatatttatttattttttatgcttattcatacagaatttattactttctagaattttgggataagaatcataatcactaatgcaaaatactcttaattttttaaatgttgtatttctcgtttttaaatattaatagttcactattctaagtttttcatgaataaaaaacacatcctaagttcatgaaatctgtgcggttcactactgtaccaggtattaaaaccttaagggctaatcctcttcacttatgagaatttctcaagaatgagtcaaatgcgccacatttaaatttgcagattattttgtctagctgctcaatcaagagaaataccactcaaagaaatcaattctaaattcatgtctttaatgaatactatgttttgcaacctgtataaaaactgatcacccaagcacatgcaaaaggaatatagttatctttagtgggcttgctaaagtattgacaactaatcagtgtcctctaaatactcttattttggcaacagcccacaaggttaacttttagaaaattcagcttgatacaagaaaataattcatcataattagacaatataatttttccacttttgagacaaaatatataaatcaatacttgtttatatgacttgcaaaatgtctatacactaagattgctacagtctatgaggtaaccaaaggtaagtgatacacatcctttagaaaacacaatttgtctggggggatgattgcacatgtatttaaatatgttaaaaccactgaattgtgtattttaaatgtgtgattatatggtatgtgaattgtatctcatgaaggctttttaaacaaaacaacactgatgtaacttagaccaaaaaaaaaaaaaccacaatttgtcacacattgttcttttgagacatatttttataaagacagaaattaacatttgtagcatcagcaggtttgattagcacatgttacccatgtaggtataattgtctaatcagtagccaaagtgtgcccttgatgctaatcacccctataactgaataatctgcaaattacaaaatgagttgtaatcccccatccactaccagaacatgccctgtaatatacggtgattctaaaagaaacacaaccgcatgtgccacctcaatagtttctccaaacctcccaagaggaatatttttctttaaatgttcttctttcaagtctttcgtcatatctgtgtgtacaaatcctaaaagagaaatgtttgtttagttgaaaagggtacacactaagacatctgctgaatttcaaaaaaaataataaatttgtttctgaaaattttaatttgaaattatttaaaaaaaaatttttttttgagacagggtctcactctgtcacccaagctagaatgcagt

SEQ ID NO: 363234 - DNA, 1532 bp, Homo sapiens
ttttttcggtacagacagcatcttgctatgttgctcaggctgatctggaactcctggcctcacaatactcctgcctcagcctcccacatgagctaccatacctggtaggacattatttttaagctcccattaggtggaaatcaaaagacaaagcttttagtaacagttcttccataaactagctgtgtaatcttaggcaagtcactctgaatcccaggtacagttttctaatctacaaaaatgactggaaaaaattatttctaagaccctctccaccttaagttattccactagtgcaaaatttaaaaataaagactcttatggtttggatgtttgtcccctccaaatctcatgttgaaatgtgattcccaatgttggaggtgggcctagcgggaggtgtttgggtcatggaggcggattcctcatgaatagcttggtgccctccacatggtaaataatgagttctcactgttagttcatgccagagctggttgtttagagcctgccacctcctctctctcttgctcctgctatccccatatgacttggctgctacctctttaccttccgccatgactgaaaaaaagtttcctgggcctcaccagaagctgagcagatgttggtgtcatgcttgtacagcctgcaggcccgagagccaaataagcctcttttttttatgaattacctcagacagtcctttagagcaatgcaaacaggctaacacatagactttatatagaatatgaggtacaaaaaatttttttgagtcccccagttcattatttgattcttttcacaatcattttacaaactattctacccagatgtcaattactaatgttccaaataatggcttccctataaaacaataatcataatcaagttattttaataaagttttcactaacctggtgcaactacattcactctaattttctttcttgctacctctttagcaagagcacgtgaaaatccaactaatcctcctttactggcactgtaaacggactggccagagttgccttttaagccaacaatgcttcctacattaacaatagaccctccctgttgttgaatcatagtcctcatggcagctttacaggtcagcatggaacccaagaggttagtatgaagctgagataccatatcttcagtttttgttcttactaaaagaccatccctgttaataccagctgcatttaccaagaaatttactcgacctaaatgtttctccatctcttcaaatgtattttgaacatcatgttctttagcaacatcacagctaaatgccaaatgatctccgccgaggtcaccggcggcggctttggccccttccaggtttctggcaatgaccgccagtcggtagcctttccgggccattaactgggccacagctctgccaatgcctcgggagcctccaaaaacagcacacactttgtccatctcggagtcacaaactcggaggaaagaaggtagagagtgggagcccccctccaggttccctcaggcttttaaacaaccgcggttccaaa

SEQ ID NO: 363235 - DNA, 904 bp, Homo sapiens
tcatgaaagtgtgttgttttttactctttttcatagggcagtacatatttgtgatttttttctaattttgtattttttgtgacttacgttgttaggttaacatacgaagaaagaatggctcgtcgactgctaggtgctgacagtgcaactgtctttaatattcaggagccagaagaggaaacagctaatcaggtaccatgttgctctggacttcttagggtaacatttattctgtcccccttttccatcttccttatggatactgttcttgggatgagttctggtgcaactacattcactctaattttctttcttgctacctctttagcaagagcacgtgaaaatccaactaatcctcctttactggcactgtaaacggactggccagagttgccttttaagccaacaatgcttcctacattaacaatagaccctccctgttgttgaatcatagtcctcatggcagctttacaggtcagcatggaacccaagaggttagtatgaagctgagataccatatcttcagtttttgttcttactaaaagaccatccctgttaataccagctgcatttaccaagaaatttactcgacctaaatgtttctccatctcttcaaatgtattttgaacatcatgttctttagcaacatcacagctaaatgccaaatgatctccgccgaggtcaccggcggcggctttggccccttccaggtttctggcaatgaccgccagtcggtagcctttccgggccattaactgggccacagctctgccaatgcctcgggagcctccaaaaacagcacacactttgtccatctcggagtcacaaactcggaggaaagaaggtagagagtgggagcccccctccaggttccctcaggcttttaaacaaccgcggttccaaa

SEQ ID NO: 363236 - DNA, 563 bp, Homo sapiens
atcacctttaagttcgtaacttttatatttctatacttttaactgttacattaatcctgtcttattcaaaaggtattcaccacaaaaatacttactaatcttggtttcctggtatgaactccttgtgcttctgagattagagatacgcttttctttacgggtggccacaatcaagagataagatcatgcaggttaacatacgaagaaagaatggctcgtcgactgctaggtgctgacagtgcaactgtctttaatattcaggagccagaagaggaaacagctaatcaggtaccatgttgctctggacttcttagggtaacatttattctgtcccccttttccatcttccttatggatactgttcttgggatgagttctggtgcaactacattcactctaattttctttcttgctacctctttagcaagagcacgtgaaaatccaactaatcctcctttactggcactgtaaacggactggccagagttgccttttaagccaacaatgcttcctacattaacaatagaccctccctgttgttgaatgtcgacgcggccgcgaat

SEQ ID NO: 363237 - DNA, 392 bp, Homo sapiens
atcacctttaagttcgtaacttttatatttctatacttttaactgttacattaatcctgtcttattcaaaaggtattcaccacaaaaatacttactaatcttggtttcctggtatgaactccttgtgcttctgagattagagatacgcttttctttacgggtggccacaatcaagagataagatcatgccttggtgtcatcacttgagaggctaagagtgaagcaacctagttactactctgggctctgttggtggcctcctgtgtggcactgcaccaaacgtacttattactcagctggatgagatgatcccggttccttccatccacatgttccatgctttcctgtgtatctcggcgcacagatactatacatacttcagtggctttttc

SEQ ID NO: 363238 - DNA, 4051 bp, Homo sapiens
  misc_feature (54)..(54): n is a, c, g, or t
  misc_feature (72)..(72): n is a, c, g, or t
aaaaagaaagaaaccaaaagcccaaatgtatctgccgtcctaagggctatagcngaagtgccccctgggtgngtgttttaaaaacttctcggcacggaggctcgggcccgcgtcgggccacggcacgccggcctccagccccagctcgtccagcctcccgtcgcccatgtccccgacgccgaggcagttcggccgcgcccccgtgccgcccttcgcgcagcccttcggcgctgagcccgaggccccgtggggctcctcctcgccgtcgccccgcgcccggctgccttcccggtgcccgacgtgttcccactgccgccgccaccaccgccgctcccgagcccgggacaggcgtcccactgctcgtcgcctgccacccgcttcggccacggccagacgcccgcggccttcctcagcgctctgctgccctcgcagccgccgccggcggccgtcaacgccctggggctgcccaagggtgtcacccccgcaggatttccaaagaaggccagtagaactgctagaatagcctccgatgaggaaattcaaggcacaaaggatgctgttattcaagacctggaacgaaaacttcgcttcaaggaggacctcctgaacaatggccagccgaggttaacatacgaagaaagaatggctcgtcgactgctaggtgctgacagtgcaactgtctttaatattcaggagccagaagaggaaacagctaatcaggaatacaaagtctccagctgtgaacagagactcatcagtgaaatagagtacaggctagaaaggtctcctgtggatgaatcaggtgatgaagttcagtatggagatgtgcctgtggaaaatggaatggcaccattctttgagatgaagctgaaacattacaagatctttgagggaatgccagtaactttcacatgtagagtggctggaaatccaaagccaaagatctattggtttaaagatgggaagcagatctctccaaagagtgatcactacaccattcaaagagatctcgatgggacctgctccctccataccacagcctccaccctagatgatgatgggaattatacaattatggctgcaaaccctcagggccgcatcagttgtactggacggctaatggtacaggctgtcaaccaaagaggtcgaagtccccggtctccctcaggccatcctcatgtcagaaggcctcgttctagatcaagggacagtggagacgaaaatgaaccaattcaggagcgattcttcagacctcacttcttgcaggctcctggagatctgactgttcaagaaggaaaactctgcagaatggactgcaaagtcagtgggttaccaaccccagatctaagctggcaactagatggaaagcccgtacgccctgacagtgctcacaagatgctggtgcgtgagaacggggtgcactctctgatcatagagccagtcacgtcacgtgatgccggcatctacacatgtatagctaccaaccgagcaggacagaactcattcagcctggagcttgtggttgctgctaaagaagcacacaaaccccctgtgtttattgagaagctccaaaacacaggagttgctgatgggtacccagtgcggctggaatgtcgtgtattgggagtgccaccacctcagatattttggaagaaagaaaatgaatcactcactcacagcactgaccgagtgagcatgcaccaggacaaccacggctacatctgcctgctcattcagggagccacaaaagaagatgctgggtggtatactgtgtcagccaagaatgaagcagggattgtgtcctgtactgccaggctggacgtttacacccagtggcatcagcagtcacagagcaccaagccaaaaaaagtacggccctcagccagtcgctatgcagcactttcggaccagggactagacatcaaagcagcgttccaacctgaggccaacccatctcacctgacactgaatactgccttggtagaaagtgaggacctgtaatccagcattcttgttaaagctgaaacactgaaacagccattgccttgaccaacatattcctttgtcacattatgtaaaaggcagaaacatacctttgactataagaaattaaaaaaaaacaccaaaataatatttttcttacttgatataccaaacttagtttaagtagataatgctaatacaaatatacacattgcacagaaaatacacatttactgtccaatttaaaactttggaattgctgtgattaaagtgatcaaaatgccaaaatactaaaggaaatcaattgttcacaggtaactacaatttgtattatctacaagtgcctttaaacacaagatataggtgctgtgtagcctgatagtgtgaaatgtttaatgagggagttgtaccacaaacagtactacaatgattctgaagcacagtgtattcagacagatacagtgaaccaagtgcaatatgtaaggatgaaagaagaagagatgacaaagaaatccaagtaaatgccttgtctttgcaaatgtttttatattaaatcataaggaaggaactacttgccttaaatgttaatatcaaaagagttttctaacaaggttaataccttagttcttaacattttttttctttatgtgtagtgttttcatgctaccttggtaggaaacttatttacaaaccatattaaaaggctaatttaaatataaataatataaagtgctctgaataaagcagaaatatattacagttcattccacagaaagcatccaaaccacccaaatgaccaaggcatatatagtatttggaggaatcaggggtttggaaggagtagggaggagaatgaaggaaaatgcaaccagcatgattatagtgtgttcatttagataaaagtagaaggcacaggagaggtagcaaaggccaggcttttctttggttttcttcaaacataggtgaaaaaaacactgccattcacaagtcaaggaacccagggccagctggaagtgtggagcacacatgctgtggagcacacatgctgtggagattgcagtgtgtctgaggtttgtgtagtagtggaagattttaggtatgtagagcaagttgaaaatggattgagactgcatggtggcataaatgagaaattgcctgtagcatctagtctacttgaaggaagtggagacataaggagagacaaaaacaggtttgtgccataaagtattttttcaaagacaccaagatgtggtaaatgaaaattattagttcacttccctgctgccatgaaactttgccttaagaaggtgctggattccaaggtttgtaaaggcatctcggtaaagactgctttttgaatgcatatgattttgcatcagctagactgagttgattctgaccagacttgatggttttaagtcggaaccgataaattttaaaaaggagaaaaaataatttgacctagtagtataaaacatgaggctttaatggtactttgctatgaaaagaaaacactgtattccttatgcaaaacacatgtatctttcattatttataagtggcctctcttagctcagttactcaattcatacgtagtattttttaaaataattttatatctgtgtaccaccccatatatttcatattactgtttcacatgtacagctttctacttctttgtaagaacaccaaccaaccaaggtttaagtgattaataggcttgagcaccgggtggcagatgttctatgcagtgtggttcaagtttctttgaccgcacttatatgcattgctaatatggaatttaagataccatacacagtctctcatggacctatctctattgtagaattatgacttatgtcttacttggcaaatttttctgaatgtgacctttttttgctgatttgctgggtttgggattaactagcattattttgccacctttatattgtatttataaaaaaaaagtactatcaatcaatcatactactttggattgttgtgctggtgtaatgtggatttaacatcaataaatatttgacaaataatagttgcagttttgtgaagc

SEQ ID NO: 363239 - DNA, 3619 bp, Homo sapiens
atggctagtagaggccggcggtgaatcggccgaggccaaggtgtcacccccgcaggatttccaaagaaggccagtagaactgctagaatagcctccgatgaggaaattcaaggcacaaaggatgctgttattcaagacctggaacgaaaacttcgcttcaaggaggacctcctgaacaatggccagccgaggttaacatacgaagaaagaatggctcgtcgactgctaggtgctgacagtgcaactgtctttaatattcaggagccagaagaggaaacagctaatcaggaatacaaagtctccagctgtgaacagagactcatcagtgaaatagagtacaggctagaaaggtctcctgtggatgaatcaggtgatgaagttcagtatggagatgtgcctgtggaaaatggaatggcaccattctttgagatgaagctgaaacattacaagatctttgagggaatgccagtaactttcacatgtagagtggctggaaatccaaagccaaagatctattggtttaaagatgggaagcagatctctccaaagagtgatcactacaccattcaaagagatctcgatgggacctgctccctccataccacagcctccaccctagatgatgatgggaattatacaattatggctgcaaaccctcagggccgcatcagttgtactggacggctaatggtacaggctgtcaaccaaagaggtcgaagtccccggtctccctcaggccatcctcatgtcagaaggcctcgttctagatcaagggacagtggagacgaaaatgaaccaattcaggagcgattcttcagacctcacttcttgcaggctcctggagatctgactgttcaagaaggaaaactctgcagaatggactgcaaagtcagtgggttaccaaccccagatctaagctggcaactagatggaaagcccgtacgccctgacagtgctcacaagatgctggtgcgtgagaacggggtgcactctctgatcatagagccagtcacgtcacgtgatgccggcatctacacatgtatagctaccaaccgagcaggacagaactcattcagcctggagcttgtggttgctgctaaagaagcacacaaaccccctgtgtttattgagaagctccaaaacacaggagttgctgatgggtacccagtgcggctggaatgtcgtgtattgggagtgccaccacctcagatattttggaagaaagaaaatgaatcactcactcacagcactgaccgagtgagcatgcaccaggacaaccacggctacatctgcctgctcattcagggagccacaaaagaagatgctgggtggtatactgtgtcagccaagaatgaagcagggattgtgtcctgtactgccaggctggacgtttacacccagtggcatcagcagtcacagagcaccaagccaaaaaaagtacggccctcagccagtcgctatgcagcactttcggaccagggactagacatcaaagcagcgttccaacctgaggccaacccatctcacctgacactgaatactgccttggtagaaagtgaggacctgtaatccagcattcttgttaaagctgaaacactgaaacagccattgccttgaccaacatattcctttgtcacattatgtaaaaggcagaaacatacctttgactataagaaattaaaaaaaaacaccaaaataatatttttcttacttgatataccaaacttagtttaagtagataatgctaatacaaatatacacattgcacagaaaatacacatttactgtccaatttaaaactttggaattgctgtgattaaagtgatcaaaatgccaaaatactaaaggaaatcaattgttcacaggtaactacaatttgtattatctacaagtgcctttaaacacaagatataggtgctgtgtagcctgatagtgtgaaatgtttaatgagggagttgtaccacaaacagtactacaatgattctgaagcacagtgtattcagacagatacagtgaaccaagtgcaatatgtaaggatgaaagaagaagagatgacaaagaaatccaagtaaatgccttgtctttgcaaatgtttttatattaaatcataaggaaggaactacttgccttaaatgttaatatcaaaagagttttctaacaaggttaataccttagttcttaacattttttttctttatgtgtagtgttttcatgctaccttggtaggaaacttatttacaaaccatattaaaaggctaatttaaatataaataatataaagtgctctgaataaagcagaaatatattacagttcattccacagaaagcatccaaaccacccaaatgaccaaggcatatatagtatttggaggaatcaggggtttggaaggagtagggaggagaatgaaggaaaatgcaaccagcatgattatagtgtgttcatttagataaaagtagaaggcacaggagaggtagcaaaggccaggcttttctttggttttcttcaaacataggtgaaaaaaacactgccattcacaagtcaaggaacccagggccagctggaagtgtggagcacacatgctgtggagcacacatgctgtggagattgcagtgtgtctgaggtttgtgtagtagtggaagattttaggtatgtagagcaagttgaaaatggattgagactgcatggtggcataaatgagaaattgcctgtagcatctagtctacttgaaggaagtggagacataaggagagacaaaaacaggtttgtgccataaagtattttttcaaagacaccaagatgtggtaaatgaaaattattagttcacttccctgctgccatgaaactttgccttaagaaggtgctggattccaaggtttgtaaaggcatctcggtaaagactgctttttgaatgcatatgattttgcatcagctagactgagttgattctgaccagacttgatggttttaagtcggaaccgataaattttaaaaaggagaaaaaataatttgacctagtagtataaaacatgaggctttaatggtactttgctatgaaaagaaaacactgtattccttatgcaaaacacatgtatctttcattatttataagtggcctctcttagctcagttactcaattcatacgtagtattttttaaaataattttatatctgtgtaccaccccatatatttcatattactgtttcacatgtacagctttctacttctttgtaagaacaccaaccaaccaaggtttaagtgattaataggcttgagcaccgggtggcagatgttctatgcagtgtggttcaagtttctttgaccgcacttatatgcattgctaatatggaatttaagataccatacacagtctctcatggacctatctctattgtagaattatgacttatgtcttacttggcaaatttttctgaatgtgacctttttttgctgatttgctgggtttgggattaactagcattattttgccacctttatattgtatttataaaaaaaaagtactatcaatcaatcatactactttggattgttgtgctggtgtaatgtggatttaacatcaataaatatttgacaaataatagttgcagttttgtgaagc

SEQ ID NO: 363240 - DNA, 3447 bp, Homo sapiens
tttaaaatcattaaatactttatttaagaacagtttgtttaccaagttaggacagtggttatgatttctcaatttacacatattccttttgaaaatcttagaaaaaatgtttcaccaatgttaaggtacaactcttgaatatgcagcgtagtcttctctctttattctgaataacagaagcacgtaaattaaattatcctctttgcacaattattccccccaaaactaatttataacatataattatctccctaaaaagcagttacaaaccataaattgaatatgaataaaatatgaaaaagagcacaaattttaaagccctccatgcaaaaaaaaattaatacattggctttacctataaaccttattttgttaatgctaagcacagaacccttatgggctcataggagtcagcaaacagctacagatgagtcttcttgttaagaattcattcaatgcttctcagaatagcagattttaaaaaatgaattcactgaggttcttaaacctctgaacataaggcaacagttcacaactgatttcagaaatagaaggtaagtattaaattacaaattctactaggtcagtgggagtgggcggattcacctggagtggagcagtgaaggtttattttacctctttcaagatctctccatatattccaccagtttgagataggctgggggaggaggtggaatagcttaaaaggttatatttcttattttaaagtataaaaacatacacttaaaggctaaacctatctataacctacatcttaatgtcagcaaaacatactgctttctacccaaatcaccaattgaatcagcctcgctcatgatttcagagcataaggtgtccagagaagaaaactcaagactgaatgggctgccataatggggaagtacaggtagccaaaggccagcaattgagacagcattagagaaactatctactatgtctgaataagctcccctaccttacaagcatcaactactacattgaaaccattctgagtgctgcatttcctatatgtgcctagacttggtaatgcctgataaattctgtatattaccacgtcttgcatttaatagacaatttgtttaatgatactaactttactcacacttaattgactttctcatatcctgagattaatctaagaaaactatttcaaagataaatttaaaataatttttaaggaacccagaatttttatttagaacactgctttgacttttgttattactttgtatttattagtatatcctattcataattttgcactgactttcaatataaaattaaatctctgcttacacaaaataactgtcagctccaaatcaacatgaatggagtgacattgaaaatatcatactattcccgataaaaagagtttaatgcaaaataattattacctggtatttcacattcggtttgtgtctttatctctactcccaggcaaatattctcacttaagaccagtgccttcactgcttcttgtaaagacatttaatttaatgttattgcatatttatttattttttatgcttattcatacagaatttattactttctagaattttgggataagaatcataatcactaatgcaaaatactcttaattttttaaatgttgtatttctcgtttttaaatattaatagttcactattctaagtttttcatgaataaaaaacacatcctaagttcatgaaatctgtgcggttcactactgtaccaggtattaaaaccttaagggctaatcctcttcacttatgagaatttctcaagaatgagtcaaatgcgccacatttaaatttgcagattattttgtctagctgctcaatcaagagaaataccactcaaagaaatcaattctaaattcatgtctttaatgaatactatgttttgcaacctgtataaaaactgatcacccaagcacatgcaaaaggaatatagttatctttagtgggcttgctaaagtattgacaactaatcagtgtcctctaaatactcttattttggcaacagcccacaaggttaacttttagaaaattcagcttgatacaagaaaataattcatcataattagacaatataatttttccacttttgagacaaaatatataaatcaatacttgtttatatgacttgcaaaatgtctatacactaagattgctacagtctatgaggtaaccaaaggtaagtgatacacatcctttagaaaacacaatttgtctggggggatgattgcacatgtatttaaatatgttaaaaccactgaattgtgtattttaaatgtgtgattatatggtatgtgaattgtatctcatgaaggctttttaaacaaaacaacactgatgtaacttagaccaaaaaaaaaaaaaccacaatttgtcacacattgttcttttgagacatatttttataaagacagaaattaacatttgtagcatcagcaggtttgattagcacatgttacccatgtaggtataattgtctaatcagtagccaaagtgtgcccttgatgctaatcacccctataactgaataatctgcaaattacaaaatgagttgtaatcccccatccactaccagaacatgccctgtaatatacggtgattctaaaagaaacacaaccgcatgtgccacctcaatagtttctccaaacctcccaagaggaatatttttctttaaatgttcttctttcaagtctttcgtcatatctgtgtgtacaaatcctctgaagcctttgcagttccagtcccaagattacactcatatacttgcaaatgtgcaaaataaactccatacaagtattgtcactggtgcaactacattcactctaattttctttcttgctacctctttagcaagagcacgtgaaaatccaactaatcctcctttactggcactgtaaacggactggccagagttgccttttaagccaacaatgcttcctacattaacaatagaccctccctgttgttgaatcatagtcctcatggcagctttacaggtcagcatggaacccaagaggttagtatgaagctgagataccatatcttcagtttttgttcttactaaaagaccatccctgttaataccagctgcatttaccaagaaatttactcgacctaaatgtttctccatctcttcaaatgtattttgaacatcatgttctttagcaacatcacagctaaatgccaaatgatctccgccgaggtcaccggcggcggctttggccccttccaggtttctggcaatgaccgccagtcggtagcctttccgggccattaactgggccacagctctgccaatgcctcgggagcctccaaaaacagcacacactttgtccatctcggagtcacaaactcggaggaaagaaggtagagagtgggagcccccctccaggttccctcaggcttttaaacaaccgcggttccaaa

SEQ ID NO: 363241 - DNA, 3771 bp, Homo sapiens
tttaaaatcattaaatactttatttaagaacagtttgtttaccaagttaggacagtggttatgatttctcaatttacacatattccttttgaaaatcttagaaaaaatgtttcaccaatgttaaggtacaactcttgaatatgcagcgtagtcttctctctttattctgaataacagaagcacgtaaattaaattatcctctttgcacaattattccccccaaaactaatttataacatataattatctccctaaaaagcagttacaaaccataaattgaatatgaataaaatatgaaaaagagcacaaattttaaagccctccatgcaaaaaaaaattaatacattggctttacctataaaccttattttgttaatgctaagcacagaacccttatgggctcataggagtcagcaaacagctacagatgagtcttcttgttaagaattcattcaatgcttctcagaatagcagattttaaaaaatgaattcactgaggttcttaaacctctgaacataaggcaacagttcacaactgatttcagaaatagaaggtaagtattaaattacaaattctactaggtcagtgggagtgggcggattcacctggagtggagcagtgaaggtttattttacctctttcaagatctctccatatattccaccagtttgagataggctgggggaggaggtggaatagcttaaaaggttatatttcttattttaaagtataaaaacatacacttaaaggctaaacctatctataacctacatcttaatgtcagcaaaacatactgctttctacccaaatcaccaattgaatcagcctcgctcatgatttcagagcataaggtgtccagagaagaaaactcaagactgaatgggctgccataatggggaagtacaggtagccaaaggccagcaattgagacagcattagagaaactatctactatgtctgaataagctcccctaccttacaagcatcaactactacattgaaaccattctgagtgctgcatttcctatatgtgcctagacttggtaatgcctgataaattctgtatattaccacgtcttgcatttaatagacaatttgtttaatgatactaactttactcacacttaattgactttctcatatcctgagattaatctaagaaaactatttcaaagataaatttaaaataatttttaaggaacccagaatttttatttagaacactgctttgacttttgttattactttgtatttattagtatatcctattcataattttgcactgactttcaatataaaattaaatctctgcttacacaaaataactgtcagctccaaatcaacatgaatggagtgacattgaaaatatcatactattcccgataaaaagagtttaatgcaaaataattattacctggtatttcacattcggtttgtgtctttatctctactcccaggcaaatattctcacttaagaccagtgccttcactgcttcttgtaaagacatttaatttaatgttattgcatatttatttattttttatgcttattcatacagaatttattactttctagaattttgggataagaatcataatcactaatgcaaaatactcttaattttttaaatgttgtatttctcgtttttaaatattaatagttcactattctaagtttttcatgaataaaaaacacatcctaagttcatgaaatctgtgcggttcactactgtaccaggtattaaaaccttaagggctaatcctcttcacttatgagaatttctcaagaatgagtcaaatgcgccacatttaaatttgcagattattttgtctagctgctcaatcaagagaaataccactcaaagaaatcaattctaaattcatgtctttaatgaatactatgttttgcaacctgtataaaaactgatcacccaagcacatgcaaaaggaatatagttatctttagtgggcttgctaaagtattgacaactaatcagtgtcctctaaatactcttattttggcaacagcccacaaggttaacttttagaaaattcagcttgatacaagaaaataattcatcataattagacaatataatttttccacttttgagacaaaatatataaatcaatacttgtttatatgacttgcaaaatgtctatacactaagattgctacagtctatgaggtaaccaaaggtaagtgatacacatcctttagaaaacacaatttgtctggggggatgattgcacatgtatttaaatatgttaaaaccactgaattgtgtattttaaatgtgtgattatatggtatgtgaattgtatctcatgaaggctttttaaacaaaacaacactgatgtaacttagaccaaaaaaaaaaaaaccacaatttgtcacacattgttcttttgagacatatttttataaagacagaaattaacatttgtagcatcagcaggtttgattagcacatgttacccatgtaggtataattgtctaatcagtagccaaagtgtgcccttgatgctaatcacccctataactgaataatctgcaaattacaaaatgagttgtaatcccccatccactaccagaacatgccctgtaatatacggtgattctaaaagaaacacaaccgcatgtgccacctcaatagtttctccaaacctcccaagaggaatatttttctttaaatgttcttctttcaagtctttcgtcatatctgtgtgtacaaatcctctgaagcctttgcagttccagtcccaagattacactcatatacttgcaaatgtgcaaaataaactccatacaagtattgtcactggtgcaactacattcactctaattttctttcttgctacctctttagcaagagcacgtgaaaatccaactaatcctcctttactggcactgtaaacggactggccagagttgccttttaagccaacaatgcttcctacattaacaatagaccctccctgttgttgaatcatagtcctcatggcagctttacaggtcagcatggaacccaagaggttagtatgaagctgagataccatatcttcagtttttgttcttactaaaagaccatccctgttaataccagctgcatttaccaagaaatttactcgacctaaatgtttctccatctcttcaaatgtattttgaacatcatgttctttagcaacatcacagctaaatgccaaatgatctccaaaacaatgttaataacattaaagcaaaccaggtatatctcaaaactggctggtactcaaaagggtttctctatcaaacactgctttgtgcattcgcgcagggccaaggcacggcccttgggcaaaactgaagggagccgttggtacctgcactcccacctttcctgcctgaactcctttcgacccagccctgtctccgggggccgagaactcgcccttttccctacattaaaagtaaactgttacgtggctctctcccacaacagggaagctcctcagcgttagcactagccgcagggcggagggtgcgtatagcggggcctcaaaagactacgaggtctcaaagaacaccccaagtgttcagccctcggcggcaagctgcgtggccggcattctgcgaggcatagggagatcgcgggtttctgcacgagacgcattctacccttggaacgggagagcgcctgcacgcggctacatcgagtatgacccatgagccattgaataggaattgatccacttctccttacaaaagcaagcaatgtatctaagcacca

SEQ ID NO: 363242 - DNA, 3762 bp, Homo sapiens
tttaaaatcattaaatactttatttaagaacagtttgtttaccaagttaggacagtggttatgatttctcaatttacacatattccttttgaaaatcttagaaaaaatgtttcaccaatgttaaggtacaactcttgaatatgcagcgtagtcttctctctttattctgaataacagaagcacgtaaattaaattatcctctttgcacaattattccccccaaaactaatttataacatataattatctccctaaaaagcagttacaaaccataaattgaatatgaataaaatatgaaaaagagcacaaattttaaagccctccatgcaaaaaaaaattaatacattggctttacctataaaccttattttgttaatgctaagcacagaacccttatgggctcataggagtcagcaaacagctacagatgagtcttcttgttaagaattcattcaatgcttctcagaatagcagattttaaaaaatgaattcactgaggttcttaaacctctgaacataaggcaacagttcacaactgatttcagaaatagaaggtaagtattaaattacaaattctactaggtcagtgggagtgggcggattcacctggagtggagcagtgaaggtttattttacctctttcaagatctctccatatattccaccagtttgagataggctgggggaggaggtggaatagcttaaaaggttatatttcttattttaaagtataaaaacatacacttaaaggctaaacctatctataacctacatcttaatgtcagcaaaacatactgctttctacccaaatcaccaattgaatcagcctcgctcatgatttcagagcataaggtgtccagagaagaaaactcaagactgaatgggctgccataatggggaagtacaggtagccaaaggccagcaattgagacagcattagagaaactatctactatgtctgaataagctcccctaccttacaagcatcaactactacattgaaaccattctgagtgctgcatttcctatatgtgcctagacttggtaatgcctgataaattctgtatattaccacgtcttgcatttaatagacaatttgtttaatgatactaactttactcacacttaattgactttctcatatcctgagattaatctaagaaaactatttcaaagataaatttaaaataatttttaaggaacccagaatttttatttagaacactgctttgacttttgttattactttgtatttattagtatatcctattcataattttgcactgactttcaatataaaattaaatctctgcttacacaaaataactgtcagctccaaatcaacatgaatggagtgacattgaaaatatcatactattcccgataaaaagagtttaatgcaaaataattattacctggtatttcacattcggtttgtgtctttatctctactcccaggcaaatattctcacttaagaccagtgccttcactgcttcttgtaaagacatttaatttaatgttattgcatatttatttattttttatgcttattcatacagaatttattactttctagaattttgggataagaatcataatcactaatgcaaaatactcttaattttttaaatgttgtatttctcgtttttaaatattaatagttcactattctaagtttttcatgaataaaaaacacatcctaagttcatgaaatctgtgcggttcactactgtaccaggtattaaaaccttaagggctaatcctcttcacttatgagaatttctcaagaatgagtcaaatgcgccacatttaaatttgcagattattttgtctagctgctcaatcaagagaaataccactcaaagaaatcaattctaaattcatgtctttaatgaatactatgttttgcaacctgtataaaaactgatcacccaagcacatgcaaaaggaatatagttatctttagtgggcttgctaaagtattgacaactaatcagtgtcctctaaatactcttattttggcaacagcccacaaggttaacttttagaaaattcagcttgatacaagaaaataattcatcataattagacaatataatttttccacttttgagacaaaatatataaatcaatacttgtttatatgacttgcaaaatgtctatacactaagattgctacagtctatgaggtaaccaaaggtaagtgatacacatcctttagaaaacacaatttgtctggggggatgattgcacatgtatttaaatatgttaaaaccactgaattgtgtattttaaatgtgtgattatatggtatgtgaattgtatctcatgaaggctttttaaacaaaacaacactgatgtaacttagaccaaaaaaaaaaaaaccacaatttgtcacacattgttcttttgagacatatttttataaagacagaaattaacatttgtagcatcagcaggtttgattagcacatgttacccatgtaggtataattgtctaatcagtagccaaagtgtgcccttgatgctaatcacccctataactgaataatctgcaaattacaaaatgagttgtaatcccccatccactaccagaacatgccctgtaatatacggtgattctaaaagaaacacaaccgcatgtgccacctcaatagtttctccaaacctcccaagaggaatatttttctttaaatgttcttctttcaagtctttcgtcatatctgtgtgtacaaatcctctgaagcctttgcagttccagtcccaagattacactcatatacttgcaaatgtgcaaaataaactccatacaagtattgtcactggtgcaactacattcactctaattttctttcttgctacctctttagcaagagcacgtgaaaatccaactaatcctcctttactggcactgtaaacggactggccagagttgccttttaagccaacaatgcttcctacattaacaatagaccctccctgttgttgaatcatagtcctcatggcagctttacaggtcagcatggaacccaagaggttagtatgaagctgagataccatatcttcagtttttgttcttactaaaagaccatccctgttaataccagctgcatttaccaagaaatttactcgacctaaatgtttctccatctcttcaaatgtattttgaacatcatgttctttagcaacatcacagctaaatgccaaatgatctccaaaacaatgttaataacattaaagcaaaccaggtatatctcaaaactggctggtactcaaaagggtttctctatcaaacactgctttgtgcattcgcgcagggccaaggcacggcccttgggcaaaactgaagggagccgttggtacctgcactcccacctttcctgcctgaactcctttcgacccagccctgtctccgggggccgagaactcgcccttttccctacattaaaagtaaactgttacgtggctctctcccacaacagggaagctcctcagcgttagcactagccgcagggcggagggtgcgtatagcggggcctcaaaagactacgaggtctcaaagaacaccccaagtgttcagccctcggcggcaagctgcgtggccggcattctgcgaggcatagggagatcgcgggtttctgcacgagacgcattctacccttggaacgggagagcgcctgcacgcggctacatcgagtaaccctagagccctaaaggccagacccgctctttttacaaaggagattttctttaggcgcctg

SEQ ID NO: 363243 - DNA, 3363 bp, Homo sapiens
tttaaaatcattaaatactttatttaagaacagtttgtttaccaagttaggacagtggttatgatttctcaatttacacatattccttttgaaaatcttagaaaaaatgtttcaccaatgttaaggtacaactcttgaatatgcagcgtagtcttctctctttattctgaataacagaagcacgtaaattaaattatcctctttgcacaattattccccccaaaactaatttataacatataattatctccctaaaaagcagttacaaaccataaattgaatatgaataaaatatgaaaaagagcacaaattttaaagccctccatgcaaaaaaaaattaatacattggctttacctataaaccttattttgttaatgctaagcacagaacccttatgggctcataggagtcagcaaacagctacagatgagtcttcttgttaagaattcattcaatgcttctcagaatagcagattttaaaaaatgaattcactgaggttcttaaacctctgaacataaggcaacagttcacaactgatttcagaaatagaaggtaagtattaaattacaaattctactaggtcagtgggagtgggcggattcacctggagtggagcagtgaaggtttattttacctctttcaagatctctccatatattccaccagtttgagataggctgggggaggaggtggaatagcttaaaaggttatatttcttattttaaagtataaaaacatacacttaaaggctaaacctatctataacctacatcttaatgtcagcaaaacatactgctttctacccaaatcaccaattgaatcagcctcgctcatgatttcagagcataaggtgtccagagaagaaaactcaagactgaatgggctgccataatggggaagtacaggtagccaaaggccagcaattgagacagcattagagaaactatctactatgtctgaataagctcccctaccttacaagcatcaactactacattgaaaccattctgagtgctgcatttcctatatgtgcctagacttggtaatgcctgataaattctgtatattaccacgtcttgcatttaatagacaatttgtttaatgatactaactttactcacacttaattgactttctcatatcctgagattaatctaagaaaactatttcaaagataaatttaaaataatttttaaggaacccagaatttttatttagaacactgctttgacttttgttattactttgtatttattagtatatcctattcataattttgcactgactttcaatataaaattaaatctctgcttacacaaaataactgtcagctccaaatcaacatgaatggagtgacattgaaaatatcatactattcccgataaaaagagtttaatgcaaaataattattacctggtatttcacattcggtttgtgtctttatctctactcccaggcaaatattctcacttaagaccagtgccttcactgcttcttgtaaagacatttaatttaatgttattgcatatttatttattttttatgcttattcatacagaatttattactttctagaattttgggataagaatcataatcactaatgcaaaatactcttaattttttaaatgttgtatttctcgtttttaaatattaatagttcactattctaagtttttcatgaataaaaaacacatcctaagttcatgaaatctgtgcggttcactactgtaccaggtattaaaaccttaagggctaatcctcttcacttatgagaatttctcaagaatgagtcaaatgcgccacatttaaatttgcagattattttgtctagctgctcaatcaagagaaataccactcaaagaaatcaattctaaattcatgtctttaatgaatactatgttttgcaacctgtataaaaactgatcacccaagcacatgcaaaaggaatatagttatctttagtgggcttgctaaagtattgacaactaatcagtgtcctctaaatactcttattttggcaacagcccacaaggttaacttttagaaaattcagcttgatacaagaaaataattcatcataattagacaatataatttttccacttttgagacaaaatatataaatcaatacttgtttatatgacttgcaaaatgtctatacactaagattgctacagtctatgaggtaaccaaaggtaagtgatacacatcctttagaaaacacaatttgtctggggggatgattgcacatgtatttaaatatgttaaaaccactgaattgtgtattttaaatgtgtgattatatggtatgtgaattgtatctcatgaaggctttttaaacaaaacaacactgatgtaacttagaccaaaaaaaaaaaaaccacaatttgtcacacattgttcttttgagacatatttttataaagacagaaattaacatttgtagcatcagcaggtttgattagcacatgttacccatgtaggtataattgtctaatcagtagccaaagtgtgcccttgatgctaatcacccctataactgaataatctgcaaattacaaaatgagttgtaatcccccatccactaccagaacatgccctgtaatatacggtgattctaaaagaaacacaaccgcatgtgccacctcaatagtttctccaaacctcccaagaggaatatttttctttaaatgttcttctttcaagtctttcgtcatatctgtgtgtacaaatcctggtgcaactacattcactctaattttctttcttgctacctctttagcaagagcacgtgaaaatccaactaatcctcctttactggcactgtaaacggactggccagagttgccttttaagccaacaatgcttcctacattaacaatagaccctccctgttgttgaatcatagtcctcatggcagctttacaggtcagcatggaacccaagaggttagtatgaagctgagataccatatcttcagtttttgttcttactaaaagaccatccctgttaataccagctgcatttaccaagaaatttactcgacctaaatgtttctccatctcttcaaatgtattttgaacatcatgttctttagcaacatcacagctaaatgccaaatgatctccgccgaggtcaccggcggcggctttggccccttccaggtttctggcaatgaccgccagtcggtagcctttccgggccattaactgggccacagctctgccaatgcctcgggagcctccaaaaacagcacacactttgtccatctcggagtcacaaactcggaggaaagaaggtagagagtgggagcccccctccaggttccctcaggcttttaaacaaccgcggttccaaa

SEQ ID NO: 363244 - DNA, 2567 bp, Homo sapiens
ggtggtgctgctgtcctggtggtgctgctgtcctggtggtgctgctaaagaagcacacaaaccccctgtgtttattgagaagctccaaaacacaggagttgctgatgggtacccagtgcggctggaatgtcgtgtattgggagtgccaccacctcagatattttggaagaaagaaaatgaatcactcactcacagcactgaccgagtgagcatgcaccaggacaaccacggctacatctgcctgctcattcagggagccacaaaagaagatgctgggtggtatactgtgtcagccaagaatgaagcagggattgtgtcctgtactgccaggctggacgtttacacccagtggcatcagcagtcacagagcaccaagccaaaaaaagtacggccctcagccagtcgctatgcagcactttcggaccagggactagacatcaaagcagcgttccaacctgaggccaacccatctcacctgacactgaatactgccttggtagaaagtgaggacctgtaatccagcattcttgttaaagctgaaacactgaaacagccattgccttgaccaacatattcctttgtcacattatgtaaaaggcagaaacatacctttgactataagaaattaaaaaaaaacaccaaaataatatttttcttacttgatataccaaacttagtttaagtagataatgctaatacaaatatacacattgcacagaaaatacacatttactgtccaatttaaaactttggaattgctgtgattaaagtgatcaaaatgccaaaatactaaaggaaatcaattgttcacaggtaactacaatttgtattatctacaagtgcctttaaacacaagatataggtgctgtgtagcctgatagtgtgaaatgtttaatgagggagttgtaccacaaacagtactacaatgattctgaagcacagtgtattcagacagatacagtgaaccaagtgcaatatgtaaggatgaaagaagaagagatgacaaagaaatccaagtaaatgccttgtctttgcaaatgtttttatattaaatcataaggaaggaactacttgccttaaatgttaatatcaaaagagttttctaacaaggttaataccttagttcttaacattttttttctttatgtgtagtgttttcatgctaccttggtaggaaacttatttacaaaccatattaaaaggctaatttaaatataaataatataaagtgctctgaataaagcagaaatatattacagttcattccacagaaagcatccaaaccacccaaatgaccaaggcatatatagtatttggaggaatcaggggtttggaaggagtagggaggagaatgaaggaaaatgcaaccagcatgattatagtgtgttcatttagataaaagtagaaggcacaggagaggtagcaaaggccaggcttttctttggttttcttcaaacataggtgaaaaaaacactgccattcacaagtcaaggaacccagggccagctggaagtgtggagcacacatgctgtggagcacacatgctgtggagattgcagtgtgtctgaggtttgtgtagtagtggaagattttaggtatgtagagcaagttgaaaatggattgagactgcatggtggcataaatgagaaattgcctgtagcatctagtctacttgaaggaagtggagacataaggagagacaaaaacaggtttgtgccataaagtattttttcaaagacaccaagatgtggtaaatgaaaattattagttcacttccctgctgccatgaaactttgccttaagaaggtgctggattccaaggtttgtaaaggcatctcggtaaagactgctttttgaatgcatatgattttgcatcagctagactgagttgattctgaccagacttgatggttttaagtcggaaccgataaattttaaaaaggagaaaaaataatttgacctagtagtataaaacatgaggctttaatggtactttgctatgaaaagaaaacactgtattccttatgcaaaacacatgtatctttcattatttataagtggcctctcttagctcagttactcaattcatacgtagtattttttaaaataattttatatctgtgtaccaccccatatatttcatattactgtttcacatgtacagctttctacttctttgtaagaacaccaaccaaccaaggtttaagtgattaataggcttgagcaccgggtggcagatgttctatgcagtgtggttcaagtttctttgaccgcacttatatgcattgctaatatggaatttaagataccatacacagtctctcatggacctatctctattgtagaattatgacttatgtcttacttggcaaatttttctgaatgtgacctttttttgctgatttgctgggtttgggattaactagcattattttgccacctttatattgtatttataaaaaaaaagtactatcaatcaatcatactactttggattgttgtgctggtgtaatgtggatttaacatcaataaatatttgacaaataatagttgcagttttgtgaagc

SEQ ID NO: 363245 - DNA, 2022 bp, Homo sapiens
cctgagtcacccggcgggcgaggtataaagcccgatacctgccccgcgcccggtccgcggagcccgctgcagctcccgctcgctccggacgcggaatcgggcagcagcgggaggcggcccggagagccgagggaccctctgaagctccagcaactccagaaccaaatccgactggagcaggaggccggcgctcggcagcctccgccagccccgcgcagcgcgccgccctcgcccccccttcccgccgccgcccgccttccccgagctcgcggcctgcacgccgcccgcgtccccggagcccatgagcgcgctggcctcccgctccgcccccgccatgcagtcctccggctccttcaactacgcgcgccccaagcagttcatcgccgcgcagaacctcgggcccgcgtcgggccacggcacgccggcctccagccccagctcgtccagcctcccgtcgcccatgtccccgacgccgaggcagttcggccgcgcccccgtgccgcccttcgcgcagcccttcggcgctgagcccgaggccccgtggggctcctcctcgccgtcgccccgcgccccgccacccccggtcttcagccccacggctgccttcccggtgcccgacgtgttcccactgccgccgccaccaccgccgctcccgagcccgggacaggcgtcccactgctcgtcgcctgccacccgcttcggccacggccagacgcccgcggccttcctcagcgctctgctgccctcgcagccgccgccggcggccgtcaacgccctggggctgcccaagggtgtcacccccgcaggatttccaaagaaggccagtagaactgctagaatagcctccgatgaggaaattcaaggcacaaaggatgctgttattcaagacctggaacgaaaacttcgcttcaaggaggacctcctgaacaatggccagccgaggttaacatacgaagaaagaatggctcgtcgactgctaggtgctgacagtgcaactgtctttaatattcaggagccagaagaggaaacagctaatcaggaatacaaagtctccagctgtgaacagagactcatcagtgaaatagagtacaggctagaaaggtctcctgtggatgaatcaggtgatgaagttcagtatggagatgtgcctgtggaaaatggaatggcaccattctttgagatgaagctgaaacattacaagatctttgagggaatgccagtaactttcacatgtagagtggctggaaatccaaagccaaagatctattggtttaaagatgggaagcagatctctccaaagagtgatcactacaccattcaaagagatctcgatgggacctgctccctccataccacagcctccaccctagatgatgatgggaattatacaattatggctgcaaaccctcagggccgcatcagttgtactggacggctaatggtacaggctgtcaaccaaagaggtcgaagtccccggtctccctcaggccatcctcatgtcagaaggtatttaacatgttccttcccagaagtgttacattattttatttattactataaatgtagtactattagaatcatcatatgaccacaaaagtaaacataactggaagatagaataggaatgcaaacctgaagcctgtggctccttgattattatgctcccttgtgatgcagaaagggaatgggaacaaacattcgctaatgtgtgctaagcccattcacatatactattagtttgttaaataagacatattttatagacaaataaatcaagactcagcacttttaaatggcatatgaaaatactactaaatggtacacaaatgttggaaaccaaacttctgtaaccaacagctgtgtgagtggacgcacacattaaaagctattaccactgggtttcttaaaatcagctcatttgttaatgttcatttttcagccacttagttcaaaacataagaccattagactacaaatcttgtaggtaagatctgtcacattttaaatactcagatatctgct

SEQ ID NO: 363246 - DNA, 1307 bp, Homo sapiens
cctgagtcacccggcgggcgaggtataaagcccgatacctgccccgcgcccggtccgcggagcccgctgcagctcccgctcgctccggacgcggaatcgggcagcagcgggaggcggcccggagagccgagggaccctctgaagctccagcaactccagaaccaaatccgactggagcaggaggccggcgctcggcagcctccgccagccccgcgcagcgcgccgccctcgcccccccttcccgccgccgcccgccttccccgagctcgcggcctgcacgccgcccgcgtccccggagcccatgagcgcgctggcctcccgctccgcccccgccatgcagtcctccggctccttcaactacgcgcgccccaagcagttcatcgccgcgcagaacctcgggcccgcgtcgggccacggcacgccggcctccagccccagctcgtccagcctcccgtcgcccatgtccccgacgccgaggcagttcggccgcgcccccgtgccgcccttcgcgcagcccttcggcgctgagcccgaggccccgtggggctcctcctcgccgtcgccccgcgccccgccacccccggtcttcagccccacggctgccttcccggtgcccgacgtgttcccactgccgccgccaccaccgccgctcccgagcccgggacaggcgtcccactgctcgtcgcctgccacccgcttcggccacggccagacgcccgcggccttcctcagcgctctgctgccctcgcagccgccgccggcggccgtcaacgccctggggctgcccaagggtgtcacccccgcaggatttccaaagaaggccagtagaactgctagaatagcctccgatgaggaaattcaaggcacaaaggatgctgttattcaagacctggaacgaaaacttcgcttcaaggaggacctcctgaacaatggccagccgaggttaacatacgaagaaagaatggctcgtcgactgctaggtgctgacagtgcaactgtctttaatattcaggagccagaagaggaaacagctaatcaggtaccatgttgctctggacttcttagggtaacatttattctgtcccccttttccatcttccttatggatactgttcttgggatgagttctgtggaaagtagagggcaagtcacagaaaagcagtattaatatcatcagtcaacctcacagctaatttttattgagcacatactatgttaagtgactgacagaattctttccatcagtgatacctgttctttttattcttcttcttgattattctcctttccagtacatttccattttc

SEQ ID NO: 363247 - DNA, 447 bp, Homo sapiens
cacccctaggcctctattctccccatgcctccctgatagtaaatgaagtataattttgtccattctggtgattaaacaaatagcatcttcggatctaacgtcctatttctccctaaactcaatgaagagttatattcacaaaatgactaatccattcataataagccggaaataaaaaaccctgaagtttaaatgcaataaaaaagaatttggcagaacaaagttcaattgtccatttgcaaaactcaccaaaacaatgttaataacattaaagcaaaccaggtatatctcaaaactggctggtactcaaaagggtttctctatcaaacactgctttgtgcattcgcgcagggccaaggcacggcccttgggcaaaactgaagggagccgttggtacctgcactcccacctttcctgcctgaactcctttcgacccagccctgtctc

SEQ ID NO: 363248 - DNA, 852 bp, Homo sapiens
ggcaaacggcagtgagggaatctaagtggtcaaattcctagaaatacttgtcctcagcaccactaggtggcagtagttggttgaggctgtgaatgatcggtaacataatcactagtagtgaagccatcacagatgctagcaatgacttaggagtctcccacagctggtcagacaggcattctgtgaagcagatggccagtggacagtgtgagcctatcagacttgaattaattgaggaaataaatgagcggaatgaagtatacagacctttgcttggtaaaagaataatttggagaggggactagcatcttaccacctggagtaaaaaatggtatcataaaagatctattcaagcaatattccaaaagccttctgaattctttctagtgctccttttgtatatcattgatagagaattcatctcatgttttcttagctaaagaagcacacaaaccccctgtgtttattgagaagctccaaaacacaggagttgctgatgggtacccagtgcggctggaatgtcgtgtattgggagtgccaccacctcagatattttggaagaaagaaaatgaatcactcactcacagcactgaccgagtgaggtaagactgcacaatgagaacctgatccttaactgttcagtcctaatgatgtatcaaaagatacattttatatagcatggaaatctatgtgtaaaagccacatagatgttttgatttttgatgaaatcaatcaaagacaaaaaccatgcgttacccaatgtaggattaagcttttagaaggaagctatgggtgtttgatctaatggtgatttcttaaaagtgtttatcattctatctaaaagaaaagatg

SEQ ID NO: 363249 - DNA, 3856 bp, Homo sapiens
tttttttttctattattcttttactattttttctattaccattttttctagtaccattttttctattattcttttactataattgtatataatatggcagctgcttgccacatgtactatgtggagagatgtaccaccctgcatcagcttttaccctacagaaggaaatcagcgttccattatattttattgttatcaacagtttaggaatacatagctttgcttttgcctttttctttccttccccttgtttcccctcgcctcagagaaaagaaggaaaaaaaaattcatctttcctacccccctctttttggatgataggacttgaagacaatctgaaataccacataaactcacttccagatgttttttgtttcatatgcaattgaattgggctcagactgtgtttttaagctgtatggtaaaaatatcactgtcttctagggccttattggggggcagggagagacgtgacactttgtcagaagggattgagtctgctaacttaaactctccttgattcaggaatacaaagtctccagctgtgaacagagactcatcagtgaaatagagtacaggctagaaaggtctcctgtggatgaatcaggtgatgaagttcagtatggagatgtgcctgtggaaaatggaatggcaccattctttgagatgaagctgaaacattacaagatctttgagggaatgccagtaactttcacatgtagagtggctggaaatccaaagccaaagatctattggtttaaagatgggaagcagatctctccaaagagtgatcactacaccattcaaagagatctcgatgggacctgctccctccataccacagcctccaccctagatgatgatgggaattatacaattatggctgcaaaccctcagggccgcatcagttgtactggacggctaatggtacaggctgtcaaccaaagaggtcgaagtccccggtctccctcaggccatcctcatgtcagaaggcctcgttctagatcaagggacagtggagacgaaaatgaaccaattcaggagcgattcttcagacctcacttcttgcaggctcctggagatctgactgttcaagaaggaaaactctgcagaatggactgcaaagtcagtgggttaccaaccccagatctaagctggcaactagatggaaagcccgtacgccctgacagtgctcacaagatgctggtgcgtgagaacggggtgcactctctgatcatagagccagtcacgtcacgtgatgccggcatctacacatgtatagctaccaaccgagcaggacagaactcattcagcctggagcttgtggttgctgctaaagaagcacacaaaccccctgtgtttattgagaagctccaaaacacaggagttgctgatgggtacccagtgcggctggaatgtcgtgtattgggagtgccaccacctcagatattttggaagaaagaaaatgaatcactcactcacagcactgaccgagtgagcatgcaccaggacaaccacggctacatctgcctgctcattcagggagccacaaaagaagatgctgggtggtatactgtgtcagccaagaatgaagcagggattgtgtcctgtactgccaggctggacgtttacacccagtggcatcagcagtcacagagcaccaagccaaaaaaagtacggccctcagccagtcgctatgcagcactttcggaccagggactagacatcaaagcagcgttccaacctgaggccaacccatctcacctgacactgaatactgccttggtagaaagtgaggacctgtaatccagcattcttgttaaagctgaaacactgaaacagccattgccttgaccaacatattcctttgtcacattatgtaaaaggcagaaacatacctttgactataagaaattaaaaaaaaacaccaaaataatatttttcttacttgatataccaaacttagtttaagtagataatgctaatacaaatatacacattgcacagaaaatacacatttactgtccaatttaaaactttggaattgctgtgattaaagtgatcaaaatgccaaaatactaaaggaaatcaattgttcacaggtaactacaatttgtattatctacaagtgcctttaaacacaagatataggtgctgtgtagcctgatagtgtgaaatgtttaatgagggagttgtaccacaaacagtactacaatgattctgaagcacagtgtattcagacagatacagtgaaccaagtgcaatatgtaaggatgaaagaagaagagatgacaaagaaatccaagtaaatgccttgtctttgcaaatgtttttatattaaatcataaggaaggaactacttgccttaaatgttaatatcaaaagagttttctaacaaggttaataccttagttcttaacattttttttctttatgtgtagtgttttcatgctaccttggtaggaaacttatttacaaaccatattaaaaggctaatttaaatataaataatataaagtgctctgaataaagcagaaatatattacagttcattccacagaaagcatccaaaccacccaaatgaccaaggcatatatagtatttggaggaatcaggggtttggaaggagtagggaggagaatgaaggaaaatgcaaccagcatgattatagtgtgttcatttagataaaagtagaaggcacaggagaggtagcaaaggccaggcttttctttggttttcttcaaacataggtgaaaaaaacactgccattcacaagtcaaggaacccagggccagctggaagtgtggagcacacatgctgtggagcacacatgctgtggagattgcagtgtgtctgaggtttgtgtagtagtggaagattttaggtatgtagagcaagttgaaaatggattgagactgcatggtggcataaatgagaaattgcctgtagcatctagtctacttgaaggaagtggagacataaggagagacaaaaacaggtttgtgccataaagtattttttcaaagacaccaagatgtggtaaatgaaaattattagttcacttccctgctgccatgaaactttgccttaagaaggtgctggattccaaggtttgtaaaggcatctcggtaaagactgctttttgaatgcatatgattttgcatcagctagactgagttgattctgaccagacttgatggttttaagtcggaaccgataaattttaaaaaggagaaaaaataatttgacctagtagtataaaacatgaggctttaatggtactttgctatgaaaagaaaacactgtattccttatgcaaaacacatgtatctttcattatttataagtggcctctcttagctcagttactcaattcatacgtagtattttttaaaataattttatatctgtgtaccaccccatatatttcatattactgtttcacatgtacagctttctacttctttgtaagaacaccaaccaaccaaggtttaagtgattaataggcttgagcaccgggtggcagatgttctatgcagtgtggttcaagtttctttgaccgcacttatatgcattgctaatatggaatttaagataccatacacagtctctcatggacctatctctattgtagaattatgacttatgtcttacttggcaaatttttctgaatgtgacctttttttgctgatttgctgggtttgggattaactagcattattttgccacctttatattgtatttataaaaaaaaagtactatcaatcaatcatactactttggattgttgtgctggtgtaatgtggatttaacatcaataaatatttgacaaataatagttgcagttttgtgaagc

SEQ ID NO: 363250 - DNA, 631 bp, Homo sapiens
cccttccttagccaacactgaaaactgtagttacgagtcaatgggagaatccaacaatgaccacttccaacactttccacctccccctccaatcttggagacaagttccttggagttggcttcaaagaaaccatctgagatccagcaggtgaacaaccctgagttaggcctgagcagggcagcccttcaaatgcaattcaatgctgctgagagggaaacgaacggagtccatcccagccgtggagtaaatggactgattaacggcaaagctaacagtaataaatctcttccaacaccagctgtcctgctttcacccactaaggagccaccacctctgcttgccaaaccaaaactgtgagtatttctgcatggttttataataatttccatacccctgttacatttcctgtctggtgagaaaaaaacttttgcctgtattcaactatgtggcaagttggccttgactcatgggaccttgctgccaagtggtgtctttcaacaatataaaagacacctaaaaataaagaagggaaatgaaaagcttggtgaaatctgccctttgctgaaagctataactggttatggctgtgaaaatatctgtgcccagtgtgggcttccaacatacagctaa

SEQ ID NO: 363251 - DNA, 4310 bp, Homo sapiens
cccttccttagccaacactgaaaactgtagttacgagtcaatgggagaatccaacaatgaccacttccaacactttccacctccccctccaatcttggagacaagttccttggagttggcttcaaagaaaccatctgagatccagcaggtgaacaaccctgagttaggcctgagcagggcagcccttcaaatgcaattcaatgctgctgagagggaaacgaacggagtccatcccagccgtggagtaaatggactgattaacggcaaagctaacagtaataaatctcttccaacaccagctgtcctgctttcacccactaaggagccaccacctctgcttgccaaaccaaaactgggcacgccggcctccagccccagctcgtccagcctcccgtcgcccatgtccccgacgccgaggcagttcggccgcgcccccgtgccgcccttcgcgcagcccttcggcgctgagcccgaggccccgtggggctcctcctcgccgtcgccccgcgccccgccacccccggtcttcagccccacggctgccttcccggtgcccgacgtgttcccactgccgccgccaccaccgccgctcccgagcccgggacaggcgtcccactgctcgtcgcctgccacccgcttcggccacggccagacgcccgcggccttcctcagcgctctgctgccctcgcagccgccgccggcggccgtcaacgccctggggctgcccaagggtgtcacccccgcaggatttccaaagaaggccagtagaactgctagaatagcctccgatgaggaaattcaaggcacaaaggatgctgttattcaagacctggaacgaaaacttcgcttcaaggaggacctcctgaacaatggccagccgaggttaacatacgaagaaagaatggctcgtcgactgctaggtgctgacagtgcaactgtctttaatattcaggagccagaagaggaaacagctaatcaggaatacaaagtctccagctgtgaacagagactcatcagtgaaatagagtacaggctagaaaggtctcctgtggatgaatcaggtgatgaagttcagtatggagatgtgcctgtggaaaatggaatggcaccattctttgagatgaagctgaaacattacaagatctttgagggaatgccagtaactttcacatgtagagtggctggaaatccaaagccaaagatctattggtttaaagatgggaagcagatctctccaaagagtgatcactacaccattcaaagagatctcgatgggacctgctccctccataccacagcctccaccctagatgatgatgggaattatacaattatggctgcaaaccctcagggccgcatcagttgtactggacggctaatggtacaggctgtcaaccaaagaggtcgaagtccccggtctccctcaggccatcctcatgtcagaaggcctcgttctagatcaagggacagtggagacgaaaatgaaccaattcaggagcgattcttcagacctcacttcttgcaggctcctggagatctgactgttcaagaaggaaaactctgcagaatggactgcaaagtcagtgggttaccaaccccagatctaagctggcaactagatggaaagcccgtacgccctgacagtgctcacaagatgctggtgcgtgagaacggggtgcactctctgatcatagagccagtcacgtcacgtgatgccggcatctacacatgtatagctaccaaccgagcaggacagaactcattcagcctggagcttgtggttgctgctaaagaagcacacaaaccccctgtgtttattgagaagctccaaaacacaggagttgctgatgggtacccagtgcggctggaatgtcgtgtattgggagtgccaccacctcagatattttggaagaaagaaaatgaatcactcactcacagcactgaccgagtgagcatgcaccaggacaaccacggctacatctgcctgctcattcagggagccacaaaagaagatgctgggtggtatactgtgtcagccaagaatgaagcagggattgtgtcctgtactgccaggctggacgtttacacccagtggcatcagcagtcacagagcaccaagccaaaaaaagtacggccctcagccagtcgctatgcagcactttcggaccagggactagacatcaaagcagcgttccaacctgaggccaacccatctcacctgacactgaatactgccttggtagaaagtgaggacctgtaatccagcattcttgttaaagctgaaacactgaaacagccattgccttgaccaacatattcctttgtcacattatgtaaaaggcagaaacatacctttgactataagaaattaaaaaaaaacaccaaaataatatttttcttacttgatataccaaacttagtttaagtagataatgctaatacaaatatacacattgcacagaaaatacacatttactgtccaatttaaaactttggaattgctgtgattaaagtgatcaaaatgccaaaatactaaaggaaatcaattgttcacaggtaactacaatttgtattatctacaagtgcctttaaacacaagatataggtgctgtgtagcctgatagtgtgaaatgtttaatgagggagttgtaccacaaacagtactacaatgattctgaagcacagtgtattcagacagatacagtgaaccaagtgcaatatgtaaggatgaaagaagaagagatgacaaagaaatccaagtaaatgccttgtctttgcaaatgtttttatattaaatcataaggaaggaactacttgccttaaatgttaatatcaaaagagttttctaacaaggttaataccttagttcttaacattttttttctttatgtgtagtgttttcatgctaccttggtaggaaacttatttacaaaccatattaaaaggctaatttaaatataaataatataaagtgctctgaataaagcagaaatatattacagttcattccacagaaagcatccaaaccacccaaatgaccaaggcatatatagtatttggaggaatcaggggtttggaaggagtagggaggagaatgaaggaaaatgcaaccagcatgattatagtgtgttcatttagataaaagtagaaggcacaggagaggtagcaaaggccaggcttttctttggttttcttcaaacataggtgaaaaaaacactgccattcacaagtcaaggaacccagggccagctggaagtgtggagcacacatgctgtggagcacacatgctgtggagattgcagtgtgtctgaggtttgtgtagtagtggaagattttaggtatgtagagcaagttgaaaatggattgagactgcatggtggcataaatgagaaattgcctgtagcatctagtctacttgaaggaagtggagacataaggagagacaaaaacaggtttgtgccataaagtattttttcaaagacaccaagatgtggtaaatgaaaattattagttcacttccctgctgccatgaaactttgccttaagaaggtgctggattccaaggtttgtaaaggcatctcggtaaagactgctttttgaatgcatatgattttgcatcagctagactgagttgattctgaccagacttgatggttttaagtcggaaccgataaattttaaaaaggagaaaaaataatttgacctagtagtataaaacatgaggctttaatggtactttgctatgaaaagaaaacactgtattccttatgcaaaacacatgtatctttcattatttataagtggcctctcttagctcagttactcaattcatacgtagtattttttaaaataattttatatctgtgtaccaccccatatatttcatattactgtttcacatgtacagctttctacttctttgtaagaacaccaaccaaccaaggtttaagtgattaataggcttgagcaccgggtggcagatgttctatgcagtgtggttcaagtttctttgaccgcacttatatgcattgctaatatggaatttaagataccatacacagtctctcatggacctatctctattgtagaattatgacttatgtcttacttggcaaatttttctgaatgtgacctttttttgctgatttgctgggtttgggattaactagcattattttgccacctttatattgtatttataaaaaaaaagtactatcaatcaatcatactactttggattgttgtgctggtgtaatgtggatttaacatcaataaatatttgacaaataatagttgcagttttgtgaagc

SEQ ID NO: 363252 - DNA, 3227 bp, Homo sapiens
cctgagtcacccggcgggcgaggtataaagcccgatacctgccccgcgcccggtccgcggagcccgctgcagctcccgctcgctccggacgcggaatcgggcagcagcgggaggcggcccggagagccgagggaccctctgaagctccagcaactccagaaccaaatccgactggagcaggaggccggcgctcggcagcctccgccagccccgcgcagcgcgccgccctcgcccccccttcccgccgccgcccgccttccccgagctcgcggcctgcacgccgcccgcgtccccggagcccatgagcgcgctggcctcccgctccgcccccgccatgcagtcctccggctccttcaactacgcgcgccccaagcagttcatcgccgcgcagaacctcgggcccgcgtcgggccacggcacgccggcctccagccccagctcgtccagcctcccgtcgcccatgtccccgacgccgaggcagttcggccgcgcccccgtgccgcccttcgcgcagcccttcggcgctgagcccgaggccccgtggggctcctcctcgccgtcgccccgcgccccgccacccccggtcttcagccccacggctgccttcccggtgcccgacgtgttcccactgccgccgccaccaccgccgctcccgagcccgggacaggcgtcccactgctcgtcgcctgccacccgcttcggccacggccagacgcccgcggccttcctcagcgctctgctgccctcgcagccgccgccggcggccgtcaacgccctggggctgcccaagggtgtcacccccgcaggatttccaaagaaggccagtagaactgctagaatagcctccgatgaggaaattcaaggcacaaaggatgctgttattcaagacctggaacgaaaacttcgcttcaaggaggacctcctgaacaatggccagccgaggttaacatacgaagaaagaatggctcgtcgactgctaggtgctgacagtgcaactgtctttaatattcaggagccagaagaggaaacagctaatcaggaatacaaagtctccagctgtgaacagagactcatcagtgaaatagagtacaggctagaaaggtctcctgtggatgaatcaggtgatgaagttcagtatggagatgtgcctgtggaaaatggaatggcaccattctttgagatgaagctgaaacattacaagatctttgagggaatgccagtaactttcacatgtagagtggctggaaatccaaagccaaagatctattggtttaaagatgggaagcagatctctccaaagagtgatcactacaccattcaaagagatctcgatgggacctgctccctccataccacagcctccaccctagatgatgatgggaattatacaattatggctgcaaaccctcagggccgcatcagttgtactggacggctaatggtacaggctgtcaaccaaagaggtcgaagtccccggtctccctcaggccatcctcatgtcagaaggcctcgttctagatcaagggacagtggagacgaaaatgaaccaattcaggagcgattcttcagacctcacttcttgcaggctcctggagatctgactgttcaagaaggaaaactctgcagaatggactgcaaagtcagtgggttaccaaccccagatctaagctggcaactagatggaaagcccgtacgccctgacagtgctcacaagatgctggtgcgtgagaacggggtgcactctctgatcatagagccagtcacgtcacgtgatgccggcatctacacatgtatagctaccaaccgagcaggacagaactcattcagcctggagcttgtggttgctgctaaagaagcacacaaaccccctgtgtttattgagaagctccaaaacacaggagttgctgatgggtacccagtgcggctggaatgtcgtgtattgggagtgccaccacctcagatattttggaagaaagaaaatgaatcactcactcacagcactgaccgagtgagcatgcaccaggacaaccacggctacatctgcctgctcattcagggagccacaaaagaagatgctgggtggtatactgtgtcagccaagaatgaagcagggattgtgtcctgtactgccaggctggacgtttacagtgagtgccacttcatctcatttcattgcgtttactcattaaattatgaaaaattagacatctggacagcaaatcacattactctttataaacaactattgtgttttatttgtcaaaaaaattcatattgctctctctctctttctatttgtagtttctcgacattaatagtgaaccacaccaggagaacaaatacccaagtatcattcaggaactttgaattattagcaaaatatgcatgttgatttctcttacattggctagttagttgtggcttccttactcaagcatccttaggagttaacagtaggcaaaggcataaccatgtttttcacatgttcttgttactgtgttctgcaaatgactgccttttaacatttcttcctatattctatcgcagtgtcctaatgcactctaaacgtgtgttccattgatcctggaatgcgtacttttgtggcttagtgcttttctcattaatatatcttaagcagccagcagtagacttgtgtttgtatatttgtgtacatgcatcccaaatttaaagaaaattattcctattgaatttacagtctagtacaatcagcattatgttatccattgacataaaaaaaacactagaaaaaaattaagaatttatttaagaatttatttcagattttgcctcttcttgaaataactatgtgagggtcatcaagaaatgtgtggcctcaaccttccctactgtacgattcctttcagttgattagtgttaaagcatccacatccagcagaattcctaagtgctataattattttagagaaaatattttttaaaaggagaggggggatgagaattaggaagcttatcagctattccaaaggattccctgtgctgcagtgtttacttaaaaaaaaaaagataaactacacttgacctttgtaatctagctgctttattcccactatcctgtatagacagtaaatctgcaacatgtgagtaaaatgcaaaagtgttcctaaattttccatgtttctaccatggatgtgttcaggtgccttgcatctatctagacattctgtatttatttgaaatatctaaag

SEQ ID NO: 363253 - DNA, 1751 bp, Homo sapiens
cctgagtcacccggcgggcgaggtataaagcccgatacctgccccgcgcccggtccgcggagcccgctgcagctcccgctcgctccggacgcggaatcgggcagcagcgggaggcggcccggagagccgagggaccctctgaagctccagcaactccagaaccaaatccgactggagcaggaggccggcgctcggcagcctccgccagccccgcgcagcgcgccgccctcgcccccccttcccgccgccgcccgccttccccgagctcgcggcctgcacgccgcccgcgtccccggagcccatgagcgcgctggcctcccgctccgcccccgccatgcagtcctccggctccttcaactacgcgcgccccaagcagttcatcgccgcgcagaacctcgggcccgcgtcgggccacggcacgccggcctccagccccagctcgtccagcctcccgtcgcccatgtccccgacgccgaggcagttcggccgcgcccccgtgccgcccttcgcgcagcccttcggcgctgagcccgaggccccgtggggctcctcctcgccgtcgccccgcgccccgccacccccggtcttcagccccacggctgccttcccggtgcccgacgtgttcccactgccgccgccaccaccgccgctcccgagcccgggacaggcgtcccactgctcgtcgcctgccacccgcttcggccacggccagacgcccgcggccttcctcagcgctctgctgccctcgcagccgccgccggcggccgtcaacgccctggggctgcccaagggtgtcacccccgcaggatttccaaagaaggccagtagaactgctagaatagcctccgatgaggaaattcaaggcacaaaggatgctgttattcaagacctggaacgaaaacttcgcttcaaggaggacctcctgaacaatggccagccgaggttaacatacgaagaaagaatggctcgtcgactgctaggtgctgacagtgcaactgtctttaatattcaggagccagaagaggaaacagctaatcaggtaccatgttgctctggacttcttagggtaacatttattctgtcccccttttccatcttccttatggatactgttcttgggatgagttctggtgcaactacattcactctaattttctttcttgctacctctttagcaagagcacgtgaaaatccaactaatcctcctttactggcactgtaaacggactggccagagttgccttttaagccaacaatgcttcctacattaacaatagaccctccctgttgttgaatcatagtcctcatggcagctttacaggtcagcatggaacccaagaggttagtatgaagctgagataccatatcttcagtttttgttcttactaaaagaccatccctgttaataccagctgcatttaccaagaaatttactcgacctaaatgtttctccatctcttcaaatgtattttgaacatcatgttctttagcaacatcacagctaaatgccaaatgatctccgccgaggtcaccggcggcggctttggccccttccaggtttctggcaatgaccgccagtcggtagcctttccgggccattaactgggccacagctctgccaatgcctcgggagcctccaaaaacagcacacactttgtccatctcggagtcacaaactcggaggaaagaaggtagagagtgggagcccccctccaggttccctcaggcttttaaacaaccgcggttccaaa

SEQ ID NO: 363254 - DNA, 418 bp, Homo sapiens
attccccaacctgatagccctccgcgacgcattacgcaccgcggacagctggagaggccgaggcgctctcgctttgatttcggcgcctccgccctcgcggggagagattggctgcggccgcgggacggggtagtgagcgcgtcacttcctgccgctgccaggcgcgtcctcccgcgcgctatgacggccagcgcacagccgcgcgggcggcggccaggagtcggagtcggagtcgtggtgaccagctgcaagcatccgcgttgcgtcctcctggggaagaggaaaggctcggttggagctggcagtttccaactccctggaggtcatctggagttcgggtgagcagccgcggacgcgaggaaaccggggcgtgcgcagagggacgaactcacgccgtgcttgcttccgtgtgccgtgc

SEQ ID NO: 363255 - DNA, 2096 bp, Homo sapiens
attccccaacctgatagccctccgcgacgcattacgcaccgcggacagctggagaggccgaggcgctctcgctttgatttcggcgcctccgccctcgcggggagagattggctgcggccgcgggacggggtagtgagcgcgtcacttcctgccgctgccaggcgcgtcctcccgcgcgctatgacggccagcgcacagccgcgcgggcggcggccaggagtcggagtcggagtcgtggtgaccagctgcaagcatccgcgttgcgtcctcctggggaagaggaaaggctcggttggagctggcagtttccaactccctggaggtcatctggagttcggtgaaacctgggaagaatgtgctcaaagggaaacctgggaagaagcagctcttcacctgaaaaatgttcactttgcctcagttgtgaattctttcattgagaaggagaattaccattatgttactatattaatgaaaggagaagtggatgtgactcatgattcagaaccaaagaatgtagagcctgaaaaaaatgaaagttgggagtgggttccttgggaagaactacctcccctggaccagcttttctggggactgcgttgtttaaaagaacaaggctatgatccatttaaagaagatctgaaccatctggtgggatacaaaggaaatcatctctaggtggccgagaagatttgattttctttaaaaagacaagaataaggtctggttagggaatgaaaaatgtatacatttcggaacaactccattttatctaaaaaagttcttgtgattgccagtttatttgcagtctcttaatgtatcccccactctttcagccagtacttgagaaaatttttctgaaatatgtcattgaattgtattccagacacagaatacatgataaatactgatattatgggtaatctgctttccatatttacctatgatatttactgtgcagtttgtcattactagcttgcatggagtaggatgcagtcaaatttgccttagtgtttctgttcaaatagagacctgaattcaaatattgtagtttaggttcaaacagagtatggctgttgcaaaatttaccaaatttgttgattacctcttttattaaagaaatgttggggagagggtaatatattgtgacaatttttgcaacttacagggaataggacaggtcattagggtgtatttcccaggtttccaattgagaatctaaaccaagagaagtgagacaaaccatctaatatctgtatcatgctattaataggctgtgatgttgagtttctcacttactctttctgaggtccagggtccttatatgaagagattcatatatatgaagagattcgtctagagcagtggttgtcaaagtgtggtctgggggggcctcaagagcctttcaagggtattctaggtcaaagctgtttttataacactaagacatcatttcactatttatagcttttccttttttttatttgagaaggagtcttgctctgttgcccacattggagtgcagtggcacgatctcagctcattgcagcctccgccacctgggttcaagcaattctcctacctcagcttcccgagtagctgggattataggcacccaccaccacacctggctaatttttgtatttttagtggagacggggtttcaccatgttggccaggctggtctggaactcctgagctcaagtgatctgcccatctcagcctcccaaagtgctgggattacaggtatgagccacaacgcccagccatcatttatctttttcactcattttttcatgagtatgcagaggagttttcaagaggctatctggtgtgatattgtaataggctgaatgcaaaagcagatacaagattccagctttcgtctgtcatcagacattgaagagatttggagaaatgtaaagcagcagtactcttctcactaatttttgttgtggttagttagaaaaatggttatttttagtgggttttaatatgtgaaaaaaataaaattagctatttgccaaaaatgtttttatgtgtttatatatacttggttcttgttacttgcaaatgattaataaaaattttaagaaatt

SEQ ID NO: 363256 - DNA, 1981 bp, Homo sapiens
agattacagacatgagccacatgcccagctgatttgttgttttaaagcaggaaccaattacagttctttttgttttacactagaattttctagccaagaatttcatggcaaaatatatacacacacacacacgtatatacatttatatatatacatatatatacacacacatgtgtatatataaaaaaatagaattaatctaatttttgtttctgttttccagtgaaacctgggaagaatgtgctcaaagggaaacctgggaagaagcagctcttcacctgaaaaatgttcactttgcctcagttgtgaattctttcattgagaaggagaattaccattatgttactatattaatgaaaggagaagtggatgtgactcatgattcagaaccaaagaatgtagagcctgaaaaaaatgaaagttgggagtgggttccttgggaagaactacctcccctggaccagcttttctggggactgcgttgtttaaaagaacaaggctatgatccatttaaagaagatctgaaccatctggtgggatacaaaggaaatcatctctaggtggccgagaagatttgattttctttaaaaagacaagaataaggtctggttagggaatgaaaaatgtatacatttcggaacaactccattttatctaaaaaagttcttgtgattgccagtttatttgcagtctcttaatgtatcccccactctttcagccagtacttgagaaaatttttctgaaatatgtcattgaattgtattccagacacagaatacatgataaatactgatattatgggtaatctgctttccatatttacctatgatatttactgtgcagtttgtcattactagcttgcatggagtaggatgcagtcaaatttgccttagtgtttctgttcaaatagagacctgaattcaaatattgtagtttaggttcaaacagagtatggctgttgcaaaatttaccaaatttgttgattacctcttttattaaagaaatgttggggagagggtaatatattgtgacaatttttgcaacttacagggaataggacaggtcattagggtgtatttcccaggtttccaattgagaatctaaaccaagagaagtgagacaaaccatctaatatctgtatcatgctattaataggctgtgatgttgagtttctcacttactctttctgaggtccagggtccttatatgaagagattcatatatatgaagagattcgtctagagcagtggttgtcaaagtgtggtctgggggggcctcaagagcctttcaagggtattctaggtcaaagctgtttttataacactaagacatcatttcactatttatagcttttccttttttttatttgagaaggagtcttgctctgttgcccacattggagtgcagtggcacgatctcagctcattgcagcctccgccacctgggttcaagcaattctcctacctcagcttcccgagtagctgggattataggcacccaccaccacacctggctaatttttgtatttttagtggagacggggtttcaccatgttggccaggctggtctggaactcctgagctcaagtgatctgcccatctcagcctcccaaagtgctgggattacaggtatgagccacaacgcccagccatcatttatctttttcactcattttttcatgagtatgcagaggagttttcaagaggctatctggtgtgatattgtaataggctgaatgcaaaagcagatacaagattccagctttcgtctgtcatcagacattgaagagatttggagaaatgtaaagcagcagtactcttctcactaatttttgttgtggttagttagaaaaatggttatttttagtgggttttaatatgtgaaaaaaataaaattagctatttgccaaaaatgtttttatgtgtttatatatacttggttcttgttacttgcaaatgattaataaaaattttaagaaatt

SEQ ID NO: 363257 - DNA, 2043 bp, Homo sapiens
attccccaacctgatagccctccgcgacgcattacgcaccgcggacagctggagaggccgaggcgctctcgctttgatttcggcgcctccgccctcgcggggagagattggctgcggccgcgggacggggtagtgagcgcgtcacttcctgccgctgccaggcgcgtcctcccgcgcgctatgacggccagcgcacagccgcgcgggcggcggccaggagtcggagtcggagtcgtggtgaccagctgcaagcatccgcgttgcgtcctcctggggaagaggaaaggctcggttggagctggcagtttccaactccctggaggtcatctggagttcggtgaaacctgggaagaatgtgctcaaagggaaacctgggaagaagcagctcttcacctgaaaaatgttcactttgcctcagttgtgaattctttcattgagaaggagaattaccattatgttactatattaatgaaaggagaagtggatgtgactcatgattcagaaccaaagaatgtagagcctgaaaaaaatgaaagttgggagtgggttccttgggaagaactacctcccctggaccagcttttctggggactgcgttgtttaaaagaacaaggctatgatccatttaaagaagatctgaaccatctggtgggatacaaaggaaatcatctctaggtggccgagaagatttgattttctttaaaaagacaagaataaggtctggttagggaatgaaaaatgtatacatttcggaacaactccattttatctaaaaaagttcttgtgattgccagtttatttgcagtctcttaatgtatcccccactctttcagccagtacttgagaaaatttttctgaaatatgtcattgaattgtattccagacacagaatacatgataaatactgatattatgggtaatctgctttccatatttacctatgatatttactgtgcagtttgtcattactagcttgcatggagtaggatgcagtcaaatttgccttagtgtttctgttcaaatagagacctgaattcaaatattgtagtttaggttcaaacagagtatggctgttgcaaaatttaccaaatttgttgattacctcttttattaaagaaatgttggggagagggtaatatattgtgacaatttttgcaacttacagggaataggacaggtcattagggtgtatttcccaggtttccaattgagaatctaaaccaagagaagtgagacaaaccatctaatatctgtatcatgctattaataggctgtgatgttgagtttctcacttactctttctgaggtccagggtccttatatgaagagattcatatatatgaagagattcgtctagagcagtggttgtcaaagtgtggtctgggggggcctcaagagcctttcaagggtattctaggtcaaagctgtttttataacactaagacatcatttcactatttatagcttttccttttttttatttgagaaggagtcttgctctgttgcccacattggagtgcagtggcacgatctcagctcattgcagcctccgccacctgggttcaagcaattctcctacctcagcttcccgagtagctgggattataggcacccaccaccacacctggctaatttttgtatttttagtggagacggggtttcaccatgttggccaggctggtctggaactcctgagctcaagtgatctgcccatctcagcctcccaaagtgctgggattacaggtatgagccacaacgcccagccatcatttatctttttcactcattttttcatgagtatgcagaggagttttcaagaggctatctggtgtatagcggtggtatcctgataccaccaagggaaggcgatagttgggattctaaggggctctgaggtttctggaatggctaacagcctgaatactggtgtcattaagcatgtaggaatacggtggtatggtggtatggggtatagggtggtatagctccattattgattggcttcccggtactggtgcaccaggtcactgacatctgtacctt

SEQ ID NO: 363258 - DNA, 233 bp, Homo sapiens
aagaagcagctcttcacctgaaaaatgttcactttgcctcagttgtgaattctttcattgagaaggagaattaccattatgttactatattaatgaaaggagaagtggatgtgactcatgattcagaaccaaagaatgtagagcctgaaaaaaatgaaagtaagagaattatatataatcatgcatttttctttcaggagagcaagtggtctggaggaatattacagtatgtt

SEQ ID NO: 363259 - DNA, 2386 bp, Homo sapiens
attccccaacctgatagccctccgcgacgcattacgcaccgcggacagctggagaggccgaggcgctctcgctttgatttcggcgcctccgccctcgcggggagagattggctgcggccgcgggacggggtagtgagcgcgtcacttcctgccgctgccaggcgcgtcctcccgcgcgctatgacggccagcgcacagccgcgcgggcggcggccaggagtcggagtcggagtcgtggtgaccagctgcaagcatccgcgttgcgtcctcctggggaagaggaaaggctcggttggagctggcagtttccaactccctggaggtcatctggagttcggtgaaacctgggaagaatgtgctcaaagggaaacctgggaagaagcagctcttcacctgaaaaatgttcactttgcctcagttgtgaattctttcattgagaaggagaattaccattatgttactatattaatgaaaggagaagtggatgtgactcatgattcagaaccaaagaatgtagagcctgaaaaaaatgaaagttgggagtgggttccttgggaagaactacctcccctggaccagcttttctggggactgcgttgtttaaaagaacaaggctatgatccatttaaagaagatctgaaccatctggtgggatacaaaggaaatcatctctaggtggccgagaagatttgattttctttaaaaagacaagaataaggtctggttagggaatgaaaaatgtatacatttcggaacaactccattttatctaaaaaagttcttgtgattgccagtttatttgcagtctcttaatgtatcccccactctttcagccagtacttgagaaaatttttctgaaatatgtcattgaattgtattccagacacagaatacatgataaatactgatattatgggtaatctgctttccatatttacctatgatatttactgtgcagtttgtcattactagcttgcatggagtaggatgcagtcaaatttgccttagtgtttctgttcaaatagagacctgaattcaaatattgtagtttaggttcaaacagagtatggctgttgcaaaatttaccaaatttgttgattacctcttttattaaagaaatgttggggagagggtaatatattgtgacaatttttgcaacttacagggaataggacaggtcattagggtgtatttcccaggtttccaattgagaatctaaaccaagagaagtgagacaaaccatctaatatctgtatcatgctattaataggctgtgatgttgagtttctcacttactctttctgaggtccagggtccttatatgaagagattcatatatatgaagagattcgtctagagcagtggttgtcaaagtgtggtctgggggggcctcaagagcctttcaagggtattctaggtcaaagctgtttttataacactaagacatcatttcactatttatagcttttccttttttttatttgagaaggagtcttgctctgttgcccacattggagtgcagtggcacgatctcagctcattgcagcctccgccacctgggttcaagcaattctcctacctcagcttcccgagtagctgggattataggcacccaccaccacacctggctaatttttgtatttttagtggagacggggtttcaccatgttggccaggctggtctggaactcctgagctcaagtgatctgcccatctcagcctcccaaagtgctgggattacaggtatgagccacaacgcccagccatcatttatctttttcactcattttttcatgagtatgcagaggagttttcaagaggctatctggtgtgatattgtaataggctgaatgcaaaagcagatacaagattccagctttcgtctgtcatcagacattgaagagatttggagaaatgtaaagcagcagtactcttctcactaatttttgttgtggttagttagaaaaatggttatttttagtgggttttaatatgtgaaaaaaataaaattagctatttgccaaaaatgtttttatgtgtttatatatacttggttcttgttacttgcaaatgattaataaaaattttaagaaattaaaaacaaaaaaacacaaaaaacaaaaaaaaacaaacaacaaacaagaagaaaaagaaagagagaagaaaaaagaaataaaaaaaagagagaagagaagaggcaccgaaaagagacagaacaacaagaaagaaagcccaggagtaaaacataagcaaacagaggagagagacataagggcgaaaaagaggtagacaaacaagcgtaatagaggaacggacaagaaaaggaaataggagagcagacagcaaagaaagaaagaagagaggggagaaggagaaagagacagct

SEQ ID NO: 363260 - DNA, 231 bp, Homo sapiens
gtagttaatgttacaaaagaaaacacttattctttcacatagctcttatacagactgaaaagtctaggaagaatgatgccaggaagatgctttgcatgattatttaaaaagatgtcattattaagtaaaaattgtaaagtgcagaagagtatatagtacactattttgtgtgagaaaaagcaagattacaaatataatcatgtatcctctgatattttcaagaagaaagaa

SEQ ID NO: 363261 - DNA, 824 bp, Homo sapiens
aatacaaaagattagccgagtgtggtgtctcgtgcctgtgtgtgtgtgtgtatgtgcatgtgtatatatgtgtacacacacacacacacgttgttctgccttgcacagcccagtgacaaccttggccccacccttgtccctctgatccattcaagtcaggaatcttggttgtgttttggaggctgtggggtcccaggttcatccatgatacaggttggtcgccaactggtagtgatgtgaatggcgaactagccatcctttagggaccagctcaaatgctgttacctcccagaaatcttccctggttcattctggccacctctgtctcaacagccctgccttgcccgttgttctccctgacatggtccccaaggggtctttctgacatccagagctgaccccatctctgctgacagcatcccatgggtccctagcatgttaggacaggtccagctgccaccatctggccttccagggctcttccccaagctgtgtggcctcatggacctccaccccaccccatctcctcccttctcttgctgccatcctcgggatgggacgcatccctcatcgtgccacgttctctcaagcctccctggctgtgcacgtgtcctttctttttcccttagaacttccctgtccttggccaggcacagtggctcacgcccgtaatcccagcactttgggaggccgagaagggcagatcatgaggtcaggatttcaagaccagcctggccaacatggtgaaaccccatctctactaaagatacaaaaaattacccaggtgtggtggcgcacgcctgtaatcccagctacttgggagg

SEQ ID NO: 363262 - DNA, 374 bp, Homo sapiens
taacaggacatttcttttccaacccttcttttcttttcttttttcatcaatctgaagtatcctgggacgctctttggcctggcacatgggtaggtaggcatattgtcaaagattgagctgcagtttttcaatttgtgacttccctgataactacttcctctagaagtccccagaaatgaaaatgggagtgtgtgtccaggcacaattgcttctcccagtcttcctggggatgttccaatcttgtcaaccagttttcagttttgtttcagagtattgactcaagtaattaaatcatcaataatattagacttccctttttcctttttaatttttctttctctattattctttttcttcactatccaccccaaccc

SEQ ID NO: 363263 - DNA, 210 bp, Homo sapiens
tggccggcaggcggcccatggactattactcagtcccaaaaacggatggacacagggcagcagggccgacaggcggcccatgaactattagccatgaaaacggatcaaaaacagatggacatggggcagcgcggctggcagacagcccataaactattactcagccccaaaaacgaatggacatggggcagatggactattttactcagc

SEQ ID NO: 363264 - DNA, 780 bp, Homo sapiens
ctttgatggagtcttccaagcgcggtttctgggtcaaaggacagatccatgtgcttggtccgccttggtgtccagtttgcggttttagctgcggggcgtctctgttgaacacatattgtggctttagtaggatctggccagtgagttgccataactgacgtttcccctaccctccctttagagaagagagaacagagctgaggcctgggaacctaacccctcagtgttactgatttctttcatggaagcccttgtgggaggtgtcatcgtaaagctaacatcctctctctgtttggaatttcagcaaagctctgcaggaatattctcagagcttcatcgtgtcactcgtcctggggaaggatgtgattcccaggctcagtgtgaccaacttggaagatctgaagagaagaatcttgcgagtggtcgcgcactgcaataaacccaaggtaagcgggtgccttgttgagagggtcagcaggacacggggcctgtccctgagatcctgtggagagccgggaggaattgcaccctcagtgcagggcactctatgctgttgctggaagttctccttccaccatctgatcagattctgggctaggactctgtgatgtctaagaaagcaaatggctgcagcaagtgcgggaaatgtcacagggaggaaacaggatctgggctgggagcagtggtgtatgcctggaatcccagcacctcaggaggccaaggcaggaggatcccttgaggccaacctgggcaacacaacaagaccctgtctctattcta

SEQ ID NO: 363265 - DNA, 2862 bp, Homo sapiens
atgcgcaggtccccgccctcgctgcgtttgcgcttgagcgccgataatttggtggcggcgtccggagggtgctggtttgttctcggtgaacggcgcgcggggtctctcctgagtgcgagctacgggaccttcgccatgccggggatggtactcttcggccggcgctgggccatcgccagcgacgacttggtcttcccagggttcttcgagctggtcgtgcgagtgctgtggtggattggcattctgacgttgtatctcatgcacagaggaaagctggactgtgctggtggagccttgctcagcagttacttgatcgtcctcatgattctcctggcagttgtcatatgtactgtgtcagccatcatgtgtgtcagcatgagaggaacgatttgtaaccctggaccgcggaagtctatgtctaagctgctttacatccgcctggcgctgttttttccagagatggtctgggcctctctgggggctgcctgggtggcagatggtgttcagtgcgacaggacagttgtaaacggcatcatcgcaaccgtcgtggtcagttggatcatcatcgctgccacagtggtttccattatcattgtctttgaccctcttggggggaaaatggctccatattcctctgccggccccagccacctggatagtcatgattcaagccagttacttaatggcctcaagacagcagctacaagcgtgtgggaaaccagaatcaagctcttgtgctgttgcattgggaaagacgaccatactcgggttgctttttcgagtacggcagagcttttctcaacctacttttcagacacagatctggtgcccagcgacattgcggcgggcctcgccctgcttcatcagcaacaggacaatatcaggaacaaccaagagcctgcccaggtggtctgccatgccccagggagctcccaggaagctgatctggatgcagaattagaaaactgccatcattacatgcagtttgcagcagcggcctatgggtggcccctctacatctacagaaaccccctcacggggctgtgcaggattggtggtgactgctgcagaagcagaaccacagactatgacttggtcggaggcgatcagctcaactgtcacttcggctccatcctgcacaccacagggctgcagtacagggacttcatccacgtcagcttccatgacaaggtttacgagctgccgtttttagtggctctggatcacaggaaagagtctgttgtggtcgctgtgagggggaccatgtctctgcaggatgtccttacggacctgtcagcggagagtgaggtgctggacgtggagtgtgaggtgcaggaccgcctggcacacaagggtatttctcaagctgccagatacgtttaccaacgactcatcaacgacgggattttgagccaagccttcagcattgctcctgagtaccggctggtcatagtgggccacagcctcgggggcggggcggccgccctgctggccaccatgctcagagccgcctacccgcaggtcaggtgctacgccttctccccaccccgggggctgtggagcaaagctctgcaggaatattctcagagcttcatcgtgtcactcgtcctggggaaggatgtgattcccaggctcagtgtgaccaacttggaagatctgaagagaagaatcttgcgagtggtcgcgcactgcaataaacccaagtacaagatcttgctgcacggtttgtggtacgaactgtttggaggaaaccccaacaacttgcccacggagctggacgggggcgaccaggaagtcctgacacagcctcttctgggggagcagagcctactgacgcgctggtccccggcctacagcttctccagcgactccccactggactcttctcccaagtacccccctctctaccctcccggcaggatcatccacctgcaggaggagggcgcctcggggcggtttggctgctgctctgctgctcactatagcgccaagtggtcacacgaagcggaattcagcaaaatactcataggtccgaagatgctcaccgaccacatgccagacatcctgatgcgggccttggacagcgtggtctccgacagagcggcctgcgtctcctgtccagcacaaggggtctccagtgtggacgtggcctgaccagggccactggaaactgtcccaggaacgatggactcacgcttttgtccttaaactgacttaccatccgaggagttcccatgacgccaaaacagcgaatgtccatcaacaggaatcggatgggaacagaattccatggtctcaatgacttaagtttatgggaagtcattgtggccataatggtagcagaagtagcgagcacgctcaggtgataggacgactcctgagacccagcgaccgtggagacagcctcgggaagccctggcccgtggatggatcccttggctgtctgaggactgctccagaagtgcgggaatccagggcccacccagaagaccgtgaacagttccttagcctcccacccccaaggcagctcttttcatccaactcagtttacaggcgtggtttgtttttcaaactgggcttcctggatgtacaaatggaactgtggtgagggtgcgggctggggttttctcctgggcgtcaccaagggcagccctgggctctggctggggatgaagacgaaacccgatcgggaaagtaagtggagcccccggccccgccgagccacagccccccaactgcctattcccactgcccagttgtttgtccacatcaggagttgctgattgaattcttgctactcttctggctctggggtcggccagtggattcaggagttgaaacaataaagcgcgcgtcacgata

SEQ ID NO: 363266 - DNA, 3090 bp, Homo sapiens
atgcgcaggtccccgccctcgctgcgtttgcgcttgagcgccgataatttggtggcggcgtccggagggtgctggtttgttctcggtgaacggcgcgcggggtctctcctgagtgcgagctacgggaccttcgccatgccggggatggtactcttcggccggcgctgggccatcgccagcgacgacttggtcttcccagggttcttcgagctggtcgtgcgagtgctgtgagacagggtttcaccatgttgatcaggatggtctcgatctcctgaccttgtgatccgcccacctcaccctcccaaagtgctgtgattacaggtggattggcattctgacgttgtatctcatgcacagaggaaagctggactgtgctggtggagccttgctcagcagttacttgatcgtcctcatgattctcctggcagttgtcatatgtactgtgtcagccatcatgtgtgtcagcatgagagtttttaatataatcacagagttgtgcagccatcaccatcatcaagtttataccattttcttcactcctgaaagaaatcctgtaccaggcgggacacagtggctcacacctgtaatcccagcactttgggaagccgaggaacgatttgtaaccctggaccgcggaagtctatgtctaagctgctttacatccgcctggcgctgttttttccagagatggtctgggcctctctgggggctgcctgggtggcagatggtgttcagtgcgacaggacagttgtaaacggcatcatcgcaaccgtcgtggtcagttggatcatcatcgctgccacagtggtttccattatcattgtctttgaccctcttggggggaaaatggctccatattcctctgccggccccagccacctggatagtcatgattcaagccagttacttaatggcctcaagacagcagctacaagcgtgtgggaaaccagaatcaagctcttgtgctgttgcattgggaaagacgaccatactcgggttgctttttcgagtacggcagagcttttctcaacctacttttcagacacagatctggtgcccagcgacattgcggcgggcctcgccctgcttcatcagcaacaggacaatatcaggaacaaccaagagcctgcccaggtggtctgccatgccccagggagctcccaggaagctgatctggatgcagaattagaaaactgccatcattacatgcagtttgcagcagcggcctatgggtggcccctctacatctacagaaaccccctcacggggctgtgcaggattggtggtgactgctgcagaagcagaaccacagactatgacttggtcggaggcgatcagctcaactgtcacttcggctccatcctgcacaccacagggctgcagtacagggacttcatccacgtcagcttccatgacaaggtttacgagctgccgtttttagtggctctggatcacaggaaagagtctgttgtggtcgctgtgagggggaccatgtctctgcaggatgtccttacggacctgtcagcggagagtgaggtgctggacgtggagtgtgaggtgcaggaccgcctggcacacaagggtatttctcaagctgccagatacgtttaccaacgactcatcaacgacgggattttgagccaagccttcagcattgctcctgagtaccggctggtcatagtgggccacagcctcgggggcggggcggccgccctgctggccaccatgctcagagccgcctacccgcaggtcaggtgctacgccttctccccaccccgggggctgtggagcaaagctctgcaggaatattctcagagcttcatcgtgtcactcgtcctggggaaggatgtgattcccaggctcagtgtgaccaacttggaagatctgaagagaagaatcttgcgagtggtcgcgcactgcaataaacccaagtacaagatcttgctgcacggtttgtggtacgaactgtttggaggaaaccccaacaacttgcccacggagctggacgggggcgaccaggaagtcctgacacagcctcttctgggggagcagagcctactgacgcgctggtccccggcctacagcttctccagcgactccccactggactcttctcccaagtacccccctctctaccctcccggcaggatcatccacctgcaggaggagggcgcctcggggcggtttggctgctgctctgctgctcactatagcgccaagtggtcacacgaagcggaattcagcaaaatactcataggtccgaagatgctcaccgaccacatgccagacatcctgatgcgggccttggacagcgtggtctccgacagagcggcctgcgtctcctgtccagcacaaggggtctccagtgtggacgtggcctgaccagggccactggaaactgtcccaggaacgatggactcacgcttttgtccttaaactgacttaccatccgaggagttcccatgacgccaaaacagcgaatgtccatcaacaggaatcggatgggaacagaattccatggtctcaatgacttaagtttatgggaagtcattgtggccataatggtagcagaagtagcgagcacgctcaggtgataggacgactcctgagacccagcgaccgtggagacagcctcgggaagccctggcccgtggatggatcccttggctgtctgaggactgctccagaagtgcgggaatccagggcccacccagaagaccgtgaacagttccttagcctcccacccccaaggcagctcttttcatccaactcagtttacaggcgtggtttgtttttcaaactgggcttcctggatgtacaaatggaactgtggtgagggtgcgggctggggttttctcctgggcgtcaccaagggcagccctgggctctggctggggatgaagacgaaacccgatcgggaaagtaagtggagcccccggccccgccgagccacagccccccaactgcctattcccactgcccagttgtttgtccacatcaggagttgctgattgaattcttgctactcttctggctctggggtcggccagtggattcaggagttgaaacaataaagcgcgcgtcacgata

SEQ ID NO: 363267 - DNA, 2308 bp, Homo sapiens
atgcgcaggtccccgccctcgctgcgtttgcgcttgagcgccgataatttggtggcggcgtccggagggtgctggtttgttctcggtgaacggcgcgcggggtctctcctgagtgcgagctacgggaccttcgccatgccggggatggtactcttcggccggcgctgggccatcgccagcgacgacttggtcttcccagggttcttcgagctggtcgtgcgagtgctgtggtggattggcattctgacgttgtatctcatgcacagaggaaagctggactgtgctggtggagccttgctcagcagttacttgatcgtcctcatgattctcctggcagttgtcatatgtactgtgtcagccatcatgtgtgtcagcatgagaggaagctgatctggatgcagaattagaaaactgccatcattacatgcagtttgcagcagcggcctatgggtggcccctctacatctacagaaaccccctcacggggctgtgcaggattggtggtgactgctgcagaagcagaaccacagactatgacttggtcggaggcgatcagctcaactgtcacttcggctccatcctgcacaccacagggctgcagtacagggacttcatccacgtcagcttccatgacaaggtttacgagctgccgtttttagtggctctggatcacaggaaagagtctgttgtggtcgctgtgagggggaccatgtctctgcaggatgtccttacggacctgtcagcggagagtgaggtgctggacgtggagtgtgaggtgcaggaccgcctggcacacaagggtatttctcaagctgccagatacgtttaccaacgactcatcaacgacgggattttgagccaagccttcagcattgctcctgagtaccggctggtcatagtgggccacagcctcgggggcggggcggccgccctgctggccaccatgctcagagccgcctacccgcaggtcaggtgctacgccttctccccaccccgggggctgtggagcaaagctctgcaggaatattctcagagcttcatcgtgtcactcgtcctggggaaggatgtgattcccaggctcagtgtgaccaacttggaagatctgaagagaagaatcttgcgagtggtcgcgcactgcaataaacccaagtacaagatcttgctgcacggtttgtggtacgaactgtttggaggaaaccccaacaacttgcccacggagctggacgggggcgaccaggaagtcctgacacagcctcttctgggggagcagagcctactgacgcgctggtccccggcctacagcttctccagcgactccccactggactcttctcccaagtacccccctctctaccctcccggcaggatcatccacctgcaggaggagggcgcctcggggcggtttggctgctgctctgctgctcactatagcgccaagtggtcacacgaagcggaattcagcaaaatactcataggtccgaagatgctcaccgaccacatgccagacatcctgatgcgggccttggacagcgtggtctccgacagagcggcctgcgtctcctgtccagcacaaggggtctccagtgtggacgtggcctgaccagggccactggaaactgtcccaggaacgatggactcacgcttttgtccttaaactgacttaccatccgaggagttcccatgacgccaaaacagcgaatgtccatcaacaggaatcggatgggaacagaattccatggtctcaatgacttaagtttatgggaagtcattgtggccataatggtagcagaagtagcgagcacgctcaggtgataggacgactcctgagacccagcgaccgtggagacagcctcgggaagccctggcccgtggatggatcccttggctgtctgaggactgctccagaagtgcgggaatccagggcccacccagaagaccgtgaacagttccttagcctcccacccccaaggcagctcttttcatccaactcagtttacaggcgtggtttgtttttcaaactgggcttcctggatgtacaaatggaactgtggtgagggtgcgggctggggttttctcctgggcgtcaccaagggcagccctgggctctggctggggatgaagacgaaacccgatcgggaaagtaagtggagcccccggccccgccgagccacagccccccaactgcctattcccactgcccagttgtttgtccacatcaggagttgctgattgaattcttgctactcttctggctctggggtcggccagtggattcaggagttgaaacaataaagcgcgcgtcacgata

SEQ ID NO: 363268 - DNA, 2509 bp, Homo sapiens
atgcgcaggtccccgccctcgctgcgtttgcgcttgagcgccgataatttggtggcggcgtccggagggtgctggtttgttctcggtgaacggcgcgcggggtctctcctgagtgcgagctacgggaccttcgccatgccggggatggtactcttcggccggcgctgggccatcgccagcgacgacttggtcttcccagggttcttcgagctggtcgtgcgagtgctgtggtggattggcattctgacgttgtatctcatgcacagaggaaagctggactgtgctggtggagccttgctcagcagttacttgatcgtcctcatgattctcctggcagttgtcatatgtactgtgtcagccatcatgtgtgtcagcatgagaggaacgatttgtaaccctggaccgcggaagtctatgtctaagctgctttacatccgcctggcgctgttttttccagagatggtctgggcctctctgggggctgcctgggtggcagatggtgttcagtgcgacaggacagttgtaaacggcatcatcgcaaccgtcgtggtcagttggatcatcatcgctgccacagtggtttccattatcattgtctttgaccctcttggggggaaaatggctccatattcctctgccggccccagccacctggatagtcatgattcaagccagttacttaatggcctcaagacagcagctacaagcgtgtgggaaaccagaatcaagctcttgtgctgttgcattgggaaagacgaccatactcgggttgctttttcgagtacggcagagcttttctcaacctacttttcagacacagatctggtgcccagcgacattgcggcgggcctcgccctgcttcatcagcaacaggacaatatcaggaacaaccaagagcctgcccaggtggtctgccatgccccagggagctcccaggaagctgatctggatgcagaattagaaaactgccatcattacatgcagtttgcagcagcggcctatgggtggcccctctacatctacagaaaccccctcacggggctgtgcaggattggtggtgactgctgcagaagcagaaccacagactatgacttggtcggaggcgatcagctcaactgtcacttcggctccatcctgcacaccacagggctgcagtacagggacttcatccacgtcagcttccatgacaaggtttacgagctgccgtttttagtggctctggatcacaggaaagagtctgttgtggtcgctgtgagggggaccatgtctctgcaggatgtccttacggacctgtcagcggagagtgaggtgctggacgtggagtgtgaggtgcaggaccgcctggcacacaagggtatttctcaagctgccagatacgtttaccaacgactcatcaacgacgggattttgagccaagccttcagcattgctcctgagtaccggctggtcatagtgggccacagcctcgggggcggggcggccgccctgctggccaccatgctcagagccgcctacccgcaggtcaggtgctacgccttctccccaccccgggggctgtggagcaaagctctgcaggaatattctcagagcttcatcgtgtcactcgtcctggggaaggatgtgattcccaggctcagtgtgaccaacttggaagatctgaagagaagaatcttgcgagtggtcgcgcactgcaataaacccaagtacaagatcttgctgcacggtttgtggtacgaactgtttggaggaaaccccaacaacttgtccagcacaaggggtctccagtgtggacgtggcctgaccagggccactggaaactgtcccaggaacgatggactcacgcttttgtccttaaactgacttaccatccgaggagttcccatgacgccaaaacagcgaatgtccatcaacaggaatcggatgggaacagaattccatggtctcaatgacttaagtttatgggaagtcattgtggccataatggtagcagaagtagcgagcacgctcaggtgataggacgactcctgagacccagcgaccgtggagacagcctcgggaagccctggcccgtggatggatcccttggctgtctgaggactgctccagaagtgcgggaatccagggcccacccagaagaccgtgaacagttccttagcctcccacccccaaggcagctcttttcatccaactcagtttacaggcgtggtttgtttttcaaactgggcttcctggatgtacaaatggaactgtggtgagggtgcgggctggggttttctcctgggcgtcaccaagggcagccctgggctctggctggggatgaagacgaaacccgatcgggaaagtaagtggagcccccggccccgccgagccacagccccccaactgcctattcccactgcccagttgtttgtccacatcaggagttgctgattgaattcttgctactcttctggctctggggtcggccagtggattcaggagttgaaacaataaagcgcgcgtcacgata

SEQ ID NO: 363269 - DNA, 1986 bp, Homo sapiens
ctggacatggttgcacacacctgtaatcacagctactcgggaggttgaggcaggagaatcgcttgaaccagggagttggaggttgcagtgagtggagatcacaccattgccctgcagcctaagcaacagagcaagattctgtctcaaaaagaaaaaaaaaaaagaaaccaaaacaaaacaaaaaacaactgcagaagcagaaccacagactatgacttggtcggaggcgatcagctcaactgtcacttcggctccatcctgcacaccacagggctgcagtacagggacttcatccacgtcagcttccatgacaaggtttacgagctgccgtttttagtggctctggatcacaggaaagagtctgttgtggtcgctgtgagggggaccatgtctctgcaggatgtccttacggacctgtcagcggagagtgaggtgctggacgtggagtgtgaggtgcaggaccgcctggcacacaagggtatttctcaagctgccagatacgtttaccaacgactcatcaacgacgggattttgagccaagccttcagcattgctcctgagtaccggctggtcatagtgggccacagcctcgggggcggggcggccgccctgctggccaccatgctcagagccgcctacccgcaggtcaggtgctacgccttctccccaccccgggggctgtggagcaaagctctgcaggaatattctcagagcttcatcgtgtcactcgtcctggggaaggatgtgattcccaggctcagtgtgaccaacttggaagatctgaagagaagaatcttgcgagtggtcgcgcactgcaataaacccaagtacaagatcttgctgcacggtttgtggtacgaactgtttggaggaaaccccaacaacttgcccacggagctggacgggggcgaccaggaagtcctgacacagcctcttctgggggagcagagcctactgacgcgctggtccccggcctacagcttctccagcgactccccactggactcttctcccaagtacccccctctctaccctcccggcaggatcatccacctgcaggaggagggcgcctcggggcggtttggctgctgctctgctgctcactatagcgccaagtggtcacacgaagcggaattcagcaaaatactcataggtccgaagatgctcaccgaccacatgccagacatcctgatgcgggccttggacagcgtggtctccgacagagcggcctgcgtctcctgtccagcacaaggggtctccagtgtggacgtggcctgaccagggccactggaaactgtcccaggaacgatggactcacgcttttgtccttaaactgacttaccatccgaggagttcccatgacgccaaaacagcgaatgtccatcaacaggaatcggatgggaacagaattccatggtctcaatgacttaagtttatgggaagtcattgtggccataatggtagcagaagtagcgagcacgctcaggtgataggacgactcctgagacccagcgaccgtggagacagcctcgggaagccctggcccgtggatggatcccttggctgtctgaggactgctccagaagtgcgggaatccagggcccacccagaagaccgtgaacagttccttagcctcccacccccaaggcagctcttttcatccaactcagtttacaggcgtggtttgtttttcaaactgggcttcctggatgtacaaatggaactgtggtgagggtgcgggctggggttttctcctgggcgtcaccaagggcagccctgggctctggctggggatgaagacgaaacccgatcgggaaagtaagtggagcccccggccccgccgagccacagccccccaactgcctattcccactgcccagttgtttgtccacatcaggagttgctgattgaattcttgctactcttctggctctggggtcggccagtggattcaggagttgaaacaataaagcgcgcgtcacgata

SEQ ID NO: 363270 - DNA, 1897 bp, Homo sapiens
gcacaggttctgtgccacggggtccttagaatacgtgtgtgtgatggggaaggcgcagggcgtgtcttaggcacactccatggtcccctccacccttcacgcctggcccagagctggtcgtgccatcagggccctcaggagccaccgctgggtttccctctttagtttagggttcagtcccaggaccgaactaggagatggtgccatccccgccatcctccacagaagtgtcaggagcagggaccacctgtcattctcccaccctgcccatcacaggctgacggccgcttctgcaacgccctttttacaggatgtccttacggacctgtcagcggagagtgaggtgctggacgtggagtgtgaggtgcaggaccgcctggcacacaagggtatttctcaagctgccagatacgtttaccaacgactcatcaacgacgggattttgagccaagccttcagcattgctcctgagtaccggctggtcatagtgggccacagcctcgggggcggggcggccgccctgctggccaccatgctcagagccgcctacccgcaggtcaggtgctacgccttctccccaccccgggggctgtggagcaaagctctgcaggaatattctcagagcttcatcgtgtcactcgtcctggggaaggatgtgattcccaggctcagtgtgaccaacttggaagatctgaagagaagaatcttgcgagtggtcgcgcactgcaataaacccaagtacaagatcttgctgcacggtttgtggtacgaactgtttggaggaaaccccaacaacttgcccacggagctggacgggggcgaccaggaagtcctgacacagcctcttctgggggagcagagcctactgacgcgctggtccccggcctacagcttctccagcgactccccactggactcttctcccaagtacccccctctctaccctcccggcaggatcatccacctgcaggaggagggcgcctcggggcggtttggctgctgctctgctgctcactatagcgccaagtggtcacacgaagcggaattcagcaaaatactcataggtccgaagatgctcaccgaccacatgccagacatcctgatgcgggccttggacagcgtggtctccgacagagcggcctgcgtctcctgtccagcacaaggggtctccagtgtggacgtggcctgaccagggccactggaaactgtcccaggaacgatggactcacgcttttgtccttaaactgacttaccatccgaggagttcccatgacgccaaaacagcgaatgtccatcaacaggaatcggatgggaacagaattccatggtctcaatgacttaagtttatgggaagtcattgtggccataatggtagcagaagtagcgagcacgctcaggtgataggacgactcctgagacccagcgaccgtggagacagcctcgggaagccctggcccgtggatggatcccttggctgtctgaggactgctccagaagtgcgggaatccagggcccacccagaagaccgtgaacagttccttagcctcccacccccaaggcagctcttttcatccaactcagtttacaggcgtggtttgtttttcaaactgggcttcctggatgtacaaatggaactgtggtgagggtgcgggctggggttttctcctgggcgtcaccaagggcagccctgggctctggctggggatgaagacgaaacccgatcgggaaagtaagtggagcccccggccccgccgagccacagccccccaactgcctattcccactgcccagttgtttgtccacatcaggagttgctgattgaattcttgctactcttctggctctggggtcggccagtggattcaggagttgaaacaataaagcgcgcgtcacgata

SEQ ID NO: 363271 - DNA, 1983 bp, Homo sapiens
gcacaggttctgtgccacggggtccttagaatacgtgtgtgtgatggggaaggcgcagggcgtgtcttaggcacactccatggtcccctccacccttcacgcctggcccagagctggtcgtgccatcagggccctcaggagccaccgctgggtttccctctttagtttagggttcagtcccaggaccgaactaggagatggtgccatccccgccatcctccacagaagtgtcaggagcagggaccacctgtcattctcccaccctgcccatcacaggctgacggccgcttctgcaacgccctttttacaggatgtccttacggacctgtcagcggagagtgaggtgctggacgtggagtgtgaggtgcaggaccgcctggcacacaagggtatttctcaagctgccagatacgtttaccaacgactcatcaacgacgggattttgagccaagccttcagcattgctcctgtgagatcttagttaacgtttctttccttgtcctctttggagctgttgtttttacccttcacctcattctgctgtctgtcctctaggagtaccggctggtcatagtgggccacagcctcgggggcggggcggccgccctgctggccaccatgctcagagccgcctacccgcaggtcaggtgctacgccttctccccaccccgggggctgtggagcaaagctctgcaggaatattctcagagcttcatcgtgtcactcgtcctggggaaggatgtgattcccaggctcagtgtgaccaacttggaagatctgaagagaagaatcttgcgagtggtcgcgcactgcaataaacccaagtacaagatcttgctgcacggtttgtggtacgaactgtttggaggaaaccccaacaacttgcccacggagctggacgggggcgaccaggaagtcctgacacagcctcttctgggggagcagagcctactgacgcgctggtccccggcctacagcttctccagcgactccccactggactcttctcccaagtacccccctctctaccctcccggcaggatcatccacctgcaggaggagggcgcctcggggcggtttggctgctgctctgctgctcactatagcgccaagtggtcacacgaagcggaattcagcaaaatactcataggtccgaagatgctcaccgaccacatgccagacatcctgatgcgggccttggacagcgtggtctccgacagagcggcctgcgtctcctgtccagcacaaggggtctccagtgtggacgtggcctgaccagggccactggaaactgtcccaggaacgatggactcacgcttttgtccttaaactgacttaccatccgaggagttcccatgacgccaaaacagcgaatgtccatcaacaggaatcggatgggaacagaattccatggtctcaatgacttaagtttatgggaagtcattgtggccataatggtagcagaagtagcgagcacgctcaggtgataggacgactcctgagacccagcgaccgtggagacagcctcgggaagccctggcccgtggatggatcccttggctgtctgaggactgctccagaagtgcgggaatccagggcccacccagaagaccgtgaacagttccttagcctcccacccccaaggcagctcttttcatccaactcagtttacaggcgtggtttgtttttcaaactgggcttcctggatgtacaaatggaactgtggtgagggtgcgggctggggttttctcctgggcgtcaccaagggcagccctgggctctggctggggatgaagacgaaacccgatcgggaaagtaagtggagcccccggccccgccgagccacagccccccaactgcctattcccactgcccagttgtttgtccacatcaggagttgctgattgaattcttgctactcttctggctctggggtcggccagtggattcaggagttgaaacaataaagcgcgcgtcacgata

SEQ ID NO: 363272 - DNA, 2038 bp, Homo sapiens
atgcgcaggtccccgccctcgctgcgtttgcgcttgagcgccgataatttggtggcggcgtccggagggtgctggtttgttctcggtgaacggcgcgcggggtctctcctgagtgcgagctacgggaccttcgccatgccggggatggtactcttcggccggcgctgggccatcgccagcgacgacttggtcttcccagggttcttcgagctggtcgtgcgagtgctgtggtggattggcattctgacgttgtatctcatgcacagaggaaagctggactgtgctggtggagccttgctcagcagttacttgatcgtcctcatgattctcctggcagttgtcatatgtactgtgtcagccatcatgtgtgtcagcatgagaggaacgatttgtaaccctggaccgcggaagtctatgtctaagctgctttacatccgcctggcgctgttttttccagagatggtctgggcctctctgggggctgcctgggtggcagatggtgttcagtgcgacaggacagttgtaaacggcatcatcgcaaccgtcgtggtcagttggatcatcatcgctgccacagtggtttccattatcattgtctttgaccctcttggggggaaaatggctccatattcctctgccggccccagccacctggatagtcatgattcaagccagttacttaatggcctcaagacagcagctacaagcgtgtgggaaaccagaatcaagctcttgtgctgttgcattgggaaagacgaccatactcgggttgctttttcgagtacggcagagcttttctcaacctacttttcagacacagatctggtgcccagcgacattgcggcgggcctcgccctgcttcatcagcaacaggacaatatcaggaacaaccaagagcctgcccaggtggtctgccatgccccagggagctcccaggaagctgatctggatgcagaattagaaaactgccatcattacatgcagtttgcagcagcggcctatgggtggcccctctacatctacagaaaccccctcacggggctgtgcaggattggtggtgactgctgcagaagcagaaccacagactatgacttggtcggaggcgatcagctcaactgtcacttcggctccatcctgcacaccacagggctgcagtacagggacttcatccacgtcagcttccatgacaaggtttacgagctgccgtttttagtggctctggatcacaggaaagagtctgttgtggtcgctgtgagggggaccatgtctctgcaggatgtccttacggacctgtcagcggagagtgaggtgctggacgtggagtgtgaggtgcaggaccgcctggcacacaagggtatttctcaagctgccagatacgtttaccaacgactcatcaacgacgggattttgagccaagccttcagcattgctcctgagtaccggctggtcatagtgggccacagcctcgggggcggggcggccgccctgctggccaccatgctcagagccgcctacccgcaggtcaggtgctacgccttctccccaccccgggggctgtggagcaaagctctgcaggaatattctcagagcttcatcgtgtcactcgtcctggggaaggatgtgattcccaggctcagtgtgaccaacttggaagatctgaagagaagaatcttgcgagtggtcgcgcactgcaataaacccaaggtaagcgggtgccttgttgagagggtcagcaggacacggggcctgtccctgagatcctgtggagagccgggaggaattgcaccctcagtgcagggcactctatgctgttgctggaagttctccttccaccatctgatcagattctgggctaggactctgtgatgtctaagaaagcaaatggctgcagcaagtgcgggaaatgtcacagggaggaaacaggatctgggctgggagcagtggtgtatgcctggaatcccagcacctcaggaggccaaggcaggaggatcccttgaggccaacctgggcaacacaacaagaccctgtctctattcta

SEQ ID NO: 363273 - DNA, 2168 bp, Homo sapiens
atgcgcaggtccccgccctcgctgcgtttgcgcttgagcgccgataatttggtggcggcgtccggagggtgctggtttgttctcggtgaacggcgcgcggggtctctcctgagtgcgagctacgggaccttcgccatgccggggatggtactcttcggccggcgctgggccatcgccagcgacgacttggtcttcccagggttcttcgagctggtcgtgcgagtgctgtggtggattggcattctgacgttgtatctcatgcacagaggaaagctggactgtgctggtggagccttgctcagcagttacttgatcgtcctcatgattctcctggcagttgtcatatgtactgtgtcagccatcatgtgtgtcagcatgagaggaacgatttgtaaccctggaccgcggaagtctatgtctaagctgctttacatccgcctggcgctgttttttccagagatggtctgggcctctctgggggctgcctgggtggcagatggtgttcagtgcgacaggacagttgtaaacggcatcatcgcaaccgtcgtggtcagttggatcatcatcgctgccacagtggtttccattatcattgtctttgaccctcttggggggaaaatggctccatattcctctgccggccccagccacctggatagtcatgattcaagccagttacttaatggcctcaagacagcagctacaagcgtgtgggaaaccagaatcaagctcttgtgctgttgcattgggaaagacgaccatactcgggttgctttttcgagtacggcagagcttttctcaacctacttttcagacacagatctggtgcccagcgacattgcggcgggcctcgccctgcttcatcagcaacaggacaatatcaggaacaaccaagagcctgcccaggtggtctgccatgccccagggagctcccaggaagctgatctggatgcagaattagaaaactgccatcattacatgcagtttgcagcagcggcctatgggtggcccctctacatctacagaaaccccctcacggggctgtgcaggattggtggtgactgctgcagaagcagaaccacagactatgacttggtcggaggcgatcagctcaactgtcacttcggctccatcctgcacaccacagggctgcagtacagggacttcatccacgtcagcttccatgacaaggtttacgagctgccgtttttagtggctctggatcacaggaaagagtctgttgtggtcgctgtgagggggaccatgtctctgcaggatgtccttacggacctgtcagcggagagtgaggtgctggacgtggagtgtgaggtgcaggaccgcctggcacacaagggtatttctcaagctgccagatacgtttaccaacgactcatcaacgacgggattttgagccaagccttcagcattgctcctgagtaccggctggtcatagtgggccacagcctcgggggcggggcggccgccctgctggccaccatgctcagagccgcctacccgcaggtcaggtgctacgccttctccccaccccgggggctgtggagcaaagctctgcaggaatattctcagagcttcatcgtgtcactcgtcctggggaaggatgtgattcccaggctcagtgtgaccaacttggaagatctgaagagaagaatcttgcgagtggtcgcgcactgcaataaacccaaggtaagcgggtgccttgttgagagggtcagcaggacacggggcctgtccctgagatcctgtggagagccgggaggaattgcaccctcagtgcagggcactctatgctgttgctggaagttctccttccaccatctgatcagattctgggctaggactctgtgatgtctaagaaagcaaatggctgcagcaagtgcgggaaatgtcacagggaggaaacaggatctgggctgggagcagtggtgtatgcctggaatcccagcacctcaggagtgggggcgctgttaggaggcgatcgttacggaggcgctgttacggaggcgctcgttacggaagcgctcgttacggaggcgctcgttacggaagggtgtaacggaggcgctttttacggaagcgctcgttacggagggctagtataggagggtgaaaggaggcgtgtaaggaggcgctcgttacggacgggaccg

SEQ ID NO: 363274 - DNA, 1366 bp, Homo sapiens
tgatctgcccgcctcggcctcccaaagtgcagggattacaggcgtgagccaccgcacccagctgagcaaagctctgcaggaatattctcagagcttcatcgtgtcactcgtcctggggaaggatgtgattcccaggctcagtgtgaccaacttggaagatctgaagagaagaatcttgcgagtggtcgcgcactgcaataaacccaagtacaagatcttgctgcacggtttgtggtacgaactgtttggaggaaaccccaacaacttgcccacggagctggacgggggcgaccaggaagtcctgacacagcctcttctgggggagcagagcctactgacgcgctggtccccggcctacagcttctccagcgactccccactggactcttctcccaagtacccccctctctaccctcccggcaggatcatccacctgcaggaggagggcgcctcggggcggtttggctgctgctctgctgctcactatagcgccaagtggtcacacgaagcggaattcagcaaaatactcataggtccgaagatgctcaccgaccacatgccagacatcctgatgcgggccttggacagcgtggtctccgacagagcggcctgcgtctcctgtccagcacaaggggtctccagtgtggacgtggcctgaccagggccactggaaactgtcccaggaacgatggactcacgcttttgtccttaaactgacttaccatccgaggagttcccatgacgccaaaacagcgaatgtccatcaacaggaatcggatgggaacagaattccatggtctcaatgacttaagtttatgggaagtcattgtggccataatggtagcagaagtagcgagcacgctcaggtgataggacgactcctgagacccagcgaccgtggagacagcctcgggaagccctggcccgtggatggatcccttggctgtctgaggactgctccagaagtgcgggaatccagggcccacccagaagaccgtgaacagttccttagcctcccacccccaaggcagctcttttcatccaactcagtttacaggcgtggtttgtttttcaaactgggcttcctggatgtacaaatggaactgtggtgagggtgcgggctggggttttctcctgggcgtcaccaagggcagccctgggctctggctggggatgaagacgaaacccgatcgggaaagtaagtggagcccccggccccgccgagccacagccccccaactgcctattcccactgcccagttgtttgtccacatcaggagttgctgattgaattcttgctactcttctggctctggggtcggccagtggattcaggagttgaaacaataaagcgcgcgtcacgata

SEQ ID NO: 363275 - DNA, 1570 bp, Homo sapiens
atgcgcaggtccccgccctcgctgcgtttgcgcttgagcgccgataatttggtggcggcgtccggagggtgctggtttgttctcggtgaacggcgcgcggggtctctcctgagtgcgagctacgggaccttcgccatgccggggatggtactcttcggccggcgctgggccatcgccagcgacgacttggtcttcccagggttcttcgagctggtcgtgcgagtgctgtggtggattggcattctgacgttgtatctcatgcacagaggaaagctggactgtgctggtggagccttgctcagcagttacttgatcgtcctcatgattctcctggcagttgtcatatgtactgtgtcagccatcatgtgtgtcagcatgagaggaacgatttgtaaccctggaccgcggaagtctatgtctaagctgctttacatccgcctggcgctgttttttccagagatggtctgggcctctctgggggctgcctgggtggcagatggtgttcagtgcgacaggacagttgtaaacggcatcatcgcaaccgtcgtggtcagttggatcatcatcgctgccacagtggtttccattatcattgtctttgaccctcttggggggaaaatggctccatattcctctgccggccccagccacctggatagtcatgattcaagccagttacttaatggcctcaagacagcagctacaagcgtgtgggaaaccagaatcaagctcttgtgctgttgcattgggaaagacgaccatactcgggttgctttttcgagtacggcagagcttttctcaacctacttttcagacacagatctggtgcccagcgacattgcggcgggcctcgccctgcttcatcagcaacaggacaatatcaggaacaaccaagagcctgcccaggtggtctgccatgccccagggagctcccaggaagctgatctggatgcagaattagaaaactgccatcattacatgcagtttgcagcagcggcctatgggtggcccctctacatctacagaaaccccctcacggggctgtgcaggattggtggtgactgctgcagaagcagaaccacagactatgacttggtcggaggcgatcagctcaactgtcacttcggctccatcctgcacaccacagggctgcagtacagggacttcatccacgtcagcttccatgacaaggtgtggacgctgcagacagcggctcttcacttcttttgggtcctggagctgttagagattctgatggaagttatgaattattcttcccgtaattcatagacacacaaacacacttctaagtcctgtgtactatttcagaggggccacagactctgggggagccacacagatgccctggtgcaggttcagaacccaggtttcacataagatagagacgtcttcatcagagatagcgcgctgtgtttcttacctcgcccttctgttgaggagtgaaatccctcagtattaatgccgcatggccttctgggattcgtatcgtcgtcctgggttgtgagtgccatcagtagtgtagtgtagcaggtctggcactctggggggg

SEQ ID NO: 363276 - DNA, 422 bp, Homo sapiens
gtgtgatggttttactgcccaagagagagcccacactcatgatctgtgactaggcatagagccttgtcctgagccgaggtggctgccacccagcacagctcgccggtgcatctttgctggagtcttccaagcggggtttctgggtcaaagggcagattcctgtgcctggtccgccttggtgtttcgggaggtctcgggtgacagagggtgagtgacagcattctactgattgggtctcgccctcagtacaagatcttgctgcacggtttgtggtacgaactgtttggaggaaaccccaacaacttgcccacggagctggacgggggcgaccaggaagtcctgacacagcctcttctgggggagcagagcctactgacgcgctggtccccggcctacagcttctccagcgactccccactgga

SEQ ID NO: 363277 - DNA, 2953 bp, Homo sapiens
atgcgcaggtccccgccctcgctgcgtttgcgcttgagcgccgataatttggtggcggcgtccggagggtgctggtttgttctcggtgaacggcgcgcggggtctctcctgagtgcgagctacgggaccttcgccatgccggggatggtactcttcggccggcgctgggccatcgccagcgacgacttggtcttcccagggttcttcgagctggtcgtgcgagtgctgtgagacagggtttcaccatgttgatcaggatggtctcgatctcctgaccttgtgatccgcccacctcaccctcccaaagtgctgtgattacaggtggattggcattctgacgttgtatctcatgcacagaggaaagctggactgtgctggtggagccttgctcagcagttacttgatcgtcctcatgattctcctggcagttgtcatatgtactgtgtcagccatcatgtgtgtcagcatgagaggaacgatttgtaaccctggaccgcggaagtctatgtctaagctgctttacatccgcctggcgctgttttttccagagatggtctgggcctctctgggggctgcctgggtggcagatggtgttcagtgcgacaggacagttgtaaacggcatcatcgcaaccgtcgtggtcagttggatcatcatcgctgccacagtggtttccattatcattgtctttgaccctcttggggggaaaatggctccatattcctctgccggccccagccacctggatagtcatgattcaagccagttacttaatggcctcaagacagcagctacaagcgtgtgggaaaccagaatcaagctcttgtgctgttgcattgggaaagacgaccatactcgggttgctttttcgagtacggcagagcttttctcaacctacttttcagacacagatctggtgcccagcgacattgcggcgggcctcgccctgcttcatcagcaacaggacaatatcaggaacaaccaagagcctgcccaggtggtctgccatgccccagggagctcccaggaagctgatctggatgcagaattagaaaactgccatcattacatgcagtttgcagcagcggcctatgggtggcccctctacatctacagaaaccccctcacggggctgtgcaggattggtggtgactgctgcagaagcagaaccacagactatgacttggtcggaggcgatcagctcaactgtcacttcggctccatcctgcacaccacagggctgcagtacagggacttcatccacgtcagcttccatgacaaggtttacgagctgccgtttttagtggctctggatcacaggaaagagtctgttgtggtcgctgtgagggggaccatgtctctgcaggatgtccttacggacctgtcagcggagagtgaggtgctggacgtggagtgtgaggtgcaggaccgcctggcacacaagggtatttctcaagctgccagatacgtttaccaacgactcatcaacgacgggattttgagccaagccttcagcattgctcctgagtaccggctggtcatagtgggccacagcctcgggggcggggcggccgccctgctggccaccatgctcagagccgcctacccgcaggtcaggtgctacgccttctccccaccccgggggctgtggagcaaagctctgcaggaatattctcagagcttcatcgtgtcactcgtcctggggaaggatgtgattcccaggctcagtgtgaccaacttggaagatctgaagagaagaatcttgcgagtggtcgcgcactgcaataaacccaagtacaagatcttgctgcacggtttgtggtacgaactgtttggaggaaaccccaacaacttgcccacggagctggacgggggcgaccaggaagtcctgacacagcctcttctgggggagcagagcctactgacgcgctggtccccggcctacagcttctccagcgactccccactggactcttctcccaagtacccccctctctaccctcccggcaggatcatccacctgcaggaggagggcgcctcggggcggtttggctgctgctctgctgctcactatagcgccaagtggtcacacgaagcggaattcagcaaaatactcataggtccgaagatgctcaccgaccacatgccagacatcctgatgcgggccttggacagcgtggtctccgacagagcggcctgcgtctcctgtccagcacaaggggtctccagtgtggacgtggcctgaccagggccactggaaactgtcccaggaacgatggactcacgcttttgtccttaaactgacttaccatccgaggagttcccatgacgccaaaacagcgaatgtccatcaacaggaatcggatgggaacagaattccatggtctcaatgacttaagtttatgggaagtcattgtggccataatggtagcagaagtagcgagcacgctcaggtgataggacgactcctgagacccagcgaccgtggagacagcctcgggaagccctggcccgtggatggatcccttggctgtctgaggactgctccagaagtgcgggaatccagggcccacccagaagaccgtgaacagttccttagcctcccacccccaaggcagctcttttcatccaactcagtttacaggcgtggtttgtttttcaaactgggcttcctggatgtacaaatggaactgtggtgagggtgcgggctggggttttctcctgggcgtcaccaagggcagccctgggctctggctggggatgaagacgaaacccgatcgggaaagtaagtggagcccccggccccgccgagccacagccccccaactgcctattcccactgcccagttgtttgtccacatcaggagttgctgattgaattcttgctactcttctggctctggggtcggccagtggattcaggagttgaaacaataaagcgcgcgtcacgata

SEQ ID NO: 363278 - DNA, 2821 bp, Homo sapiens
atgcgcaggtccccgccctcgctgcgtttgcgcttgagcgccgataatttggtggcggcgtccggagggtgctggtttgttctcggtgaacggcgcgcggggtctctcctgagtgcgagctacgggaccttcgccatgccggggatggtactcttcggccggcgctgggccatcgccagcgacgacttggtcttcccagggttcttcgagctggtcgtgcgagtgctgtggtggattggcattctgacgttgtatctcatgcacagaggaaagctggactgtgctggtggagccttgctcagcagttacttgatcgtcctcatgattctcctggcagttgtcatatgtactgtgtcagccatcatgtgtgtcagcatgagaggaacgatttgtaaccctggaccgcggaagtctatgtctaagctgctttacatccgcctggcgctgttttttccagagatggtctgggcctctctgggggctgcctgggtggcagatggtgttcagtgcgacaggacagttgtaaacggcatcatcgcaaccgtcgtggtcagttggatcatcatcgctgccacagtggtttccattatcattgtctttgaccctcttggggggaaaatggctccatattcctctgccggccccagccacctggatagtcatgattcaagccagttacttaatggcctcaagacagcagctacaagcgtgtgggaaaccagaatcaagctcttgtgctgttgcattgggaaagacgaccatactcgggttgctttttcgagtacggcagagcttttctcaacctacttttcagacacagatctggtgcccagcgacattgcggcgggcctcgccctgcttcatcagcaacaggacaatatcaggaacaaccaagagcctgcccaggtggtctgccatgccccagggagctcccaggaagctgatctggatgcagaattagaaaactgccatcattacatgcagtttgcagcagcggcctatgggtggcccctctacatctacagaaaccccctcacggggctgtgcaggattggtggtgactgctgcagaagcagaaccacagactatgacttggtcggaggcgatcagctcaactgtcacttcggctccatcctgcacaccacagggctgcagtacagggacttcatccacgtcagcttccatgacaaggtttacgagctgccgtttttagtggctctggatcacaggaaagagtctgttgtggtcgctgtgagggggaccatgtctctgcaggatgtccttacggacctgtcagcggagagtgaggtgctggacgtggagtgtgaggtgcaggaccgcctggcacacaagggtatttctcaagctgccagatacgtttaccaacgactcatcaacgacgggattttgagccaagccttcagcattgctcctgagtaccggctggtcatagtgggccacagcctcgggggcggggcggccgccctgctggccaccatgctcagagccgcctacccgcagcaaagctctgcaggaatattctcagagcttcatcgtgtcactcgtcctggggaaggatgtgattcccaggctcagtgtgaccaacttggaagatctgaagagaagaatcttgcgagtggtcgcgcactgcaataaacccaagtacaagatcttgctgcacggtttgtggtacgaactgtttggaggaaaccccaacaacttgcccacggagctggacgggggcgaccaggaagtcctgacacagcctcttctgggggagcagagcctactgacgcgctggtccccggcctacagcttctccagcgactccccactggactcttctcccaagtacccccctctctaccctcccggcaggatcatccacctgcaggaggagggcgcctcggggcggtttggctgctgctctgctgctcactatagcgccaagtggtcacacgaagcggaattcagcaaaatactcataggtccgaagatgctcaccgaccacatgccagacatcctgatgcgggccttggacagcgtggtctccgacagagcggcctgcgtctcctgtccagcacaaggggtctccagtgtggacgtggcctgaccagggccactggaaactgtcccaggaacgatggactcacgcttttgtccttaaactgacttaccatccgaggagttcccatgacgccaaaacagcgaatgtccatcaacaggaatcggatgggaacagaattccatggtctcaatgacttaagtttatgggaagtcattgtggccataatggtagcagaagtagcgagcacgctcaggtgataggacgactcctgagacccagcgaccgtggagacagcctcgggaagccctggcccgtggatggatcccttggctgtctgaggactgctccagaagtgcgggaatccagggcccacccagaagaccgtgaacagttccttagcctcccacccccaaggcagctcttttcatccaactcagtttacaggcgtggtttgtttttcaaactgggcttcctggatgtacaaatggaactgtggtgagggtgcgggctggggttttctcctgggcgtcaccaagggcagccctgggctctggctggggatgaagacgaaacccgatcgggaaagtaagtggagcccccggccccgccgagccacagccccccaactgcctattcccactgcccagttgtttgtccacatcaggagttgctgattgaattcttgctactcttctggctctggggtcggccagtggattcaggagttgaaacaataaagcgcgcgtcacgata

SEQ ID NO: 363279 - DNA, 2542 bp, Homo sapiens
atgcgcaggtccccgccctcgctgcgtttgcgcttgagcgccgataatttggtggcggcgtccggagggtgctggtttgttctcggtgaacggcgcgcggggtctctcctgagtgcgagctacgggaccttcgccatgccggggatggtactcttcggccggcgctgggccatcgccagcgacgacttggtcttcccagggttcttcgagctggtcgtgcgagtgctgtggtggattggcattctgacgttgtatctcatgcacagaggaaagctggactgtgctggtggagccttgctcagcagttacttgatcgtcctcatgattctcctggcagttgtcatatgtactgtgtcagccatcatgtgtgtcagcatgagaggaacgatttgtaaccctggaccgcggaagtctatgtctaagctgctttacatccgcctggcgctgttttttccagagatggtctgggcctctctgggggctgcctgggtggcagatggtgttcagtgcgacaggacagttgtaaacggcatcatcgcaaccgtcgtggtcagttggatcatcatcgctgccacagtggtttccattatcattgtctttgaccctcttggggggaaaatggctccatattcctctgccggccccagccacctggatagtcatgattcaagccagttacttaatggcctcaagacagcagctacaagcgtgtgggaaaccagaatcaagctcttgtgctgttgcattgggaaagacgaccatactcgggttgctttttcgagtacggcagagcttttctcaacctacttttcagacacagatctggtgcccagcgacattgcggcgggcctcgccctgcttcatcagcaacaggacaatatcaggaacaaccaagagcctgcccaggtggtctgccatgccccagggagctcccaggaagctgatctggatgcagaattagaaaactgccatcattacatgcagtttgcagcagcggcctatgggtggcccctctacatctacagaaaccccctcacggggctgtgcaggattggtggtgactgctgcagaagcagaaccacagactatgacttggtcggaggcgatcagctcaactgtcacttcggctccatcctgcacaccacagggctgcagtacagggacttcatccacgtcagcttccatgacaaggtttacgagctgccgtttttagtggctctggatcacaggaaagagtctgttgtggtcgctgtgagggggaccatgtctctgcaggatgtccttacggacctgtcagcggagagtgaggtgctggacgtggagtgtgaggtgcaggaccgcctggcacacaagggtatttctcaagctgccagatacgtttaccaacgactcatcaacgacgggattttgagccaagccttcagcattgctcctgagtaccggctggtcatagtgggccacagcctcgggggcggggcggccgccctgctggccaccatgctcagagccgcctacccgcaggtcaggtgctacgccttctccccaccccgggggctgtggagcaaagctctgcaggaatattctcagagcttcatcgtgtcactcgtcctggggaaggatgtgattcccaggctcagtgtgaccaacttggaagatctgaagagaagaatcttgcgagtggtcgcgcactgcaataaacccaagtacaagatcttgctgcacggtttgtggtacgaactgtttggaggaaaccccaacaacttgcccacggagctggacgggggcgaccaggaagtcctgacacagcctcttctgggggagcagagcctactgaccagggccactggaaactgtcccaggaacgatggactcacgcttttgtccttaaactgacttaccatccgaggagttcccatgacgccaaaacagcgaatgtccatcaacaggaatcggatgggaacagaattccatggtctcaatgacttaagtttatgggaagtcattgtggccataatggtagcagaagtagcgagcacgctcaggtgataggacgactcctgagacccagcgaccgtggagacagcctcgggaagccctggcccgtggatggatcccttggctgtctgaggactgctccagaagtgcgggaatccagggcccacccagaagaccgtgaacagttccttagcctcccacccccaaggcagctcttttcatccaactcagtttacaggcgtggtttgtttttcaaactgggcttcctggatgtacaaatggaactgtggtgagggtgcgggctggggttttctcctgggcgtcaccaagggcagccctgggctctggctggggatgaagacgaaacccgatcgggaaagtaagtggagcccccggccccgccgagccacagccccccaactgcctattcccactgcccagttgtttgtccacatcaggagttgctgattgaattcttgctactcttctggctctggggtcggccagtggattcaggagttgaaacaataaagcgcgcgtcacgata

SEQ ID NO: 363280 - DNA, 2458 bp, Homo sapiens
atgcgcaggtccccgccctcgctgcgtttgcgcttgagcgccgataatttggtggcggcgtccggagggtgctggtttgttctcggtgaacggcgcgcggggtctctcctgagtgcgagctacgggaccttcgccatgccggggatggtactcttcggccggcgctgggccatcgccagcgacgacttggtcttcccagggttcttcgagctggtcgtgcgagtgctgtggtggattggcattctgacgttgtatctcatgcacagaggaaagctggactgtgctggtggagccttgctcagcagttacttgatcgtcctcatgattctcctggcagttgtcatatgtactgtgtcagccatcatgtgtgtcagcatgagaggaacgatttgtaaccctggaccgcggaagtctatgtctaagctgctttacatccgcctggcgctgttttttccagagatggtctgggcctctctgggggctgcctgggtggcagatggtgttcagtgcgacaggacagttgtaaacggcatcatcgcaaccgtcgtggtcagttggatcatcatcgctgccacagtggtttccattatcattgtctttgaccctcttggggggaaaatggctccatattcctctgccggccccagccacctggatagtcatgattcaagccagttacttaatggcctcaagacagcagctacaagcgtgtgggaaaccagaatcaagctcttgtgctgttgcattgggaaagacgaccatactcgggttgctttttcgagtacggcagagcttttctcaacctacttttcagacacagatctggtgcccagcgacattgcggcgggcctcgccctgcttcatcagcaacaggacaatatcaggaacaaccaagagcctgcccaggtggtctgccatgccccagggagctcccaggaagctgatctggatgcagaattagaaaactgccatcattacatgcagtttgcagcagcggcctatgggtggcccctctacatctacagaaaccccctcacggggctgtgcaggattggtggtgactgctgcagaagcagaaccacagactatgacttggtcggaggcgatcagctcaactgtcacttcggctccatcctgcacaccacagggctgcagtacagggacttcatccacgtcagcttccatgacaaggtttacgagctgccgtttttagtggctctggatcacaggaaagagtctgttgtggtcgctgtgagggggaccatgtctctgcaggatgtccttacggacctgtcagcggagagtgaggtgctggacgtggagtgtgaggtgcaggaccgcctggcacacaagggtatttctcaagctgccagatacgtttaccaacgactcatcaacgacgggattttgagccaagccttcagcattgctcctgagtaccggctggtcatagtgggccacagcctcgggggcggggcggccgccctgctggccaccatgctcagagccgcctacccgcaggtcaggtgctacgccttctccccaccccgggggctgtggagcaaagctctgcaggaatattctcagagcttcatcgtgtcactcgtcctggggaaggatgtgattcccaggctcagtgtgaccaacttggaagatctgaagagaagaatcttgcgagtggtcgcgcactgcaataaacccaagtacaagatcttgctgcacggtttgtggtacgaactgtttggaggaaaccccaacaacttgcccacggagctggacgggggcgaccaggaagtcctgacacagcctcttctgggggagcagagcctactgacgcgctggtccccggcctacagcttctccagcgactccccactggactcttctcccaagtacccccctctctaccctcccggcaggatcatccacctgcaggaggagggcgcctcggggcggtttggctgctgctctgctgctcactatagcgccaagtggtcacacgaagcggaattcagcaaaatactcataggtccgaagatgctcaccgaccacatgccagacatcctgatgcgggccttggacagcgtggtctccgacagagcggcctgcgtctcctgtccagcacaaggggtctccagtgtggacgtggcctgaccagggccactggaaactgtcccaggaacgatggactcacgcttttgtccttaaactgacttaccatccgaggagttcccatgacgccaaaacagcgaatgtccatcaacaggaatcggatgggaacagaattccatggtctcaatgacttaagtttatgggaagtcattgtggccataatggtagcagaagtagcgagcacgaaccccagcactttgggaggccgaggtgggcagatcactaggtcaagagatcgagaccatcctggccaacacagtgaaaccccgtctctactaaaaataca

SEQ ID NO: 363281 - DNA, 2734 bp, Homo sapiens
atgcgcaggtccccgccctcgctgcgtttgcgcttgagcgccgataatttggtggcggcgtccggagggtgctggtttgttctcggtgaacggcgcgcggggtctctcctgagtgcgagctacgggaccttcgccatgccggggatggtactcttcggccggcgctgggccatcgccagcgacgacttggtcttcccagggttcttcgagctggtcgtgcgagtgctgtggtggattggcattctgacgttgtatctcatgcacagaggaaagctggactgtgctggtggagccttgctcagcagttacttgatcgtcctcatgattctcctggcagttgtcatatgtactgtgtcagccatcatgtgtgtcagcatgagaggaacgatttgtaaccctggaccgcggaagtctatgtctaagctgctttacatccgcctggcgctgttttttccagagatggtctgggcctctctgggggctgcctgggtggcagatggtgttcagtgcgacaggacagttgtaaacggcatcatcgcaaccgtcgtggtcagttggatcatcatcgctgccacagtggtttccattatcattgtctttgaccctcttggggggaaaatggctccatattcctctgccggccccagccacctggatagtcatgattcaagccagttacttaatggcctcaagacagcagctacaagcgtgtgggaaaccagaatcaagctcttgtgctgttgcattgggaaagacgaccatactcgggttgctttttcgagtacggcagagcttttctcaacctacttttcagacacagatctggtgcccagcgacattgcggcgggcctcgccctgcttcatcagcaacaggacaatatcaggaacaaccaagagcctgcccaggtggtctgccatgccccagggagctcccaggaagctgatctggatgcagaattagaaaactgccatcattacatgcagtttgcagcagcggcctatgggtggcccctctacatctacagaaaccccctcacggggctgtgcaggattggtggtgactgctgcagaagcagaaccacagactatgacttggtcggaggcgatcagctcaactgtcacttcggctccatcctgcacaccacagggctgcagtacagggacttcatccacgtcagcttccatgacaaggtttacgagctgccgtttttagtggctctggatcacaggaaagagtctgttgtggtcgctgtgagggggaccatgtctctgcaggatgtccttacggacctgtcagcggagagtgaggtgctggacgtggagtgtgaggtgcaggaccgcctggcacacaagggtatttctcaagctgccagatacgtttaccaacgactcatcaacgacgggattttgagccaagccttcagcattgctcctcaaagctctgcaggaatattctcagagcttcatcgtgtcactcgtcctggggaaggatgtgattcccaggctcagtgtgaccaacttggaagatctgaagagaagaatcttgcgagtggtcgcgcactgcaataaacccaagtacaagatcttgctgcacggtttgtggtacgaactgtttggaggaaaccccaacaacttgcccacggagctggacgggggcgaccaggaagtcctgacacagcctcttctgggggagcagagcctactgacgcgctggtccccggcctacagcttctccagcgactccccactggactcttctcccaagtacccccctctctaccctcccggcaggatcatccacctgcaggaggagggcgcctcggggcggtttggctgctgctctgctgctcactatagcgccaagtggtcacacgaagcggaattcagcaaaatactcataggtccgaagatgctcaccgaccacatgccagacatcctgatgcgggccttggacagcgtggtctccgacagagcggcctgcgtctcctgtccagcacaaggggtctccagtgtggacgtggcctgaccagggccactggaaactgtcccaggaacgatggactcacgcttttgtccttaaactgacttaccatccgaggagttcccatgacgccaaaacagcgaatgtccatcaacaggaatcggatgggaacagaattccatggtctcaatgacttaagtttatgggaagtcattgtggccataatggtagcagaagtagcgagcacgctcaggtgataggacgactcctgagacccagcgaccgtggagacagcctcgggaagccctggcccgtggatggatcccttggctgtctgaggactgctccagaagtgcgggaatccagggcccacccagaagaccgtgaacagttccttagcctcccacccccaaggcagctcttttcatccaactcagtttacaggcgtggtttgtttttcaaactgggcttcctggatgtacaaatggaactgtggtgagggtgcgggctggggttttctcctgggcgtcaccaagggcagccctgggctctggctggggatgaagacgaaacccgatcgggaaagtaagtggagcccccggccccgccgagccacagccccccaactgcctattcccactgcccagttgtttgtccacatcaggagttgctgattgaattcttgctactcttctggctctggggtcggccagtggattcaggagttgaaacaataaagcgcgcgtcacgata

SEQ ID NO: 363282 - DNA, 1542 bp, Homo sapiens
atgcgcaggtccccgccctcgctgcgtttgcgcttgagcgccgataatttggtggcggcgtccggagggtgctggtttgttctcggtgaacggcgcgcggggtctctcctgagtgcgagctacgggaccttcgccatgccggggatggtactcttcggccggcgctgggccatcaccatgctcagagccgcctacccgcaggtcaggtgctacgccttctccccaccccgggggctgtggagcaaagctctgcaggaatattctcagagcttcatcgtgtcactcgtcctggggaaggatgtgattcccaggctcagtgtgaccaacttggaagatctgaagagaagaatcttgcgagtggtcgcgcactgcaataaacccaagtacaagatcttgctgcacggtttgtggtacgaactgtttggaggaaaccccaacaacttgcccacggagctggacgggggcgaccaggaagtcctgacacagcctcttctgggggagcagagcctactgacgcgctggtccccggcctacagcttctccagcgactccccactggactcttctcccaagtacccccctctctaccctcccggcaggatcatccacctgcaggaggagggcgcctcggggcggtttggctgctgctctgctgctcactatagcgccaagtggtcacacgaagcggaattcagcaaaatactcataggtccgaagatgctcaccgaccacatgccagacatcctgatgcgggccttggacagcgtggtctccgacagagcggcctgcgtctcctgtccagcacaaggggtctccagtgtggacgtggcctgaccagggccactggaaactgtcccaggaacgatggactcacgcttttgtccttaaactgacttaccatccgaggagttcccatgacgccaaaacagcgaatgtccatcaacaggaatcggatgggaacagaattccatggtctcaatgacttaagtttatgggaagtcattgtggccataatggtagcagaagtagcgagcacgctcaggtgataggacgactcctgagacccagcgaccgtggagacagcctcgggaagccctggcccgtggatggatcccttggctgtctgaggactgctccagaagtgcgggaatccagggcccacccagaagaccgtgaacagttccttagcctcccacccccaaggcagctcttttcatccaactcagtttacaggcgtggtttgtttttcaaactgggcttcctggatgtacaaatggaactgtggtgagggtgcgggctggggttttctcctgggcgtcaccaagggcagccctgggctctggctggggatgaagacgaaacccgatcgggaaagtaagtggagcccccggccccgccgagccacagccccccaactgcctattcccactgcccagttgtttgtccacatcaggagttgctgattgaattcttgctactcttctggctctggggtcggccagtggattcaggagttgaaacaataaagcgcgcgtcacgata

SEQ ID NO: 363283 - DNA, 1604 bp, Homo sapiens
ctttgatggagtcttccaagcgcggtttctgggtcaaaggacagatccatgtgcttggtccgccttggtgtccagtttgcggttttagctgcggggcgtctctgttgaacacatattgtggctttagtaggatctggccagtgagttgccataactgacgtttcccctaccctccctttagagaagagagaacagagctgaggcctgggaacctaacccctcagtgttactgatttctttcatggaagcccttgtgggaggtgtcatcgtaaagctaacatcctctctctgtttggaatttcagcaaagctctgcaggaatattctcagagcttcatcgtgtcactcgtcctggggaaggatgtgattcccaggctcagtgtgaccaacttggaagatctgaagagaagaatcttgcgagtggtcgcgcactgcaataaacccaagtacaagatcttgctgcacggtttgtggtacgaactgtttggaggaaaccccaacaacttgcccacggagctggacgggggcgaccaggaagtcctgacacagcctcttctgggggagcagagcctactgacgcgctggtccccggcctacagcttctccagcgactccccactggactcttctcccaagtacccccctctctaccctcccggcaggatcatccacctgcaggaggagggcgcctcggggcggtttggctgctgctctgctgctcactatagcgccaagtggtcacacgaagcggaattcagcaaaatactcataggtccgaagatgctcaccgaccacatgccagacatcctgatgcgggccttggacagcgtggtctccgacagagcggcctgcgtctcctgtccagcacaaggggtctccagtgtggacgtggcctgaccagggccactggaaactgtcccaggaacgatggactcacgcttttgtccttaaactgacttaccatccgaggagttcccatgacgccaaaacagcgaatgtccatcaacaggaatcggatgggaacagaattccatggtctcaatgacttaagtttatgggaagtcattgtggccataatggtagcagaagtagcgagcacgctcaggtgataggacgactcctgagacccagcgaccgtggagacagcctcgggaagccctggcccgtggatggatcccttggctgtctgaggactgctccagaagtgcgggaatccagggcccacccagaagaccgtgaacagttccttagcctcccacccccaaggcagctcttttcatccaactcagtttacaggcgtggtttgtttttcaaactgggcttcctggatgtacaaatggaactgtggtgagggtgcgggctggggttttctcctgggcgtcaccaagggcagccctgggctctggctggggatgaagacgaaacccgatcgggaaagtaagtggagcccccggccccgccgagccacagccccccaactgcctattcccactgcccagttgtttgtccacatcaggagttgctgattgaattcttgctactcttctggctctggggtcggccagtggattcaggagttgaaacaataaagcgcgcgtcacgata

SEQ ID NO: 363284 - DNA, 687 bp, Homo sapiens
atgcgcaggtccccgccctcgctgcgtttgcgcttgagcgccgataatttggtggcggcgtccggagggtgctggtttgttctcggtgaacggcgcgcggggtctctcctgagtgcgagctacgggaccttcgccatgccggggatggtactcttcggccggcgctgggccatcgccagcgacgacttggtcttcccagggttcttcgagctggtcgtgcgagtgctgtggtggattggcattctgacgttgtatctcatgcacagaggaaagctggactgtgctggtggagccttgctcagcagttacttgatcgtcctcatgattctcctggcagttgtcatatgtactgtgtcagccatcatgtgtgtcagcatgagaggaacgatttgtaaccctggaccgcggaagtctatgtctaagctgctttacatccgcctggcgctgttttttccagagatggtctgggcctctctgggggctgcctgggtggcagatggtgttcagtgcgacaggacagttgtaaacggcatcatcgcaaccgtcgtggtcagttggatcatcatcgctgccacagtggtttccattatcattgtctttgaccctcttggggggaaaatggctccatattctctggggtcggccagtggattcaggagttgaaacaataaagcgcgcgtcacgata

SEQ ID NO: 363285 - DNA, 486 bp, Homo sapiens
aactcctgggctcaagtgtcctcctgccttggcctccctaagtgctgggattacaagcgtgcgccaccacacctggcacctgcttcacgtcaggcgctgtgcaaggtgccaggagcacagccatgcacgatggacgtggctgctgattctgcagtctcagatcccaggagagactcacacatcagtgcacagcgtcatcccatctttgagtctctgctgggcctgccttgtctgaggattaacggccaccttctttgtctgtgtttttagggtatttctcaagctgccagatacgtttaccaacgactcatcaacgacgggattttgagccaagccttcagcattgctcctgtgagatcttagttaacgtttctttccttgtcctctttggagctgttgtttttacccttcacctcattctgctgtctgtcctctaggagtaccggctggtcatagtgggccacagcctcgggggcggggcggccg

SEQ ID NO: 363286 - DNA, 4044 bp, Homo sapiens
cgcccgttccggggcggggcttacttcgcagcgactacttgccgcacttccgggctgccaggcagctgctgtggctccaggatgatggagacagagcgacttgtgctaccccctccagatcccctggacctaccccttcgggccgtggagctcggatgcacggggcactgggagctgctgaacttgcctggagctccagagagtagccttccccatggcctccctccttgtgccccagatctgcagcaagaagcagaacagttgtttctgtcatccccagcctggctgcctctgcatggtgtggagcactcagcccgaaaatggcagaggaagacggatccctggtctcttttggctgtcctgggagccccagtcccatccgacctacaggcccaaagacacccaaccacaggccagatactgggttacaaagaggtcttgctggagaacacaaatctctcggctacaacctccttgtctcttcgccggcctccagggccagcctcccagtccttatggggaaatccaactcggtatcccttctggccaggggggatggatgaacccaccataacagatctgaacacacgggaggaggctgaggaggagatagactttgagaaagatcttcttactattccacctggtttcaagaaaggcatggactttgcaccaaaagattgtccaactccagctcctggactactaagccttagctgtctgttggagcctctggatttgggtgggggtgacgaggatgagaatgaggcagtgggacagccaggaggtcccagaggggacactgtttcagcctctccctgcagtgctcccctggcccgagcaagcagcttggaagacctagtgttgaaggaagcgtccacagctgtatccaccccagaggccccagagcctccatctcaggagcagtgggccatccctgtggacgccacctcccctgttggtgatttctatcgcctcattccccagccagccttccagtgggcatttgagccagatgtgtttcagaaacaggccatcctgcacttggaacggcatgactctgtctttgtcgcagctcacacatctgcaggaaaaacagttgtggctgaatatgccattgccctggcccagaaacacatgacacgcaccatctacacttcgcccatcaaggccctgagcaaccagaagttccgggacttccgaaacacattcggggatgtggggctgctcaccggggatgtacagctgcatccggaggcctcctgcctcatcatgaccacagagatccttcgctccatgctgtacagtggctcagatgttattcgggacctggagtgggtcatctttgatgaggttcactatatcaacgatgtcgagcgtggggtcgtgtgggaggaggtgcttatcatgctacctgaccacgtttctatcatccttctgagtgccaccgtccccaacgcccttgagtttgctgactggattgggcggctgaagcgtcgtcagatctatgtgattagcactgtaacccgccccgtgcccctggagcactatcttttcacagggaacagctccaagacccagggggagctctttttgttgctggactcccgaggagccttccatacaaaagggtactatgcagctgtggaggccaagaaggagagaatgagcaaacacgcccagacctttggggccaagcagcccacacatcaggggggccctgcacaggaccgcggagtgtacctgtccctcctggcctccctccgcacacgtgcccagttgcccgtggtggtgttcaccttctcccggggccgctgtgatgagcaggcctcaggcctcacctcccttgacctcaccaccagttcggagaagagcgagatccacctcttcctgcagcgctgccttgctcgcctccgtggctctgaccgccagctgccccaggtcctgcacatgtcagagctcctgaatcgcggcctgggtgtgcaccatagcggcatcctgcccatcctcaaggagatcgtggagatgctcttcagccgtggcctggtcaaggtcttgtttgccacagagacctttgccatgggagtaaacatgcctgctcgtacagtagtgtttgactccatgcgcaaacacgatggctccaccttccgggacctgctccctggggagtatgtgcagatggcaggccgggcagggcggaggggcctggaccccacaggcaccgttatcctgctctgcaagggccgagtgcccgagatggcagacctgcaccgcatgatgatggggaagccgtcccagctgcagtcccagttccgcctcacgtacactatgatcctcaacttgctgcgagtggatgccctcagggtggaggacatgatgaagaggagcttctctgagtttccctcccgcaaagacagcaaggcccatgaacaggccctggctgaactgaccaagaggctgggagctttggaggagcctgacatgactggccaactggtcgacctgcctgaatattacagctggggggaggaactgacagagacccagcacatgatccagcgacgcatcatggagtctgtgaacgggctgaagtctctctcagcaggaagggtggtggttgtgaagaatcaggagcatcacaacgcattgggagtgatcctacaggtctcctcgaactccaccagcagagtattcacaaccctggtcttgtgtgataagcccttgtcccaggacccacaggacagggggccagccactgcagaggtgccctatccagatgacctcgtgggattcaagctgttcctgcctgaagggccttgtgaccacaccgtggtcaagctccagccaggagatatggctgccatcaccaccaaggtgctccgggtgaatggggagaagatcttggaggacttcagcaagaggcagcagccaaaattcaagaaggatcctccccttgcagccgtgaccactgctgtccaggaactgctgcgtctggctcaggcccacccagccggacctcccaccctcgaccctgtcaatgacctgcagctcaaagatatgtcagttgtagagggtgggctccgggcccggaagctggaggagctgatccagggggctcagtgtgtacacagcccccgttttcctgcccagtacctgaagctgcgggagcgaatgcagatacagaaggagatggagcggctgcgcttcctactgtcggatcagtcattgctgctgcttcctgagtaccatcagcgagtagaggtgctccgaaccctgggttacgtggacgaggtgggcactgtgaagctggcagggcgggtggcttgtgccatgagcagccatgagttgctcctcactgagctcatgtttgacaatgcactgagcaccctgcggcctgaggagattgctgccttgctctctggcctggtctgccagagccctggggacgctggggatcagctcccaaacaccctcaagcagggaatagaacgtgtccgggctgtggccaagcggattggtgaggtccaggtggcttgtggcctgaaccagacggtggaggaatttgtgggggagctgaattttgggctggttgaggttgtatatgagtgggcccggggcatgcccttctccgagttggcagggctctcagggacccctgagggcctggtggtccgctgcattcagcgcctggctgagatgtgtcgctcactgcggggggcagcccgcctggtaggagagcctgtgctgggtgccaagatggagacagcggctaccttgctacggcgggacatcgtatttgcggccagcctctacacccagtgaatgccccatgtaaaaacatgatgataaaacagcaaaaagaacacataaacttatagaaactagcaacatgatacatagcaaaatcttggggggtgtttttaggggggggggaaaatgggtctgaaagtggactggtgcgctaaagtttttctggacacggtttttgtgcaagggggagaaaaggcggccccataggggcgcgatgaatgcaacgcgggacgt

SEQ ID NO: 363287 - DNA, 4677 bp, Homo sapiens
cgcccgttccggggcggggcttacttcgcagcgactacttgccgcacttccgggctgccaggcagctgctgtggctccaggatgatggagacagagcgacttgtgctaccccctccagatcccctggacctaccccttcgggccgtggagctcggatgcacggggcactgggagctgctgaacttgcctggagctccagagagtagccttccccatggcctccctccttgtgccccagatctgcagcaagaagcagaacagttgtttctgtcatccccagcctggctgcctctgcatggtgtggagcactcagcccgaaaatggcagaggaagacggatccctggtctcttttggctgtcctgggagccccagtcccatccgacctacaggcccaaagacacccaaccacaggccagatactgggttacaaagaggtcttgctggagaacacaaatctctcggctacaacctccttgtctcttcgccggcctccagggccagcctcccagtccttatggggaaatccaactcggtatcccttctggccaggggggatggatgaacccaccataacagatctgaacacacgggaggaggctgaggaggagatagactttgagaaagatcttcttactattccacctggtttcaagaaaggcatggactttgcaccaaaagattgtccaactccagctcctggactactaagccttagctgtctgttggagcctctggatttgggtgggggtgacgaggatgagaatgaggcagtgggacagccaggaggtcccagaggggacactgtttcagcctctccctgcagtgctcccctggcccgagcaagcagcttggaagacctagtgttgaaggaagcgtccacagctgtatccaccccagaggccccagagcctccatctcaggagcagtgggccatccctgtggacgccacctcccctgttggtgatttctatcgcctcattccccagccagccttccagtgggcatttgagccagatgtgtttcagaaacaggccatcctgcacttggaacggcatgactctgtctttgtcgcagctcacacatctgcaggaaaaacagttgtggctgaatatgccattgccctggcccagaaacacatgacacgcaccatctacacttcgcccatcaaggccctgagcaaccagaagttccgggacttccgaaacacattcggggatgtggggctgctcaccggggatgtacagctgcatccggaggcctcctgcctcatcatgaccacagagatccttcgctccatgctgtacagtggctcagatgttattcgggacctggagtgggtcatctttgatgaggttcactatatcaacgatgtcgagcgtggggtcgtgtgggaggaggtgcttatcatgctacctgaccacgtttctatcatccttctgagtgccaccgtccccaacgcccttgagtttgctgactggattgggcggctgaagcgtcgtcagatctatgtgattagcactgtaacccgccccgtgcccctggagcactatcttttcacagggaacagctccaagacccagggggagctctttttgttgctggactcccgaggagccttccatacaaaagggtactatgcagctgtggaggccaagaaggagagaatgagcaaacacgcccagacctttggggccaagcagcccacacatcaggggggccctgcacaggaccgcggagtgtacctgtccctcctggcctccctccgcacacgtgcccagttgcccgtggtggtgttcaccttctcccggggccgctgtgatgagcaggcctcaggcctcacctcccttgacctcaccaccagttcggagaagagcgagatccacctcttcctgcagcgctgccttgctcgcctccgtggctctgaccgccagctgccccaggtcctgcacatgtcagagctcctgaatcgcggcctgggtgtgcaccatagcggcatcctgcccatcctcaaggagatcgtggagatgctcttcagccgtggcctggtcaaggtcttgtttgccacagagacctttgccatgggagtaaacatgcctgctcgtacagtagtgtttgactccatgcgcaaacacgatggctccaccttccgggacctgctccctggggagtatgtgcagatggcaggccgggcagggcggaggggcctggaccccacaggcaccgttatcctgctctgcaagggccgagtgcccgagatggcagacctgcaccgcatgatgatggggaagccgtcccagctgcagtcccagttccgcctcacgtacactatgatcctcaacttgctgcgagtggatgccctcagggtggaggacatgatgaagaggagcttctctgagtttccctcccgcaaagacagcaaggcccatgaacaggccctggctgaactgaccaagaggctgggagctttggaggagcctgacatgactggccaactggtcgacctgcctgaatattacagctggggggaggaactgacagagacccagcacatgatccagcgacgcatcatggagtctgtgaacgggctgaagtctctctcagcaggaagggtggtggttgtgaagaatcaggagcatcacaacgcattgggagtgatcctacaggtctcctcgaactccaccagcagagtattcacaaccctggtcttgtgtgataagcccttgtcccaggacccacaggacagggggccagccactgcagaggtgccctatccagatgacctcgtgggattcaagctgttcctgcctgaagggccttgtgaccacaccgtggtcaagctccagccaggagatatggctgccatcaccaccaaggtgctccgggtgaatggggagaagatcttggaggacttcagcaagaggcagcagccaaaattcaagaaggatcctccccttgcagccgtgaccactgctgtccaggaactgctgcgtctggctcaggcccacccagccggacctcccaccctcgaccctgtcaatgacctgcagctcaaagatatgtcagttgtagagggtgggcactgtgaagctggcagggcgggtggcttgtgccatgagcagccatgagttgctcctcactgagctcatgtttgacaatgcactgagcaccctgcggcctgaggagattgctgccttgctctctggcctggtctgccagagccctggggacgctggggatcagctcccaaacaccctcaagcagggaatagaacgtgtccgggctgtggccaagcggattggtgaggtccaggtggcttgtggcctgaaccagacggtggaggaatttgtgggggagctgaattttgggctggttgaggttgtatatgagtgggcccggggcatgcccttctccgagttggcagggctctcagggacccctgagggcctggtggtccgctgcattcagcgcctggctgagatgtgtcgctcactgcggggggcagcccgcctggtaggagagcctgtgctgggtgccaagatggagacagcggctaccttgctacggcgggacatcgtatttgcggccagcctctacacccagtgaatgccccatgtaaaaacatgatgataaaacagcaaagcactgttgtgtgcttgagttgctggacagggatgactcagctaagaagacagcgagagaacctcttagaaatatgcttttattatctgcacacagagatatgactgcctccctctaaagcattactatttgggagagggagtcttggggggtgatgggaggtcctgagtcatagcttccacataccatatgggcaggaaggcgtaaggtgcatcttggtgtacagacacggtgactgggccgccaggctcccaagagaagagatgaacgagcctggggggcagatggaggcatcagttgagggccagaggctggatcctgggatccagaggggagggacagagctgaatgcctcacctggggtcatcctggacaaccgtgctctgggcaaagctaaggaaggcggcacagaagttcatgcacacagagggattccagccgtcacggtcattctggagcaggcagaggaggaggcagaagatgggcagtgggggtggtgggaggagagaaggcaggctgttgccctggatgctagacctgtggtcttggtgtttggggatacgggtgggagctgcaacatcgttcccttaccctgacatattcaaacatcttcatggtaggaaaggtcttgagggaagagacaaaaccgtctgggttacggaagccagcaacaacattcgggacccctgggaggaatgactgagcccaccatttcaggagcttgtgtctgacaggaaaagcaagggatcagtgggacccctcgtgcaccctccattctgccttcaccctcctccccaagtccctttcccagccttcaagcctaagctctcgccctgcccaccccgatcctgaacctgtagaaactcctccattggccagggctgtgcatctccttggaggtcttgagctccacatagcaggttgggggctgtgtggatggggcttgggggtctgtgcagtctacctcccctgagaagagcagagggtggcttcccaggcggctgcgtagcacagagcagaaggccacgttggtgtta

SEQ ID NO: 363288 - DNA, 4996 bp, Homo sapiens
cgcccgttccggggcggggcttacttcgcagcgactacttgccgcacttccgggctgccaggcagctgctgtggctccaggatgatggagacagagcgacttgtgctaccccctccagatcccctggacctaccccttcgggccgtggagctcggatgcacggggcactgggagctgctgaacttgcctggagctccagagagtagccttccccatggcctccctccttgtgccccagatctgcagcaagaagcagaacagttgtttctgtcatccccagcctggctgcctctgcatggtgtggagcactcagcccgaaaatggcagaggaagacggatccctggtctcttttggctgtcctgggagccccagtcccatccgacctacaggcccaaagacacccaaccacaggccagatactgggttacaaagaggtcttgctggagaacacaaatctctcggctacaacctccttgtctcttcgccggcctccagggccagcctcccagtccttatggggaaatccaactcggtatcccttctggccaggggggatggatgaacccaccataacagatctgaacacacgggaggaggctgaggaggagatagactttgagaaagatcttcttactattccacctggtttcaagaaaggcatggactttgcaccaaaaggttagttttagtttttgagtggggtgtaggagaagtcatgtccttctcctaaggaacagagatggacatgacaaggttgaccttgttggcttgctcctcagattgtccaactccagctcctggactactaagccttagctgtctgttggagcctctggatttgggtgggggtgacgaggatgagaatgaggcagtgggacagccaggaggtcccagaggggacactgtttcagcctctccctgcagtgctcccctggcccgagcaagcagcttggaagacctagtgttgaaggaagcgtccacagctgtatccaccccagaggccccagagcctccatctcaggagcagtgggccatccctgtggacgccacctcccctgttggtgatttctatcgcctcattccccagccagccttccagtgggcatttgagccagatgtgtttcagaaacaggccatcctgcacttggaacggcatgactctgtctttgtcgcagctcacacatctgcaggaaaaacagttgtggctgaatatgccattgccctggcccagaaacacatgacacgcaccatctacacttcgcccatcaaggccctgagcaaccagaagttccgggacttccgaaacacattcggggatgtggggctgctcaccggggatgtacagctgcatccggaggcctcctgcctcatcatgaccacagagatccttcgctccatgctgtacagtggctcagatgttattcgggacctggagtgggtcatctttgatgaggttcactatatcaacgatgtcgagcgtggggtcgtgtgggaggaggtgcttatcatgctacctgaccacgtttctatcatccttctgagtgccaccgtccccaacgcccttgagtttgctgactggattgggcggctgaagcgtcgtcagatctatgtgattagcactgtaacccgccccgtgcccctggagcactatcttttcacagggaacagctccaagacccagggggagctctttttgttgctggactcccgaggagccttccatacaaaagggtactatgcagctgtggaggccaagaaggagagaatgagcaaacacgcccagacctttggggccaagcagcccacacatcaggggggccctgcacaggaccgcggagtgtacctgtccctcctggcctccctccgcacacgtgcccagttgcccgtggtggtgttcaccttctcccggggccgctgtgatgagcaggcctcaggcctcacctcccttgacctcaccaccagttcggagaagagcgagatccacctcttcctgcagcgctgccttgctcgcctccgtggctctgaccgccagctgccccaggtcctgcacatgtcagagctcctgaatcgcggcctgggtgtgcaccatagcggcatcctgcccatcctcaaggagatcgtggagatgctcttcagccgtggcctggtcaaggtcttgtttgccacagagacctttgccatgggagtaaacatgcctgctcgtacagtagtgtttgactccatgcgcaaacacgatggctccaccttccgggacctgctccctggggagtatgtgcagatggcaggccgggcagggcggaggggcctggaccccacaggcaccgttatcctgctctgcaagggccgagtgcccgagatggcagacctgcaccgcatgatgatggggaagccgtcccagctgcagtcccagttccgcctcacgtacactatgatcctcaacttgctgcgagtggatgccctcagggtggaggacatgatgaagaggagcttctctgagtttccctcccgcaaagacagcaaggcccatgaacaggccctggctgaactgaccaagaggctgggagctttggaggagcctgacatgactggccaactggtcgacctgcctgaatattacagctggggggaggaactgacagagacccagcacatgatccagcgacgcatcatggagtctgtgaacgggctgaagtctctctcagcaggaagggtggtggttgtgaagaatcaggagcatcacaacgcattgggagtgatcctacaggtctcctcgaactccaccagcagagtattcacaaccctggtcttgtgtgataagcccttgtcccaggacccacaggacagggggccagccactgcagaggtgccctatccagatgacctcgtgggattcaagctgttcctgcctgaagggccttgtgaccacaccgtggtcaagctccagccaggagatatggctgccatcaccaccaaggtgctccgggtgaatggggagaagatcttggaggacttcagcaagaggcagcagccaaaattcaagaaggatcctccccttgcagccgtgaccactgctgtccaggaactgctgcgtctggctcaggcccacccagccggacctcccaccctcgaccctgtcaatgacctgcagctcaaagatatgtcagttgtagagggtgggctccgggcccggaagctggaggagctgatccagggggctcagtgtgtacacagcccccgttttcctgcccagtacctgaagctgcgggagcgaatgcagatacagaaggagatggagcggctgcgcttcctactgtcggatcagtcattgctgctgcttcctgagtaccatcagcgagtagaggtgctccgaaccctgggttacgtggacgaggtgggcactgtgaagctggcagggcgggtggcttgtgccatgagcagccatgagttgctcctcactgagctcatgtttgacaatgcactgagcaccctgcggcctgaggagattgctgccttgctctctggcctggtctgccagagccctggggacgctggggatcagctcccaaacaccctcaagcagggaatagaacgtgtccgggctgtggccaagcggattggtgaggtccaggtggcttgtggcctgaaccagacggtggaggaatttgtgggggagctgaattttgggctggttgaggttgtatatgagtgggcccggggcatgcccttctccgagttggcagggctctcagggacccctgagggcctggtggtccgctgcattcagcgcctggctgagatgtgtcgctcactgcggggggcagcccgcctggtaggagagcctgtgctgggtgccaagatggagacagcggctaccttgctacggcgggacatcgtatttgcggccagcctctacacccagtgaatgccccatgtaaaaacatgatgataaaacagcaaagcactgttgtgtgcttgagttgctggacagggatgactcagctaagaagacagcgagagaacctcttagaaatatgcttttattatctgcacacagagatatgactgcctccctctaaagcattactatttgggagagggagtcttggggggtgatgggaggtcctgagtcatagcttccacataccatatgggcaggaaggcgtaaggtgcatcttggtgtacagacacggtgactgggccgccaggctcccaagagaagagatgaacgagcctggggggcagatggaggcatcagttgagggccagaggctggatcctgggatccagaggggagggacagagctgaatgcctcacctggggtcatcctggacaaccgtgctctgggcaaagctaaggaaggcggcacagaagttcatgcacacagagggattccagccgtcacggtcattctggagcaggcagaggaggaggcagaagatgggcagtgggggtggtgggaggagagaaggcaggctgttgccctggatgctagacctgtggtcttggtgtttggggatacgggtgggagctgcaacatcgttcccttaccctgacatattcaaacatcttcatggtaggaaaggtcttgagggaagagacaaaaccgtctgggttacggaagccagcaacaacattcgggacccctgggaggaatgactgagcccaccatttcaggagcttgtgtctgacaggaaaagcaagggatcagtgggacccctcgtgcaccctccattctgccttcaccctcctccccaagtccctttcccagccttcaagcctaagctctcgccctgcccaccccgatcctgaacctgtagaaactcctccattggccagggctgtgcatctccttggaggtcttgagctccacatagcaggttgggggctgtgtggatggggcttgggggtctgtgcagtctacctcccctgagaagagcagagggtggcttcccaggcggctgcgtagcacagagcagaaggccacgttggtgtta

SEQ ID NO: 363289 - DNA, 1808 bp, Homo sapiens
  misc_feature (1791)..(1791): n is a, c, g, or t
cgcccgttccggggcggggcttacttcgcagcgactacttgccgcacttccgggctgccaggcagctgctgtggctccaggatgatggagacagagcgacttgtgctaccccctccagatcccctggacctaccccttcgggccgtggagctcggatgcacggggcactgggagctgctgaacttgcctggagctccagagagtagccttccccatggcctccctccttgtgccccagatctgcagcaagaagcagaacagttgtttctgtcatccccagcctggctgcctctgcatggtgtggagcactcagcccgaaaatggcagaggaagacggatccctggtctcttttggctgtcctgggagccccagtcccatccgacctacaggcccaaagacacccaaccacaggccagatactgggttacaaagaggtcttgctggagaacacaaatctctcggctacaacctccttgtctcttcgccggcctccagggccagcctcccagtccttatggggaaatccaactcggtatcccttctggccaggggggatggatgaacccaccataacagatctgaacacacgggaggaggctgaggaggagatagactttgagaaagatcttcttactattccacctggtttcaagaaaggcatggactttgcaccaaaagattgtccaactccagctcctggactactaagccttagctgtctgttggagcctctggatttgggtgggggtgacgaggatgagaatgaggcagtgggacagccaggaggtcccagaggggacactgtttcagcctctccctgcagtgctcccctggcccgagcaagcagcttggaagacctagtgttgaaggaagcgtccacagctgtatccaccccagaggccccagagcctccatctcaggagcagtgggccatccctgtggacgccacctcccctgttggtgatttctatcgcctcattccccagccagccttccagtgggcatttgagccagatgtgtttcagaaacaggccatcctgcacttggaacggcatgactctgtctttgtcgcagctcacacatctgcaggaaaaacagttgtggctgaatatgccattgccctggcccagaaacacatgacacgcaccatctacacttcgcccatcaaggccctgagcaaccagaagttccgggacttccgaaacacattcggggatgtggggctgctcaccggggatgtacagctgcatccggaggcctcctgcctcatcatgaccacagagatccttcgctccatgctgtacagtggctcagatgttattcgggacctggagtgggtcatctttgatgaggttcactatatcaacgatgtcgagcgtggggtcgtgtgggaggaggtgcttatcatgctacctgaccacgtttctatcatccttctgagtgccaccgtccccaacgcccttgagtttgctgactggattggggcggatgaagcagtcagaagatcctatgtggaatagccactggatacccggcccgatgcccctggagcacaactatacaccagggaacacagtccaagaacccaagggggagcctcaaaaaggaagcaggagcacccaaggaagaccttcccatcaaaaagcggcacctaaccagcagtaaggaaggcaaaaacggcaagcacaggacaaaagcaaccaagactatggagacaagcgcaccacactatagggggcgcggaaagaccacagataaacaggcagacggagacagcagacaagatcacnaccgaccacagacataa

SEQ ID NO: 363290 - DNA, 355 bp, Homo sapiens
gtcagagatgctagggaggcccttctcctccagaggggcacgtagaggcagggaggggcagtggtctgggagtttcctccagcctgagggagaccatgaagtggtggggttgtagtgagggggctcccccagcctaagggagactgtgaagtggaggttgtagtaagagggcttccacagcctgagggaggcttctgggggagagaagatcttaccccagatcttaagatctgctccctcttcaggaaggatcctccccttgcagccgtgaccactgctgtccaggaactgctgcgtctggctcaggcccacccagccggacctcccaccctcgaccctgtcaatgacctgcagc

SEQ ID NO: 363291 - DNA, 4895 bp, Homo sapiens
cgcccgttccggggcggggcttacttcgcagcgactacttgccgcacttccgggctgccaggcagctgctgtggctccaggatgatggagacagagcgacttgtgctaccccctccagatcccctggacctaccccttcgggccgtggagctcggatgcacggggcactgggagctgctgaacttgcctggagctccagagagtagccttccccatggcctccctccttgtgccccagatctgcagcaagaagcagaacagttgtttctgtcatccccagcctggctgcctctgcatggtgtggagcactcagcccgaaaatggcagaggaagacggatccctggtctcttttggctgtcctgggagccccagtcccatccgacctacaggcccaaagacacccaaccacaggccagatactgggttacaaagaggtcttgctggagaacacaaatctctcggctacaacctccttgtctcttcgccggcctccagggccagcctcccagtccttatggggaaatccaactcggtatcccttctggccaggggggatggatgaacccaccataacagatctgaacacacgggaggaggctgaggaggagatagactttgagaaagatcttcttactattccacctggtttcaagaaaggcatggactttgcaccaaaagattgtccaactccagctcctggactactaagccttagctgtctgttggagcctctggatttgggtgggggtgacgaggatgagaatgaggcagtgggacagccaggaggtcccagaggggacactgtttcagcctctccctgcagtgctcccctggcccgagcaagcagcttggaagacctagtgttgaaggaagcgtccacagctgtatccaccccagaggccccagagcctccatctcaggagcagtgggccatccctgtggacgccacctcccctgttggtgatttctatcgcctcattccccagccagccttccagtgggcatttgagccagatgtgtttcagaaacaggccatcctgcacttggaacggcatgactctgtctttgtcgcagctcacacatctgcaggaaaaacagttgtggctgaatatgccattgccctggcccagaaacacatgacacgcaccatctacacttcgcccatcaaggccctgagcaaccagaagttccgggacttccgaaacacattcggggatgtggggctgctcaccggggatgtacagctgcatccggaggcctcctgcctcatcatgaccacagagatccttcgctccatgctgtacagtggctcagatgttattcgggacctggagtgggtcatctttgatgaggttcactatatcaacgatgtcgagcgtggggtcgtgtgggaggaggtgcttatcatgctacctgaccacgtttctatcatccttctgagtgccaccgtccccaacgcccttgagtttgctgactggattgggcggctgaagcgtcgtcagatctatgtgattagcactgtaacccgccccgtgcccctggagcactatcttttcacagggaacagctccaagacccagggggagctctttttgttgctggactcccgaggagccttccatacaaaagggtactatgcagctgtggaggccaagaaggagagaatgagcaaacacgcccagacctttggggccaagcagcccacacatcaggggggccctgcacaggaccgcggagtgtacctgtccctcctggcctccctccgcacacgtgcccagttgcccgtggtggtgttcaccttctcccggggccgctgtgatgagcaggcctcaggcctcacctcccttgacctcaccaccagttcggagaagagcgagatccacctcttcctgcagcgctgccttgctcgcctccgtggctctgaccgccagctgccccaggtcctgcacatgtcagagctcctgaatcgcggcctgggtgtgcaccatagcggcatcctgcccatcctcaaggagatcgtggagatgctcttcagccgtggcctggtcaaggtcttgtttgccacagagacctttgccatgggagtaaacatgcctgctcgtacagtagtgtttgactccatgcgcaaacacgatggctccaccttccgggacctgctccctggggagtatgtgcagatggcaggccgggcagggcggaggggcctggaccccacaggcaccgttatcctgctctgcaagggccgagtgcccgagatggcagacctgcaccgcatgatgatggggaagccgtcccagctgcagtcccagttccgcctcacgtacactatgatcctcaacttgctgcgagtggatgccctcagggtggaggacatgatgaagaggagcttctctgagtttccctcccgcaaagacagcaaggcccatgaacaggccctggctgaactgaccaagaggctgggagctttggaggagcctgacatgactggccaactggtcgacctgcctgaatattacagctggggggaggaactgacagagacccagcacatgatccagcgacgcatcatggagtctgtgaacgggctgaagtctctctcagcaggaagggtggtggttgtgaagaatcaggagcatcacaacgcattgggagtgatcctacaggtctcctcgaactccaccagcagagtattcacaaccctggtcttgtgtgataagcccttgtcccaggacccacaggacagggggccagccactgcagaggtgccctatccagatgacctcgtgggattcaagctgttcctgcctgaagggccttgtgaccacaccgtggtcaagctccagccaggagatatggctgccatcaccaccaaggtgctccgggtgaatggggagaagatcttggaggacttcagcaagaggcagcagccaaaattcaagaaggatcctccccttgcagccgtgaccactgctgtccaggaactgctgcgtctggctcaggcccacccagccggacctcccaccctcgaccctgtcaatgacctgcagctcaaagatatgtcagttgtagagggtgggctccgggcccggaagctggaggagctgatccagggggctcagtgtgtacacagcccccgttttcctgcccagtacctgaagctgcgggagcgaatgcagatacagaaggagatggagcggctgcgcttcctactgtcggatcagtcattgctgctgcttcctgagtaccatcagcgagtagaggtgctccgaaccctgggttacgtggacgaggtgggcactgtgaagctggcagggcgggtggcttgtgccatgagcagccatgagttgctcctcactgagctcatgtttgacaatgcactgagcaccctgcggcctgaggagattgctgccttgctctctggcctggtctgccagagccctggggacgctggggatcagctcccaaacaccctcaagcagggaatagaacgtgtccgggctgtggccaagcggattggtgaggtccaggtggcttgtggcctgaaccagacggtggaggaatttgtgggggagctgaattttgggctggttgaggttgtatatgagtgggcccggggcatgcccttctccgagttggcagggctctcagggacccctgagggcctggtggtccgctgcattcagcgcctggctgagatgtgtcgctcactgcggggggcagcccgcctggtaggagagcctgtgctgggtgccaagatggagacagcggctaccttgctacggcgggacatcgtatttgcggccagcctctacacccagtgaatgccccatgtaaaaacatgatgataaaacagcaaagcactgttgtgtgcttgagttgctggacagggatgactcagctaagaagacagcgagagaacctcttagaaatatgcttttattatctgcacacagagatatgactgcctccctctaaagcattactatttgggagagggagtcttggggggtgatgggaggtcctgagtcatagcttccacataccatatgggcaggaaggcgtaaggtgcatcttggtgtacagacacggtgactgggccgccaggctcccaagagaagagatgaacgagcctggggggcagatggaggcatcagttgagggccagaggctggatcctgggatccagaggggagggacagagctgaatgcctcacctggggtcatcctggacaaccgtgctctgggcaaagctaaggaaggcggcacagaagttcatgcacacagagggattccagccgtcacggtcattctggagcaggcagaggaggaggcagaagatgggcagtgggggtggtgggaggagagaaggcaggctgttgccctggatgctagacctgtggtcttggtgtttggggatacgggtgggagctgcaacatcgttcccttaccctgacatattcaaacatcttcatggtaggaaaggtcttgagggaagagacaaaaccgtctgggttacggaagccagcaacaacattcgggacccctgggaggaatgactgagcccaccatttcaggagcttgtgtctgacaggaaaagcaagggatcagtgggacccctcgtgcaccctccattctgccttcaccctcctccccaagtccctttcccagccttcaagcctaagctctcgccctgcccaccccgatcctgaacctgtagaaactcctccattggccagggctgtgcatctccttggaggtcttgagctccacatagcaggttgggggctgtgtggatggggcttgggggtctgtgcagtctacctcccctgagaagagcagagggtggcttcccaggcggctgcgtagcacagagcagaaggccacgttggtgtta

SEQ ID NO: 363292 - DNA, 4989 bp, Homo sapiens
cgcccgttccggggcggggcttacttcgcagcgactacttgccgcacttccgggctgccaggcagctgctgtggctccaggatgatggagacagagcgacttgtgctaccccctccagatcccctggacctaccccttcgggccgtggagctcggatgcacggggcactgggagctgctgaacttgcctggagctccagagagtagccttccccatggcctccctccttgtgccccagatctgcagcaagaagcagaacagttgtttctgtcatccccagcctggctgcctctgcatggtgtggagcactcagcccgaaaatggcagaggaagacggatccctggtctcttttggctgtcctgggagccccagtcccatccgacctacaggcccaaagacacccaaccacaggccagatactgggttacaaagaggtcttgctggagaacacaaatctctcggctacaacctccttgtctcttcgccggcctccagggccagcctcccagtccttatggggaaatccaactcggtatcccttctggccaggggggatggatgaacccaccataacagatctgaacacacgggaggaggctgaggaggagatagactttgagaaagatcttcttactattccacctggtttcaagaaaggcatggactttgcaccaaaagattgtccaactccagctcctggactactaagccttagctgtctgttggagcctctggatttgggtgggggtgacgaggatgagaatgaggcagtgggacagccaggaggtcccagaggggacactgtttcagcctctccctgcagtgctcccctggcccgagcaagcagcttggaagacctagtgttgaaggaagcgtccacagctgtatccaccccagaggccccagagcctccatctcaggagcagtgggccatccctgtggacgccacctcccctgttggtgatttctatcgcctcattccccagccagccttccagtgggcatttgagccagatgtgtttcagaaacaggccatcctgcacttggaacggcatgactctgtctttgtcgcagctcacacatctgcaggaaaaacagttgtggctgaatatgccattgccctggcccagaaacacatgacacgcaccatctacacttcgcccatcaaggccctgagcaaccagaagttccgggacttccgaaacacattcggggatgtggggctgctcaccggggatgtacagctgcatccggaggcctcctgcctcatcatgaccacagagatccttcgctccatgctgtacagtggctcagatgttattcgggacctggagtgggtcatctttgatgaggttcactatatcaacgatgtcgagcgtggggtcgtgtgggaggaggtgcttatcatgctacctgaccacgtttctatcatccttctgagtgccaccgtccccaacgcccttgagtttgctgactggattgggcggctgaagcgtcgtcagatctatgtgattagcactgtaacccgccccgtgcccctggagcactatcttttcacagggaacagctccaagacccagggggagctctttttgttgctggactcccgaggagccttccatacaaaagggtactatgcagctgtggaggccaagaaggagagaatgagcaaacacgcccagacctttggggccaagcagcccacacatcaggggggccctgcacaggaccgcggagtgtacctgtccctcctggcctccctccgcacacgtgcccagttgcccgtggtggtgttcaccttctcccggggccgctgtgatgagcaggcctcaggcctcacctcccttgacctcaccaccagttcggagaagagcgagatccacctcttcctgcagcgctgccttgctcgcctccgtggctctgaccgccagctgccccaggtcctgcacatgtcagagctcctgaatcgcggcctgggtgtgcaccatagcggcatcctgcccatcctcaaggagatcgtggagatgctcttcagccgtggcctggtcaaggtcttgtttgccacagagacctttgccatgggagtaaacatgcctgctcgtacagtagtgtttgactccatgcgcaaacacgatggctccaccttccgggacctgctccctggggagtatgtgcagatggcaggccgggcagggcggaggggcctggaccccacaggcaccgttatcctgctctgcaagggccgagtgcccgagatggcagacctgcaccgcatgatgatggggaagccgtcccagctgcagtcccagttccgcctcacgtacactatgatcctcaacttgctgcgagtggatgccctcagggtggaggacatgatgaagaggagcttctctgagtttccctcccgcaaagacagcaaggcccatgaacaggccctggctgaactgaccaagaggctgggagctttggaggagcctgacatgactggccaactggtcgacctgcctgaatattacagctggggggaggaactgacagagacccagcacatgatccagcgacgcatcatggagtctgtgaacgggctgaagtctctctcagcaggaagggtggtggttgtgaagaatcaggagcatcacaacgcattgggagtgatcctacaggtctcctcgaactccaccagcagagtattcacaaccctggtcttgtgtgataagcccttgtcccaggacccacaggacagggggccagccactgcagaggtgccctatccagatgacctcgtgggattcaagctgttcctgcctgaagggccttgtgaccacaccgtggtcaagctccagccaggagatatggctgccatcaccaccaaggtgctccgggtgaatggggagaagatcttggaggacttcagcaagaggcagcagccaaaattcaagaaggatcctccccttgcagccgtgaccactgctgtccaggaactgctgcgtctggctcaggcccacccagccggacctcccaccctcgaccctgtcaatgacctgcagctcaaagatatgtcagttgtagagggtgggctccgggcccggaagctggaggagctgatccagggggctcagtgtgtacacagcccccgttttcctgcccagtacctgaagctgcgggagcgaatgcagatacagaaggagatggagcggctgcgcttcctactgtcggatcagtcattgctgctgcttcctgagtaccatcagcgagtagaggtgctccgaaccctgggttacgtggacgaggtgggcactgtgaagctggcagggcgggtggcttgtgccatgagcagccatgagttgctcctcactgagctcatgtttgacaatgcactgagcaccctgcggcctgaggagattgctgccttgctctctggcctggtctgccagagccctggggacgctggggatcagctcccaaacaccctcaagcagggaatagaacgtgtccgggctgtggccaagcggattggtgaggtccaggtggcttgtggcctgaaccagacggtggaggaatttgtgggggagctgaattttgggctggttgaggttgtatatgagtgggcccggggcatggtgagtacctgaggtttgggattttgcagacggctggctggggagaacctgcccaggctgagtgcatccagtcctcaccctactttccccacagcccttctccgagttggcagggctctcagggacccctgagggcctggtggtccgctgcattcagcgcctggctgagatgtgtcgctcactgcggggggcagcccgcctggtaggagagcctgtgctgggtgccaagatggagacagcggctaccttgctacggcgggacatcgtatttgcggccagcctctacacccagtgaatgccccatgtaaaaacatgatgataaaacagcaaagcactgttgtgtgcttgagttgctggacagggatgactcagctaagaagacagcgagagaacctcttagaaatatgcttttattatctgcacacagagatatgactgcctccctctaaagcattactatttgggagagggagtcttggggggtgatgggaggtcctgagtcatagcttccacataccatatgggcaggaaggcgtaaggtgcatcttggtgtacagacacggtgactgggccgccaggctcccaagagaagagatgaacgagcctggggggcagatggaggcatcagttgagggccagaggctggatcctgggatccagaggggagggacagagctgaatgcctcacctggggtcatcctggacaaccgtgctctgggcaaagctaaggaaggcggcacagaagttcatgcacacagagggattccagccgtcacggtcattctggagcaggcagaggaggaggcagaagatgggcagtgggggtggtgggaggagagaaggcaggctgttgccctggatgctagacctgtggtcttggtgtttggggatacgggtgggagctgcaacatcgttcccttaccctgacatattcaaacatcttcatggtaggaaaggtcttgagggaagagacaaaaccgtctgggttacggaagccagcaacaacattcgggacccctgggaggaatgactgagcccaccatttcaggagcttgtgtctgacaggaaaagcaagggatcagtgggacccctcgtgcaccctccattctgccttcaccctcctccccaagtccctttcccagccttcaagcctaagctctcgccctgcccaccccgatcctgaacctgtagaaactcctccattggccagggctgtgcatctccttggaggtcttgagctccacatagcaggttgggggctgtgtggatggggcttgggggtctgtgcagtctacctcccctgagaagagcagagggtggcttcccaggcggctgcgtagcacagagcagaaggccacgttggtgtta

SEQ ID NO: 363293 - DNA, 7165 bp, Homo sapiens
aagaagaggtagcgagtggacgtgactgctctatcccgggcaaaagggatagaaccagaggtggggagtctgggcagtcggcgacccgcgaagacttgaggtgccgcagcggcatccggagtagcgccgggctccctccggggtgcagccgccgtcgggggaagggcgccacaggccgggaagacctcctccctttgtgtccagtagtggggtccaccggagggcggcccgtgggccgggcctcaccgcggcgctccgggactgtggggtcaggctgcgttgggtggacgcccacctcgccaaccttcggaggtccctgggggtcttcgtgcgccccggggctgcagagatccaggggaggcgcctgtgaggcccggacctgccccggggcgaagggtatgtggcgagacagagccctgcacccctaattcccggtggaaaactcctgttgccgtttccctccaccggcctggagtctcccagtcttgtcccggcagtgccgccctccccactaagacctaggcgcaaaggcttggctcatggttgacagctcagagagagaaagatctgagggaagatggatgcaaaagctcgaaattgtttgcttcaacatagagaagctctggaaaaggacatcaagacatcctacatcatggatcacatgattagtgatggatttttaacaatatcagaagaggaaaaagtaagaaatgagcccactcaacagcaaagagcagctatgctgattaaaatgatacttaaaaaagataatgattcctacgtatcattctacaatgctctactacatgaaggatataaagatcttgctgcccttctccatgatggcattcctgttgtctcttcttccagtgtaaggacagtcctgtgtgaaggtggagtaccacagaggccagttgtttttgtcacaaggaagaagctggtgaatgcaattcagcagaagctctccaaattgaaaggtgaaccaggatgggtcaccatacatggaatggcaggctgtgggaagtctgtattagctgcagaagctgttagagatcattcccttttagaaggttgtttcccagggggagtgcattgggtttcagttgggaaacaagacaaatctgggcttctgatgaaactgcagaatctttgcacacggttggatcaggatgagagtttttcccagaggcttccacttaatattgaagaggctaaagaccgtctccgcattctgatgcttcgcaaacacccaaggtctctcttgatcttggatgatgtttgggactcttgggtgttgaaagcttttgacagtcagtgtcagattcttcttacaaccagagacaagagtgttacagattcagtaatgggtcctaaatatgtagtccctgtggagagttccttaggaaaggaaaaaggacttgaaattttatccctttttgttaatatgaagaaggcagatttgccagaacaagctcatagtattataaaagaatgtaaaggctctccccttgtagtatctttaattggtgcacttttacgtgattttcccaatcgctgggagtactacctcaaacagcttcagaataagcagtttaagagaataaggaaatcttcgtcttatgattatgaggctctagatgaagccatgtctataagtgttgaaatgctcagagaagacatcaaagattattacacagatctttccatccttcagaaggacgttaaggtgcctacaaaggtgttatgtattctctgggacatggaaactgaagaagttgaagacatactgcaggagtttgtaaataagtctcttttattctgtgatcggaatggaaagtcgtttcgttattatttacatgatcttcaagtagattttcttacagagaagaattgcagccagcttcaggatctacataagaagataatcactcagtttcagagatatcaccagccgcatactctttcaccagatcaggaagactgtatgtattggtacaactttctggcctatcacatggccagtgccaagatgcacaaggaactttgtgctttaatgttttccctggattggattaaagcaaaaacagaacttgtaggccctgctcatctgattcatgaatttgtggaatacagacatatactagatgaaaaggattgtgcagtcagtgagaattttcaggagtttttatctttaaatggacaccttcttggacgacagccatttcctaatattgtacaactgggtctctgtgagccggaaacttcagaagtttatcagcaagctaagctgcaggccaagcaggaggtcgataatggaatgctttacctggaatggataaacaaaaaaaacatcacgaatctttcccgcttagttgtccgcccccacacagatgctgtttaccatgcctgcttttctgaggatggtcagagaatagcttcttgtggagctgataaaaccttacaggtgttcaaagctgaaacaggagagaaacttctagaaatcaaggctcatgaggatgaagtgctttgttgtgcattctctacagatgacagatttatagcaacctgctcagtggataaaaaagtgaagatttggaattctatgactggggaactagtacacacctatgatgagcactcagagcaagtcaattgctgccatttcaccaacagtagtcatcatcttctcttagccactgggtcaagtgactgcttcctcaaactttgggatttgaatcaaaaagaatgtcgaaataccatgtttggtcatacaaattcagtcaatcactgcagattttcaccagatgataagcttttggctagttgttcagctgatggaaccttaaagctttgggatgcgacatcagcaaatgagaggaaaagcattaatgtgaaacagttcttcctaaatttggaggaccctcaagaggatatggaagtgatagtgaagtgttgttcgtggtctgctgatggtgcaaggataatggtggcagcaaaaaataaaatctttctttttgacattcatactagtggcctattgggagaaatccacacgggccatcacagcaccatccagtactgtgacttctccccacaaaaccatttggcagtggttgctttgtcccagtactgtgtagagttgtggaatacagactcacgttcaaaggtggctgattgcagaggacatttaagttgggttcatggtgtgatgttttctcctgatggatcatcatttttgacatcttctgatgaccagacaatcaggctctgggagacaaagaaagtatgtaagaactctgctgtaatgttaaagcaagaagtagatgttgtgtttcaagaaaatgaagtgatggtccttgcagttgaccatataagacgtctgcaactcattaatggaagaacaggtcagattgattatctgactgaagctcaagttagctgctgttgcttaagtccacatcttcagtacattgcatttggagatgaaaatggagccattgagattttagaacttgtaaacaatagaatcttccagtccaggtttcagcacaagaaaactgtatggcacatccagttcacagccgatgagaagactcttatttcaagttctgatgatgctgaaattcaggtatggaattggcaattggacaaatgtatctttctacgaggccatcaggaaacagtgaaagactttagactcttgaaaaattcaagactgctttcttggtcatttgatggaacagtgaaggtatggaatattattactggaaataaagaaaaagactttgtctgtcaccagggtacagtactttcttgtgacatttctcacgatgctaccaagttttcatctacctctgctgacaagactgcaaagatctggagttttgatctccttttgccacttcatgaattgaggggccacaacggctgtgtgcgctgctctgccttctctgtggacagtaccctgctggcaacgggagatgacaatggagaaatcaggatatggaatgtctcaaacggtgagcttcttcatttgtgtgctccgctttcagaagaaggagctgctacccatggaggctgggtgactgacctttgcttttctccagatggcaaaatgcttatctctgctggaggatatattaagtggtggaacgttgtcactggggaatcctcacagaccttctacacaaatggaaccaatcttaagaaaatacacgtgtcccctgacttcaaaacatatgtgactgtggataatcttggtattttatatattttacagactttagaataaaatagttaagcattaatgtagttgaactttttaaatttttgaattggaaaaaaattctaatgaaaccctgatatcaactttttataaagctcttaattgttgtgcagtattgcattcattacaaaagtgtttgtggttggatgaataatattaatgtagctttttcccaaatgaacatacctttaatcttgtttttcatgatcatcattaacagtttgtccttaggatgcaaatgaaaatgtgaatacataccttgttgtactgttggtaaaattctgtcttgatgcattcaaaatggttgacataattaatgagaagaatttggaagaaattggtattttaatactgtctgtatttattactgttatgcaggctgtgcctcagggtagcagtggcctgctttttgaaccacacttaccccaagggggttttgttctcctaaatacaatcttagaggttttttgcactctttaaatttgctttaaaaatattgtgtctgtgtgcatagtctgcagcatttcctttaattgactcaataagtgagtcttggatttagcaggcccccccaccttttttttttgtttttggagacagagtcttgctttgttgccaggctggagtgcagtggcgcgatctcggctcaccacaatcgctgcctcctgggttcaagcaattctcctgcctcagcctcccgagtagctgggactacaggtgtgcgcacatgccaggctaatttttgtatttttagtagagacggggtttcaccatgttggccgggatggtctcgatctcttgacctcatgatctacccgccttggcctcccaaagtgctgagattacaggcgtgagccaccgtgcctggccaggccccttctcttttaatggagacagggtcttgcactatcacccaggctggagtgcagtggcataatcatacctcattgcagcctcagactcctgggttcaagcaatcctcctgcctcagcctcccaagtagctgagactacaggcacgagccaccacacccagctaatttttaagttttcttgtagagacagggtctcactatgttgtctaggctggtcttgaactcttggcctcaagtaatcctcctgcctcagcctcccaaagtgttgggattgcagatatgagccactggcctggccttcagcagttctttttgtgaagtaaaacttgtatgttggaaagagtagattttattggtctacccttttctcactgtagctgctggcagccctgtgccatatctggactctagttgtcagtatctgagttggacactattcctgctccctcttgtttcttacatatcagacttcttacttgaatgaaacctgatctttcctaatcctcacttttttcttttttaaaaagcagtttctccactgctaaatgttagtcattgaggtggggccaattttaatcataagccttaataagatttttctaagaaatgtgaaatagaacaattttcatctaattccatttacttttagatgaatggcattgtgaatgccattcttttaatgaatttcaagagaattctctggttttctgtgtaattccagatgagtcactgtaactctagaagattaaccttccagccaacctattttcctttcccttgtctctctcatcctcttttccttccttctttcctttctcttcttttatctccaaggttaatcaggaaaaatagcttttgacaggggaaaaaactcaataactagctatttttgacctcctgatcaggaactttagttgaagcgtaaatctaaagaaacattttctctgaaatatattattaagggcaatggagataaattaatagtagatgtggttcccagaaaatataatcaaaattcaaagattttttttgtttctgtaactggaactaaatcaaatgattactagtgttaatagtagataacttgtttttattgttggtgcatattagtataactgtggggtaggtcggggagagggtaagggaatagatcactcagatgtattttagataagctatttagcctttgatggaatcataaatacagtgaatacaatcctttgcattgttaaggaggttttttgtttttaaatggtgggtcaaggagctagtttacaggcttactgtgatttaagcaaatgtgaaaagtgaaaccttaattttatcaaaagaaatttctgtaaatggtatgtctccttagaatacccaaatcataattttatttgtacacactgttaggggctcatctcatgtaggcagagtataaagtattaccttttggaattaaaagccactgactgttataaagtataacaacacacatcaggttttaaaaagccttgaatggcccttgtcttaaaaagaaattaggagccaggtgcggtggcacgtgcctgtaatcccagctccttgggaggctaagacaggaggattccttgagccctggagtttgagtccagcctgggtgacatagcaagaccctgtcttaaaagaaaaatgggaagaaagacaaggtaacatgaagaaagaagagatacctagtatgatggagctgcaaatttcatggcagttcatgcagtcggtcaagaggaggattttgttttgtagtttgcagatgagcatttctaaagcattttcccttgctgtatttttttgtattataaattacattggacttcatatatataatttttttttacattatatgtctcttgtatgttttgaaactcttgtatttatgatatagcttatatgatttttttgccttggtatacattttaaaatatgaatttaaaaaatttttgtaaaaataaaattcacaaaattgttttgaaaaacaaaaaaaa

SEQ ID NO: 363294 - DNA, 7069 bp, Homo sapiens
aagaagaggtagcgagtggacgtgactgctctatcccgggcaaaagggatagaaccagaggtggggagtctgggcagtcggcgacccgcgaagacttgaggtgccgcagcggcatccggagtagcgccgggctccctccggggtgcagccgccgtcgggggaagggcgccacaggccgggaagacctcctccctttgtgtccagtagtggggtccaccggagggcggcccgtgggccgggcctcaccgcggcgctccgggactgtggggtcaggctgcgttgggtggacgcccacctcgccaaccttcggaggtccctgggggtcttcgtgcgccccggggctgcagagatccaggggaggcgcctgtgaggcccggacctgccccggggcgaagggtatgtggcgagacagagccctgcacccctaattcccggtggaaaactcctgttgccgtttccctccaccggcctggagtctcccagtcttgtcccggcagtgccgccctccccactaagacctaggcgcaaaggcttggctcatggttgacagctcagagagagaaagatctgagggaagatggatgcaaaagctcgaaattgtttgcttcaacatagagaagctctggaaaaggacatcaagacatcctacatcatggatcacatgattagtgatggatttttaacaatatcagaagaggaaaaagtaagaaatgagcccactcaacagcaaagagcagctatgctgattaaaatgatacttaaaaaagataatgattcctacgtatcattctacaatgctctactacatgaaggatataaagatcttgctgcccttctccatgatggcattcctgttgtctcttcttccagtggtaaagattcagttagtggaataacttcgtatgtaaggacagtcctgtgtgaaggtggagtaccacagaggccagttgtttttgtcacaaggaagaagctggtgaatgcaattcagcagaagctctccaaattgaaaggtgaaccaggatgggtcaccatacatggaatggcaggctgtgggaagtctgtattagctgcagaagctgttagagatcattcccttttagaaggttgtttcccagggggagtgcattgggtttcagttgggaaacaagacaaatctgggcttctgatgaaactgcagaatctttgcacacggttggatcaggatgagagtttttcccagaggcttccacttaatattgaagaggctaaagaccgtctccgcattctgatgcttcgcaaacacccaaggtctctcttgatcttggatgatgtttgggactcttgggtgttgaaagcttttgacagtcagtgtcagattcttcttacaaccagagacaagagtgttacagattcagtaatgggtcctaaatatgtagtccctgtggagagttccttaggaaaggaaaaaggacttgaaattttatccctttttgttaatatgaagaaggcagatttgccagaacaagctcatagtattataaaagaatgtaaaggctctccccttgtagtatctttaattggtgcacttttacgtgattttcccaatcgctgggagtactacctcaaacagcttcagaataagcagtttaagagaataaggaaatcttcgtcttatgattatgaggctctagatgaagccatgtctataagtgttgaaatgctcagagaagacatcaaagattattacacagatctttccatccttcagaaggacgttaaggtgcctacaaaggtgttatgtattctctgggacatggaaactgaagaagttgaagacatactgcaggagtttgtaaataagtctcttttattctgtgatcggaatggaaagtcgtttcgttattatttacatgatcttcaagtagattttcttacagagaagaattgcagccagcttcaggatctacataagaagataatcactcagtttcagagatatcaccagccgcatactctttcaccagatcaggaagactgtatgtattggtacaactttctggcctatcacatggccagtgccaagatgcacaaggaactttgtgctttaatgttttccctggattggattaaagcaaaaacagaacttgtaggccctgctcatctgattcatgaatttgtggaatacagacatatactagatgaaaaggattgtgcagtcagtgagaattttcaggagtttttatctttaaatggacaccttcttggacgacagccatttcctaatattgtacaactgggtctctgtgagccggaaacttcagaagtttatcagcaagctaagctgcaggccaagcaggaggtcgataatggaatgctttacctggaatggataaacaaaaaaaacatcacgaatctttcccgcttagttgtccgcccccacacagatgctgtttaccatgcctgcttttctgaggatggtcagagaatagcttcttgtggagctgataaaaccttacaggtgttcaaagctgaaacaggagagaaacttctagaaatcaaggctcatgaggatgaagtgctttgttgtgcattctctacagatgacagatttatagcaacctgctcagtggataaaaaagtgaagatttggaattctatgactggggaactagtacacacctatgatgagcactcagagcaagtcaattgctgccatttcaccaacagtagtcatcatcttctcttagccactgggtcaagtgactgcttcctcaaactttgggatttgaatcaaaaagaatgtcgaaataccatgtttggtcatacaaattcagtcaatcactgcagattttcaccagatgataagcttttggctagttgttcagctgatggaaccttaaagctttgggatgcgacatcagcaaatgagaggaaaagcattaatgtgaaacagttcttcctaaatttggaggaccctcaagaggatatggaagtgatagtgaagtgttgttcgtggtctgctgatggtgcaaggataatggtggcagcaaaaaataaaatctttttgtggaatacagactcacgttcaaaggtggctgattgcagaggacatttaagttgggttcatggtgtgatgttttctcctgatggatcatcatttttgacatcttctgatgaccagacaatcaggctctgggagacaaagaaagtatgtaagaactctgctgtaatgttaaagcaagaagtagatgttgtgtttcaagaaaatgaagtgatggtccttgcagttgaccatataagacgtctgcaactcattaatggaagaacaggtcagattgattatctgactgaagctcaagttagctgctgttgcttaagtccacatcttcagtacattgcatttggagatgaaaatggagccattgagattttagaacttgtaaacaatagaatcttccagtccaggtttcagcacaagaaaactgtatggcacatccagttcacagccgatgagaagactcttatttcaagttctgatgatgctgaaattcaggtatggaattggcaattggacaaatgtatctttctacgaggccatcaggaaacagtgaaagactttagactcttgaaaaattcaagactgctttcttggtcatttgatggaacagtgaaggtatggaatattattactggaaataaagaaaaagactttgtctgtcaccagggtacagtactttcttgtgacatttctcacgatgctaccaagttttcatctacctctgctgacaagactgcaaagatctggagttttgatctccttttgccacttcatgaattgaggggccacaacggctgtgtgcgctgctctgccttctctgtggacagtaccctgctggcaacgggagatgacaatggagaaatcaggatatggaatgtctcaaacggtgagcttcttcatttgtgtgctccgctttcagaagaaggagctgctacccatggaggctgggtgactgacctttgcttttctccagatggcaaaatgcttatctctgctggaggatatattaagtggtggaacgttgtcactggggaatcctcacagaccttctacacaaatggaaccaatcttaagaaaatacacgtgtcccctgacttcaaaacatatgtgactgtggataatcttggtattttatatattttacagactttagaataaaatagttaagcattaatgtagttgaactttttaaatttttgaattggaaaaaaattctaatgaaaccctgatatcaactttttataaagctcttaattgttgtgcagtattgcattcattacaaaagtgtttgtggttggatgaataatattaatgtagctttttcccaaatgaacatacctttaatcttgtttttcatgatcatcattaacagtttgtccttaggatgcaaatgaaaatgtgaatacataccttgttgtactgttggtaaaattctgtcttgatgcattcaaaatggttgacataattaatgagaagaatttggaagaaattggtattttaatactgtctgtatttattactgttatgcaggctgtgcctcagggtagcagtggcctgctttttgaaccacacttaccccaagggggttttgttctcctaaatacaatcttagaggttttttgcactctttaaatttgctttaaaaatattgtgtctgtgtgcatagtctgcagcatttcctttaattgactcaataagtgagtcttggatttagcaggcccccccaccttttttttttgtttttggagacagagtcttgctttgttgccaggctggagtgcagtggcgcgatctcggctcaccacaatcgctgcctcctgggttcaagcaattctcctgcctcagcctcccgagtagctgggactacaggtgtgcgcacatgccaggctaatttttgtatttttagtagagacggggtttcaccatgttggccgggatggtctcgatctcttgacctcatgatctacccgccttggcctcccaaagtgctgagattacaggcgtgagccaccgtgcctggccaggccccttctcttttaatggagacagggtcttgcactatcacccaggctggagtgcagtggcataatcatacctcattgcagcctcagactcctgggttcaagcaatcctcctgcctcagcctcccaagtagctgagactacaggcacgagccaccacacccagctaatttttaagttttcttgtagagacagggtctcactatgttgtctaggctggtcttgaactcttggcctcaagtaatcctcctgcctcagcctcccaaagtgttgggattgcagatatgagccactggcctggccttcagcagttctttttgtgaagtaaaacttgtatgttggaaagagtagattttattggtctacccttttctcactgtagctgctggcagccctgtgccatatctggactctagttgtcagtatctgagttggacactattcctgctccctcttgtttcttacatatcagacttcttacttgaatgaaacctgatctttcctaatcctcacttttttcttttttaaaaagcagtttctccactgctaaatgttagtcattgaggtggggccaattttaatcataagccttaataagatttttctaagaaatgtgaaatagaacaattttcatctaattccatttacttttagatgaatggcattgtgaatgccattcttttaatgaatttcaagagaattctctggttttctgtgtaattccagatgagtcactgtaactctagaagattaaccttccagccaacctattttcctttcccttgtctctctcatcctcttttccttccttctttcctttctcttcttttatctccaaggttaatcaggaaaaatagcttttgacaggggaaaaaactcaataactagctatttttgacctcctgatcaggaactttagttgaagcgtaaatctaaagaaacattttctctgaaatatattattaagggcaatggagataaattaatagtagatgtggttcccagaaaatataatcaaaattcaaagattttttttgtttctgtaactggaactaaatcaaatgattactagtgttaatagtagataacttgtttttattgttggtgcatattagtataactgtggggtaggtcggggagagggtaagggaatagatcactcagatgtattttagataagctatttagcctttgatggaatcataaatacagtgaatacaatcctttgcattgttaaggaggttttttgtttttaaatggtgggtcaaggagctagtttacaggcttactgtgatttaagcaaatgtgaaaagtgaaaccttaattttatcaaaagaaatttctgtaaatggtatgtctccttagaatacccaaatcataattttatttgtacacactgttaggggctcatctcatgtaggcagagtataaagtattaccttttggaattaaaagccactgactgttataaagtataacaacacacatcaggttttaaaaagccttgaatggcccttgtcttaaaaagaaattaggagccaggtgcggtggcacgtgcctgtaatcccagctccttgggaggctaagacaggaggattccttgagccctggagtttgagtccagcctgggtgacatagcaagaccctgtcttaaaagaaaaatgggaagaaagacaaggtaacatgaagaaagaagagatacctagtatgatggagctgcaaatttcatggcagttcatgcagtcggtcaagaggaggattttgttttgtagtttgcagatgagcatttctaaagcattttcccttgctgtatttttttgtattataaattacattggacttcatatatataatttttttttacattatatgtctcttgtatgttttgaaactcttgtatttatgatatagcttatatgatttttttgccttggtatacattttaaaatatgaatttaaaaaatttttgtaaaaataaaattcacaaaattgttttgaaaaacaaaaaaaa

SEQ ID NO: 363295 - DNA, 6893 bp, Homo sapiens
aagaagaggtagcgagtggacgtgactgctctatcccgggcaaaagggatagaaccagaggtggggagtctgggcagtcggcgacccgcgaagacttgaggtgccgcagcggcatccggagtagcgccgggctccctccggggtgcagccgccgtcgggggaagggcgccacaggccgggaagacctcctccctttgtgtccagtagtggggtccaccggagggcggcccgtgggccgggcctcaccgcggcgctccgggactgtggggtcaggctgcgttgggtggacgcccacctcgccaaccttcggaggtccctgggggtcttcgtgcgccccggggctgcagagatccaggggaggcgcctgtgaggcccggacctgccccggggcgaagggtatgtggcgagacagagccctgcacccctaattcccggtggaaaactcctgttgccgtttccctccaccggcctggagtctcccagtcttgtcccggcagtgccgccctccccactaagacctaggcgcaaaggcttggctcatggttgacagctcagagagagaaagatctgagggaagatggatgcaaaagctcgaaattgtttgcttcaacatagagaagctctggaaaaggacatcaagacatcctacatcatggatcacatgattagtgatggatttttaacaatatcagaagaggaaaaagtaagaaatgagcccactcaacagcaaagagcagctatgctgattaaaatgatacttaaaaaagataatgattcctacgtatcattctacaatgctctactacatgaaggatataaagatcttgctgcccttctccatgatggcattcctgttgtctcttcttccagtggtaaagattcagttagtggaataacttcgtatgtaaggacagtcctgtgtgaaggtggagtaccacagaggccagttgtttttgtcacaaggaagaagctggtgaatgcaattcagcagaagctctccaaattgaaaggtgaaccaggatgggtcaccatacatggaatggcaggctgtgggaagtctgtattagctgcagaagctgttagagatcattcccttttagaaggttgtttcccagggggagtgcattgggtttcagttgggaaacaagacaaatctgggcttctgatgaaactgcagaatctttgcacacggttggatcaggatgagagtttttcccagaggcttccacttaatattgaagaggctaaagaccgtctccgcattctgatgcttcgcaaacacccaaggtctctcttgatcttggatgatgtttgggactcttgggtgttgaaagcttttgacagtcagtgtcagattcttcttacaaccagagacaagagtgttacagattcagtaatgggtcctaaatatgtagtccctgtggagagttccttaggaaaggaaaaaggacttgaaattttatccctttttgttaatatgaagaaggcagatttgccagaacaagctcatagtattataaaagaatgtaaaggctctccccttgtagtatctttaattggtgcacttttacgtgattttcccaatcgctgggagtactacctcaaacagcttcagaataagcagtttaagagaataaggaaatcttcgtcttatgattatgaggctctagatgaagccatgtctataagtgttgaaatgctcagagaagacatcaaagattattacacagatctttccatccttcagaaggacgttaaggtgcctacaaaggtgttatgtattctctgggacatggaaactgaagaagttgaagacatactgcaggagtttgtaaataagtctcttttattctgtgatcggaatggaaagtcgtttcgttattatttacatgatcttcaagtagattttcttacagagaagaattgcagccagcttcaggatctacataagaagataatcactcagtttcagagatatcaccagccgcatactctttcaccagatcaggaagactgtatgtattggtacaactttctggcctatcacatggccagtgccaagatgcacaaggaactttgtgctttaatgttttccctggattggattaaagcaaaaacagaacttgtaggccctgctcatctgattcatgaatttgtggaatacagacatatactagatgaaaaggattgtgcagtcagtgagaattttcaggagtttttatctttaaatggacaccttcttggacgacagccatttcctaatattgtacaactgggtctctgtgagccggaaacttcagaagtttatcagcaagctaagctgcaggccaagcaggaggtcgataatggaatgctttacctggaatggataaacaaaaaaaacatcacgaatctttcccgcttagttgtccgcccccacacagatgctgtttaccatgcctgcttttctgaggatggtcagagaatagcttcttgtggagctgataaaaccttacaggtgttcaaagctgaaacaggagagaaacttctagaaatcaaggctcatgaggatgaagtgctttgttgtgcattctctacagatgacagatttatagcaacctgctcagtggataaaaaagtgaagatttggaattctatgactggggaactagtacacacctatgatgagcactcagagcaagtcaattgctgccatttcaccaacagtagtcatcatcttctcttagccactgggtcaagtgactgcttcctcaaactttgggatttgaatcaaaaagaatgtcgaaataccatgtttggtcatacaaattcagtcaatcactgcagattttcaccagatgataagcttttggctagttgttcagctgatggaaccttaaagctttgggatgcgacatcagcaaatgagaggaaaagcattaatgtgaaacagttcttcctaaatttggaggaccctcaagaggatatggaagtgatagtgaagtgttgttcgtggtctgctgatggtgcaaggataatggtggcagcaaaaaataaaatctttttgtggaatacagactcacgttcaaaggtggctgattgcagaggacatttaagttgggttcatggtgtgatgttttctcctgatggatcatcatttttgacatcttctgatgaccagacaatcaggctctgggagacaaagaaagtatgtaagaactctgctgtaatgttaaagcaagaagtagatgttgtgtttcaagaaaatgaagtgatggtccttgcagttgaccatataagacgtctgcaactcattaatggaagaacaggtcagattgattatctgactgaagctcaagttagctgctgttgcttaagtccacatcttcagtacattgcatttggagatgaaaatggagccattgagattttagaacttgtaaacaatagaatcttccagtccaggtttcagcacaagaaaactgtatggcacatccagttcacagccgatgagaagactcttatttcaagttctgatgatgctgaaattcaggtatggaattggcaattggacaaatgtatctttctacgaggccatcaggaaacagtgaaagactttagactcttgaaaaattcaagactgctttcttggtcatttgatggaacagtgaaggtatggaatattattactggaaataaagaaaaagactttgtctgtcaccagggtacagtactttcttgtgacatttctcacgatgctaccaagttttcatctacctctgctgacaagactgcaaagatctggagttttgatctccttttgccacttcatgaattgaggggccacaacggctgtgtgcgctgctctgccttctctgtggacagtaccctgctggcaacgggagatgacaatggagaaatcaggatatggaatgtctcaaacggtgagcttcttcatttgtgtgctccgctttcagaagaaggagctgctacccatggaggctgggtgactgacctttgcttttctccagatggcaaaatgcttatctctgctggaggatatattaagtggtggaacgttgtcactggggaatcctcacagaccttctacacaaatggaaccaatcttaagaaaatacacgtgtcccctgacttcaaaacatatgtgactgtggataatcttggtattttatatattttacagactttagaataaaatagttaagcattaatgtagttgaactttttaaatttttgaattggaaaaaaattctaatgaaaccctgatatcaactttttataaagctcttaattgttgtgcagtattgcattcattacaaaagtgtttgtggttggatgaataatattaatgtagctttttcccaaatgaacatacctttaatcttgtttttcatgatcatcattaacagtttgtccttaggatgcaaatgaaaatgtgaatacataccttgttgtactgttggtaaaattctgtcttgatgcattcaaaatggttgacataattaatgagaagaatttggaagaaattggtattttaatactgtctgtatttattactgttatgcaggctgtgcctcagggtagcagtggcctgctttttgaaccacacttaccccaagggggttttgttctcctaaatacaatcttagaggttttttgcactctttaaatttgctttaaaaatattgtgtctgtgtgcatagtctgcagcatttcctttaattgactcaataagtgagtcttggatttagcaggcccccccaccttttttttttgtttttggagacagagtcttgctttgttgccaggctggagtgcagtggcgcgatctcggctcaccacaatcgctgcctcctgggttcaagcaattctcctgcctcagcctcccgagtagctgggactacaggtgtgcgcacatgccaggctaatttttgtatttttagtagagacggggtttcaccatgttggccgggatggtctcgatctcttgacctcatgatctacccgccttggcctcccaaagtgctgagattacaggcgtgagccaccgtgcctggccaggccccttctcttttaatggagacagggtcttgcactatcacccaggctggagtgcagtggcataatcatacctcattgcagcctcagactcctgggttcaagcaatcctcctgcctcagcctcccaagtagctgagactacaggcacgagccaccacacccagctaatttttaagttttcttgtagagacagggtctcactatgttgtctaggctggtcttgaactcttggcctcaagtaatcctcctgcctcagcctcccaaagtgttgggattgcagatatgagccactggcctggccttcagcagttctttttgtgaagtaaaacttgtatgttggaaagagtagattttattggtctacccttttctcactgtagctgctggcagccctgtgccatatctggactctagttgtcagtatctgagttggacactattcctgctccctcttgtttcttacatatcagacttcttacttgaatgaaacctgatctttcctaatcctcacttttttcttttttaaaaagcagtttctccactgctaaatgttagtcattgaggtggggccaattttaatcataagccttaataagatttttctaagaaatgtgaaatagaacaattttcatctaattccatttacttttagatgaatggcattgtgaatgccattcttttaatgaatttcaagagaattctctggttttctgtgtaattccagatgagtcactgtaactctagaagattaaccttccagccaacctattttcctttcccttgtctctctcatcctcttttccttccttctttcctttctcttcttttatctccaaggttaatcaggaaaaatagcttttgacaggggaaaaaactcaataactagctatttttgacctcctgatcaggaactttagttgaagcgtaaatctaaagaaacattttctctgaaatatattattaagggcaatggagataaattaatagtagatgtggttcccagaaaatataatcaaaattcaaagattttttttgtttctgtaactggaactaaatcaaatgattactagtgttaatagtagataacttgtttttattgttggtgcatattagtataactgtggggtaggtcggggagagggtaagggaatagatcactcagatgtattttagataagctatttagcctttgatggaatcataaatacagtgaatacaatcctttgcattgttaaggaggttttttgtttttaaatggtgggtcaaggagctagtttacaggcttactgtgatttaagcaaatgtgaaaagtgaaaccttaattttatcaaaagaaatttctgtaaatggtatgtctccttagaatacccaaatcataattttatttgtacacactgttaggggctcatacaggaggattccttgagccctggagtttgagtccagcctgggtgacatagcaagaccctgtcttaaaagaaaaatgggaagaaagacaaggtaacatgaagaaagaagagatacctagtatgatggagctgcaaatttcatggcagttcatgcagtcggtcaagaggaggattttgttttgtagtttgcagatgagcatttctaaagcattttcccttgctgtatttttttgtattataaattacattggacttcatatatataatttttttttacattatatgtctcttgtatgttttgaaactcttgtatttatgatatagcttatatgatttttttgccttggtatacattttaaaatatgaatttaaaaaatttttgtaaaaataaaattcacaaaattgttttgaaaaacaaaaaaaa

SEQ ID NO: 363296 - DNA, 5239 bp, Homo sapiens
tttaaattctagatatttactgtttctcttagcagtgtgaggttaatgatgttatacctaaaattttttgatctctaacagtgctgctgatactactttttgttttttaaaggaactttgtgctttaatgttttccctggattggattaaagcaaaaacagaacttgtaggccctgctcatctgattcatgaatttgtggaatacagacatatactagatgaaaaggattgtgcagtcagtgagaattttcaggagtttttatctttaaatggacaccttcttggacgacagccatttcctaatattgtacaactgggtctctgtgagccggaaacttcagaagtttatcagcaagctaagctgcaggccaagcaggaggtcgataatggaatgctttacctggaatggataaacaaaaaaaacatcacgaatctttcccgcttagttgtccgcccccacacagatgctgtttaccatgcctgcttttctgaggatggtcagagaatagcttcttgtggagctgataaaaccttacaggtgttcaaagctgaaacaggagagaaacttctagaaatcaaggctcatgaggatgaagtgctttgttgtgcattctctacagatgacagatttatagcaacctgctcagtggataaaaaagtgaagatttggaattctatgactggggaactagtacacacctatgatgagcactcagagcaagtcaattgctgccatttcaccaacagtagtcatcatcttctcttagccactgggtcaagtgactgcttcctcaaactttgggatttgaatcaaaaagaatgtcgaaataccatgtttggtcatacaaattcagtcaatcactgcagattttcaccagatgataagcttttggctagttgttcagctgatggaaccttaaagctttgggatgcgacatcagcaaatgagaggaaaagcattaatgtgaaacagttcttcctaaatttggaggaccctcaagaggatatggaagtgatagtgaagtgttgttcgtggtctgctgatggtgcaaggataatggtggcagcaaaaaataaaatctttctttttgacattcatactagtggcctattgggagaaatccacacgggccatcacagcaccatccagtactgtgacttctccccacaaaaccatttggcagtggttgctttgtcccagtactgtgtagagttgtggaatacagactcacgttcaaaggtggctgattgcagaggacatttaagttgggttcatggtgtgatgttttctcctgatggatcatcatttttgacatcttctgatgaccagacaatcaggctctgggagacaaagaaagtatgtaagaactctgctgtaatgttaaagcaagaagtagatgttgtgtttcaagaaaatgaagtgatggtccttgcagttgaccatataagacgtctgcaactcattaatggaagaacaggtcagattgattatctgactgaagctcaagttagctgctgttgcttaagtccacatcttcagtacattgcatttggagatgaaaatggagccattgagattttagaacttgtaaacaatagaatcttccagtccaggtttcagcacaagaaaactgtatggcacatccagttcacagccgatgagaagactcttatttcaagttctgatgatgctgaaattcaggtatggaattggcaattggacaaatgtatctttctacgaggccatcaggaaacagtgaaagactttagactcttgaaaaattcaagactgctttcttggtcatttgatggaacagtgaaggtatggaatattattactggaaataaagaaaaagactttgtctgtcaccagggtacagtactttcttgtgacatttctcacgatgctaccaagttttcatctacctctgctgacaagactgcaaagatctggagttttgatctccttttgccacttcatgaattgaggggccacaacggctgtgtgcgctgctctgccttctctgtggacagtaccctgctggcaacgggagatgacaatggagaaatcaggatatggaatgtctcaaacggtgagcttcttcatttgtgtgctccgctttcagaagaaggagctgctacccatggaggctgggtgactgacctttgcttttctccagatggcaaaatgcttatctctgctggaggatatattaagtggtggaacgttgtcactggggaatcctcacagaccttctacacaaatggaaccaatcttaagaaaatacacgtgtcccctgacttcaaaacatatgtgactgtggataatcttggtattttatatattttacagactttagaataaaatagttaagcattaatgtagttgaactttttaaatttttgaattggaaaaaaattctaatgaaaccctgatatcaactttttataaagctcttaattgttgtgcagtattgcattcattacaaaagtgtttgtggttggatgaataatattaatgtagctttttcccaaatgaacatacctttaatcttgtttttcatgatcatcattaacagtttgtccttaggatgcaaatgaaaatgtgaatacataccttgttgtactgttggtaaaattctgtcttgatgcattcaaaatggttgacataattaatgagaagaatttggaagaaattggtattttaatactgtctgtatttattactgttatgcaggctgtgcctcagggtagcagtggcctgctttttgaaccacacttaccccaagggggttttgttctcctaaatacaatcttagaggttttttgcactctttaaatttgctttaaaaatattgtgtctgtgtgcatagtctgcagcatttcctttaattgactcaataagtgagtcttggatttagcaggcccccccaccttttttttttgtttttggagacagagtcttgctttgttgccaggctggagtgcagtggcgcgatctcggctcaccacaatcgctgcctcctgggttcaagcaattctcctgcctcagcctcccgagtagctgggactacaggtgtgcgcacatgccaggctaatttttgtatttttagtagagacggggtttcaccatgttggccgggatggtctcgatctcttgacctcatgatctacccgccttggcctcccaaagtgctgagattacaggcgtgagccaccgtgcctggccaggccccttctcttttaatggagacagggtcttgcactatcacccaggctggagtgcagtggcataatcatacctcattgcagcctcagactcctgggttcaagcaatcctcctgcctcagcctcccaagtagctgagactacaggcacgagccaccacacccagctaatttttaagttttcttgtagagacagggtctcactatgttgtctaggctggtcttgaactcttggcctcaagtaatcctcctgcctcagcctcccaaagtgttgggattgcagatatgagccactggcctggccttcagcagttctttttgtgaagtaaaacttgtatgttggaaagagtagattttattggtctacccttttctcactgtagctgctggcagccctgtgccatatctggactctagttgtcagtatctgagttggacactattcctgctccctcttgtttcttacatatcagacttcttacttgaatgaaacctgatctttcctaatcctcacttttttcttttttaaaaagcagtttctccactgctaaatgttagtcattgaggtggggccaattttaatcataagccttaataagatttttctaagaaatgtgaaatagaacaattttcatctaattccatttacttttagatgaatggcattgtgaatgccattcttttaatgaatttcaagagaattctctggttttctgtgtaattccagatgagtcactgtaactctagaagattaaccttccagccaacctattttcctttcccttgtctctctcatcctcttttccttccttctttcctttctcttcttttatctccaaggttaatcaggaaaaatagcttttgacaggggaaaaaactcaataactagctatttttgacctcctgatcaggaactttagttgaagcgtaaatctaaagaaacattttctctgaaatatattattaagggcaatggagataaattaatagtagatgtggttcccagaaaatataatcaaaattcaaagattttttttgtttctgtaactggaactaaatcaaatgattactagtgttaatagtagataacttgtttttattgttggtgcatattagtataactgtggggtaggtcggggagagggtaagggaatagatcactcagatgtattttagataagctatttagcctttgatggaatcataaatacagtgaatacaatcctttgcattgttaaggaggttttttgtttttaaatggtgggtcaaggagctagtttacaggcttactgtgatttaagcaaatgtgaaaagtgaaaccttaattttatcaaaagaaatttctgtaaatggtatgtctccttagaatacccaaatcataattttatttgtacacactgttaggggctcatctcatgtaggcagagtataaagtattaccttttggaattaaaagccactgactgttataaagtataacaacacacatcaggttttaaaaagccttgaatggcccttgtcttaaaaagaaattaggagccaggtgcggtggcacgtgcctgtaatcccagctccttgggaggctaagacaggaggattccttgagccctggagtttgagtccagcctgggtgacatagcaagaccctgtcttaaaagaaaaatgggaagaaagacaaggtaacatgaagaaagaagagatacctagtatgatggagctgcaaatttcatggcagttcatgcagtcggtcaagaggaggattttgttttgtagtttgcagatgagcatttctaaagcattttcccttgctgtatttttttgtattataaattacattggacttcatatatataatttttttttacattatatgtctcttgtatgttttgaaactcttgtatttatgatatagcttatatgatttttttgccttggtatacattttaaaatatgaatttaaaaaatttttgtaaaaataaaattcacaaaattgttttgaaaaacaaaaaaaa

SEQ ID NO: 363297 - DNA, 1879 bp, Homo sapiens
aactgggacttcaggtatgcaccaccacacctagctaatttttctgtttttgtagagatggaggtttcaccagtgttgcccaggctggccttaaactcttgggctcaagtgatctacccatcttggcctcccaaagtgttgggattgcagatatgagccactggcctggccttcagcagttctttttgtgaagtaaaacttgtatgttggaaagagtagattttattggtctacccttttctcactgtagctgctggcagccctgtgccatatctggactctagttgtcagtatctgagttggacactattcctgctccctcttgtttcttacatatcagacttcttacttgaatgaaacctgatctttcctaatcctcacttttttcttttttaaaaagcagtttctccactgctaaatgttagtcattgaggtggggccaattttaatcataagccttaataagatttttctaagaaatgtgaaatagaacaattttcatctaattccatttacttttagatgaatggcattgtgaatgccattcttttaatgaatttcaagagaattctctggttttctgtgtaattccagatgagtcactgtaactctagaagattaaccttccagccaacctattttcctttcccttgtctctctcatcctcttttccttccttctttcctttctcttcttttatctccaaggttaatcaggaaaaatagcttttgacaggggaaaaaactcaataactagctatttttgacctcctgatcaggaactttagttgaagcgtaaatctaaagaaacattttctctgaaatatattattaagggcaatggagataaattaatagtagatgtggttcccagaaaatataatcaaaattcaaagattttttttgtttctgtaactggaactaaatcaaatgattactagtgttaatagtagataacttgtttttattgttggtgcatattagtataactgtggggtaggtcggggagagggtaagggaatagatcactcagatgtattttagataagctatttagcctttgatggaatcataaatacagtgaatacaatcctttgcattgttaaggaggttttttgtttttaaatggtgggtcaaggagctagtttacaggcttactgtgatttaagcaaatgtgaaaagtgaaaccttaattttatcaaaagaaatttctgtaaatggtatgtctccttagaatacccaaatcataattttatttgtacacactgttaggggctcatctcatgtaggcagagtataaagtattaccttttggaattaaaagccactgactgttataaagtataacaacacacatcaggttttaaaaagccttgaatggcccttgtcttaaaaagaaattaggagccaggtgcggtggcacgtgcctgtaatcccagctccttgggaggctaagacaggaggattccttgagccctggagtttgagtccagcctgggtgacatagcaagaccctgtcttaaaagaaaaatgggaagaaagacaaggtaacatgaagaaagaagagatacctagtatgatggagctgcaaatttcatggcagttcatgcagtcggtcaagaggaggattttgttttgtagtttgcagatgagcatttctaaagcattttcccttgctgtatttttttgtattataaattacattggacttcatatatataatttttttttacattatatgtctcttgtatgttttgaaactcttgtatttatgatatagcttatatgatttttttgccttggtatacattttaaaatatgaatttaaaaaatttttgtaaaaataaaattcacaaaattgttttgaaaaacaaaaaaaa

SEQ ID NO: 363298 - DNA, 433 bp, Homo sapiens
gctaaacaatcctaattgccttccagatctggagttttgatctccttttgccacttcatgaattgaggggccacaacggctgtgtgcgctgctctgccttctctgtggacagtaccctgctggcaacgggagatgacaatggagaaatcagggtaggctgtttgctgacatgagagcactgctcttcttgtagcttgggctagcactgttcacagtggggacctttgttcacgggccagggaagcatagtcctgaagttgtggttggatgaggcattctttttgtttcttgtgcacattgtattcacagctgcactccactgcagaaacggattcattttagagttagagtgaagcattccctgtatatgtgaggaagcaagtgctctagtcatttgtagttcattctctgccattagcttgagaatgattca

SEQ ID NO: 363299 - DNA, 427 bp, Homo sapiens
ctttaaatggacaccttcttggacgacagccatttcctaatattgtacaactgggtctctgtgagccggaaacttcagaagtttatcagcaagctaagctgcaggccaagcaggaggtcgataatggaatgctttacctggaatggatgtaagtaggttaggagagaaaccaaagggagtggtgcgctaactatatcattatttttcaggtggtgaatacgatcactccaggaggatttaactactttcgaaagggctggaacttttaataagcattcttacttattgaaaagttctagagaagtaagcataggagaaaatgattgtattttcaaagaatccatataaatagatgcctgtaaggcatttggacaaattatcctaagtattcagtactaagtgcttgacttactgtaatttagtatag

SEQ ID NO: 363300 - DNA, 639 bp, Homo sapiens
gcagcctgtcaggccaagtgggtgaaacaagaccagtgggcccaagcaaaacttgggcaaaggcgccaccggccacagaagtttctggccagaaaatcaacaccccaaagatcctgtaacattttcattgatatttacaaacatgtaacagtgaatagttctctagttatgtgaaggcatacacattctgacagaaattctgattttgggagtagctttgccaaggttcctttctgttttgcaaaatgacaatgattaaactcacttaaagatttttattgaatgatgaccagtagttaagcagtttattataaaaaatattttattgttacttgtgcaggtgttcaaagctgaaacaggagagaaacttctagaaatcaaggctcatgaggatgaagtgctttgttgtgcattctctacagatgacagatttatagcaacctgctcagtggataaaaaagtgaaggtaggaaaatcttttcctcttgagttgtaatcacaacagaattcattttatttttccatgatcatgagaccagagtaagtagagttaaaggactctcacctgttgatctactaacctgattcattgtaaattaacactatctgaaaattctttacttttttttaaagagacag

SEQ ID NO: 363301 - DNA, 7036 bp, Homo sapiens
aagaagaggtagcgagtggacgtgactgctctatcccgggcaaaagggatagaaccagaggtggggagtctgggcagtcggcgacccgcgaagacttgaggtgccgcagcggcatccggagtagcgccgggctccctccggggtgcagccgccgtcgggggaagggcgccacaggccgggaagacctcctccctttgtgtccagtagtggggtccaccggagggcggcccgtgggccgggcctcaccgcggcgctccgggactgtggggtcaggctgcgttgggtggacgcccacctcgccaaccttcggaggtccctgggggtcttcgtgcgccccggggctgcagagatccaggggaggcgcctgtgaggcccggacctgccccggggcgaagggtatgtggcgagacagagccctgcacccctaattcccggtggaaaactcctgttgccgtttccctccaccggcctggagtctcccagtcttgtcccggcagtgccgccctccccactaagacctaggcgcaaaggcttggctcatggttgacagctcagagagagaaagatctgagggaagatggatgcaaaagctcgaaattgtttgcttcaacatagagaagctctggaaaaggacatcaagacatcctacatcatggatcacatgattagtgatggatttttaacaatatcagaagaggaaaaagtaagaaatgagcccactcaacagcaaagagcagctatgctgattaaaatgatacttaaaaaagataatgattcctacgtatcattctacaatgctctactacatgaaggatataaagatcttgctgcccttctccatgatggcattcctgttgtctcttcttccagtgtaaggacagtcctgtgtgaaggtggagtaccacagaggccagttgtttttgtcacaaggaagaagctggtgaatgcaattcagcagaagctctccaaattgaaaggtgaaccaggatgggtcaccatacatggaatggcaggctgtgggaagtctgtattagctgcagaagctgttagagatcattcccttttagaaggttgtttcccagggggagtgcattgggtttcagttgggaaacaagacaaatctgggcttctgatgaaactgcagaatctttgcacacggttggatcaggatgagagtttttcccagaggcttccacttaatattgaagaggctaaagaccgtctccgcattctgatgcttcgcaaacacccaaggtctctcttgatcttggatgatgtttgggactcttgggtgttgaaagcttttgacagtcagtgtcagattcttcttacaaccagagacaagagtgttacagattcagtaatgggtcctaaatatgtagtccctgtggagagttccttaggaaaggaaaaaggacttgaaattttatccctttttgttaatatgaagaaggcagatttgccagaacaagctcatagtattataaaagaatgtaaaggctctccccttgtagtatctttaattggtgcacttttacgtgattttcccaatcgctgggagtactacctcaaacagcttcagaataagcagtttaagagaataaggaaatcttcgtcttatgattatgaggctctagatgaagccatgtctataagtgttgaaatgctcagagaagacatcaaagattattacacagatctttccatccttcagaaggacgttaaggtgcctacaaaggtgttatgtattctctgggacatggaaactgaagaagttgaagacatactgcaggagtttgtaaataagtctcttttattctgtgatcggaatggaaagtcgtttcgttattatttacatgatcttcaagtagattttcttacagagaagaattgcagccagcttcaggatctacataagaagataatcactcagtttcagagatatcaccagccgcatactctttcaccagatcaggaagactgtatgtattggtacaactttctggcctatcacatggccagtgccaagatgcacaaggaactttgtgctttaatgttttccctggattggattaaagcaaaaacagaacttgtaggccctgctcatctgattcatgaatttgtggaatacagacatatactagatgaaaaggattgtgcagtcagtgagaattttcaggagtttttatctttaaatggacaccttcttggacgacagccatttcctaatattgtacaactgggtctctgtgagccggaaacttcagaagtttatcagcaagctaagctgcaggccaagcaggaggtcgataatggaatgctttacctggaatggataaacaaaaaaaacatcacgaatctttcccgcttagttgtccgcccccacacagatgctgtttaccatgcctgcttttctgaggatggtcagagaatagcttcttgtggagctgataaaaccttacaggtgttcaaagctgaaacaggagagaaacttctagaaatcaaggctcatgaggatgaagtgctttgttgtgcattctctacagatgacagatttatagcaacctgctcagtggataaaaaagtgaagatttggaattctatgactggggaactagtacacacctatgatgagcactcagagcaagtcaattgctgccatttcaccaacagtagtcatcatcttctcttagccactgggtcaagtgactgcttcctcaaactttgggatttgaatcaaaaagaatgtcgaaataccatgtttggtcatacaaattcagtcaatcactgcagattttcaccagatgataagcttttggctagttgttcagctgatggaaccttaaagctttgggatgcgacatcagcaaatgagaggaaaagcattaatgtgaaacagttcttcctaaatttggaggaccctcaagaggatatggaagtgatagtgaagtgttgttcgtggtctgctgatggtgcaaggataatggtggcagcaaaaaataaaatctttttgtggaatacagactcacgttcaaaggtggctgattgcagaggacatttaagttgggttcatggtgtgatgttttctcctgatggatcatcatttttgacatcttctgatgaccagacaatcaggctctgggagacaaagaaagtatgtaagaactctgctgtaatgttaaagcaagaagtagatgttgtgtttcaagaaaatgaagtgatggtccttgcagttgaccatataagacgtctgcaactcattaatggaagaacaggtcagattgattatctgactgaagctcaagttagctgctgttgcttaagtccacatcttcagtacattgcatttggagatgaaaatggagccattgagattttagaacttgtaaacaatagaatcttccagtccaggtttcagcacaagaaaactgtatggcacatccagttcacagccgatgagaagactcttatttcaagttctgatgatgctgaaattcaggtatggaattggcaattggacaaatgtatctttctacgaggccatcaggaaacagtgaaagactttagactcttgaaaaattcaagactgctttcttggtcatttgatggaacagtgaaggtatggaatattattactggaaataaagaaaaagactttgtctgtcaccagggtacagtactttcttgtgacatttctcacgatgctaccaagttttcatctacctctgctgacaagactgcaaagatctggagttttgatctccttttgccacttcatgaattgaggggccacaacggctgtgtgcgctgctctgccttctctgtggacagtaccctgctggcaacgggagatgacaatggagaaatcaggatatggaatgtctcaaacggtgagcttcttcatttgtgtgctccgctttcagaagaaggagctgctacccatggaggctgggtgactgacctttgcttttctccagatggcaaaatgcttatctctgctggaggatatattaagtggtggaacgttgtcactggggaatcctcacagaccttctacacaaatggaaccaatcttaagaaaatacacgtgtcccctgacttcaaaacatatgtgactgtggataatcttggtattttatatattttacagactttagaataaaatagttaagcattaatgtagttgaactttttaaatttttgaattggaaaaaaattctaatgaaaccctgatatcaactttttataaagctcttaattgttgtgcagtattgcattcattacaaaagtgtttgtggttggatgaataatattaatgtagctttttcccaaatgaacatacctttaatcttgtttttcatgatcatcattaacagtttgtccttaggatgcaaatgaaaatgtgaatacataccttgttgtactgttggtaaaattctgtcttgatgcattcaaaatggttgacataattaatgagaagaatttggaagaaattggtattttaatactgtctgtatttattactgttatgcaggctgtgcctcagggtagcagtggcctgctttttgaaccacacttaccccaagggggttttgttctcctaaatacaatcttagaggttttttgcactctttaaatttgctttaaaaatattgtgtctgtgtgcatagtctgcagcatttcctttaattgactcaataagtgagtcttggatttagcaggcccccccaccttttttttttgtttttggagacagagtcttgctttgttgccaggctggagtgcagtggcgcgatctcggctcaccacaatcgctgcctcctgggttcaagcaattctcctgcctcagcctcccgagtagctgggactacaggtgtgcgcacatgccaggctaatttttgtatttttagtagagacggggtttcaccatgttggccgggatggtctcgatctcttgacctcatgatctacccgccttggcctcccaaagtgctgagattacaggcgtgagccaccgtgcctggccaggccccttctcttttaatggagacagggtcttgcactatcacccaggctggagtgcagtggcataatcatacctcattgcagcctcagactcctgggttcaagcaatcctcctgcctcagcctcccaagtagctgagactacaggcacgagccaccacacccagctaatttttaagttttcttgtagagacagggtctcactatgttgtctaggctggtcttgaactcttggcctcaagtaatcctcctgcctcagcctcccaaagtgttgggattgcagatatgagccactggcctggccttcagcagttctttttgtgaagtaaaacttgtatgttggaaagagtagattttattggtctacccttttctcactgtagctgctggcagccctgtgccatatctggactctagttgtcagtatctgagttggacactattcctgctccctcttgtttcttacatatcagacttcttacttgaatgaaacctgatctttcctaatcctcacttttttcttttttaaaaagcagtttctccactgctaaatgttagtcattgaggtggggccaattttaatcataagccttaataagatttttctaagaaatgtgaaatagaacaattttcatctaattccatttacttttagatgaatggcattgtgaatgccattcttttaatgaatttcaagagaattctctggttttctgtgtaattccagatgagtcactgtaactctagaagattaaccttccagccaacctattttcctttcccttgtctctctcatcctcttttccttccttctttcctttctcttcttttatctccaaggttaatcaggaaaaatagcttttgacaggggaaaaaactcaataactagctatttttgacctcctgatcaggaactttagttgaagcgtaaatctaaagaaacattttctctgaaatatattattaagggcaatggagataaattaatagtagatgtggttcccagaaaatataatcaaaattcaaagattttttttgtttctgtaactggaactaaatcaaatgattactagtgttaatagtagataacttgtttttattgttggtgcatattagtataactgtggggtaggtcggggagagggtaagggaatagatcactcagatgtattttagataagctatttagcctttgatggaatcataaatacagtgaatacaatcctttgcattgttaaggaggttttttgtttttaaatggtgggtcaaggagctagtttacaggcttactgtgatttaagcaaatgtgaaaagtgaaaccttaattttatcaaaagaaatttctgtaaatggtatgtctccttagaatacccaaatcataattttatttgtacacactgttaggggctcatctcatgtaggcagagtataaagtattaccttttggaattaaaagccactgactgttataaagtataacaacacacatcaggttttaaaaagccttgaatggcccttgtcttaaaaagaaattaggagccaggtgcggtggcacgtgcctgtaatcccagctccttgggaggctaagacaggaggattccttgagccctggagtttgagtccagcctgggtgacatagcaagaccctgtcttaaaagaaaaatgggaagaaagacaaggtaacatgaagaaagaagagatacctagtatgatggagctgcaaatttcatggcagttcatgcagtcggtcaagaggaggattttgttttgtagtttgcagatgagcatttctaaagcattttcccttgctgtatttttttgtattataaattacattggacttcatatatataatttttttttacattatatgtctcttgtatgttttgaaactcttgtatttatgatatagcttatatgatttttttgccttggtatacattttaaaatatgaatttaaaaaatttttgtaaaaataaaattcacaaaattgttttgaaaaacaaaaaaaa

SEQ ID NO: 363302 - DNA, 7198 bp, Homo sapiens
aagaagaggtagcgagtggacgtgactgctctatcccgggcaaaagggatagaaccagaggtggggagtctgggcagtcggcgacccgcgaagacttgaggtgccgcagcggcatccggagtagcgccgggctccctccggggtgcagccgccgtcgggggaagggcgccacaggccgggaagacctcctccctttgtgtccagtagtggggtccaccggagggcggcccgtgggccgggcctcaccgcggcgctccgggactgtggggtcaggctgcgttgggtggacgcccacctcgccaaccttcggaggtccctgggggtcttcgtgcgccccggggctgcagagatccaggggaggcgcctgtgaggcccggacctgccccggggcgaagggtatgtggcgagacagagccctgcacccctaattcccggtggaaaactcctgttgccgtttccctccaccggcctggagtctcccagtcttgtcccggcagtgccgccctccccactaagacctaggcgcaaaggcttggctcatggttgacagctcagagagagaaagatctgagggaagatggatgcaaaagctcgaaattgtttgcttcaacatagagaagctctggaaaaggacatcaagacatcctacatcatggatcacatgattagtgatggatttttaacaatatcagaagaggaaaaagtaagaaatgagcccactcaacagcaaagagcagctatgctgattaaaatgatacttaaaaaagataatgattcctacgtatcattctacaatgctctactacatgaaggatataaagatcttgctgcccttctccatgatggcattcctgttgtctcttcttccagtggtaaagattcagttagtggaataacttcgtatgtaaggacagtcctgtgtgaaggtggagtaccacagaggccagttgtttttgtcacaaggaagaagctggtgaatgcaattcagcagaagctctccaaattgaaaggtgaaccaggatgggtcaccatacatggaatggcaggctgtgggaagtctgtattagctgcagaagctgttagagatcattcccttttagaaggttgtttcccagggggagtgcattgggtttcagttgggaaacaagacaaatctgggcttctgatgaaactgcagaatctttgcacacggttggatcaggatgagagtttttcccagaggcttccacttaatattgaagaggctaaagaccgtctccgcattctgatgcttcgcaaacacccaaggtctctcttgatcttggatgatgtttgggactcttgggtgttgaaagcttttgacagtcagtgtcagattcttcttacaaccagagacaagagtgttacagattcagtaatgggtcctaaatatgtagtccctgtggagagttccttaggaaaggaaaaaggacttgaaattttatccctttttgttaatatgaagaaggcagatttgccagaacaagctcatagtattataaaagaatgtaaaggctctccccttgtagtatctttaattggtgcacttttacgtgattttcccaatcgctgggagtactacctcaaacagcttcagaataagcagtttaagagaataaggaaatcttcgtcttatgattatgaggctctagatgaagccatgtctataagtgttgaaatgctcagagaagacatcaaagattattacacagatctttccatccttcagaaggacgttaaggtgcctacaaaggtgttatgtattctctgggacatggaaactgaagaagttgaagacatactgcaggagtttgtaaataagtctcttttattctgtgatcggaatggaaagtcgtttcgttattatttacatgatcttcaagtagattttcttacagagaagaattgcagccagcttcaggatctacataagaagataatcactcagtttcagagatatcaccagccgcatactctttcaccagatcaggaagactgtatgtattggtacaactttctggcctatcacatggccagtgccaagatgcacaaggaactttgtgctttaatgttttccctggattggattaaagcaaaaacagaacttgtaggccctgctcatctgattcatgaatttgtggaatacagacatatactagatgaaaaggattgtgcagtcagtgagaattttcaggagtttttatctttaaatggacaccttcttggacgacagccatttcctaatattgtacaactgggtctctgtgagccggaaacttcagaagtttatcagcaagctaagctgcaggccaagcaggaggtcgataatggaatgctttacctggaatggataaacaaaaaaaacatcacgaatctttcccgcttagttgtccgcccccacacagatgctgtttaccatgcctgcttttctgaggatggtcagagaatagcttcttgtggagctgataaaaccttacaggtgttcaaagctgaaacaggagagaaacttctagaaatcaaggctcatgaggatgaagtgctttgttgtgcattctctacagatgacagatttatagcaacctgctcagtggataaaaaagtgaagatttggaattctatgactggggaactagtacacacctatgatgagcactcagagcaagtcaattgctgccatttcaccaacagtagtcatcatcttctcttagccactgggtcaagtgactgcttcctcaaactttgggatttgaatcaaaaagaatgtcgaaataccatgtttggtcatacaaattcagtcaatcactgcagattttcaccagatgataagcttttggctagttgttcagctgatggaaccttaaagctttgggatgcgacatcagcaaatgagaggaaaagcattaatgtgaaacagttcttcctaaatttggaggaccctcaagaggatatggaagtgatagtgaagtgttgttcgtggtctgctgatggtgcaaggataatggtggcagcaaaaaataaaatctttctttttgacattcatactagtggcctattgggagaaatccacacgggccatcacagcaccatccagtactgtgacttctccccacaaaaccatttggcagtggttgctttgtcccagtactgtgtagagttgtggaatacagactcacgttcaaaggtggctgattgcagaggacatttaagttgggttcatggtgtgatgttttctcctgatggatcatcatttttgacatcttctgatgaccagacaatcaggctctgggagacaaagaaagtatgtaagaactctgctgtaatgttaaagcaagaagtagatgttgtgtttcaagaaaatgaagtgatggtccttgcagttgaccatataagacgtctgcaactcattaatggaagaacaggtcagattgattatctgactgaagctcaagttagctgctgttgcttaagtccacatcttcagtacattgcatttggagatgaaaatggagccattgagattttagaacttgtaaacaatagaatcttccagtccaggtttcagcacaagaaaactgtatggcacatccagttcacagccgatgagaagactcttatttcaagttctgatgatgctgaaattcaggtatggaattggcaattggacaaatgtatctttctacgaggccatcaggaaacagtgaaagactttagactcttgaaaaattcaagactgctttcttggtcatttgatggaacagtgaaggtatggaatattattactggaaataaagaaaaagactttgtctgtcaccagggtacagtactttcttgtgacatttctcacgatgctaccaagttttcatctacctctgctgacaagactgcaaagatctggagttttgatctccttttgccacttcatgaattgaggggccacaacggctgtgtgcgctgctctgccttctctgtggacagtaccctgctggcaacgggagatgacaatggagaaatcaggatatggaatgtctcaaacggtgagcttcttcatttgtgtgctccgctttcagaagaaggagctgctacccatggaggctgggtgactgacctttgcttttctccagatggcaaaatgcttatctctgctggaggatatattaagtggtggaacgttgtcactggggaatcctcacagaccttctacacaaatggaaccaatcttaagaaaatacacgtgtcccctgacttcaaaacatatgtgactgtggataatcttggtattttatatattttacagactttagaataaaatagttaagcattaatgtagttgaactttttaaatttttgaattggaaaaaaattctaatgaaaccctgatatcaactttttataaagctcttaattgttgtgcagtattgcattcattacaaaagtgtttgtggttggatgaataatattaatgtagctttttcccaaatgaacatacctttaatcttgtttttcatgatcatcattaacagtttgtccttaggatgcaaatgaaaatgtgaatacataccttgttgtactgttggtaaaattctgtcttgatgcattcaaaatggttgacataattaatgagaagaatttggaagaaattggtattttaatactgtctgtatttattactgttatgcaggctgtgcctcagggtagcagtggcctgctttttgaaccacacttaccccaagggggttttgttctcctaaatacaatcttagaggttttttgcactctttaaatttgctttaaaaatattgtgtctgtgtgcatagtctgcagcatttcctttaattgactcaataagtgagtcttggatttagcaggcccccccaccttttttttttgtttttggagacagagtcttgctttgttgccaggctggagtgcagtggcgcgatctcggctcaccacaatcgctgcctcctgggttcaagcaattctcctgcctcagcctcccgagtagctgggactacaggtgtgcgcacatgccaggctaatttttgtatttttagtagagacggggtttcaccatgttggccgggatggtctcgatctcttgacctcatgatctacccgccttggcctcccaaagtgctgagattacaggcgtgagccaccgtgcctggccaggccccttctcttttaatggagacagggtcttgcactatcacccaggctggagtgcagtggcataatcatacctcattgcagcctcagactcctgggttcaagcaatcctcctgcctcagcctcccaagtagctgagactacaggcacgagccaccacacccagctaatttttaagttttcttgtagagacagggtctcactatgttgtctaggctggtcttgaactcttggcctcaagtaatcctcctgcctcagcctcccaaagtgttgggattgcagatatgagccactggcctggccttcagcagttctttttgtgaagtaaaacttgtatgttggaaagagtagattttattggtctacccttttctcactgtagctgctggcagccctgtgccatatctggactctagttgtcagtatctgagttggacactattcctgctccctcttgtttcttacatatcagacttcttacttgaatgaaacctgatctttcctaatcctcacttttttcttttttaaaaagcagtttctccactgctaaatgttagtcattgaggtggggccaattttaatcataagccttaataagatttttctaagaaatgtgaaatagaacaattttcatctaattccatttacttttagatgaatggcattgtgaatgccattcttttaatgaatttcaagagaattctctggttttctgtgtaattccagatgagtcactgtaactctagaagattaaccttccagccaacctattttcctttcccttgtctctctcatcctcttttccttccttctttcctttctcttcttttatctccaaggttaatcaggaaaaatagcttttgacaggggaaaaaactcaataactagctatttttgacctcctgatcaggaactttagttgaagcgtaaatctaaagaaacattttctctgaaatatattattaagggcaatggagataaattaatagtagatgtggttcccagaaaatataatcaaaattcaaagattttttttgtttctgtaactggaactaaatcaaatgattactagtgttaatagtagataacttgtttttattgttggtgcatattagtataactgtggggtaggtcggggagagggtaagggaatagatcactcagatgtattttagataagctatttagcctttgatggaatcataaatacagtgaatacaatcctttgcattgttaaggaggttttttgtttttaaatggtgggtcaaggagctagtttacaggcttactgtgatttaagcaaatgtgaaaagtgaaaccttaattttatcaaaagaaatttctgtaaatggtatgtctccttagaatacccaaatcataattttatttgtacacactgttaggggctcatctcatgtaggcagagtataaagtattaccttttggaattaaaagccactgactgttataaagtataacaacacacatcaggttttaaaaagccttgaatggcccttgtcttaaaaagaaattaggagccaggtgcggtggcacgtgcctgtaatcccagctccttgggaggctaagacaggaggattccttgagccctggagtttgagtccagcctgggtgacatagcaagaccctgtcttaaaagaaaaatgggaagaaagacaaggtaacatgaagaaagaagagatacctagtatgatggagctgcaaatttcatggcagttcatgcagtcggtcaagaggaggattttgttttgtagtttgcagatgagcatttctaaagcattttcccttgctgtatttttttgtattataaattacattggacttcatatatataatttttttttacattatatgtctcttgtatgttttgaaactcttgtatttatgatatagcttatatgatttttttgccttggtatacattttaaaatatgaatttaaaaaatttttgtaaaaataaaattcacaaaattgttttgaaaaacaaaaaaaa

SEQ ID NO: 363303 - DNA, 3861 bp, Homo sapiens
aagaagaggtagcgagtggacgtgactgctctatcccgggcaaaagggatagaaccagaggtggggagtctgggcagtcggcgacccgcgaagacttgaggtgccgcagcggcatccggagtagcgccgggctccctccggggtgcagccgccgtcgggggaagggcgccacaggccgggaagacctcctccctttgtgtccagtagtggggtccaccggagggcggcccgtgggccgggcctcaccgcggcgctccgggactgtggggtcaggctgcgttgggtggacgcccacctcgccaaccttcggaggtccctgggggtcttcgtgcgccccggggctgcagagatccaggggaggcgcctgtgaggcccggacctgccccggggcgaagggtatgtggcgagacagagccctgcacccctaattcccggtggaaaactcctgttgccgtttccctccaccggcctggagtctcccagtcttgtcccggcagtgccgccctccccactaagacctaggcgcaaaggcttggctcatggttgacagctcagagagagaaagatctgagggaagatggatgcaaaagctcgaaattgtttgcttcaacatagagaagctctggaaaaggacatcaagacatcctacatcatggatcacatgattagtgatggatttttaacaatatcagaagaggaaaaagtaagaaatgagcccactcaacagcaaagagcagctatgctgattaaaatgatacttaaaaaagataatgattcctacgtatcattctacaatgctctactacatgaaggatataaagatcttgctgcccttctccatgatggcattcctgttgtctcttcttccagtggtaaagattcagttagtggaataacttcgtatgtaaggacagtcctgtgtgaaggtggagtaccacagaggccagttgtttttgtcacaaggaagaagctggtgaatgcaattcagcagaagctctccaaattgaaaggtgaaccaggatgggtcaccatacatggaatggcaggctgtgggaagtctgtattagctgcagaagctgttagagatcattcccttttagaaggttgtttcccagggggagtgcattgggtttcagttgggaaacaagacaaatctgggcttctgatgaaactgcagaatctttgcacacggttggatcaggatgagagtttttcccagaggcttccacttaatattgaagaggctaaagaccgtctccgcattctgatgcttcgcaaacacccaaggtctctcttgatcttggatgatgtttgggactcttgggtgttgaaagcttttgacagtcagtgtcagattcttcttacaaccagagacaagagtgttacagattcagtaatgggtcctaaatatgtagtccctgtggagagttccttaggaaaggaaaaaggacttgaaattttatccctttttgttaatatgaagaaggcagatttgccagaacaagctcatagtattataaaagaatgtaaaggctctccccttgtagtatctttaattggtgcacttttacgtgattttcccaatcgctgggagtactacctcaaacagcttcagaataagcagtttaagagaataaggaaatcttcgtcttatgattatgaggctctagatgaagccatgtctataagtgttgaaatgctcagagaagacatcaaagattattacacagatctttccatccttcagaaggacgttaaggtgcctacaaaggtgttatgtattctctgggacatggaaactgaagaagttgaagacatactgcaggagtttgtaaataagtctcttttattctgtgatcggaatggaaagtcgtttcgttattatttacatgatcttcaagtagattttcttacagagaagaattgcagccagcttcaggatctacataagaagataatcactcagtttcagagatatcaccagccgcatactctttcaccagatcaggaagactgtatgtattggtacaactttctggcctatcacatggccagtgccaagatgcacaaggaactttgtgctttaatgttttccctggattggattaaagcaaaaacagaacttgtaggccctgctcatctgattcatgaatttgtggaatacagacatatactagatgaaaaggattgtgcagtcagtgagaattttcaggagtttttatctttaaatggacaccttcttggacgacagccatttcctaatattgtacaactgggtctctgtgagccggaaacttcagaagtttatcagcaagctaagctgcaggccaagcaggaggtcgataatggaatgctttacctggaatggataaacaaaaaaaacatcacgaatctttcccgcttagttgtccgcccccacacagatgctgtttaccatgcctgcttttctgaggatggtcagagaatagcttcttgtggagctgataaaaccttacaggtgttcaaagctgaaacaggagagaaacttctagaaatcaaggctcatgaggatgaagtgctttgttgtgcattctctacagatgacagatttatagcaacctgctcagtggataaaaaagtgaagatttggaattctatgactggggaactagtacacacctatgatgagcactcagagcaagtcaattgctgccatttcaccaacagtagtcatcatcttctcttagccactgggtcaagtgactgcttcctcaaactttgggatttgaatcaaaaagaatgtcgaaataccatgtttggtcatacaaattcagtcaatcactgcagattttcaccagatgataagcttttggctagttgttcagctgatggaaccttaaagctttgggatgcgacatcagcaaatgagaggaaaagcattaatgtgaaacagttcttcctaaatttggaggaccctcaagaggatatggaagtgatagtgaagtgttgttcgtggtctgctgatggtgcaaggataatggtggcagcaaaaaataaaatctttctttttgacattcatactagtggcctattgggagaaatccacacgggccatcacagcaccatccagtactgtgacttctccccacaaaaccatttggcagtggttgctttgtcccagtactgtgtagagttgtggaatacagactcacgttcaaaggtggctgattgcagaggacatttaagttgggttcatggtgtgatgttttctcctgatggatcatcatttttgacatcttctgatgaccagacaatcaggctctgggagacaaagaaagtatgtaagaactctgctgtaatgttaaagcaagaagtagatgttgtgtttcaagaaaatgaagtgatggtccttgcagttgaccatataagacgtctgcaactcattaatggaagaacaggtcagattgattatctgactgaagctcaagttagctgctgttgcttaagtccacatcttcagtacattgcatttggagatgaaaatggagccattgaggtattcagtgctagtcttcagaatctttctgtacagaattaaataaaactaattatatgtctggcattgtgcacttctatttttatttatttttatttttgaaatggggtcttgctgtgtcacccacgctgagtacagtgacacgatcacagccgactgcagccttgaccttctgagctcaagtgattttcccacttaagcctcctgagtagctgggactaaaggtgtacgtcaccatgcccgactaattttttttttttgtagagatggggtcccctgtgttgcccaggctggtctcaaactcctgggtttaagcgattgtccgg

SEQ ID NO: 363304 - DNA, 806 bp, Homo sapiens
cggaacagtgacttggccggggggaagaagaagccggtccggagttctggccgacagcaggcgaggagtgggtagcagcgcctatgtgaagttagctaatctgagaaggcccacttctggttccatggatgatggcggttgagcagatgccaaaaaaggattggtacagcatcctgggagcagacccatctgcaaatatatcagacctaaaacaaaaatatcaaaaactcatattaatgtatcatccagataaacaaagtacagatgtaccagcaggaacagtggaggaatgtgtacagaagttcatcgaaattgatcaagcatggaaaattctaggaaatgaagagacaaaaagagagtatgacctgcagcggtgtggctcataaacctctctgatgagtcctgccagtgttttcttagatcccactgttgagacaatggagccacagaattctttcacctcttgttgtcagacaaatccaatagaacacaaggtcagaagggcctatacttctaaaggttgaaagattctttttcaaaagatgatctaagaaatgtaggaccagtagatgctcaagtatatcttgaagaaatgtcttggaatgaaggttggattttttttttctcttgacaacatttaaaaaaaaaaggaattttctataagaaaaaaaaactcatgtggatattgggaaatcttaaaaagaaataatagtgtggctttctatatatatgtggtaagtgtttctgtctggagtatttctgcttaattctaaactttatttattgactgatgtccccctatatga

SEQ ID NO: 363305 - DNA, 457 bp, Homo sapiens
aaaaagaaatggtatggggtaggggaggtggataggtaagtagaaggattagaacagggagtaataaattcacatgaaaaggagacaataatcaagtcaaaagaataaatgcttactaatcatcagaaaatctgtggccattagggctggcacgtaaaaatccaaaatcactcagaggccaaatctgtaaaatcaaaatgaggttgaagacaattagtgaaagtaatgttatagtatcatcatattcccttttgctatctgtcccttttctctatgccagataaacactttctccttactcatcaatcaagaataaaattttctacatcaaagtaagacttgagaaaataaacttatgtgtatatatgtttaaactccaaagtttgggacattcaaacaatgtacatgaaattatatgtgtgtggtgtgtgaataaatatgtatgaatataaaaaaa

SEQ ID NO: 363306 - DNA, 625 bp, Homo sapiens
cggaacagtgacttggccggggggaagaagaagccggtccggagttctggccgacagcaggcgaggagtgggtagcagcgcctatgtgaagttagctaatctgagaaggcccacttctggttccatggatgatggcggttgagcagatgccaaaaaaggattggtacagcatcctgggagcagacccatctgcaaatatatcagacctaaaacaaaaatatcaaaaactcatattaatggttcattgatgatgttacatagcccttgacccatgtgaactgatgacagaatagagccacacagcatgtgaagtgatttgacctgtagcaatctttgaaccagtgttttgtctacacctatcctcagaggctatccagctgttagatttcatttttaataattcagccaagagtgtggaacatttttctcttgagattttcaatagctagtctgaagatatgtttttgagagcttcaaatagtgttccagaagagaatgttagaatcgggaagaataagcatattagatacttaaaggaaagtatctgaaaaagaaaatagagaatataagcatataattttcagtttactaaagaatactgtttttaggaataatagtcatgaaa

SEQ ID NO: 363307 - DNA, 490 bp, Homo sapiens
tgattttgacaaaaaatttataagaaatgttatgttctagatttttcagtcagctaaagtcaggttactttaacactgctgtcaaaaatactagtctaagtttttaagtgataggtaagttagaattgtagtggccaggctggcgttgcctttttagcattcttcaaggttacaattaaagtatcatgttttacaattaagtgtcatgttttatgttttacagaagatgatctaagaaatgtaggaccagtagatgctcaagtatatcttgaagaaatgtcttggaatgaaggttggattttttttttctcttgacaacatttaaaaaaaaaaggaattttctataagaaaaaaaaactcatgtggatattgggaaatcttaaaaagaaataatagtgtggctttctatatatatgtggtaagtgtttctgtctggagtatttctgcttaattctaaactttatttattgactgatgtccccctatatga

SEQ ID NO: 363308 - DNA, 2421 bp, Homo sapiens
cggaacagtgacttggccggggggaagaagaagccggtccggagttctggccgacagcaggcgaggagtgggtagcagcgcctatgtgaagttagctaatctgagaaggcccacttctggttccatggatgatggcggttgagcagatgccaaaaaaggattggtacagcatcctgggagcagacccatctgcaaatatatcagacctaaaacaaaaatatcaaaaactcatattaatgtatcatccagataaacaaagtacagatgtaccagcaggaacagtggaggaatgtgtacagaagttcatcgaaattgatcaagcatggaaaattctaggaaatgaagagacaaaaagagagtatgacctgcagcggtgtgaagatgatctaagaaatgtaggaccagtagatgctcaagtatatcttgaagaaatgtcttggaatgaaggtgatcactctttttatctgagttgcagatgtggtggaaaatacagtgtttccaaggatgaagcggaagaagttagcctgatttcttgtgatacatgttcactaattatagaactccttcattataactaaaattgttcacaacttgaaatgctttaactgtggtattgagacatgatgagaagccgttgagctttgtccattcaaggaaatggattatttgtcagcccgattatttgcaaagaaaatatacaattatcaagcagagaccacctcagattaatagagaatgaatataattatttatttgtatttataatttatatttacaagttgtcacaaaaatagatttgattatatttggtgaattcccatctgagaactttattatgtcatttttttccatgacacaaaataagaattttcttaatatgagcatgtctcctcttttcagtgggtaacagtatcatcatattcctttatagttactaagtttctggtctaaccgataacgtttctagttgctaaagttatggggctgttgtacacctagaatctttgtgaataatgtgaggccagttcttccataaggaaggctggttatggatattcataaggttatttcaaagttaataaagacaaagtggcaactgtagaaagtgttgcctccaatcttggtccgtatttccaaagcttgtaaacactgccatcttcaaatttaaatgtaatttaggaaatggaagcttttaattttaatttcttttttctaagacagagtctcactctgtcgcgccagctggagtgcagtgccatgatctcgggtcgctgtaacctccgtctcctgggggaggctggggcacaagaatcacttgaacccaggaggcagagtgagccgaggttgtgccactgcactgcagcctgggctacagagagcaagactctgtctcaaaaaaaataaaataaaataaataaaaaaagatatagtattaatgcctgtatttatgaagacagggccattgcactgctgctatgctgaaatgaacttttataaagtattattgactatagccaactacagatggcatatgccttaaagatgcatttttctatgtatttaatattttgtgtacagtaaaagtcagaactcatttaaagaactttaagggatcctttagaaacatttttacttaatttcaaatgagtgggctgagcatgtagactagcagctttttatcaaacctggcattgtcaggttgaacttataaatacgaatagttactactctgacttgtaaatgtagctgctaaagtatgaggtatatttaagaagaatagattagtttcattatacctataagaacaagaattcaaaagtgaggtagtcatccaggttccccctcccacaatatttttgtatcataaaatttagatgacttttttgggttacatttttatccatatattttgaactaacagaacttggcagaatgtgtgttgaatattctttacatttaacaattaaaaacaactaaaactgaatagcaaatagtttattggtaagtacacggtttcaacgggagtaataaattcacatgaaaaggagacaataatcaagtcaaaagaataaatgcttactaatcatcagaaaatctgtggccattagggctggcacgtaaaaatccaaaatcactcagaggccaaatctgtaaaatcaaaatgaggttgaagacaattagtgaaagtaatgttatagtatcatcatattcccttttgctatctgtcccttttctctatgccagataaacactttctccttactcatcaatcaagaataaaattttctacatcaaagtaagacttgagaaaataaacttatgtgtatatatgtttaaactccaaagtttgggacattcaaacaatgtacatgaaattatatgtgtgtggtgtgtgaataaatatgtatgaatataaaaaaa

SEQ ID NO: 363309 - DNA, 2390 bp, Homo sapiens
tgattttgacaaaaaatttataagaaatgttatgttctagatttttcagtcagctaaagtcaggttactttaacactgctgtcaaaaatactagtctaagtttttaagtgataggtaagttagaattgtagtggccaggctggcgttgcctttttagcattcttcaaggttacaattaaagtatcatgttttacaattaagtgtcatgttttatgttttacagaagatgatctaagaaatgtaggaccagtagatgctcaagtatatcttgaagaaatgtcttggaatgaagttacttctcagagacagtaaaatggaatgaccaatggatcagagattctttaagtcaaagggcacaagcatttcaacttcccaggaaaatgacacacttaaaatttccacgatcaggagcctaagtgatcactctttttatctgagttgcagatgtggtggaaaatacagtgtttccaaggatgaagcggaagaagttagcctgatttcttgtgatacatgttcactaattatagaactccttcattataactaaaattgttcacaacttgaaatgctttaactgtggtattgagacatgatgagaagccgttgagctttgtccattcaaggaaatggattatttgtcagcccgattatttgcaaagaaaatatacaattatcaagcagagaccacctcagattaatagagaatgaatataattatttatttgtatttataatttatatttacaagttgtcacaaaaatagatttgattatatttggtgaattcccatctgagaactttattatgtcatttttttccatgacacaaaataagaattttcttaatatgagcatgtctcctcttttcagtgggtaacagtatcatcatattcctttatagttactaagtttctggtctaaccgataacgtttctagttgctaaagttatggggctgttgtacacctagaatctttgtgaataatgtgaggccagttcttccataaggaaggctggttatggatattcataaggttatttcaaagttaataaagacaaagtggcaactgtagaaagtgttgcctccaatcttggtccgtatttccaaagcttgtaaacactgccatcttcaaatttaaatgtaatttaggaaatggaagcttttaattttaatttcttttttctaagacagagtctcactctgtcgcgccagctggagtgcagtgccatgatctcgggtcgctgtaacctccgtctcctgggggaggctggggcacaagaatcacttgaacccaggaggcagagtgagccgaggttgtgccactgcactgcagcctgggctacagagagcaagactctgtctcaaaaaaaataaaataaaataaataaaaaaagatatagtattaatgcctgtatttatgaagacagggccattgcactgctgctatgctgaaatgaacttttataaagtattattgactatagccaactacagatggcatatgccttaaagatgcatttttctatgtatttaatattttgtgtacagtaaaagtcagaactcatttaaagaactttaagggatcctttagaaacatttttacttaatttcaaatgagtgggctgagcatgtagactagcagctttttatcaaacctggcattgtcaggttgaacttataaatacgaatagttactactctgacttgtaaatgtagctgctaaagtatgaggtatatttaagaagaatagattagtttcattatacctataagaacaagaattcaaaagtgaggtagtcatccaggttccccctcccacaatatttttgtatcataaaatttagatgacttttttgggttacatttttatccatatattttgaactaacagaacttggcagaatgtgtgttgaatattctttacatttaacaattaaaaacaactaaaactgaatagcaaatagtttattggtaagtacacggtttcaacgggagtaataaattcacatgaaaaggagacaataatcaagtcaaaagaataaatgcttactaatcatcagaaaatctgtggccattagggctggcacgtaaaaatccaaaatcactcagaggccaaatctgtaaaatcaaaatgaggttgaagacaattagtgaaagtaatgttatagtatcatcatattcccttttgctatctgtcccttttctctatgccagataaacactttctccttactcatcaatcaagaataaaattttctacatcaaagtaagacttgagaaaataaacttatgtgtatatatgtttaaactccaaagtttgggacattcaaacaatgtacatgaaattatatgtgtgtggtgtgtgaataaatatgtatgaatataaaaaaa

SEQ ID NO: 363310 - DNA, 2440 bp, Homo sapiens
cggaacagtgacttggccggggggaagaagaagccggtccggagttctggccgacagcaggcgaggagtgggtagcagcgcctatgtgaagttagctaatctgagaaggcccacttctggttccatggatgatggcggttgagcagatgccaaaaaaggattggtacagcatcctgggagcagacccatctgcaaatatatcagacctaaaacaaaaatatcaaaaactcatattaatgtatcatccagataaacaaagtacagatgtaccagcaggaacagtggaggaatgtgtacagaagttcatcgaaattgatcaagcatggaaaattctaggaaatgaagagacaaaaagagagtatgacctgcagcggtgtgaagatgatctaagaaatgtaggaccagtagatgctcaagtatatcttgaagaaatgtcttggaatgaaggtgatcactctttttatctgagttgcagatgtggtggaaaatacagtgtttccaaggatgaagcggaagaagttagcctgatttcttgtgatacatgttcactaattatagaactccttcattataactaaaattgttcacaacttgaaatgctttaactgtggtattgagacatgatgagaagccgttgagctttgtccattcaaggaaatggattatttgtcagcccgattatttgcaaagaaaatatacaattatcaagcagagaccacctcagattaatagagaatgaatataattatttatttgtatttataatttatatttacaagttgtcacaaaaatagatttgattatatttggtgaattcccatctgagaactttattatgtcatttttttccatgacacaaaataagaattttcttaatatgagcatgtctcctcttttcagtgggtaacagtatcatcatattcctttatagttactaagtttctggtctaaccgataacgtttctagttgctaaagttatggggctgttgtacacctagaatctttgtgaataatgtgaggccagttcttccataaggaaggctggttatggatattcataaggttatttcaaagttaataaagacaaagtggcaactgtagaaagtgttgcctccaatcttggtccgtatttccaaagcttgtaaacactgccatcttcaaatttaaatgtaatttaggaaatggaagcttttaattttaatttcttttttctaagacagagtctcactctgtcgcgccagctggagtgcagtgccatgatctcgggtcgctgtaacctccgtctcctgggttcaagtgattctccagcgggaggctggggcacaagaatcacttgaacccaggaggcagagtgagccgaggttgtgccactgcactgcagcctgggctacagagagcaagactctgtctcaaaaaaaataaaataaaataaataaaaaaagatatagtattaatgcctgtatttatgaagacagggccattgcactgctgctatgctgaaatgaacttttataaagtattattgactatagccaactacagatggcatatgccttaaagatgcatttttctatgtatttaatattttgtgtacagtaaaagtcagaactcatttaaagaactttaagggatcctttagaaacatttttacttaatttcaaatgagtgggctgagcatgtagactagcagctttttatcaaacctggcattgtcaggttgaacttataaatacgaatagttactactctgacttgtaaatgtagctgctaaagtatgaggtatatttaagaagaatagattagtttcattatacctataagaacaagaattcaaaagtgaggtagtcatccaggttccccctcccacaatatttttgtatcataaaatttagatgacttttttgggttacatttttatccatatattttgaactaacagaacttggcagaatgtgtgttgaatattctttacatttaacaattaaaaacaactaaaactgaatagcaaatagtttattggtaagtacacggtttcaacgggagtaataaattcacatgaaaaggagacaataatcaagtcaaaagaataaatgcttactaatcatcagaaaatctgtggccattagggctggcacgtaaaaatccaaaatcactcagaggccaaatctgtaaaatcaaaatgaggttgaagacaattagtgaaagtaatgttatagtatcatcatattcccttttgctatctgtcccttttctctatgccagataaacactttctccttactcatcaatcaagaataaaattttctacatcaaagtaagacttgagaaaataaacttatgtgtatatatgtttaaactccaaagtttgggacattcaaacaatgtacatgaaattatatgtgtgtggtgtgtgaataaatatgtatgaatataaaaaaa

SEQ ID NO: 363311 - DNA, 2357 bp, Homo sapiens
cggaacagtgacttggccggggggaagaagaagccggtccggagttctggccgacagcaggcgaggagtgggtagcagcgcctatgtgaagttagctaatctgagaaggcccacttctggttccatggatgatggcggttgagcagatgccaaaaaaggattggtacagcatcctgggagcagacccatctgcaaatatatcagacctaaaacaaaaatatcaaaaactcatattaatgtatcatccagataaacaaagtacagatgtaccagcaggaacagtggaggaatgtgtacagaagttcatcgaaattgatcaagcatggaaaattctaggaaatgaagagacaaaaagagagtatgacctgcagcggtgtgaagatgatctaagaaatgtaggaccagtagatgctcaagtatatcttgaagaaatgtcttggaatgaaggtgatcactctttttatctgagttgcagatgtggtggaaaatacagtgtttccaaggatgaagcggaagaagttagcctgatttcttgtgatacatgttcactaattatagaactccttcattataactaaaattgttcacaacttgaaatgctttaactgtggtattgagacatgatgagaagccgttgagctttgtccattcaaggaaatggattatttgtcagcccgattatttgcaaagaaaatatacaattatcaagcagagaccacctcagattaatagagaatgaatataattatttatttgtatttataatttatatttacaagttgtcacaaaaatagatttgattatatttggtgaattcccatctgagaactttattatgtcatttttttccatgacacaaaataagaattttcttaatatgagcatgtctcctcttttcagtgggtaacagtatcatcatattcctttatagttactaagtttctggtctaaccgataacgtttctagttgctaaagttatggggctgttgtacacctagaatctttgtgaataatgtgaggccagttcttccataaggaaggctggttatggatattcataaggttatttcaaagttaataaagacaaagtggcaactgtagaaagtgttgcctccaatcttggtccgtatttccaaagcttgtaaacactgccatcttcaaatttaaatgtaatttaggaaatggaagcttttaattttaatttcttttttctaagacagagtctcactctgtcgcgccagctggagtgcagtgccatgatctcgggtcgctgtaacctccgtctcctgggggaggctggggcacaagaatcacttgaacccaggaggcagagtgagccgaggttgtgccactgcactgcagcctgggctacagagagcaagactctgtctcaaaaaaaataaaataaaataaataaaaaaagatatagtattaatgcctgtatttatgaagacagggccattgcactgctgctatgctgaaatgaacttttataaagtattattgactatagccaactacagatggcatatgccttaaagatgcatttttctatgtatttaatattttgtgtacagtaaaagtcagaactcatttaaagaactttaagggatcctttagaaacatttttacttaatttcaaatgagtgggctgagcatgtagactagcagctttttatcaaacctggcattgtcaggttgaacttataaatacgaatagttactactctgacttgtaaatgtagctgctaaagtatgaggtatatttaagaagaatagattagtttcattatacctataagaacaagaattcaaaagtgaggtagtcatccaggttccccctcccacaatatttttgtatcataaaatttagatgacttttttgggttacatttttatccatatattttgaactaacagaacttggcagaatgtgtgttgaatattctttacatttaacaattaaaaacaactaaaactgaatagcaaatagtttattggtaagtacacggtttcaacgggagtaataaattcacatgaaaaggagacaataatcaagtcaaaagaataaatgcttactaatcatcagaaaatctgtggccattagggctggcacgtaaaaatccaaaatcactcagaggccaaatctgtaaaatcaaaatgaggttgaagacaattagtgaaagtaatgttatagtatcatcatattcccttttgctatctgtcccttttctctatgccagataaacactttctccttactcatcaatcaagaataaaattttctacatcaaagtaagactttggagtttaaacatatatacacataagtttatttgtcgacgcggccgcgaat

SEQ ID NO: 363312 - DNA, 1404 bp, Homo sapiens
accatgcctggccagaagcttttttaaaaataatgacttggaagttggtgcattatttccccttttattttggagtgttgatataatattggggccaggcatggtggctcacatctgtaatcccagcactttgggagactaaggcaggcggatcacctttggtcaggagttcgagaccaccctggccagcatggtgaaaccccatatctactaaaaataatttttttaaaaattggccagtcacgttggtgtctgcctgtggtcccagctactcgggaggctggggcacaagaatcacttgaacccaggaggcagagtgagccgaggttgtgccactgcactgcagcctgggctacagagagcaagactctgtctcaaaaaaaataaaataaaataaataaaaaaagatatagtattaatgcctgtatttatgaagacagggccattgcactgctgctatgctgaaatgaacttttataaagtattattgactatagccaactacagatggcatatgccttaaagatgcatttttctatgtatttaatattttgtgtacagtaaaagtcagaactcatttaaagaactttaagggatcctttagaaacatttttacttaatttcaaatgagtgggctgagcatgtagactagcagctttttatcaaacctggcattgtcaggttgaacttataaatacgaatagttactactctgacttgtaaatgtagctgctaaagtatgaggtatatttaagaagaatagattagtttcattatacctataagaacaagaattcaaaagtgaggtagtcatccaggttccccctcccacaatatttttgtatcataaaatttagatgacttttttgggttacatttttatccatatattttgaactaacagaacttggcagaatgtgtgttgaatattctttacatttaacaattaaaaacaactaaaactgaatagcaaatagtttattggtaagtacacggtttcaacgggagtaataaattcacatgaaaaggagacaataatcaagtcaaaagaataaatgcttactaatcatcagaaaatctgtggccattagggctggcacgtaaaaatccaaaatcactcagaggccaaatctgtaaaatcaaaatgaggttgaagacaattagtgaaagtaatgttatagtatcatcatattcccttttgctatctgtcccttttctctatgccagataaacactttctccttactcatcaatcaagaataaaattttctacatcaaagtaagacttgagaaaataaacttatgtgtatatatgtttaaactccaaagtttgggacattcaaacaatgtacatgaaattatatgtgtgtggtgtgtgaataaatatgtatgaatataaaaaaa

SEQ ID NO: 363313 - DNA, 1448 bp, Homo sapiens
  misc_feature (13)..(13): n is a, c, g, or t
  misc_feature (17)..(17): n is a, c, g, or t
  misc_feature (29)..(29): n is a, c, g, or t
  misc_feature (34)..(34): n is a, c, g, or t
  misc_feature (36)..(36): n is a, c, g, or t
  misc_feature (44)..(44): n is a, c, g, or t
  misc_feature (49)..(49): n is a, c, g, or t
  misc_feature (55)..(55): n is a, c, g, or t
  misc_feature (62)..(62): n is a, c, g, or t
agggccctacttnatgnggctggaccacnttaantngaaaaacnaccgntggggnttctaantaaacgcgtacgcccgatacgggatgattctggccgacagcaggcgaggagtgggtagcagcgcctatgtgaagttagctaatctgagaaggcccacttctggttccatggatgatggcggttgagcagatgccaaaaaaggattggtacagcatcctgggagcagacccatctgcaaatatatcagacctaaaacaaaaatatcaaaaactcatattaatgtatcatccagataaacaaagtacagatgtaccaggggaggctggggcacaagaatcacttgaacccaggaggcagagtgagccgaggttgtgccactgcactgcagcctgggctacagagagcaagactctgtctcaaaaaaaataaaataaaataaataaaaaaagatatagtattaatgcctgtatttatgaagacagggccattgcactgctgctatgctgaaatgaacttttataaagtattattgactatagccaactacagatggcatatgccttaaagatgcatttttctatgtatttaatattttgtgtacagtaaaagtcagaactcatttaaagaactttaagggatcctttagaaacatttttacttaatttcaaatgagtgggctgagcatgtagactagcagctttttatcaaacctggcattgtcaggttgaacttataaatacgaatagttactactctgacttgtaaatgtagctgctaaagtatgaggtatatttaagaagaatagattagtttcattatacctataagaacaagaattcaaaagtgaggtagtcatccaggttccccctcccacaatatttttgtatcataaaatttagatgacttttttgggttacatttttatccatatattttgaactaacagaacttggcagaatgtgtgttgaatattctttacatttaacaattaaaaacaactaaaactgaatagcaaatagtttattggtaagtacacggtttcaacgggagtaataaattcacatgaaaaggagacaataatcaagtcaaaagaataaatgcttactaatcatcagaaaatctgtggccattagggctggcacgtaaaaatccaaaatcactcagaggccaaatctgtaaaatcaaaatgaggttgaagacaattagtgaaagtaatgttatagtatcatcatattcccttttgctatctgtcccttttctctatgccagataaacactttctccttactcatcaatcaagaataaaattttctacatcaaagtaagacttgagaaaataaacttatgtgtatatatgtttaaactccaaagtttgggacattcaaacaatgtacatgaaattatatgtgtgtggtgtgtgaataaatatgtatgaatataaaaaaa

SEQ ID NO: 363314 - DNA, 1395 bp, Homo sapiens
cggaacagtgacttggccggggggaagaagaagccggtccggagttctggccgacagcaggcgaggagtgggtagcagcgcctatgtgaagttagctaatctgagaaggcccacttctggttccatggatgatggcggttgagcagatgccaaaaaaggattggtacagcatcctgggagcagacccatctgcaaatatatcagacctaaaacaaaaatatcaaaaactcatattaatgtatcatccagataaacaaagtacagatgtaccagcaggaacagtggaggaatgtgtacagaagttcatcgaaattgatcaagcatggaaaattctaggaaatgaagagacaaaaagagagtatgacctgcagcggtgtgaagatgatctaagaaatgtaggaccagtagatgctcaagtatatcttgaagaaatgtcttggaatgaaggtgatcactctttttatctgagttgcagatgtggtggaaaatacagtgtttccaaggatgaagcggaagaagttagcctgatttcttgtgatacatgttcactaattatagaactccttcattataactaaaattgttcacaacttgaaatgctttaactgtggtattgagacatgatgagaagccgttgagctttgtccattcaaggaaatggattatttgtcagcccgattatttgcaaagaaaatatacaattatcaagcagagaccacctcagattaatagagaatgaatataattatttatttgtatttataatttatatttacaagttgtcacaaaaatagatttgattatatttggtgaattcccatctgagaactttattatgtcatttttttccatgacacaaaataagaattttcttaatatgagcatgtctcctcttttcagtgggtaacagtatcatcatattcctttatagttactaagtttctggtctaaccgataacgtttctagttgctaaagttatggggctgttgtacacctagaatctttgtgaataatgtgaggccagttcttccataaggaaggctggttatggatattcataaggttatttcaaagttaataaagacaaagtggcaactgtagaaagtgttgcctccaatcttggtccgtatttccaaagcttgtaaacactgccatcttcaaatttaaatgtaatttaggaaatggaagcttttaattttaatttcttttttctaagacagagtctcactctgtcgcgccagctggagtgcagtgccatgatctcgggtcgctgtaacctccgtctcctgggttcaagtgattctccagcctcagcctcccgaatagctgggattacacgtgcccaccaccatgcccagctaatttttgtatttttagtagagatggggttccac

SEQ ID NO: 363315 - DNA, 762 bp, Homo sapiens
  misc_feature (13)..(13): n is a, c, g, or t
  misc_feature (17)..(17): n is a, c, g, or t
  misc_feature (29)..(29): n is a, c, g, or t
  misc_feature (34)..(34): n is a, c, g, or t
  misc_feature (36)..(36): n is a, c, g, or t
  misc_feature (44)..(44): n is a, c, g, or t
  misc_feature (49)..(49): n is a, c, g, or t
  misc_feature (55)..(55): n is a, c, g, or t
  misc_feature (62)..(62): n is a, c, g, or t
agggccctacttnatgnggctggaccacnttaantngaaaaacnaccgntggggnttctaantaaacgcgtacgcccgatacgggatgattctggccgacagcaggcgaggagtgggtagcagcgcctatgtgaagttagctaatctgagaaggcccacttctggttccatggatgatggcggttgagcagatgccaaaaaaggattggtacagcatcctgggagcagacccatctgcaaatatatcagacctaaaacaaaaatatcaaaaactcatattaatgtatcatccagataaacaaagtacagatgtaccagcaggaacagtggaggaatgtgtacagaagttcatcgaaattgatcaagcatggaaaattctaggaaatgaagagacaaaaagagagtatgacctgcagcggtgtggtaggtgcttgtgttgaggagccacagcacatcggcaactcttagaagcacactctgcagccattcctggggagcattttccagcatttgcaccaagtgttattgttgcctttattcctcccctccatcactgtttttaattatgccctattcttagcagtgactattgtgtatccattgagaagttaacaaaactactaggatgtggcttcttgtgaagccttgaaagctactttttataacatttgaaaaatgtttaattacacattactaactaatatgctttatatgtttaaaaactttttattaaaataaatatggattaacattttaattgta

SEQ ID NO: 363316 - DNA, 911 bp, Homo sapiens
  misc_feature (13)..(13): n is a, c, g, or t
  misc_feature (17)..(17): n is a, c, g, or t
  misc_feature (29)..(29): n is a, c, g, or t
  misc_feature (34)..(34): n is a, c, g, or t
  misc_feature (36)..(36): n is a, c, g, or t
  misc_feature (44)..(44): n is a, c, g, or t
  misc_feature (49)..(49): n is a, c, g, or t
  misc_feature (55)..(55): n is a, c, g, or t
  misc_feature (62)..(62): n is a, c, g, or t
agggccctacttnatgnggctggaccacnttaantngaaaaacnaccgntggggnttctaantaaacgcgtacgcccgatacgggatgattctggccgacagcaggcgaggagtgggtagcagcgcctatgtgaagttagctaatctgagaaggcccacttctggttccatggatgatggcggttgagcagatgccaaaaaaggattggtacagcatcctgggagcagacccatctgcaaatatatcagacctaaaacaaaaatatcaaaaactcatattaatggttattggattttttccccctctttttggtgtacatacttggaaggacgcatctgtcacaggaaaatttttgtgaagcactcatcttctgacttgcccatgaattccttgttttaagcagtcaaggcaaacagtgtgcttctcaaattttagcacgcgtaacagttgcttggagagcttggtgaaacagagattctggagtcctccctctgaagatttgagtatcatccagataaacaaagtacagatgtaccagcaggaacagtggaggaatgtgtacagaagttcatcgaaattgatcaagcatggaaaattctaggaaatgaagagacaaaaagagagtatgacctgcagcggtgtgaagatgatctaagaaatgtaggaccagtagatgctcaagtatatcttgaagaaatgtcttggaatgaaggttggattttttttttctcttgacaacatttaaaaaaaaaaggaattttctataagaaaaaaaaactcatgtggatattgggaaatcttaaaaagaaataatagtgtggctttctatatatatgtggtaagtgtttctgtctggagtatttctgcttaattctaaactttatttattgactgatgtccccctatatga

SEQ ID NO: 363317 - DNA, 418 bp, Homo sapiens
gttcattaattaaagtataaatatatatcgtgaaatacctaacacgttttccatacttgtcggtacacttatacctggaattcttggggcattttaaatgaaaatctgtgcttcctcaggtttgcattataatcatgatttactcgactaaatactaaagaatttacaagggcagtacttaattttttcttagatacatggcaaactgtgatgaattgtcattaatatttctattcagctaatctgagaaggcccacttctggttccatggatgatggcggttgagcagatgccaaaaaaggattggtacagcatcctgggagcagacccatctgcaaatatatcagacctaaaacaaaaatatcaaaaactcatattaatggtaagtcttttctttcagattttaaatcatgagggg

SEQ ID NO: 363318 - DNA, 2466 bp, Homo sapiens
  misc_feature (13)..(13): n is a, c, g, or t
  misc_feature (17)..(17): n is a, c, g, or t
  misc_feature (29)..(29): n is a, c, g, or t
  misc_feature (34)..(34): n is a, c, g, or t
  misc_feature (36)..(36): n is a, c, g, or t
  misc_feature (44)..(44): n is a, c, g, or t
  misc_feature (49)..(49): n is a, c, g, or t
  misc_feature (55)..(55): n is a, c, g, or t
  misc_feature (62)..(62): n is a, c, g, or t
agggccctacttnatgnggctggaccacnttaantngaaaaacnaccgntggggnttctaantaaacgcgtacgcccgatacgggatgattctggccgacagcaggcgaggagtgggtagcagcgcctatgtgaagttagctaatctgagaaggcccacttctggttccatggatgatggcggttgagcagatgccaaaaaaggattggtacagcatcctgggagcagacccatctgcaaatatatcagacctaaaacaaaaatatcaaaaactcatattaatgtatcatccagataaacaaagtacagatgtaccagcaggaacagtggaggaatgtgtacagaagttcatcgaaattgatcaagcatggaaaattctaggaaatgaagagacaaaaagagagtatgacctgcagcggtgtgaagatgatctaagaaatgtaggaccagtagatgctcaagtatatcttgaagaaatgtcttggaatgaaggtgatcactctttttatctgagttgcagatgtggtggaaaatacagtgtttccaaggatgaagcggaagaagttagcctgatttcttgtgatacatgttcactaattatagaactccttcattataactaaaattgttcacaacttgaaatgctttaactgtggtattgagacatgatgagaagccgttgagctttgtccattcaaggaaatggattatttgtcagcccgattatttgcaaagaaaatatacaattatcaagcagagaccacctcagattaatagagaatgaatataattatttatttgtatttataatttatatttacaagttgtcacaaaaatagatttgattatatttggtgaattcccatctgagaactttattatgtcatttttttccatgacacaaaataagaattttcttaatatgagcatgtctcctcttttcagtgggtaacagtatcatcatattcctttatagttactaagtttctggtctaaccgataacgtttctagttgctaaagttatggggctgttgtacacctagaatctttgtgaataatgtgaggccagttcttccataaggaaggctggttatggatattcataaggttatttcaaagttaataaagacaaagtggcaactgtagaaagtgttgcctccaatcttggtccgtatttccaaagcttgtaaacactgccatcttcaaatttaaatgtaatttaggaaatggaagcttttaattttaatttcttttttctaagacagagtctcactctgtcgcgccagctggagtgcagtgccatgatctcgggtcgctgtaacctccgtctcctgggggaggctggggcacaagaatcacttgaacccaggaggcagagtgagccgaggttgtgccactgcactgcagcctgggctacagagagcaagactctgtctcaaaaaaaataaaataaaataaataaaaaaagatatagtattaatgcctgtatttatgaagacagggccattgcactgctgctatgctgaaatgaacttttataaagtattattgactatagccaactacagatggcatatgccttaaagatgcatttttctatgtatttaatattttgtgtacagtaaaagtcagaactcatttaaagaactttaagggatcctttagaaacatttttacttaatttcaaatgagtgggctgagcatgtagactagcagctttttatcaaacctggcattgtcaggttgaacttataaatacgaatagttactactctgacttgtaaatgtagctgctaaagtatgaggtatatttaagaagaatagattagtttcattatacctataagaacaagaattcaaaagtgaggtagtcatccaggttccccctcccacaatatttttgtatcataaaatttagatgacttttttgggttacatttttatccatatattttgaactaacagaacttggcagaatgtgtgttgaatattctttacatttaacaattaaaaacaactaaaactgaatagcaaatagtttattggtaagtacacggtttcaacgggagtaataaattcacatgaaaaggagacaataatcaagtcaaaagaataaatgcttactaatcatcagaaaatctgtggccattagggctggcacgtaaaaatccaaaatcactcagaggccaaatctgtaaaatcaaaatgaggttgaagacaattagtgaaagtaatgttatagtatcatcatattcccttttgctatctgtcccttttctctatgccagataaacactttctccttactcatcaatcaagaataaaattttctacatcaaagtaagacttgagaaaataaacttatgtgtatatatgtttaaactccaaagtttgggacattcaaacaatgtacatgaaattatatgtgtgtggtgtgtgaataaatatgtatgaatataaaaaaa

SEQ ID NO: 363319 - DNA, 2473 bp, Homo sapiens
cggaacagtgacttggccggggggaagaagaagccggtccggagttctggccgacagcaggcgaggagtgggtagcagcgcctatgtgaagttagctaatctgagaaggcccacttctggttccatggatgatggcggttgagcagatgccaaaaaaggattggtacagcatcctgggagcagacccatctgcaaatatatcagacctaaaacaaaaatatcaaaaactcatattaatgtatcatccagataaacaaagtacagatgtaccagcaggaacagtggaggaatgtgtacagaagttcatcgaaattgatcaagcatggaaaattctaggaaatgaagagacaaaaagagagtatgacctgcagcggtgtgaagatgatctaagaaatgtaggaccagtagatgctcaagtatatcttgaagaaatgtcttggaatgaaggtgatcactctttttatctgagttgcagatgtggtggaaaatacagtgtttccaaggatgaagcggaagaagttagcctgatttcttgtgatacatgttcactaattatagaactccttcattataactaaaattgttcacaacttgaaatgctttaactgtggtattgagacatgatgagaagccgttgagctttgtccattcaaggaaatggattatttgtcagcccgattatttgcaaagaaaatatacaattatcaagcagagaccacctcagattaatagagaatgaatataattatttatttgtatttataatttatatttacaagttgtcacaaaaatagatttgattatatttggtgaattcccatctgagaactttattatgtcatttttttccatgacacaaaataagaattttcttaatatgagcatgtctcctcttttcagtgggtaacagtatcatcatattcctttatagttactaagtttctggtctaaccgataacgtttctagttgctaaagttatggggctgttgtacacctagaatctttgtgaataatgtgaggccagttcttccataaggaaggctggttatggatattcataaggttatttcaaagttaataaagacaaagtggcaactgtagaaagtgttgcctccaatcttggtccgtatttccaaagcttgtaaacactgccatcttcaaatttaaatgtaatttaggaaatggaagcttttaattttaatttcttttttctaagacagagtctcactctgtcgcgccagctggagtgcagtgccatgatctcgggtcgctgtaacctccgtctcctgggttcaagtgattctccagcctcagcctcccgaatagctgggattacacgtgcccaccaccatatctactaaaaataatttttttaaaaattggccagtcacgttggtgtctgcctgtggtcccagctactcgggaggctggggcacaagaatcacttgaacccaggaggcagagtgagccgaggttgtgccactgcactgcagcctgggctacagagagcaagactctgtctcaaaaaaaataaaataaaataaataaaaaaagatatagtattaatgcctgtatttatgaagacagggccattgcactgctgctatgtatttaatattttgtgtacagtaaaagtcagaactcatttaaagaactttaagggatcctttagaaacatttttacttaatttcaaatgagtgggctgagcatgtagactagcagctttttatcaaacctggcattgtcaggttgaacttataaatacgaatagttactactctgacttgtaaatgtagctgctaaagtatgaggtatatttaagaagaatagattagtttcattatacctataagaacaagaattcaaaagtgaggtagtcatccaggttccccctcccacaatatttttgtatcataaaatttagatgacttttttgggttacatttttatccatatattttgaactaacagaacttggcagaatgtgtgttgaatattctttacatttaacaattaaaaacaactaaaactgaatagcaaatagtttattggtaagtacacggtttcaacgggagtaataaattcacatgaaaaggagacaataatcaagtcaaaagaataaatgcttactaatcatcagaaaatctgtggccattagggctggcacgtaaaaatccaaaatcactcagaggccaaatctgtaaaatcaaaatgaggttgaagacaattagtgaaagtaatgttatagtatcatcatattcccttttgctatctgtcccttttctctatgccagataaacactttctccttactcatcaatcaagaataaaattttctacatcaaagtaagacttgagaaaataaacttatgtgtatatatgtttaaactccaaagtttgggacattcaaacaatgtacatgaaattatatgtgtgtggtgtgtgaataaatatgtatgaatataaaaaaa

SEQ ID NO: 363320 - DNA, 416 bp, Homo sapiens
ctgcatggctcagcagctgagacggggtttggaccatgtctgttctgcttatctcactagatcactttgtctctctgtgcacttcagtcacctcttggttgaaataggtgacaagggcacagagaggggagggggcttgaccaaggccaaagagctgcacagtagccatcattgtattcccagcactttgggagacggtggtaggaggactgcttgagctcaggagtttaagaccagcctgggcaacatagcaagacgtcgtctctgttaaaaattaacaacaacaacaaaaagtagccaggcatggtggtgcacaccagtaatccaagctacttgggaagctgaagtgggaggatcacttgagcccaggagattgaagctgcagtgagctatgatcgcaccactaccccccagcc

SEQ ID NO: 363321 - DNA, 2214 bp, Homo sapiens
  misc_feature (909)..(909): n is a, c, g, or t
gttttggcatttgtctggactgattacttggtagaaagccccggagcgctgggtcagcatcatccgtgactgactgagaaggcgcgagaggagtcttccccgctgcacagaggcgtggctgaggctcggcggcgcccagggtacccaggcccggcccggaataaggacatcctctctggccccgctccgctcacagagtcagatggcggcggccgagctgacggccccggcccaggtggttctggagcaggggatgaggaggcaccttatcagcagagcacttctccacagcgggtgtcacaggttaggattcctaaggcccttccttctccccagaagaccaacccctgtgagatatgtggcccagtcttgagacagattttgcacttggttgaacaccaaggaacacaccatggtcagaaactgtatacagacggggcatgtaggaaacaattacaatttactgcataccttcatcagcaccagaagcagcatgttggacagaaacacttcagaagcaatgggggcagagacatgtttttgagcagctgcacatttgaagtatctgggaagcccttcacttgcaaggaggttgggaaggatttcctggtgagatcaagatttcttcagcaacaggctgctcacaccagaaagaagtcaaacagaaccaagagtgcagtggcctttcacagtgtaaaaaatcattacaactggggagaatgtgtgaaagctttcagctacaaacatgtacgtgttcagcaccagggagacctcattagggaaagatcttacatgtgcagtgaatgtgggaaatcttttagcacaagctgtagcctcagtgatcatttgagagttcacacttcagaaaagccttatacatgtggagaatgtgggaaatcctataggcanagctctagccttattacgcaccgaagaattcacactggagtaagacctcatcaatgtgatgaatgtggaaaattatttaacaggaagtatgaccttcttatacatcagagagttcatactggagaaaggccttacaagtgcagtgaatgtgggaaatcctttagccatagctctagcctcattacacaccagagaattcatactggaatgaggccttatgagtgcagtgaatgtgggaaatcttttatccatagttctagccttattacacaccagagagttcacactggtacaaggccttatatgtgcagtgaatgtgggaaatcctttagccagagctgtcacctcattaaacaccggagacttcacattggagaagggccttatgagtgtagtgaatgtgggaaattgtttacttatagatctcgtttcttccaacaccagagagttcatactggagtaagatctcatgaatgtcatgaatgtggaaaattatttagcaggaaatttgacctcattgtacatgagagagttcacacaggagaaaggccatatgagtgcagtgaatgtggaaaatcctttacctgtaaatcctacctcatctcacactggaaagttcatactggagcaaggccttatgaatgtggggagtgtgggaaatcatttactcatagctctacgctccttcaacaccagagagttcacactggagaaaggccttatgagtgcaatgaatgtgggaagttttttagccagagctccagcctcattagacataggagaagtcacaccggagaaaggccttatgagtgcagtgagtgttggaaatcctttagtaaccactctagcctcgttaaacaccgaagagttcataccggagaaaggccttatgaatgcagtgaatgtggaaaatcctttagccagagctctaacctcactaatcaccagcgaattcacagtggggaaaggccttatgagtgtagtgactgtggaaaattttttaccttcaactccaacctcctaaaacatcagaacgttcacaagggataaaggttaggtaacacacatagggctgttacggactgagaagtgtccctgcaaaattcacagacataaataaataaatacgtattttcaataaccatgttttatatttagtatatgttctctgaattttgttttatacaaataagtttatatgtgtacatactactttgtctcatatccacacagaaaaccaaatggtttctttttttaaaaaaattctttgtgtttaaatggacaaattataattgtacatgttct

SEQ ID NO: 363322 - DNA, 890 bp, Homo sapiens
gttttggcatttgtctggactgattacttggtagaaagccccggagcgctgggtcagcatcatccgtgactgactgagaaggcgcgagaggagtcttccccgctgcacagaggcgtggctgaggctcggcggcgcccagggtacccaggcccggcccggaataaggacatcctctctggccccgctccgctcacagagtcagatggcggcggccgagctgacggccccggcccagggcattgtgacctttgaggacgtggctgtttacttctcctggaaggaatggggtcttcttgatgaggctcagaaatgcctgtaccacgatgtgatgctggagaacttgacacttacaacctccctgggtggttctggagcaggggatgaggaggcaccttatcagcagagcacttctccacagcgggtgtcacaggttaggattcctaaggcccttccttctccccagaagaccaacccctgtgagatatgtggcccagtcttgagacagattttgcacttggttgaacaccaaggaacacaccatggtcagaaactgtatacagacggggcatgtaggaaacaattacaatttactgcataccttcatcagcaccagaagcagcatgttggacagaaacacttcagcctctgattggttgtgcaccagtccttcataggattggaggcctttaaagaactcttggggtattataaaattctagcttattcatggcaaaaaccgcaattacttttgcaccaacctaataaaaccctaaaaaacattgtaatcggggttcttgagccgcttggtcgcctgctcccacacctacattccacttctgtggagtgtactttcccctcaataaatctgcgctttcattggtccgttcttt

SEQ ID NO: 363323 - DNA, 2341 bp, Homo sapiens
  misc_feature (1036)..(1036): n is a, c, g, or t
gttttggcatttgtctggactgattacttggtagaaagccccggagcgctgggtcagcatcatccgtgactgactgagaaggcgcgagaggagtcttccccgctgcacagaggcgtggctgaggctcggcggcgcccagggtacccaggcccggcccggaataaggacatcctctctggccccgctccgctcacagagtcagatggcggcggccgagctgacggccccggcccagggcattgtgacctttgaggacgtggctgtttacttctcctggaaggaatggggtcttcttgatgaggctcagaaatgcctgtaccacgatgtgatgctggagaacttgacacttacaacctccctgggtggttctggagcaggggatgaggaggcaccttatcagcagagcacttctccacagcgggtgtcacaggttaggattcctaaggcccttccttctccccagaagaccaacccctgtgagatatgtggcccagtcttgagacagattttgcacttggttgaacaccaaggaacacaccatggtcagaaactgtatacagacggggcatgtaggaaacaattacaatttactgcataccttcatcagcaccagaagcagcatgttggacagaaacacttcagaagcaatgggggcagagacatgtttttgagcagctgcacatttgaagtatctgggaagcccttcacttgcaaggaggttgggaaggatttcctggtgagatcaagatttcttcagcaacaggctgctcacaccagaaagaagtcaaacagaaccaagagtgcagtggcctttcacagtgtaaaaaatcattacaactggggagaatgtgtgaaagctttcagctacaaacatgtacgtgttcagcaccagggagacctcattagggaaagatcttacatgtgcagtgaatgtgggaaatcttttagcacaagctgtagcctcagtgatcatttgagagttcacacttcagaaaagccttatacatgtggagaatgtgggaaatcctataggcanagctctagccttattacgcaccgaagaattcacactggagtaagacctcatcaatgtgatgaatgtggaaaattatttaacaggaagtatgaccttcttatacatcagagagttcatactggagaaaggccttacaagtgcagtgaatgtgggaaatcctttagccatagctctagcctcattacacaccagagaattcatactggaatgaggccttatgagtgcagtgaatgtgggaaatcttttatccatagttctagccttattacacaccagagagttcacactggtacaaggccttatatgtgcagtgaatgtgggaaatcctttagccagagctgtcacctcattaaacaccggagacttcacattggagaagggccttatgagtgtagtgaatgtgggaaattgtttacttatagatctcgtttcttccaacaccagagagttcatactggagtaagatctcatgaatgtcatgaatgtggaaaattatttagcaggaaatttgacctcattgtacatgagagagttcacacaggagaaaggccatatgagtgcagtgaatgtggaaaatcctttacctgtaaatcctacctcatctcacactggaaagttcatactggagcaaggccttatgaatgtggggagtgtgggaaatcatttactcatagctctacgctccttcaacaccagagagttcacactggagaaaggccttatgagtgcaatgaatgtgggaagttttttagccagagctccagcctcattagacataggagaagtcacaccggagaaaggccttatgagtgcagtgagtgttggaaatcctttagtaaccactctagcctcgttaaacaccgaagagttcataccggagaaaggccttatgaatgcagtgaatgtggaaaatcctttagccagagctctaacctcactaatcaccagcgaattcacagtggggaaaggccttatgagtgtagtgactgtggaaaattttttaccttcaactccaacctcctaaaacatcagaacgttcacaagggataaaggttaggtaacacacatagggctgttacggactgagaagtgtccctgcaaaattcacagacataaataaataaatacgtattttcaataaccatgttttatatttagtatatgttctctgaattttgttttatacaaataagtttatatgtgtacatactactttgtctcatatccacacagaaaaccaaatggtttctttttttaaaaaaattctttgtgtttaaatggacaaattataattgtacatgttct

SEQ ID NO: 363324 - DNA, 2600 bp, Homo sapiens
gaactctgtttttgttggcaagattgttcttattgtagaagtggatattatcagattattttagatgttattcaacatttgatttatttaccaaattgtccttactttgaatataagcaaacttttttattgtggtaaagtatacatagcataaaattaccattctaatcattttttaatgtaccatttagtggcattaattacaagcaaccttttttttttttttttgagacatagcctcactctgtcacccaggctggagttcagtggcactatctcagctcactgcaatctctgcttcctgggttcaagcgattcttgtgcctcagccctcccgagtaactgggattacaggcacacaccaccatgcccagctaatttttttgtatttttaatagagatggggtttcattatattggttaggttggtcttgaactcctgacctcaagtgatctgcctgccttggcctcccaaagtgctgggattataggcatgagccaccgcgtctggcatacaaacttttgattacagtttgacacctgttgatggacagaaaatggagtaaccgtccaggcaggaatgttctagtctgtgtgacagttacagttcattttataaataaacaattgactttttttggtagttatggtccctaccctcagtgctgtatctctatttggtattcaaacaaatccagggaatctgcaaggctgaagggcagattcttggcaatggtaaattcagtaggtcctgccaccatttgaggcctcctcggagacagccatactagtctaatctcttcttgactttcccttcttctttcccagtcctctaattcccagaggtctgttgtgaattctaatgctttcagaaaatattacggagaatcccacaatgataaaatttcccagtttttgttttaaaacaaagttgaaaaatattatattaggggtcagggtgaggtgctgttgatggtgacagatggcccccttggcgacagggaagtatgaaatagcatggagtgtggaagggtactatgggtagcttatttattagatcagtataaagtatagatttaagagagttagattaaaatggcatgcttgattcaagtcattaaattctaaagttctattaaaattgtagaggagatacaataatacaaatttcagcaataaggatagatttataatcacactaggaagacaagaagggtgctgtgaaatatttctagaagatacaaaacaaggaattagatcttggtgaaaccaagagagccaaggaactgacagccacatgccgatgataattaaagaattacctccagttgtagagacagctctgagatggggtgtctgtagtgtgctaagccagatttttgaaggactagatagttattctggtctctgactcagagctgctggtccacagaattcctctaagctaaagctgtaacacaatttgatgtttgccaaataaggtgagactcacagagtatatgtgcagagcatataatgcagagcatacaaataggggccatcgaagtgtggcaatgccctaggtatattgtgattaccacaaggagctttattcctcatacttagaaaacaagcacacaaagaaaaatctgccagctgtctatttcccaattttccttctgactgttcctttctccttcctcacacaattaaaatgctaggtttcctgtaatcgcaatcttcagggaatttttcactcaagcccagaaaataaactccagataatgatactgagaaatttattggttggaaaactgctatctacaggccttccactacctatttcttagtagattttacatttttaaagggttgtagaacaccaaaacaatatatgacagatactgtgtttgggccttaaagcctaccctttatataaaaagtttgttgactcctaggctctcatttgcaagtagacaaatgagaaacagcaaatatttaaggaaaagagcaacatgaaaaatacacagcaaacttaacaagcagaaagaattcctggggaaacaattcagggggaaaaaatgaccaagtataattagtattatatggaataataattactactacttataatagtttcatatgtaatcctcatcatattatatgtcataatcttcaaatattttagaggttattgtactaattttaaaaatgcaagttgctataaagaagtatcttggaaataaacagttgtgaaaataaactctgttttaggctgattagttgaataaacatggctgagaatcaaattactgagctagaattttgagctgaagatacttccagagcttacaagaaaagataaaaaagatggaagttacagtaaaagacatagatgtatctcttaaagacatagaaaacccagaacaccatctgtttaaaaattaaacttcatgagattaagagccatatgtatagagaattcaccattgaataccctgcatatatcacagtgccaggtaaatactatgcaataaatatttttgaatgtatgtatgtatgttacagtataaatatatagaggagttccagaaagtgaaaaaagaagtgaagaataggaa

SEQ ID NO: 363325 - DNA, 3315 bp, Homo sapiens
gggcaggaggcgtgaggagaaactacgcgttagaactacgactcccagcaggccctgggccgcgccctccgcgcgtgcgcattcctagggccgggcgcgggggcggggagtccgggaggatttaacccaggagaccgctggtgggaggcgcggctggcgccgctgcgcgcatgggcctgttcctggcccgcagccgccacctacccagtgaccatgatagtgtttgtcaggttcaactccagccatggtttcccagtggaggtcgattctgacaccagcatcttccagctcaaggaggtggttgctaagcgacagggggttccggctgaccagttgcgtgtgattttcgcagggaaggagctgaggaatgactggactgtgcagaattgtgacctggatcagcagagcattgttcacattgtgcagagaccgtggagaaaaggtcaagaaatgaatgcaactggaggcgacgaccccagaaacgcggcgggaggctgtgagcgggagccccagagcttgactcgggtggacctcagcagctcagtcctcccaggagactctgtggggctggctgtcattctgcacactgacagcaggaaggactcaccaccagctggaagtccagcaggtagatcaatctacaacagcttttatgtgtattgcaaaggcccctgtcaaagagtgcagccgggaaaactcagggtacagtgcagcacctgcaggcaggcaacgctcaccttgacccaggaatttttctttaaatgtggagcacaccccacctctgacaaggaaacaccagtagctttgcacctgatcgcaacaaatagtcggaacatcacttgcattacgtgcacagacgtcaggagccccgtcctggttttccagtgcaactcccgccacgtgatttgcttagactgtttccacttatactgtgtgacaagactcaatgatcggcagtttgttcacgaccctcaacttggctactccctgccttgtgtggctggctgtcccaactccttgattaaagagctccatcacttcaggattctgggagaagagcagtacaaccggtaccagcagtatggtgcagaggagtgtgtcctgcagatggggggcgtgttatgcccccgccctggctgtggagcggggctgctgccggagcctgaccagaggaaagtcacctgcgaagggggcaatggcctgggctgtgggtttgccttctgccgggaatgtaaagaagcgtaccatgaaggggagtgcagtgccgtatttgaagcctcaggaacaactactcaggcctacagagtcgatgaaagagccgccgagcaggctcgttgggaagcagcctccaaagaaaccatcaagaaaaccaccaagccctgtccccgctgccatgtaccagtggaaaaaaatggaggctgcatgcacatgaagtgtccgcagccccagtgcaggctcgagtggtgctggaactgtggctgcgagtggaaccgcgtctgcatgggggaccactggttcgacgtgtagccagggcggccgggcgccccatcgccacatcctgggggagcatacccagtgtctaccttcattttctaattctcttttcaaacacacacacacacgcgcgcgcgcgcacacacactcttcaagtttttttcaaagtccaactacagccaaattgcagaagaaactcctggatccctttcactatgtccatgaaaaacagcagagtaaaattacagaagaagctcctgaatccctttcagtttgtccacacaagacagcagagccatctgcgacaccaccaacaggcgttctcagcctccggatgacacaaataccagagcacagattcaagtgcaatccatgtatctgtatgggtcattctcacctgaattcgagacaggcagaatcagtagctggagagagagttctcacatttaatatcctgccttttaccttcagtaaacaccatgaagatgccattgacaaggtgtttctctgtaaaatgaactgcagtgggttctccaaactagattcatggctttaacagtaatgttcttatttaaattttcagaaagcatctattcccaaagaaccccaggcaatagtcaaaaacatttgtttatccttaagaattccatctatataaatcgcattaatcgaaataccaactatgtgtaaatcaacttgtcacaaagtgagaaattatgaaagttaatttgaatgttgaatgtttgaattacagggaagaaatcaagttaatgtactttcattccctttcatgatttgcaactttagaaagaaattgtttttctgaaagtatcaccaaaaaatctatagtttgattctgagtattcattttgcaacttggagattttgctaatacatttggctccactgtaaatttaatagataaagtgcctataaaggaaacacgtttagaaatgatttcaaaatgatattcaatcttaacaaaagtgaacattattaaatcagaatctttaaagaggagcctttccagaactaccaaaatgaagacacgcccgactctctccatcagaagggtttatacccctttggcacaccctctctgtccaatctgcaagtcccagggagctctgcataccaggggttccccaggagagaccttctcttaggacagtaaactcactagaatattccttatgttgacatggattggatttcagttcaatcaaactttcagcttttttttcagccattcacaacacaatcaaaagattaacaacactgcatgcggcaaaccgcatgctcttacccacactacgcagaagagaaagtacaaccactatcttttgttctacctgtattgtctgacttctcaggaagatcgtgaacataactgagggcatgagtctcactagcacatggaggcccttttggatttagagactgtaaattattaaatcggcaacagggcttctctttttagatgtagcactgaaatccttgctggagggaagagaggggatgaactcaagttttccacatcctgggacacctgtccctcttttcctaactgcctaagataacccatttcttccaaccatctgaggacagtcccgtcgtctcagaggccctgcaccggggagagactgggctctgcagcagccacatcagcattcacagcttcatgtggcttcactgtctgaaaatctaccgactccaacatggccccacggtgacaacagacctgtgacaggaagcccaaagctcacatagaaatggtggacagatcaaagtctctatagtaagggaaaaaaagagaggtgg

SEQ ID NO: 363326 - DNA, 464 bp, Homo sapiens
gggcaggaggcgtgaggagaaactacgcgttagaactacgactcccagcaggccctgggccgcgccctccgcgcgtgcgcattcctagggccgggcgcgggggcggggagtccgggaggatttaacccaggagaccgctggtgggaggcgcggctggcgccgctgcgcgcatgggcctgttcctggcccgcagccgccacctacccagtgaccatgatagttaatctgcttaaatacttcaagctgtacaagtctgctgtggaagtgagcaccacacaatgtggcttcagcttccgatgtgatttctatttgaactccgatattagaaaccatgtcttagacctcccatgcagctctcaaagtgctttgcattgttgtggttacatggaaatgttaaacaaatgagttaatggaataatttttatttaattgtttttaataaatattcatgaaaaatgtaacta

SEQ ID NO: 363327 - DNA, 386 bp, Homo sapiens
ttttttatggctgcataatattccatagtatgtgccacattttctttatccaggctaccattgatgggcatctaggttgattccatgtctttgctattgtgaagggtgctacgatgaacctatgagtgcctgtgtctttatgttaatctgcttaaatacttcaagctgtacaagtctgctgtggaagtgagcaccacacaatgtggcttcagcttccgatgtgatttctatttgaactccgatattagaaaccatgtcttagacctcccatgcagctctcaaagtgctttgcattgttgtggttacatggaaatgttaaacaaatgagttaatggaataatttttatttaattgtttttaataaatattcatgaaaaatgtaacta

SEQ ID NO: 363328 - DNA, 3399 bp, Homo sapiens
gggcaggaggcgtgaggagaaactacgcgttagaactacgactcccagcaggccctgggccgcgccctccgcgcgtgcgcattcctagggccgggcgcgggggcggggagtccgggaggatttaacccaggagaccgctggtgggaggcgcggctggcgccgctgcgcgcatgggcctgttcctggcccgcagccgccacctacccagtgaccatgatagtgtttgtcaggttcaactccagccatggtttcccagtggaggtcgattctgacaccagcatcttccagctcaaggaggtggttgctaagcgacagggggttccggctgaccagttgcgtgtgattttcgcagggaaggagctgaggaatgactggactgtgcagaattgtgacctggatcagcagagcattgttcacattgtgcagagaccgtggagaaaaggtcaagaaatgaatgcaactggaggcgacgaccccagaaacgcggcgggaggctgtgagcgggagccccagagcttgactcgggtggacctcagcagctcagtcctcccaggagactctgtggggctggctgtcattctgcacactgacagcaggaaggactcaccaccagctggaagtccagcaggtagatcaatctacaacagcttttatgtgtattgcaaaggcccctgtcaaagagtgcagccgggaaaactcagggtacagtgcagcacctgcaggcaggcaacgctcaccttgacccagggtccatcttgctgggatgatgttttaattccaaaccggatgagtggtgaatgccaatccccacactgccctgggactagtgcagaatttttctttaaatgtggagcacaccccacctctgacaaggaaacaccagtagctttgcacctgatcgcaacaaatagtcggaacatcacttgcattacgtgcacagacgtcaggagccccgtcctggttttccagtgcaactcccgccacgtgatttgcttagactgtttccacttatactgtgtgacaagactcaatgatcggcagtttgttcacgaccctcaacttggctactccctgccttgtgtggctggctgtcccaactccttgattaaagagctccatcacttcaggattctgggagaagagcagtacaaccggtaccagcagtatggtgcagaggagtgtgtcctgcagatggggggcgtgttatgcccccgccctggctgtggagcggggctgctgccggagcctgaccagaggaaagtcacctgcgaagggggcaatggcctgggctgtgggtttgccttctgccgggaatgtaaagaagcgtaccatgaaggggagtgcagtgccgtatttgaagcctcaggaacaactactcaggcctacagagtcgatgaaagagccgccgagcaggctcgttgggaagcagcctccaaagaaaccatcaagaaaaccaccaagccctgtccccgctgccatgtaccagtggaaaaaaatggaggctgcatgcacatgaagtgtccgcagccccagtgcaggctcgagtggtgctggaactgtggctgcgagtggaaccgcgtctgcatgggggaccactggttcgacgtgtagccagggcggccgggcgccccatcgccacatcctgggggagcatacccagtgtctaccttcattttctaattctcttttcaaacacacacacacacgcgcgcgcgcgcacacacactcttcaagtttttttcaaagtccaactacagccaaattgcagaagaaactcctggatccctttcactatgtccatgaaaaacagcagagtaaaattacagaagaagctcctgaatccctttcagtttgtccacacaagacagcagagccatctgcgacaccaccaacaggcgttctcagcctccggatgacacaaataccagagcacagattcaagtgcaatccatgtatctgtatgggtcattctcacctgaattcgagacaggcagaatcagtagctggagagagagttctcacatttaatatcctgccttttaccttcagtaaacaccatgaagatgccattgacaaggtgtttctctgtaaaatgaactgcagtgggttctccaaactagattcatggctttaacagtaatgttcttatttaaattttcagaaagcatctattcccaaagaaccccaggcaatagtcaaaaacatttgtttatccttaagaattccatctatataaatcgcattaatcgaaataccaactatgtgtaaatcaacttgtcacaaagtgagaaattatgaaagttaatttgaatgttgaatgtttgaattacagggaagaaatcaagttaatgtactttcattccctttcatgatttgcaactttagaaagaaattgtttttctgaaagtatcaccaaaaaatctatagtttgattctgagtattcattttgcaacttggagattttgctaatacatttggctccactgtaaatttaatagataaagtgcctataaaggaaacacgtttagaaatgatttcaaaatgatattcaatcttaacaaaagtgaacattattaaatcagaatctttaaagaggagcctttccagaactaccaaaatgaagacacgcccgactctctccatcagaagggtttatacccctttggcacaccctctctgtccaatctgcaagtcccagggagctctgcataccaggggttccccaggagagaccttctcttaggacagtaaactcactagaatattccttatgttgacatggattggatttcagttcaatcaaactttcagcttttttttcagccattcacaacacaatcaaaagattaacaacactgcatgcggcaaaccgcatgctcttacccacactacgcagaagagaaagtacaaccactatcttttgttctacctgtattgtctgacttctcaggaagatcgtgaacataactgagggcatgagtctcactagcacatggaggcccttttggatttagagactgtaaattattaaatcggcaacagggcttctctttttagatgtagcactgaaatccttgctggagggaagagaggggatgaactcaagttttccacatcctgggacacctgtccctcttttcctaactgcctaagataacccatttcttccaaccatctgaggacagtcccgtcgtctcagaggccctgcaccggggagagactgggctctgcagcagccacatcagcattcacagcttcatgtggcttcactgtctgaaaatctaccgactccaacatggccccacggtgacaacagacctgtgacaggaagcccaaagctcacatagaaatggtggacagatcaaagtctctatagtaagggaaaaaaagagaggtgg

SEQ ID NO: 363329 - DNA, 2952 bp, Homo sapiens
gggcaggaggcgtgaggagaaactacgcgttagaactacgactcccagcaggccctgggccgcgccctccgcgcgtgcgcattcctagggccgggcgcgggggcggggagtccgggaggatttaacccaggagaccgctggtgggaggcgcggctggcgccgctgcgcgcatgggcctgttcctggcccgcagccgccacctacccagtgaccatgatagtgtttgtcaggttcaactccagccatggtttcccagtggaggtcgattctgacaccagcatcttccagctcaaggaggtggttgctaagcgacagggggttccggctgaccagttgcgtgtgattttcgcagggaaggagctgaggaatgactggactgtgcaggaatttttctttaaatgtggagcacaccccacctctgacaaggaaacaccagtagctttgcacctgatcgcaacaaatagtcggaacatcacttgcattacgtgcacagacgtcaggagccccgtcctggttttccagtgcaactcccgccacgtgatttgcttagactgtttccacttatactgtgtgacaagactcaatgatcggcagtttgttcacgaccctcaacttggctactccctgccttgtgtggctggctgtcccaactccttgattaaagagctccatcacttcaggattctgggagaagagcagtacaaccggtaccagcagtatggtgcagaggagtgtgtcctgcagatggggggcgtgttatgcccccgccctggctgtggagcggggctgctgccggagcctgaccagaggaaagtcacctgcgaagggggcaatggcctgggctgtgggtttgccttctgccgggaatgtaaagaagcgtaccatgaaggggagtgcagtgccgtatttgaagcctcaggaacaactactcaggcctacagagtcgatgaaagagccgccgagcaggctcgttgggaagcagcctccaaagaaaccatcaagaaaaccaccaagccctgtccccgctgccatgtaccagtggaaaaaaatggaggctgcatgcacatgaagtgtccgcagccccagtgcaggctcgagtggtgctggaactgtggctgcgagtggaaccgcgtctgcatgggggaccactggttcgacgtgtagccagggcggccgggcgccccatcgccacatcctgggggagcatacccagtgtctaccttcattttctaattctcttttcaaacacacacacacacgcgcgcgcgcgcacacacactcttcaagtttttttcaaagtccaactacagccaaattgcagaagaaactcctggatccctttcactatgtccatgaaaaacagcagagtaaaattacagaagaagctcctgaatccctttcagtttgtccacacaagacagcagagccatctgcgacaccaccaacaggcgttctcagcctccggatgacacaaataccagagcacagattcaagtgcaatccatgtatctgtatgggtcattctcacctgaattcgagacaggcagaatcagtagctggagagagagttctcacatttaatatcctgccttttaccttcagtaaacaccatgaagatgccattgacaaggtgtttctctgtaaaatgaactgcagtgggttctccaaactagattcatggctttaacagtaatgttcttatttaaattttcagaaagcatctattcccaaagaaccccaggcaatagtcaaaaacatttgtttatccttaagaattccatctatataaatcgcattaatcgaaataccaactatgtgtaaatcaacttgtcacaaagtgagaaattatgaaagttaatttgaatgttgaatgtttgaattacagggaagaaatcaagttaatgtactttcattccctttcatgatttgcaactttagaaagaaattgtttttctgaaagtatcaccaaaaaatctatagtttgattctgagtattcattttgcaacttggagattttgctaatacatttggctccactgtaaatttaatagataaagtgcctataaaggaaacacgtttagaaatgatttcaaaatgatattcaatcttaacaaaagtgaacattattaaatcagaatctttaaagaggagcctttccagaactaccaaaatgaagacacgcccgactctctccatcagaagggtttatacccctttggcacaccctctctgtccaatctgcaagtcccagggagctctgcataccaggggttccccaggagagaccttctcttaggacagtaaactcactagaatattccttatgttgacatggattggatttcagttcaatcaaactttcagcttttttttcagccattcacaacacaatcaaaagattaacaacactgcatgcggcaaaccgcatgctcttacccacactacgcagaagagaaagtacaaccactatcttttgttctacctgtattgtctgacttctcaggaagatcgtgaacataactgagggcatgagtctcactagcacatggaggcccttttggatttagagactgtaaattattaaatcggcaacagggcttctctttttagatgtagcactgaaatccttgctggagggaagagaggggatgaactcaagttttccacatcctgggacacctgtccctcttttcctaactgcctaagataacccatttcttccaaccatctgaggacagtcccgtcgtctcagaggccctgcaccggggagagactgggctctgcagcagccacatcagcattcacagcttcatgtggcttcactgtctgaaaatctaccgactccaacatggccccacggtgacaacagacctgtgacaggaagcccaaagctcacatagaaatggtggacagatcaaagtctctatagtaagggaaaaaaagagaggtgg

SEQ ID NO: 363330 - DNA, 1537 bp, Homo sapiens
gaagctttaaaaatcttaacatatccaagtaattgccgctcttagcaaagaagtcaccatgggatgcgatgccattattccagcgggagttcctgcccaactcttacctgagtcggtgcttctcatctactcctcatcccccttaatgacagtagactccatctccgttctcaaaagatttctcaccatggagatactgttttaccatacaaagaagggaccaggcgacatggctcatacctgtaatgccaacgctttgggaagctgggcccaggagttcaagaccagtgtgggcaacatggtgaacaaaaaatttgtttaaaaattagctgggtgtggtggttcacacctctagtcccacctactctggaggccgaggtgggaagattgctgaagcccaggaggtcaaggctacagtgagcttgatcgtgcctctgcactccagcctgggcagcagagggagactctgtctcaggggaaaacaaaaaagaaaaatctgaatgtaagagacaagttataacactaaatgacagcagaattattgagaaatttgttcctacttaaggtgatatatttgagaagtaaaaggttcgtttgaatgatacacatcctggcataataaagcccctttcctgtggtcgccctttatagtgagacagaaaagcctgttagagcctcccaaaaggagcatgtttgggaatgggaagggatagaaaaactacaactgctcttgttcattcagagccatccctagacctgggccttgaccccacgcacccctccttccctgtctgcactccctgcacagtgtgatccacaggaatcccaaagctcttcaggcccttctaatacttcccttctgtttctctaggtatttctgggaaaagccagcttctgtttgcactggtcttcacaactcgttacctggatctttttacttcatttatttcattgtataacacatctatgaaggtatggtatgccatccacaggaatgtatttcatctacagtgcacaggtctatggacacttaatttatgtcagctgtgtatttttaattaaaatgctccaaaaataatgtcttaatatgctgttcttgactttaaaactttcagaccaccttgtatatataactgggactaaacgagctatcagtaagcatacatttttggtttcaaaacagtagttaattaaaatactttgaagttagaacttttttattttaggttccttaagtatgataaatctaaagctcttgataactctgtaagtaagagcggtaactattatattttcaagccgtgggaaattacagagtccccagagaaatccagcaagttggtacataacaaggaacgaaagcaggactcctagttgcagtgtctcatttcgctgctgtgtgaggaactgtctataggcttctatcttttttctttgccactgagtcagttttacttaaactgttgtgtgtgtgtcatttttattacatttgccgtgcttaaatgatctctataccatcatttacttagtaacgtat

SEQ ID NO: 363331 - DNA, 316 bp, Homo sapiens
gcggccgcctactactactactgctcgaattcaagcttctaacgatgtacggggagagcacaacgcatggaaaggtctggaagctctgtgtagccattccttctgcagtcatcctacccaagtaaaagtaaccttggctatgttaccaccgttttggtcacccaggaggacatcttagcaagggtgcctgcgagggagtgtgggactgggcctcatcctcgccggcgttggaaaccaaggccttgtatgccacgccttatgaagcactgtttcacagttactttcacttcccgaataaaggttaccaggtaattaa

SEQ ID NO: 363332 - DNA, 254 bp, Homo sapiens
actgcagaaggaatggctacacagagcttccagacctttccatgcgttgtgctctccaagtaaaagtaaccttggctatgttaccaccgttttggtcacccaggaggacatcttagcaagggtgcctgcgagggagtgtgggactgggcctcatcctcgccggcgttggaaaccaaggccttgtatgccacgccttatgaagcactgtttcacagttactttcacttcccgaataaaggttaccaggtaattaa

SEQ ID NO: 363333 - DNA, 2838 bp, Homo sapiens
cgcgcgcgcgcgcgcggcagttcggccacgtccctggccacgtcgcgggcgatctcgccatcttcgccgcttcctctcaggggccgccgcctcctgagccgcccagccccggggccgccgcgctgcgccgaccgccaccgccgccgccgccatgaacattttccggctgactggggacctgtcccacctggcggccatcgtcatcctgctgctgaagatctggaagacgcgctcctgcgccggtatttctgggaaaagccagcttctgtttgcactggtcttcacaactcgttacctggatctttttacttcatttatttcattgtataacacatctatgaaggttatctaccttgcctgctcctatgccacagtgtacctgatctacctgaaatttaaggcaacctacgatggaaatcatgataccttccgagtggagtttctggtggtccctgtgggaggcctctcatttttagttaatcacgatttctctcctcttgagatcctctggaccttctccatctacctggagtccgtggctatccttccgcagctgtttatgatcagcaagactggggaggccgagaccatcaccacccactacctgttcttcctgggcctctatcgtgctttgtatcttgtcaactggatctggcgcttctactttgagggcttctttgacctcattgctgtggtggccggcgtagtccagaccatcctatactgtgacttcttctacttgtacattacaaaagtactcaagggaaagaagctcagtttgccagcataagtgccaaagaccatcaccagcatctgtccttcagggtgctcggacagaattcttaccacagcaaaggcataagatgcttgatacggaaaatcagaaacttaactcttttgttgcagatagtcatcagtggctctgtaaaaacgcagaggaaaagagccagaaggtttctgtttaatgcatcttgccttatctttttttattactgtgtacaaagatttttttacacaaagaaacttaatgctgtattaataaattcagtgtgtagcttcaattgggatagttccaaaagtgaagattttgtgaggaataagtgcaaattttttttttattttaaaaaattctttgaaactcttaagtctttgtgtctgcaatgaaattgtactccttgacagttgatagattatatattcttccatccctcaaacttgcattccactatatttattttttggcaaaagatgagctgtatttgtttgaaatctgagacactatgttcaattggatgtatctgttcaaatttattcccacgtgacgtggaagtccttcgttggatgtcacaacactacatttaaggttggtaaggatgacttggaggtccatggttttcattaccaacattttaagattctgaatgtcgatggagtctcactgaagagtcaccaaaggtgcctgccctcctcccctgctgggaagtgtcagttggagactgtcccaagggtgctgaagaatccagtggcaggggttctggctgctttccatctgagtgtgggatgggaggggtgttcatgatcatttggatatagcaatctactctgagaaatggaacacaaggagttacctatcactttcacttataattccaaaagatgactacaaccatgtccatgctcagattcaaacagttttccatatcacttttgggtggtaagatgatttacagttttttttttaattggcagcaccactaaccattccttacattcttttttgtatgtgtggttttctttttatttaacccgcagccgacatcgtagtttcttgttttgttttgttttacagagctgttgcatgacttatgttaccatcctaaaaaacactatattaaacatggaataaattgtctttttatgaattaggctttttgaacatcctgtgttgggatttttttgtttttcaattggcaacaaaagctctgtagggctgcagacatttaaagttcacataatcatctgtaagacattatgtattttgtggaaatactagaatttttttcctgattttgccattatatggatttgctattttttgattaatgcaaaagtatatgactttgttttttatgtgatacaccataaatattaaagtgttgaatactaacagtgctgactacaagaaggatgtagtattttggctttctgcattacaacgtcttctggaggaagggagcaggatgggtttcatttgtatctagtgtgtgtcttaacatctttctaaatcggcagtgtaactgcatagtttaacttcctgtctgtctccctcattttactcttccctccttgtcttatgttttggcttttgtgtatcagagcatctttctttgcagcatcctagtcttgcttcagtttctgtggtctcttttcatcctgcttgaagattcggagtgtggaaggaggctaggaagtctggtgcagtaggtgagcagacctcttgctgcccagcccagggtgggtggggcgcacacctgtctttgtgcatgcaaatctgatacacctggcgcatcctctggagagcacaacgcatggaaaggtctggaagctctgtgtagccattccttctgcagtcatcctacccaagtaaaagtaaccttggctatgttaccaccgttttggtcacccaggaggacatcttagcaagggtgcctgcgagggagtgtgggactgggcctcatcctcgccggcgttggaaaccaaggccttgtatgccacgccttatgaagcactgtttcacagttactttcacttcccgaataaaggttaccaggtaattaa

SEQ ID NO: 363334 - DNA, 3051 bp, Homo sapiens
cgcgcgcgcgcgcgcggcagttcggccacgtccctggccacgtcgcgggcgatctcgccatcttcgccgcttcctctcaggggccgccgcctcctgagccgcccagccccggggccgccgcgctgcgccgaccgccaccgccgccgccgccatgaacattttccggctgactggggacctgtcccacctggcggccatcgtcatcctgctgctgaagatctggaagacgcgctcctgcgccggtatttctgggaaaagccagcttctgtttgcactggtcttcacaactcgttacctggatctttttacttcatttatttcattgtataacacatctatgaaggttatctaccttgcctgctcctatgccacagtgtacctgatctacctgaaatttaaggcaacctacgatggaaatcatgataccttccgagtggagtttctggtggtccctgtgggaggcctctcatttttagttaatcacgatttctctcctcttgagatcctctggaccttctccatctacctggagtccgtggctatccttccgcagctgtttatgatcagcaagactggggaggccgagaccatcaccacccactacctgttcttcctgggcctctatcgtgctttgtatcttgtcaactggatctggcgcttctactttgagggcttctttgacctcattgctgtggtggccggcgtagtccagaccatcctatactgtgacttcttctacttgtacattacaaaagtactcaagggaaagaagctcagtttgccagcataagtgccaaagaccatcaccagcatctgtccttcagggtgctcggacagaattcttaccacagcaaaggcataagatgcttgatacggaaaatcagaaacttaactcttttgttgcagatagtcatcagtggctctgtaaaaacgcagaggaaaagagccagaaggtttctgtttaatgcatcttgccttatctttttttattactgtgtacaaagatttttttacacaaagaaacttaatgctgtattaataaattcagtgtgtagcttcaattgggatagttccaaaagtgaagattttgtgaggaataagtgcaaattttttttttattttaaaaaattctttgaaactcttaagtctttgtgtctgcaatgaaattgtactccttgacagttgatagattatatattcttccatccctcaaacttgcattccactatatttattttttggcaaaagatgagctgtatttgtttgaaatctgagacactatgttcaattggatgtatctgttcaaatttattcccacgtgacgtggaagtccttcgttggatgtcacaacactacatttaaggttggtaaggatgacttggaggtccatggttttcattaccaacattttaagattctgaatgtcgatggagtctcactgaagagtcaccaaaggtgcctgccctcctcccctgctgggaagtgtcagttggagactgtcccaagggtgctgaagaatccagtggcaggggttctggctgctttccatctgagtgtgggatgggaggggtgttcatgatcatttggatatagcaatctactctgagaaatggaacacaaggagttacctatcactttcacttataattccaaaagatgactacaaccatgtccatgctcagattcaaacagttttccatatcacttttgggtggtaagatgatttacagttttttttttaattggcagcaccactaaccattccttacattcttttttgtatgtgtggttttctttttatttaacccgcagccgacatcgtagtttcttgttttgttttgttttacagagctgttgcatgacttatgttaccatcctaaaaaacactatattaaacatggaataaattgtctttttatgaattaggctttttgaacatcctgtgttgggatttttttgtttttcaattggcaacaaaagctctgtagggctgcagacatttaaagttcacataatcatctgtaagacattatgtattttgtggaaatactagaatttttttcctgattttgccattatatggatttgctattttttgattaatgcaaaagtatatgactttgttttttatgtgatacaccataaatattaaagtgttgaatactaacagtgctgactacaagaaggatgtagtattttggctttctgcattacaacgtcttctggaggaagggagcaggatgggtttcatttgtatctagtgtgtgtcttaacatctttctaaatcggcagtgtaactgcatagtttaacttcctgtctgtctccctcattttactcttccctccttgtcttatgttttggcttttgtgtatcagagcatctttctttgcagcatcctagtcttgcttcagtttctgtggtctcttttcatcctgcttgaagattcggagtgtggaaggaggctaggaagtctggtgcagtaggtgagcagacctcttgctgcccagcccagggtgggtggggcgcacacctgtctttgtgcatgcaaatctgatacacctggcgcatcctctggagagcacaacgcatggaaaggtctggaagctctgtgtagccattccttctgcagtcatcctacccaagtaaaagtaaccttggctatgttaccaccgttttggtcacccaggaggacatcttagcaagggtgcctgcgagggagtgtgggactgggcctcatcctcgccggcgttggaaaccaaggccttgtatgccacgccttatgaagcactgtttcacagttactttcacttcccgaataaaggttaccaggtaattaaaaaaaaaaaaaaaaaaaaaaaaaaaacacttgtgtggggccgccgcgggcccccaaaaaatttcttctaaacccatcccgttggggggcgcggggccccagagtaacggcagacctggggcccaacgcggtcccaagaagaacccgggcaggacaagggctgggtttcccccaaataaaaaaacccccgggggacccgcggtctggaccacca

SEQ ID NO: 363335 - DNA, 2784 bp, Homo sapiens
cgcgcgcgcgcgcgcggcagttcggccacgtccctggccacgtcgcgggcgatctcgccatcttcgccgcttcctctcaggggccgccgcctcctgagccgcccagccccggggccgccgcgctgcgccgaccgccaccgccgccgccgccatgaacattttccggctgactggggacctgtcccacctggcggccatcgtcatcctgctgctgaagatctggaagacgcgctcctgcgccggtatttctgggaaaagccagcttctgtttgcactggtcttcacaactcgttacctggatctttttacttcatttatttcattgtataacacatctatgaaggttatctaccttgcctgctcctatgccacagtgtacctgatctacctgaaatttaaggcaacctacgatggaaatcatgataccttccgagtggagtttctggtggtccctgtgggaggcctctcatttttagttaatcacgatttctctcctcttgagatcctctggaccttctccatctacctggagtccgtggctatccttccgcagctgtttatgatcagcaagactggggaggccgagaccatcaccacccactacctgttcttcctgggcctctatcgtgctttgtatcttgtcaactggatctggcgcttctactttgagggcttctttgacctcattgctgtggtggccggcgtagtccagaccatcctatactgtgacttcttctacttgtacattacaaaagtactcaagggaaagaagctcagtttgccagcataagtgccaaagaccatcaccagcatctgtccttcagggtgctcggacagaattcttaccacagcaaaggcataagatgcttgatacggaaaatcagaaacttaactcttttgttgcagatagtcatcagtggctctgtaaaaacgcagaggaaaagagccagaaggtttctgtttaatgcatcttgccttatctttttttattactgtgtacaaagatttttttacacaaagaaacttaatgctgtattaataaattcagtgtgtagcttcaattgggatagttccaaaagtgaagattttgtgaggaataagtgcaaattttttttttattttaaaaaattctttgaaactcttaagtctttgtgtctgcaatgaaattgtactccttgacagttgatagattatatattcttccatccctcaaacttgcattccactatatttattttttggctctgttcaaatttattcccacgtgacgtggaagtccttcgttggatgtcacaacactacatttaaggttggtaaggatgacttggaggtccatggttttcattaccaacattttaagattctgaatgtcgatggagtctcactgaagagtcaccaaaggtgcctgccctcctcccctgctgggaagtgtcagttggagactgtcccaagggtgctgaagaatccagtggcaggggttctggctgctttccatctgagtgtgggatgggaggggtgttcatgatcatttggatatagcaatctactctgagaaatggaacacaaggagttacctatcactttcacttataattccaaaagatgactacaaccatgtccatgctcagattcaaacagttttccatatcacttttgggtggtaagatgatttacagttttttttttaattggcagcaccactaaccattccttacattcttttttgtatgtgtggttttctttttatttaacccgcagccgacatcgtagtttcttgttttgttttgttttacagagctgttgcatgacttatgttaccatcctaaaaaacactatattaaacatggaataaattgtctttttatgaattaggctttttgaacatcctgtgttgggatttttttgtttttcaattggcaacaaaagctctgtagggctgcagacatttaaagttcacataatcatctgtaagacattatgtattttgtggaaatactagaatttttttcctgattttgccattatatggatttgctattttttgattaatgcaaaagtatatgactttgttttttatgtgatacaccataaatattaaagtgttgaatactaacagtgctgactacaagaaggatgtagtattttggctttctgcattacaacgtcttctggaggaagggagcaggatgggtttcatttgtatctagtgtgtgtcttaacatctttctaaatcggcagtgtaactgcatagtttaacttcctgtctgtctccctcattttactcttccctccttgtcttatgttttggcttttgtgtatcagagcatctttctttgcagcatcctagtcttgcttcagtttctgtggtctcttttcatcctgcttgaagattcggagtgtggaaggaggctaggaagtctggtgcagtaggtgagcagacctcttgctgcccagcccagggtgggtggggcgcacacctgtctttgtgcatgcaaatctgatacacctggcgcatcctctggagagcacaacgcatggaaaggtctggaagctctgtgtagccattccttctgcagtcatcctacccaagtaaaagtaaccttggctatgttaccaccgttttggtcacccaggaggacatcttagcaagggtgcctgcgagggagtgtgggactgggcctcatcctcgccggcgttggaaaccaaggccttgtatgccacgccttatgaagcactgtttcacagttactttcacttcccgaataaaggttaccaggtaattaa

SEQ ID NO: 363336 - DNA, 3160 bp, Homo sapiens
  misc_feature (3160)..(3160): n is a, c, g, or t
cgcgcgcgcgcgcgcggcagttcggccacgtccctggccacgtcgcgggcgatctcgccatcttcgccgcttcctctcaggggccgccgcctcctgagccgcccagccccggggccgccgcgctgcgccgaccgccaccgccgccgccgccatgaacattttccggctgactggggacctgtcccacctggcggccatcgtcatcctgctgctgaagatctggaagacgcgctcctgcgccggtatttctgggaaaagccagcttctgtttgcactggtcttcacaactcgttacctggatctttttacttcatttatttcattgtataacacatctatgaaggttatctaccttgcctgctcctatgccacagtgtacctgatctacctgaaatttaaggcaacctacgatggaaatcatgataccttccgagtggagtttctggtggtccctgtgggaggcctctcatttttagttaatcacgatttctctcctcttgagatcctctggaccttctccatctacctggagtccgtggctatccttccgcagctgtttatgatcagcaagactggggaggccgagaccatcaccacccactacctgttcttcctgggcctctatcgtgctttgtatcttgtcaactggatctggcgcttctactttgagggcttctttgacctcattgctgtggtggccggcgtagtccagaccatcctatactgtgacttcttctacttgtacattacaaaagtactcaagggaaagaagctcagtttgccagcataagtgccaaagaccatcaccagcatctgtccttcagggtgctcggacagaattcttaccacagcaaaggcataagatgcttgatacggaaaatcagaaacttaactcttttgttgcagatagtcatcagtggctctgtaaaaacgcagaggaaaagagccagaaggtttctgtttaatgcatcttgccttatctttttttattactgtgtacaaagatttttttacacaaagaaacttaatgctgtattaataaattcagtgtgtagcttcaattgggatagttccaaaagtgaagattttgtgaggaataagtgcaaattttttttttattttaaaaaattctttgaaactcttaagtctttgtgtctgcaatgaaattgtactccttgacagttgatagattatatattcttccatccctcaaacttgcattccactatatttattttttggcaaaagatgagctgtatttgtttgaaatctgagacactatgttcaattggatgtatctgttcaaatttattcccacgtgacgtggaagtccttcgttggatgtcacaacactacatttaaggttggtaaggatgacttggaggtccatggttttcattaccaacattttaagattctgaatgtcgatggagtctcactgaagagtcaccaaaggtgcctgccctcctcccctgctgggaagtgtcagttggagactgtcccaagggtgctgaagaatccagtggcaggggttctggctgctttccatctgagtgtgggatgggaggggtgttcatgatcatttggatatagcaatctactctgagaaatggaacacaaggagttacctatcactttcacttataattccaaaagatgactacaaccatgtccatgctcagattcaaacagttttccatatcacttttgggtggtaagatgatttacagttttttttttaattggcagcaccactaaccattccttacattcttttttgtatgtgtggttttctttttatttaacccgcagccgacatcgtagtttcttgttttgttttgttttacagagctgttgcatgacttatgttaccatcctaaaaaacactatattaaacatggaataaattgtctttttatgaattaggctttttgaacatcctgtgttgggatttttttgtttttcaattggcaacaaaagctctgtagggctgcagacatttaaagttcacataatcatctgtaagacattatgtattttgtggaaatactagaatttttttcctgattttgccattatatggatttgctattttttgattaatgcaaaagtatatgactttgttttttatgtgatacaccataaatattaaagtgttgaatactaacagtgctgactacaagaaggatgtagtattttggctttctgcattacaacgtcttctggaggaagggagcaggatgggtttcatttgtatctagtgtgtgtcttaacatctttctaaatcggcagtgtaactgcatagtttaacttcctgtctgtctccctcattttactcttccctccttgtcttatgttttggcttttgtgtatcagagcatctttctttgcagcatcctagtcttgcttcagtttctgtggtctcttttcatcctgcttgaagattcggagtgtggaaggaggctaggaagtctggtgcagtaggtgagcagacctcttgctgcccagcccagggtgggtggggcgcacacctgtctttgtgcatgcaaatctgatacacctggcgcatcctctggagagcacaacgcatggaaaggtctggaagctctgtgtagccattccttctgcagtcatcctacccaagtaaaagtaaccttggctatgttaccaccgttttggtcacccaggaggacatcttagcaagggtgcctgcgagggagtgtgggactgggcctcatcctcgccggcgttggaaaccaaggccttgtatgccacgccttatgaagcactgtttcacagttactttcacttcccgaataaaggttaccaggtaattaatatttttcacacccaccccagcaccaccccaacaaccaacacacaaacgccccaaacaccaacagggggcgacgcacagaaaaaatcgcacagggggcccacatatcgcgctccactttctgtccaaaggggcccaaatagggggccacaccaaaccacgagcacggcggcattatcacacacgtggccgggcacacgcctcggccccccggcagggaaccacaccggtggggcagatcggcaacacccagcaaaatacacgcggccacacaactacgccacggtaacccactactttgctaacgctcgcgtatgatcaccn

SEQ ID NO: 363337 - DNA, 2904 bp, Homo sapiens
cgcgcgcgcgcgcgcggcagttcggccacgtccctggccacgtcgcgggcgatctcgccatcttcgccgcttcctctcaggggccgccgcctcctgagccgcccagccccggggccgccgcgctgcgccgaccgccaccgccgccgccgccatgaacattttccggctgactggggacctgtcccacctggcggccatcgtcatcctgctgctgaagatctggaagacgcgctcctgcgccggtatttctgggaaaagccagcttctgtttgcactggtcttcacaactcgttacctggatctttttacttcatttatttcattgtataacacatctatgaaggttatctaccttgcctgctcctatgccacagtgtacctgatctacctgaaatttaaggcaacctacgatggaaatcatgataccttccgagtggagtttctggtggtccctgtgggaggcctctcatttttagttaatcacgatttctctcctcttgagatcctctggaccttctccatctacctggagtccgtggctatccttccgcagctgtttatgatcagcaagactggggaggccgagaccatcaccacccactacctgttcttcctgggcctctatcgtgctttgtatcttgtcaactggatctggcgcttctactttgagggcttctttgacctcattgctgtggtggccggcgtagtccagaccatcctatactgtgacttcttctacttgtacattacaaaagtactcaagggaaagaagctcagtttgccagcataagtgccaaagaccatcaccagcatctgtccttcagggtgctcggacagaattcttaccacagcaaaggcataagatgcttgatacggaaaatcagaaacttaactcttttgttgcagatagtcatcagtggctctgtaaaaacgcagaggaaaagagccagaaggtttctgtttaatgcatcttgccttatctttttttattactgtgtacaaagatttttttacacaaagaaacttaatgctgtattaataaattcagtgtgtagcttcaattgggatagttccaaaagtgaagattttgtgaggaataagtgcaaattttttttttattttaaaaaattctttgaaactcttaagtctttgtgtctgcaatgaaattgtactccttgacagttgatagattatatattcttccatccctcaaacttgcattccactatatttattttttggcaaaagatgagctgtatttgtttgaaatctgagacactatgttcaattggatgtatctgttcaaatttattcccacgtgacgtggaagtccttcgttggatgtcacaacactacatttaaggttggtaaggatgacttggaggtccatggttttcattaccaacattttaagattctgaatgtcgatggagtctcactgaagagtcaccaaaggtgcctgccctcctcccctgctgggaagtgtcagttggagactgtcccaagggtgctgaagaatccagtggcaggggttctggctgctttccatctgagtgtgggatgggaggggtgttcatgatcatttggatatagcaatctactctgagaaatggaacacaaggagttacctatcactttcacttataattccaaaagatgactacaaccatgtccatgctcagattcaaacagttttccatatcacttttgggtggtaagatgatttacagttttttttttaattggcagcaccactaaccattccttacattcttttttgtatgtgtggttttctttttatttaacccgcagccgacatcgtagtttcttgttttgttttgttttacagagctgttgcatgacttatgttaccatcctaaaaaacactatattaaacatggaataaattgtctttttatgaattaggctttttgaacatcctgtgttgggatttttttgtttttcaattggcaacaaaagctctgtagggctgcagacatttaaagttcacataatcatctgtaagacattatgtattttgtggaaatactagaatttttttcctgattttgccattatatggatttgctattttttgattaatgcaaaagtatatgactttgttttttatgtgatacaccataaatattaaagtgttgaatactaacagtgctgactacaagaaggatgtagtattttggctttctgcattacaacgtcttctggaggaagggagcaggatgggtttcatttgtatctagtgtgtgtcttaacatctttctaaatcggcagtgtaactgcatagtttaacttcctgtctgtctccctcattttactcttccctccttgtcttatgttttggcttttgtgtatcagagcatctttctttgcagcatcctagtcttgcttcagtttctgtggtctcttttcatcctgcttgaagattcggagtgtggaaggaggctaggaagtctggtgcagtaggtgagcagacctcttgctgcccagcccagggtgggtggggcgcacacctgtctttgtgcatgcaaatctgatacacctggcgcatcctctggagagcacaacgcatggaaaggtctggaagctctgtgtagccattccttctgcagtcatcctacccaagtaaaagtaaccttggctatgttaccaccgttttggtcacccaggaggacatcttagcaagggtgcctgcgagggagtgtgggactgggcctcatcctcgccggcgttggaaaccaaggccttgtatgccacgccttatgaagcactgtttcacagttactttcacttcccgaataaaggttaccaggtaattaatatttttattgaggtgtttgtgtgtttttcaatgtaagcatcatgagaaataaagcaaagttcaga

SEQ ID NO: 363338 - DNA, 2725 bp, Homo sapiens
ggagcggcggcccctgagaggaagcggcgaagatggccatgaacattttccggctgactggggacctgtcccacctggcggccatcgtcatcctgctgctgaagatctggaagacgcgctcctgcgccggtatttctgggaaaagccagcttctgtttgcactggtcttcacaactcgttacctggatctttttacttcatttatttcattgtataacacatctatgaaggttatctaccttgcctgctcctatgccacagtgtacctgatctacctgaaatttaaggcaacctacgatggaaatcatgataccttccgagtggagtttctggtggtccctgtgggaggcctctcatttttagttaatcacgatttctctcctcttgagatcctctggaccttctccatctacctggagtccgtggctatccttccgcagctgtttatgatcagcaagactggggaggccgagaccatcaccacccactacctgttcttcctgggcctctatcgtgctttgtatcttgtcaactggatctggcgcttctactttgagggcttctttgacctcattgctgtggtggccggcgtagtccagaccatcctatactgtgacttcttctacttgtacattacaaaagtactcaagggaaagaagctcagtttgccagcataagtgccaaagaccatcaccagcatctgtccttcagggtgctcggacagaattcttaccacagcaaaggcataagatgcttgatacggaaaatcagaaacttaactcttttgttgcagatagtcatcagtggctctgtaaaaacgcagaggaaaagagccagaaggtttctgtttaatgcatcttgccttatctttttttattactgtgtacaaagatttttttacacaaagaaacttaatgctgtattaataaattcagtgtgtagcttcaattgggatagttccaaaagtgaagattttgtgaggaataagtgcaaattttttttttattttaaaaaattctttgaaactcttaagtctttgtgtctgcaatgaaattgtactccttgacagttgatagattatatattcttccatccctcaaacttgcattccactatatttattttttggcaaaagatgagctgtatttgtttgaaatctgagacactatgttcaattggatgtatctgttcaaatttattcccacgtgacgtggaagtccttcgttggatgtcacaacactacatttaaggttggtaaggatgacttggaggtccatggttttcattaccaacattttaagattctgaatgtcgatggagtctcactgaagagtcaccaaaggtgcctgccctcctcccctgctgggaagtgtcagttggagactgtcccaagggtgctgaagaatccagtggcaggggttctggctgctttccatctgagtgtgggatgggaggggtgttcatgatcatttggatatagcaatctactctgagaaatggaacacaaggagttacctatcactttcacttataattccaaaagatgactacaaccatgtccatgctcagattcaaacagttttccatatcacttttgggtggtaagatgatttacagttttttttttaattggcagcaccactaaccattccttacattcttttttgtatgtgtggttttctttttatttaacccgcagccgacatcgtagtttcttgttttgttttgttttacagagctgttgcatgacttatgttaccatcctaaaaaacactatattaaacatggaataaattgtctttttatgaattaggctttttgaacatcctgtgttgggatttttttgtttttcaattggcaacaaaagctctgtagggctgcagacatttaaagttcacataatcatctgtaagacattatgtattttgtggaaatactagaatttttttcctgattttgccattatatggatttgctattttttgattaatgcaaaagtatatgactttgttttttatgtgatacaccataaatattaaagtgttgaatactaacagtgctgactacaagaaggatgtagtattttggctttctgcattacaacgtcttctggaggaagggagcaggatgggtttcatttgtatctagtgtgtgtcttaacatctttctaaatcggcagtgtaactgcatagtttaacttcctgtctgtctccctcattttactcttccctccttgtcttatgttttggcttttgtgtatcagagcatctttctttgcagcatcctagtcttgcttcagtttctgtggtctcttttcatcctgcttgaagattcggagtgtggaaggaggctaggaagtctggtgcagtaggtgagcagacctcttgctgcccagcccagggtgggtggggcgcacacctgtctttgtgcatgcaaatctgatacacctggcgcatcctctggagagcacaacgcatggaaaggtctggaagctctgtgtagccattccttctgcagtcatcctacccaagtaaaagtaaccttggctatgttaccaccgttttggtcacccaggaggacatcttagcaagggtgcctgcgagggagtgtgggactgggcctcatcctcgccggcgttggaaaccaaggccttgtatgccacgccttatgaagcactgtttcacagttactttcacttcccgaataaaggttaccaggtaattaa

SEQ ID NO: 363339 - DNA, 2736 bp, Homo sapiens
aagcactggtatcaacgcagagtgcccattacggccgggggccgccgaacagccgccaccgccgcgcgccatgaacattttccggctgactggggacctgtcccacctggcggccatcgtcatcctgctgctgaagatctggaagacgcgctcctgcgcccttctgtttgcactggtcttcacaactcgttacctggatctttttacttcatttatttcattgtataacacatctatgaaggttatctaccttgcctgctcctatgccacagtgtacctgatctacctgaaatttaaggcaacctacgatggaaatcatgataccttccgagtggagtttctggtggtccctgtgggaggcctctcatttttagttaatcacgatttctctcctcttgagatcctctggaccttctccatctacctggagtccgtggctatccttccgcagctgtttatgatcagcaagactggggaggccgagaccatcaccacccactacctgttcttcctgggcctctatcgtgctttgtatcttgtcaactggatctggcgcttctactttgagggcttctttgacctcattgctgtggtggccggcgtagtccagaccatcctatactgtgacttcttctacttgtacattacaaaagtactcaagggaaagaagctcagtttgccagcataagtgccaaagaccatcaccagcatctgtccttcagggtgctcggacagaattcttaccacagcaaaggcataagatgcttgatacggaaaatcagaaacttaactcttttgttgcagatagtcatcagtggctctgtaaaaacgcagaggaaaagagccagaaggtttctgtttaatgcatcttgccttatctttttttattactgtgtacaaagatttttttacacaaagaaacttaatgctgtattaataaattcagtgtgtagcttcaattgggatagttccaaaagtgaagattttgtgaggaataagtgcaaattttttttttattttaaaaaattctttgaaactcttaagtctttgtgtctgcaatgaaattgtactccttgacagttgatagattatatattcttccatccctcaaacttgcattccactatatttattttttggcaaaagatgagctgtatttgtttgaaatctgagacactatgttcaattggatgtatctgttcaaatttattcccacgtgacgtggaagtccttcgttggatgtcacaacactacatttaaggttggtaaggatgacttggaggtccatggttttcattaccaacattttaagattctgaatgtcgatggagtctcactgaagagtcaccaaaggtgcctgccctcctcccctgctgggaagtgtcagttggagactgtcccaagggtgctgaagaatccagtggcaggggttctggctgctttccatctgagtgtgggatgggaggggtgttcatgatcatttggatatagcaatctactctgagaaatggaacacaaggagttacctatcactttcacttataattccaaaagatgactacaaccatgtccatgctcagattcaaacagttttccatatcacttttgggtggtaagatgatttacagttttttttttaattggcagcaccactaaccattccttacattcttttttgtatgtgtggttttctttttatttaacccgcagccgacatcgtagtttcttgttttgttttgttttacagagctgttgcatgacttatgttaccatcctaaaaaacactatattaaacatggaataaattgtctttttatgaattaggctttttgaacatcctgtgttgggatttttttgtttttcaattggcaacaaaagctctgtagggctgcagacatttaaagttcacataatcatctgtaagacattatgtattttgtggaaatactagaatttttttcctgattttgccattatatggatttgctattttttgattaatgcaaaagtatatgactttgttttttatgtgatacaccataaatattaaagtgttgaatactaacagtgctgactacaagaaggatgtagtattttggctttctgcattacaacgtcttctggaggaagggagcaggatgggtttcatttgtatctagtgtgtgtcttaacatctttctaaatcggcagtgtaactgcatagtttaacttcctgtctgtctccctcattttactcttccctccttgtcttatgttttggcttttgtgtatcagagcatctttctttgcagcatcctagtcttgcttcagtttctgtggtctcttttcatcctgcttgaagattcggagtgtggaaggaggctaggaagtctggtgcagtaggtgagcagacctcttgctgcccagcccagggtgggtggggcgcacacctgtctttgtgcatgcaaatctgatacacctggcgcatcctctggagagcacaacgcatggaaaggtctggaagctctgtgtagccattccttctgcagtcatcctacccaagtaaaagtaaccttggctatgttaccaccgttttggtcacccaggaggacatcttagcaagggtgcctgcgagggagtgtgggactgggcctcatcctcgccggcgttggaaaccaaggccttgtatgccacgccttatgaagcactgtttcacagttactttcacttcccgaataaaggttaccaggtaattaa

SEQ ID NO: 363340 - DNA, 3467 bp, Homo sapiens
gaagctttaaaaatcttaacatatccaagtaattgccgctcttagcaaagaagtcaccatgggatgcgatgccattattccagcgggagttcctgcccaactcttacctgagtcggtgcttctcatctactcctcatcccccttaatgacagtagactccatctccgttctcaaaagatttctcaccatggagatactgttttaccatacaaagaagggaccaggcgacatggctcatacctgtaatgccaacgctttgggaagctgggcccaggagttcaagaccagtgtgggcaacatggtgaacaaaaaatttgtttaaaaattagctgggtgtggtggttcacacctctagtcccacctactctggaggccgaggtgggaagattgctgaagcccaggaggtcaaggctacagtgagcttgatcgtgcctctgcactccagcctgggcagcagagggagactctgtctcaggggaaaacaaaaaagaaaaatctgaatgtaagagacaagttataacactaaatgacagcagaattattgagaaatttgttcctacttaaggtgatatatttgagaagtaaaaggttcgtttgaatgatacacatcctggcataataaagcccctttcctgtggtcgccctttatagtgagacagaaaagcctgttagagcctcccaaaaggagcatgtttgggaatgggaagggatagaaaaactacaactgctcttgttcattcagagccatccctagacctgggccttgaccccacgcacccctccttccctgtctgcactccctgcacagtgtgatccacaggaatcccaaagctcttcaggcccttctaatacttcccttctgtttctctaggtatttctgggaaaagccagcttctgtttgcactggtcttcacaactcgttacctggatctttttacttcatttatttcattgtataacacatctatgaaggttatctaccttgcctgctcctatgccacagtgtacctgatctacctgaaatttaaggcaacctacgatggaaatcatgataccttccgagtggagtttctggtggtccctgtgggaggcctctcatttttagttaatcacgatttctctcctcttgagatcctctggaccttctccatctacctggagtccgtggctatccttccgcagctgtttatgatcagcaagactggggaggccgagaccatcaccacccactacctgttcttcctgggcctctatcgtgctttgtatcttgtcaactggatctggcgcttctactttgagggcttctttgacctcattgctgtggtggccggcgtagtccagaccatcctatactgtgacttcttctacttgtacattacaaaagtactcaagggaaagaagctcagtttgccagcataagtgccaaagaccatcaccagcatctgtccttcagggtgctcggacagaattcttaccacagcaaaggcataagatgcttgatacggaaaatcagaaacttaactcttttgttgcagatagtcatcagtggctctgtaaaaacgcagaggaaaagagccagaaggtttctgtttaatgcatcttgccttatctttttttattactgtgtacaaagatttttttacacaaagaaacttaatgctgtattaataaattcagtgtgtagcttcaattgggatagttccaaaagtgaagattttgtgaggaataagtgcaaattttttttttattttaaaaaattctttgaaactcttaagtctttgtgtctgcaatgaaattgtactccttgacagttgatagattatatattcttccatccctcaaacttgcattccactatatttattttttggcaaaagatgagctgtatttgtttgaaatctgagacactatgttcaattggatgtatctgttcaaatttattcccacgtgacgtggaagtccttcgttggatgtcacaacactacatttaaggttggtaaggatgacttggaggtccatggttttcattaccaacattttaagattctgaatgtcgatggagtctcactgaagagtcaccaaaggtgcctgccctcctcccctgctgggaagtgtcagttggagactgtcccaagggtgctgaagaatccagtggcaggggttctggctgctttccatctgagtgtgggatgggaggggtgttcatgatcatttggatatagcaatctactctgagaaatggaacacaaggagttacctatcactttcacttataattccaaaagatgactacaaccatgtccatgctcagattcaaacagttttccatatcacttttgggtggtaagatgatttacagttttttttttaattggcagcaccactaaccattccttacattcttttttgtatgtgtggttttctttttatttaacccgcagccgacatcgtagtttcttgttttgttttgttttacagagctgttgcatgacttatgttaccatcctaaaaaacactatattaaacatggaataaattgtctttttatgaattaggctttttgaacatcctgtgttgggatttttttgtttttcaattggcaacaaaagctctgtagggctgcagacatttaaagttcacataatcatctgtaagacattatgtattttgtggaaatactagaatttttttcctgattttgccattatatggatttgctattttttgattaatgcaaaagtatatgactttgttttttatgtgatacaccataaatattaaagtgttgaatactaacagtgctgactacaagaaggatgtagtattttggctttctgcattacaacgtcttctggaggaagggagcaggatgggtttcatttgtatctagtgtgtgtcttaacatctttctaaatcggcagtgtaactgcatagtttaacttcctgtctgtctccctcattttactcttccctccttgtcttatgttttggcttttgtgtatcagagcatctttctttgcagcatcctagtcttgcttcagtttctgtggtctcttttcatcctgcttgaagattcggagtgtggaaggaggctaggaagtctggtgcagtaggtgagcagacctcttgctgcccagcccagggtgggtggggcgcacacctgtctttgtgcatgcaaatctgatacacctggcgcatcctctggagagcacaacgcatggaaaggtctggaagctctgtgtagccattccttctgcagtcatcctacccaagtaaaagtaaccttggctatgttaccaccgttttggtcacccaggaggacatcttagcaagggtgcctgcgagggagtgtgggactgggcctcatcctcgccggcgttggaaaccaaggccttgtatgccacgccttatgaagcactgtttcacagttactttcacttcccgaataaaggttaccaggtaattaa

SEQ ID NO: 363341 - DNA, 2937 bp, Homo sapiens
cgcgcgcgcgcgcgcggcagttcggccacgtccctggccacgtcgcgggcgatctcgccatcttcgccgcttcctctcaggggccgccgcctcctgagccgcccagccccggggccgccgcgctgcgccgaccgccaccgccgccgccgccatgaacattttccggctgactggggacctgtcccacctggcggccatcgtcatcctgctgctgaagatctggaagacgcgctcctgcgccgggtcttgctctgtcacccaggctagagtgcagggatgtgaccacagctcactcagcctcagcctcctggagtcacgcaatcctcccacctcaacctcccatgtagctgggaccacaggtcttctgtttgcactggtcttcacaactcgttacctggatctttttacttcatttatttcattgtataacacatctatgaaggttatctaccttgcctgctcctatgccacagtgtacctgatctacctgaaatttaaggcaacctacgatggaaatcatgataccttccgagtggagtttctggtggtccctgtgggaggcctctcatttttagttaatcacgatttctctcctcttgagatcctctggaccttctccatctacctggagtccgtggctatccttccgcagctgtttatgatcagcaagactggggaggccgagaccatcaccacccactacctgttcttcctgggcctctatcgtgctttgtatcttgtcaactggatctggcgcttctactttgagggcttctttgacctcattgctgtggtggccggcgtagtccagaccatcctatactgtgacttcttctacttgtacattacaaaagtactcaagggaaagaagctcagtttgccagcataagtgccaaagaccatcaccagcatctgtccttcagggtgctcggacagaattcttaccacagcaaaggcataagatgcttgatacggaaaatcagaaacttaactcttttgttgcagatagtcatcagtggctctgtaaaaacgcagaggaaaagagccagaaggtttctgtttaatgcatcttgccttatctttttttattactgtgtacaaagatttttttacacaaagaaacttaatgctgtattaataaattcagtgtgtagcttcaattgggatagttccaaaagtgaagattttgtgaggaataagtgcaaattttttttttattttaaaaaattctttgaaactcttaagtctttgtgtctgcaatgaaattgtactccttgacagttgatagattatatattcttccatccctcaaacttgcattccactatatttattttttggcaaaagatgagctgtatttgtttgaaatctgagacactatgttcaattggatgtatctgttcaaatttattcccacgtgacgtggaagtccttcgttggatgtcacaacactacatttaaggttggtaaggatgacttggaggtccatggttttcattaccaacattttaagattctgaatgtcgatggagtctcactgaagagtcaccaaaggtgcctgccctcctcccctgctgggaagtgtcagttggagactgtcccaagggtgctgaagaatccagtggcaggggttctggctgctttccatctgagtgtgggatgggaggggtgttcatgatcatttggatatagcaatctactctgagaaatggaacacaaggagttacctatcactttcacttataattccaaaagatgactacaaccatgtccatgctcagattcaaacagttttccatatcacttttgggtggtaagatgatttacagttttttttttaattggcagcaccactaaccattccttacattcttttttgtatgtgtggttttctttttatttaacccgcagccgacatcgtagtttcttgttttgttttgttttacagagctgttgcatgacttatgttaccatcctaaaaaacactatattaaacatggaataaattgtctttttatgaattaggctttttgaacatcctgtgttgggatttttttgtttttcaattggcaacaaaagctctgtagggctgcagacatttaaagttcacataatcatctgtaagacattatgtattttgtggaaatactagaatttttttcctgattttgccattatatggatttgctattttttgattaatgcaaaagtatatgactttgttttttatgtgatacaccataaatattaaagtgttgaatactaacagtgctgactacaagaaggatgtagtattttggctttctgcattacaacgtcttctggaggaagggagcaggatgggtttcatttgtatctagtgtgtgtcttaacatctttctaaatcggcagtgtaactgcatagtttaacttcctgtctgtctccctcattttactcttccctccttgtcttatgttttggcttttgtgtatcagagcatctttctttgcagcatcctagtcttgcttcagtttctgtggtctcttttcatcctgcttgaagattcggagtgtggaaggaggctaggaagtctggtgcagtaggtgagcagacctcttgctgcccagcccagggtgggtggggcgcacacctgtctttgtgcatgcaaatctgatacacctggcgcatcctctggagagcacaacgcatggaaaggtctggaagctctgtgtagccattccttctgcagtcatcctacccaagtaaaagtaaccttggctatgttaccaccgttttggtcacccaggaggacatcttagcaagggtgcctgcgagggagtgtgggactgggcctcatcctcgccggcgttggaaaccaaggccttgtatgccacgccttatgaagcactgtttcacagttactttcacttcccgaataaaggttaccaggtaattaa

SEQ ID NO: 363342 - DNA, 2635 bp, Homo sapiens
cgcgcgcgcgcgcgcggcagttcggccacgtccctggccacgtcgcgggcgatctcgccatcttcgccgcttcctctcaggggccgccgcctcctgagccgcccagccccggggccgccgcgctgcgccgaccgccaccgccgccgccgccatgaacattttccggctgactggggacctgtcccacctggcggccatcgtcatcctgctgctgaagatctggaagacgcgctcctgcgccggtatttctgggaaaagccagcttctgtttgcactggtcttcacaactcgttacctggatctttttacttcatttatttcattgtataacacatctatgaaggttatctaccttgcctgctcctatgccacagtgtacctgatctacctgaaatttaaggcaacctacgatggaaatcatgataccttccgagtggagtttctggtggtccctgtgggaggcctctcatttttagttaatcacgatttctctcctcttgagatcctctggaccttctccatctacctggagtccgtggctatccttccgcagctgtttatgatcagcaagactggggaggccgagaccatcaccacccactacctgttcttcctgggcctctatcgtgctttgtatcttgtcaactggatctggcgcttctactttgagggcttctttgacctcattgctgtggtggccggcgtagtccagaccatcctatactgtgacttcttctacttgtacattacaaaagtactcaagggaaagaagctcagtttgccagcataagtgccaaagaccatcaccagcatctgtccttcagggtgctcggacagaattcttaccacagcaaaggcataagatgcttgatacggaaaatcagaaacttaactcttttgttgcagatagtcatcagtggctctgtaaaaacgcagaggaaaagagccagaaggtttctgtttaatgcatcttgccttatctttttttattactgtgtacaaagatttttttacacaaagaaacttaatgctgtattaataaattcagtgtgtagcttcaattgggatagttccaaaagtgaagattttgtgaggaataagtgcaaattttttttttattttaaaaaattctttgaaactcttaagtctttgtgtctgcaatgaaattgtactccttgacagttgatagattatatattcttccatccctcaaacttgcattccactatatttattttttggcaaaagatgagctgtatttgtttgaaatctgagacactatgttcaattggatgtatctgttcaaatttattcccacgtgacgtggaagtccttcgttggatgtcacaacactacatttaaggttggtaaggatgacttggaggtccatggttttcattaccaacattttaagattctgaatgtcgatggagtctcactgaagagtcaccaaaggtgcctgccctcctcccctgctgggaagtgtcagttggagactgtcccaagggtgctgaagaatccagtggcaggggttctggctgctttccatctgagtgtgggatgggaggggtgttcatgatcatttggatatagcaatctactctgagaaatggaacacaaggagttacctatcactttcacttataattccaaaagatgactacaaccatgtccatgctcagattcaaacagttttccatatcacttttgggtggtaagatgatttacagttttttttttaattggcagcaccactaaccattccttacattcttttttgtatgtgtggttttctttttatttaacccgcagccgacatcgtagtttcttgttttgttttgttttacagagctgttgcatgacttatgttaccatcctaaaaaacactatattaaacatggaataaattgtctttttatgaattaggctttttgaacatcctgtgttgggatttttttgtttttcaattggcaacaaaagctctgtagggctgcagacatttaaagttcacataatcatctgtaagacattatgtattttgtggaaatactagaatttttttcctgattttgccattatatggatttgctattttttgattaatgcaaaagtatatgactttgttttttatgtgatacaccataaatattaaagtgttgaatactaacagtgctgactacaagaaggatgtagtattttggctttctgcattacaacgtcttctggaggaagggagcaggatgggtttcatttgtatctagtgtgtgtcttaacatctttctaaatcggcagtgtaactgcatagtttaacttcctgtctgtctccctcattttactcttccctccttgtcttatgttttggcttttgtgtatcagagcatctttctttgcagcatcctagtcttgcttcagtttctgtggtctcttttcatcctgcttgaagattcggagtgtggaaggaggctaggaagtctggtgcagtaggaggacatcttagcaagggtgcctgcgagggagtgtgggactgggcctcatcctcgccggcgttggaaaccaaggccttgtatgccacgccttatgaagcactgtttcacagttactttcacttcccgaataaaggttaccaggtaattaa

SEQ ID NO: 363343 - DNA, 2838 bp, Homo sapiens
ttatgtggctttctagaaaaggcaaaactatggacagagaacataagtgtgattgcactgcaggaggtgaaggaagcctgggggagtttgactgcgaagcggcagcatggcagaattttggggatgatggaactattctgtgtcctaattttggtggtggttatgcctcagaactgaacacctccaaaaaagagaattttactatatttaagttttaaaattccaaaaacaaagctaaggaaaaaaatcttgcctttccaaatacatgggtgattaaaaaagctggggggtgctggaacagtggcaaggtattgacacctggtgttttttcttttatttgtaggttatctaccttgcctgctcctatgccacagtgtacctgatctacctgaaatttaaggcaacctacgatggaaatcatgataccttccgagtggagtttctggtggtccctgtgggaggcctctcatttttagttaatcacgatttctctcctcttgagatcctctggaccttctccatctacctggagtccgtggctatccttccgcagctgtttatgatcagcaagactggggaggccgagaccatcaccacccactacctgttcttcctgggcctctatcgtgctttgtatcttgtcaactggatctggcgcttctactttgagggcttctttgacctcattgctgtggtggccggcgtagtccagaccatcctatactgtgacttcttctacttgtacattacaaaagtactcaagggaaagaagctcagtttgccagcataagtgccaaagaccatcaccagcatctgtccttcagggtgctcggacagaattcttaccacagcaaaggcataagatgcttgatacggaaaatcagaaacttaactcttttgttgcagatagtcatcagtggctctgtaaaaacgcagaggaaaagagccagaaggtttctgtttaatgcatcttgccttatctttttttattactgtgtacaaagatttttttacacaaagaaacttaatgctgtattaataaattcagtgtgtagcttcaattgggatagttccaaaagtgaagattttgtgaggaataagtgcaaattttttttttattttaaaaaattctttgaaactcttaagtctttgtgtctgcaatgaaattgtactccttgacagttgatagattatatattcttccatccctcaaacttgcattccactatatttattttttggcaaaagatgagctgtatttgtttgaaatctgagacactatgttcaattggatgtatctgttcaaatttattcccacgtgacgtggaagtccttcgttggatgtcacaacactacatttaaggttggtaaggatgacttggaggtccatggttttcattaccaacattttaagattctgaatgtcgatggagtctcactgaagagtcaccaaaggtgcctgccctcctcccctgctgggaagtgtcagttggagactgtcccaagggtgctgaagaatccagtggcaggggttctggctgctttccatctgagtgtgggatgggaggggtgttcatgatcatttggatatagcaatctactctgagaaatggaacacaaggagttacctatcactttcacttataattccaaaagatgactacaaccatgtccatgctcagattcaaacagttttccatatcacttttgggtggtaagatgatttacagttttttttttaattggcagcaccactaaccattccttacattcttttttgtatgtgtggttttctttttatttaacccgcagccgacatcgtagtttcttgttttgttttgttttacagagctgttgcatgacttatgttaccatcctaaaaaacactatattaaacatggaataaattgtctttttatgaattaggctttttgaacatcctgtgttgggatttttttgtttttcaattggcaacaaaagctctgtagggctgcagacatttaaagttcacataatcatctgtaagacattatgtattttgtggaaatactagaatttttttcctgattttgccattatatggatttgctattttttgattaatgcaaaagtatatgactttgttttttatgtgatacaccataaatattaaagtgttgaatactaacagtgctgactacaagaaggatgtagtattttggctttctgcattacaacgtcttctggaggaagggagcaggatgggtttcatttgtatctagtgtgtgtcttaacatctttctaaatcggcagtgtaactgcatagtttaacttcctgtctgtctccctcattttactcttccctccttgtcttatgttttggcttttgtgtatcagagcatctttctttgcagcatcctagtcttgcttcagtttctgtggtctcttttcatcctgcttgaagattcggagtgtggaaggaggctaggaagtctggtgcagtaggtgagcagacctcttgctgcccagcccagggtgggtggggcgcacacctgtctttgtgcatgcaaatctgatacacctggcgcatcctctggagagcacaacgcatggaaaggtctggaagctctgtgtagccattccttctgcagtcatcctacccaagtaaaagtaaccttggctatgttaccaccgttttggtcacccaggaggacatcttagcaagggtgcctgcgagggagtgtgggactgggcctcatcctcgccggcgttggaaaccaaggccttgtatgccacgccttatgaagcactgtttcacagttactttcacttcccgaataaaggttaccaggtaattaa

SEQ ID NO: 363344 - DNA, 2734 bp, Homo sapiens
ggggttcgccgttactctgcgcacatcgctattgcggttccgaggcagtgggaagagatgcggcccctggacatcgtcgagctggcggaaccggaggaagtggaggtgctggagcccgaggaggatttcgagcagtttctgctcccggtcatcaacgagatgcgcgaggacatcgcgtcgctgacgcgcgagcacgggcgggcgtacctgcggaaccggagcaagctgtgggagatggacaatatgctcatccagatcaaaacgcaggtggaggcctcggaggagagcgccctcaaccacctccagaacccgggccgccgcgctgcgccgaccgccaccgccgccgccgccatgaacattttccggctgactggggacctgtcccacctggcggccatcgtcatcctgctgctgaagatctggaagacgcgctcctgcgccggtatttctgggaaaagccaggcaagactggggaggccgagaccatcaccacccactacctgttcttcctgggcctctatcgtgctttgtatcttgtcaactggatctggcgcttctactttgagggcttctttgacctcattgctgtggtggccggcgtagtccagaccatcctatactgtgacttcttctacttgtacattacaaaagtactcaagggaaagaagctcagtttgccagcataagtgccaaagaccatcaccagcatctgtccttcagggtgctcggacagaattcttaccacagcaaaggcataagatgcttgatacggaaaatcagaaacttaactcttttgttgcagatagtcatcagtggctctgtaaaaacgcagaggaaaagagccagaaggtttctgtttaatgcatcttgccttatctttttttattactgtgtacaaagatttttttacacaaagaaacttaatgctgtattaataaattcagtgtgtagcttcaattgggatagttccaaaagtgaagattttgtgaggaataagtgcaaattttttttttattttaaaaaattctttgaaactcttaagtctttgtgtctgcaatgaaattgtactccttgacagttgatagattatatattcttccatccctcaaacttgcattccactatatttattttttggcaaaagatgagctgtatttgtttgaaatctgagacactatgttcaattggatgtatctgttcaaatttattcccacgtgacgtggaagtccttcgttggatgtcacaacactacatttaaggttggtaaggatgacttggaggtccatggttttcattaccaacattttaagattctgaatgtcgatggagtctcactgaagagtcaccaaaggtgcctgccctcctcccctgctgggaagtgtcagttggagactgtcccaagggtgctgaagaatccagtggcaggggttctggctgctttccatctgagtgtgggatgggaggggtgttcatgatcatttggatatagcaatctactctgagaaatggaacacaaggagttacctatcactttcacttataattccaaaagatgactacaaccatgtccatgctcagattcaaacagttttccatatcacttttgggtggtaagatgatttacagttttttttttaattggcagcaccactaaccattccttacattcttttttgtatgtgtggttttctttttatttaacccgcagccgacatcgtagtttcttgttttgttttgttttacagagctgttgcatgacttatgttaccatcctaaaaaacactatattaaacatggaataaattgtctttttatgaattaggctttttgaacatcctgtgttgggatttttttgtttttcaattggcaacaaaagctctgtagggctgcagacatttaaagttcacataatcatctgtaagacattatgtattttgtggaaatactagaatttttttcctgattttgccattatatggatttgctattttttgattaatgcaaaagtatatgactttgttttttatgtgatacaccataaatattaaagtgttgaatactaacagtgctgactacaagaaggatgtagtattttggctttctgcattacaacgtcttctggaggaagggagcaggatgggtttcatttgtatctagtgtgtgtcttaacatctttctaaatcggcagtgtaactgcatagtttaacttcctgtctgtctccctcattttactcttccctccttgtcttatgttttggcttttgtgtatcagagcatctttctttgcagcatcctagtcttgcttcagtttctgtggtctcttttcatcctgcttgaagattcggagtgtggaaggaggctaggaagtctggtgcagtaggtgagcagacctcttgctgcccagcccagggtgggtggggcgcacacctgtctttgtgcatgcaaatctgatacacctggcgcatcctctggagagcacaacgcatggaaaggtctggaagctctgtgtagccattccttctgcagtcatcctacccaagtaaaagtaaccttggctatgttaccaccgttttggtcacccaggaggacatcttagcaagggtgcctgcgagggagtgtgggactgggcctcatcctcgccggcgttggaaaccaaggccttgtatgccacgccttatgaagcactgtttcacagttactttcacttcccgaataaaggttaccaggtaattaa

SEQ ID NO: 363345 - DNA, 2537 bp, Homo sapiens
  misc_feature (2456)..(2456): n is a, c, g, or t
cgcgcgcgcgcgcgcggcagttcggccacgtccctggccacgtcgcgggcgatctcgccatcttcgccgcttcctctcaggggccgccgcctcctgagccgcccagccccggggccgccgcgctgcgccgaccgccaccgccgccgccgccatgaacattttccggctgactggggacctgtcccacctggcggccatcgtcatcctgctgctgaagatctggaagacgcgctcctgcgccggtatttctgggaaaagccagcttctgtttgcactggtcttcacaactcgttacctggatctttttacttcatttatttcattgtataacacatctatgaaggttatctaccttgcctgctcctatgccacagtgtacctgatctacctgaaatttaaggcaacctacgatggaaatcatgataccttccgagtggagtttctggtggtccctgtgggaggcctctcatttttagttaatcacgatttctctcctcttgagatcctctggaccttctccatctacctggagtccgtggctatccttccgcagctgtttatgatcagcaagactggggaggccgagaccatcaccacccactacctgttcttcctgggcctctatcgtgctttgtatcttgtcaactggatctggcgcttctactttgagggcttctttgacctcattgctgtggtggccggcgtagtccagaccatcctatactgtgacttcttctacttgtacattacaaaagtactcaagggaaagaagctcagtttgccagcataagtgccaaagaccatcaccagcatctgtccttcagggtgctcggacagaattcttaccacagcaaaggcataagatgcttgatacggaaaatcagaaacttaactcttttgttgcagatagtcatcagtggctctgtaaaaacgcagaggaaaagagccagaaggtttctgtttaatgcatcttgccttatctttttttattactgtgtacaaagatttttttacacaaagaaacttaatgctgtattaataaattcagtgtgtagcttcaattgggatagttccaaaagtgaagattttgtgaggaataagtgcaaattttttttttattttaaaaaattctttgaaactcttaagtctttgtgtctgcaatgaaattgtactccttgacagttgatagattatatattcttccatccctcaaacttgcattccactatatttattttttggcaaaagatgagctgtatttgtttgaaatctgagacactatgttcaattggatgtatctgttcaaatttattcccacgtgacgtggaagtccttcgttggatgtcacaacactacatttaaggttggtaaggatgacttggaggtccatggttttcattaccaacattttaagattctgaatgtcgatggagtctcactgaagagtcaccaaaggtgcctgccctcctcccctgctgggaagtgtcagttggagactgtcccaagggtgctgaagaatccagtggcaggggttctggctgctttccatctgagtgtgggatgggaggggtgttcatgatcatttggatatagcaatctactctgagaaatggaacacaaggagttacctatcactttcacttataattccaaaagatgactacaaccatgtccatgctcagattcaaacagttttccatatcacttttgggtggtaagatgatttacagttttttttttaattggcagcaccactaaccattccttacattcttttttgtatgtgtggttttctttttatttaacccgcagccgacatcgtagtttcttgttttgttttgttttacagagctgttgcatgacttatgttaccatcctaaaaaacactatattaaacatggaataaattgtctttttatgaattaggctttttgaacatcctgtgttgggatttttttgtttttcaattggcaacaaaagctctgtagggctgcagacatttaaagttcacataatcatctgtaagacattatgtattttgtggaaatactagaatttttttcctgattttgccattatatggatttgctattttttgattaatgcaaaagtatatgactttgttttttatgtgatacaccataaatattaaagtgttgaatactaacagtgctgactacaagaaggaaaaaaaaaaaaaaaaaaaaaaaaaaaaaagggggggggataaaatatctccgggggggcccagattggaccaacccgattttcttgaaagggggcctatagggaggcatatataaagaaggcggggagcggttacaagagtggtacagggaaacgtgctagtgggttttgggaagacctcttcgtgtgtgcattgggaaccactccgattggaccggataaaattgagtatggtaacgtattcggtggagtgtctagtatataatacnggtgaatatagagacgacatgggtgtgatactggccggagcaaagtgtcatataggagtcgtaaggactgtacatagtgta

SEQ ID NO: 363346 - DNA, 2223 bp, Homo sapiens
cgcgcgcgcgcgcgcggcagttcggccacgtccctggccacgtcgcgggcgatctcgccatcttcgccgcttcctctcaggggccgccgcctcctgagccgcccagccccggggccgccgcgctgcgccgaccgccaccgccgccgccgccatgaacattttccggctgactggggacctgtcccacctggcggccatcgtcatcctgctgctgaagatctggaagacgcgctcctgcgccggtatttctgggaaaagccagcttctgtttgcactggtcttcacaactcgttacctggatctttttacttcatttatttcattgtataacacatctatgaaggttatctaccttgcctgctcctatgccacagtgtacctgatctacctgaaatttaaggcaacctacgatggaaatcatgataccttccgagtggagtttctggtggtccctgtgggaggcctctcatttttagttaatcacgatttctctcctcttgagatcctctggaccttctccatctacctggagtccgtggctatccttccgcagctgtttatgatcagcaagactggggaggccgagaccatcaccacccactacctgttcttcctgggcctctatcgtgctttgtatcttgtcaactggatctggcgcttctactttgagggcttctttgacctcattgctgtggtggccggcgtagtccagaccatcctatactgtgacttcttctacttgtacattacaaaagtactcaagggaaagaagctcagtttgccagcataagtgccaaagaccatcaccagcatctgtccttcagggtgctcggacagaattcttaccacagcaaaggcataagatgcttgatacggaaaatcagaaacttaactcttttgttgcagatagtcatcagtggctctgtaaaaacgcagaggaaaagagccagaaggtttctgtttaatgcatcttgccttatctttttttattactgtgtacaaagatttttttacacaaagaaacttaatgctgtattaataaattcagtgtgtagcttcaattgggatagttccaaaagtgaagattttgtgaggaataagtgcaaattttttttttattttaaaaaattctttgaaactcttaagtctttgtgtctgcaatgaaattgtactccttgacagttgatagattatatattcttccatccctcaaacttgcattccactatatttattttttggcaaaagatgagctgtatttgtttgaaatctgagacactatgttcaattggatgtatctgttcaaatttattcccacgtgacgtggaagtccttcgttggatgtcacaacactacatttaaggttggtaaggatgacttggaggtccatggttttcattaccaacattttaagattctgaatgtcgatggagtctcactgaagagtcaccaaaggtgcctgccctcctcccctgctgggaagtgtcagttggagactgtcccaagggtgctgaagaatccagtggcaggggttctggctgctttccatctgagtgtgggatgggaggggtgttcatgatcatttggatatagcaatctactctgagaaatggaacacaaggagttacctatcactttcacttataattccaaaagatgactacaaccatgtccatgctcagattcaaacagttttccatatcacttttgggtggtaagatgatttacagttttttttttaattggcagcaccactaaccattccttacattcttttttgtatgtgtggttttctttttatttaacccgcagccgacatcgtagtttcttgttttgttttgttttacagagctgttgcatgacttatgttaccatcctaaaaaacactatattaaacatggaataaattgtctttttatgaattaggctttttgaacatcctgtgttgggatttttttgtttttcaattggcaacaaaagctctgtagggctgcagacatttaaagttcacataatcataatgtcttacagatgattatgtgaactttaaatgtctgtaagacattatgtattttgtggaaatactagaatttttttcctgattttgccattatatggatttgctattttttgattaatgcaaaagtatatgactttgttttttatgtgatacaccataaatattaaagtgttgaatactaacagtgctgactacaagaagga

SEQ ID NO: 363347 - DNA, 2585 bp, Homo sapiens
cgcgcgcgcgcgcgcggcagttcggccacgtccctggccacgtcgcgggcgatctcgccatcttcgccgcttcctctcaggggccgccgcctcctgagccgcccagccccggggccgccgcgctgcgccgaccgccaccgccgccgccgccatgaacattttccggctgactggggacctgtcccacctggcggccatcgtcatcctgctgctgaagatctggaagacgcgctcctgcgccggtatttctgggaaaagccagcttctgtttgcactggtcttcacaactcgttacctggatctttttacttcatttatttcattgtataacacatctatgaaggttatctaccttgcctgctcctatgccacagtgtacctgatctacctgaaatttaaggcaacctacgatggaaatcatgataccttccgagtggagtttctggtggtccctgtgggaggcctctcatttttagttaatcacgatttctctcctcttgagtactcaagggaaagaagctcagtttgccagcataagtgccaaagaccatcaccagcatctgtccttcagggtgctcggacagaattcttaccacagcaaaggcataagatgcttgatacggaaaatcagaaacttaactcttttgttgcagatagtcatcagtggctctgtaaaaacgcagaggaaaagagccagaaggtttctgtttaatgcatcttgccttatctttttttattactgtgtacaaagatttttttacacaaagaaacttaatgctgtattaataaattcagtgtgtagcttcaattgggatagttccaaaagtgaagattttgtgaggaataagtgcaaattttttttttattttaaaaaattctttgaaactcttaagtctttgtgtctgcaatgaaattgtactccttgacagttgatagattatatattcttccatccctcaaacttgcattccactatatttattttttggcaaaagatgagctgtatttgtttgaaatctgagacactatgttcaattggatgtatctgttcaaatttattcccacgtgacgtggaagtccttcgttggatgtcacaacactacatttaaggttggtaaggatgacttggaggtccatggttttcattaccaacattttaagattctgaatgtcgatggagtctcactgaagagtcaccaaaggtgcctgccctcctcccctgctgggaagtgtcagttggagactgtcccaagggtgctgaagaatccagtggcaggggttctggctgctttccatctgagtgtgggatgggaggggtgttcatgatcatttggatatagcaatctactctgagaaatggaacacaaggagttacctatcactttcacttataattccaaaagatgactacaaccatgtccatgctcagattcaaacagttttccatatcacttttgggtggtaagatgatttacagttttttttttaattggcagcaccactaaccattccttacattcttttttgtatgtgtggttttctttttatttaacccgcagccgacatcgtagtttcttgttttgttttgttttacagagctgttgcatgacttatgttaccatcctaaaaaacactatattaaacatggaataaattgtctttttatgaattaggctttttgaacatcctgtgttgggatttttttgtttttcaattggcaacaaaagctctgtagggctgcagacatttaaagttcacataatcatctgtaagacattatgtattttgtggaaatactagaatttttttcctgattttgccattatatggatttgctattttttgattaatgcaaaagtatatgactttgttttttatgtgatacaccataaatattaaagtgttgaatactaacagtgctgactacaagaaggatgtagtattttggctttctgcattacaacgtcttctggaggaagggagcaggatgggtttcatttgtatctagtgtgtgtcttaacatctttctaaatcggcagtgtaactgcatagtttaacttcctgtctgtctccctcattttactcttccctccttgtcttatgttttggcttttgtgtatcagagcatctttctttgcagcatcctagtcttgcttcagtttctgtggtctcttttcatcctgcttgaagattcggagtgtggaaggaggctaggaagtctggtgcagtaggtgagcagacctcttgctgcccagcccagggtgggtggggcgcacacctgtctttgtgcatgcaaatctgatacacctggcgcatcctctggagagcacaacgcatggaaaggtctggaagctctgtgtagccattccttctgcagtcatcctacccaagtaaaagtaaccttggctatgttaccaccgttttggtcacccaggaggacatcttagcaagggtgcctgcgagggagtgtgggactgggcctcatcctcgccggcgttggaaaccaaggccttgtatgccacgccttatgaagcactgtttcacagttactttcacttcccgaataaaggttaccaggtaattaa

SEQ ID NO: 363348 - DNA, 1981 bp, Homo sapiens
cgcgcgcgcgcgcgcggcagttcggccacgtccctggccacgtcgcgggcgatctcgccatcttcgccgcttcctctcaggggccgccgcctcctgagccgcccagccccggggccgccgcgctgcgccgaccgccaccgccgccgccgccatgaacattttccggctgactggggacctgtcccacctggcggccatcgtcatcctgctgctgaagatctggaagacgcgctcctgcgccggtatttctgggaaaagccagcttctgtttgcactggtcttcacaactcgttacctggatctttttacttcatttatttcattgtataacacatctatgaaggttatctaccttgcctgctcctatgccacagtgtacctgatctacctgaaatttaaggcaacctacgatggaaatcatgataccttccgagtggagtttctggtggtccctgtgggaggcctctcatttttagttaatcacgatttctctcctcttgagatcctctggaccttctccatctacctggagtccgtggctatccttccgcagctgtttatgatcagcaagactggggaggccgagaccatcaccacccactacctgttcttcctgggcctctatcgtgctttgtatcttgtcaactggatctggcgcttctactttgagggcttctttgacctcattgctgtggtggccggcgtagtccagaccatcctatactgtgacttcttctacttgtacattacaaaagtactcaagggaaagaagctcagtttgccagcataagtgccaaagaccatcaccagcatctgtccttcagggtgctcggacagaattcttaccacagcaaaggcataagatgcttgatacggaaaatcagaaacttaactcttttgttgcagatagtcatcagtggctctgtaaaaacgcagaggaaaagagccagaaggtttctgtttaatgcatcttgccttatctttttttattactgtgtacaaagatttttttacacaaagaaacttaatgctgtattaataaattcagtgtgtagcttcaattgggatagttccaaaagtgaagattttgtgaggaataagtgcaaattttttttttattttaaaaaattctttgaaactcttaagtctttgtgtctgcaatgaaattgtactccttgacagttgatagattatatattcttccatccctcaaacttgcattccactatatttattttttggcaaaagatgagctgtatttgtttgaaatctgagacactatgttcaattggatgtatctgttcaaatttattcccacgtgacgtggaagtccttcgttggatgtcacaacactacatttaaggttggtaaggatgacttggaggtccatggttttcattaccaacattttaagattctgaatgtcgatggagtctcactgaagagtcaccaaaggtgcctgccctcctcccctgctgggaagtgtcagttggagactgtcccaagggtgctgaagaatccagtggcaggggttctggctgctttccatctgagtgtgggatgggaggggtgttcatgatcatttggatatagcaatctactctgagaaatggaacacaaggagttacctatcactttcacttataattccaaaagatgactacaaccatgtccatgctccgattgcaaagagttcttccattatcactttggcggtgggtaagaatgagtacacaggaattttgattgaaactggggcaggacgagataatgcatgcctttacattactgaacatggactgtggagaggttgctgtaagaattttacgcacgcagtgcgaagatcggtagttccttggtaggagtgagggattacaggaactttgtggcatgaggttatgttagccatcctaaaaaaggacgtatgttgaaaccatggcataccattgggcttgtcaagggaatagggcctttgggacca

SEQ ID NO: 363349 - DNA, 1909 bp, Homo sapiens
tcgcgaacgatgtatctctcgcgaacgtgttatctctcgcgaacgtgttatcctctcgcgaacgtgttatcccaattgaagctacacaaagaaacttaatgctgtattaataaattcagtgtgtagcttcaattgggatagttccaaaagtgaagattttgtgaggaataagtgcaaattttttttttattttaaaaaattctttgaaactcttaagtctttgtgtctgcaatgaaattgtactccttgacagttgatagattatatattcttccatccctcaaacttgcattccactatatttattttttggcaaaagatgagctgtatttgtttgaaatctgagacactatgttcaattggatgtatctgttcaaatttattcccacgtgacgtggaagtccttcgttggatgtcacaacactacatttaaggttggtaaggatgacttggaggtccatggttttcattaccaacattttaagattctgaatgtcgatggagtctcactgaagagtcaccaaaggtgcctgccctcctcccctgctgggaagtgtcagttggagactgtcccaagggtgctgaagaatccagtggcaggggttctggctgctttccatctgagtgtgggatgggaggggtgttcatgatcatttggatatagcaatctactctgagaaatggaacacaaggagttacctatcactttcacttataattccaaaagatgactacaaccatgtccatgctcagattcaaacagttttccatatcacttttgggtggtaagatgatttacagttttttttttaattggcagcaccactaaccattccttacattcttttttgtatgtgtggttttctttttatttaacccgcagccgacatcgtagtttcttgttttgttttgttttacagagctgttgcatgacttatgttaccatcctaaaaaacactatattaaacatggaataaattgtctttttatgaattaggctttttgaacatcctgtgttgggatttttttgtttttcaattggcaacaaaagctctgtagggctgcagacatttaaagttcacataatcatctgtaagacattatgtattttgtggaaatactagaatttttttcctgattttgccattatatggatttgctattttttgattaatgcaaaagtatatgactttgttttttatgtgatacaccataaatattaaagtgttgaatactaacagtgctgactacaagaaggatgtagtattttggctttctgcattacaacgtcttctggaggaagggagcaggatgggtttcatttgtatctagtgtgtgtcttaacatctttctaaatcggcagtgtaactgcatagtttaacttcctgtctgtctccctcattttactcttccctccttgtcttatgttttggcttttgtgtatcagagcatctttctttgcagcatcctagtcttgcttcagtttctgtggtctcttttcatcctgcttgaagattcggagtgtggaaggaggctaggaagtctggtgcagtaggtgagcagacctcttgctgcccagcccagggtgggtggggcgcacacctgtctttgtgcatgcaaatctgatacacctggcgcatcctctggagagcacaacgcatggaaaggtctggaagctctgtgtagccattccttctgcagtcatcctacccaagtaaaagtaaccttggctatgttaccaccgttttggtcacccaggaggacatcttagcaagggtgcctgcgagggagtgtgggactgggcctcatcctcgccggcgttggaaaccaaggccttgtatgccacgccttatgaagcactgtttcacagttactttcacttcccgaataaaggttaccaggtaattaa

SEQ ID NO: 363350 - DNA, 1805 bp, Homo sapiens
cgcgcgcgcgcgcgcggcagttcggccacgtccctggccacgtcgcgggcgatctcgccatcttcgccgcttcctctcaggggccgccgcctcctgagccgcccagccccggggccgccgcgctgcgccgaccgccaccgccgccgccgccatgaacattttccggctgactggggacctgtcccacctggcggccatcgtcatcctgctgctgaagatctggaagacgcgctcctgcgccggtatttctgggaaaagccagcttctgtttgcactggtcttcacaactcgttacctggatctttttacttcatttatttcattgtataacacatctatgaaggttatctaccttgcctgctcctatgccacagtgtacctgatctacctgaaatttaaggcaacctacgatggaaatcatgataccttccgagtggagtttctggtggtccctgtgggaggcctctcatttttagttaatcacgatttctctcctcttgagatcctctggaccttctccatctacctggagtccgtggctatccttccgcagctgtttatgatcagcaagactggggaggccgagaccatcaccacccactacctgttcttcctgggcctctatcgtgctttgtatcttgtcaactggatctggcgcttctactttgagggcttctttgacctcattgctgtggtggccggcgtagtccagaccatcctatactgtgacttcttctacttgtacattacaaaagtactcaagggaaagaagctcagtttgccagcataagtgccaaagaccatcaccagcatctgtccttcagggtgctcggacagaattcttaccacagcaaaggcataagatgcttgatacggaaaatcagaaacttaactcttttgttgcagatagtcatcagtggctctgtaaaaacgcagaggaaaagagccagaaggtttctgtttaatgcatcttgccttatctttttttattactgtgtacaaagatttttttacacaaagaaacttaatgctgtattaataaattcagtgtgtagcttcaattgggatagttccaaaagtgaagattttgtgaggaataagtgcaaattttttttttattttaaaaaattctttgaaactcttaagtctttgtgtctgcaatgaaattgtactccttgacagttgatagattatatattcttccatccctcaaaaaaaaaaaaaaaaaaaaaaaaaaaaaaaaaaaaaaaaaaaaaaaaaaaaaaaaaaaaaaaaaaaaaaaaaaaaaaaaaaaaaaaaaaaaaaaaaaaaaaaaaaaaaaaaaaaaaaaaaaaaaaaaaaaaaaaaaaaatttgggccccctttcccccagccttttttaaatccaaaaaattttttaattggccccaaatctgggcccctttggccaaattcccctaatgggggggtatttaaaaaaaaggggccccgttttaaaaaacggtgggtgggaaaaaccccggggttcccccaaataaagcctttggaaaaaaacccctttttcccagggggggaaaaacaaaaaaggccccccccatgggccttttcaaaaaagtggccccccctaaagggcaaaggaaaatttggggcgaataattttctaaaaaactgccaaaaaattttgttaaaacccctcttttttaaaacaaatgggcaaaattgggaaaaaccctctttaaaataaaaaaaaaacccccctaaagggttagaggtttttccccctttgaacaaaagggcccttctaatagtggtctccccccggggcg

SEQ ID NO: 363351 - DNA, 1295 bp, Homo sapiens
gttcagcacatttaggtcacactttaaattaagccttatattaggcccctctattttcaggatataattcttaactatcattatttacctgattttaatcatcagattcgaaattctgtgccatggcgtatatgctcagattcaaacagttttccatatcacttttgggtggtaagatgatttacagttttttttttaattggcagcaccactaaccattccttacattcttttttgtatgtgtggttttctttttatttaacccgcagccgacatcgtagtttcttgttttgttttgttttacagagctgttgcatgacttatgttaccatcctaaaaaacactatattaaacatggaataaattgtctttttatgaattaggctttttgaacatcctgtgttgggatttttttgtttttcaattggcaacaaaagctctgtagggctgcagacatttaaagttcacataatcatctgtaagacattatgtattttgtggaaatactagaatttttttcctgattttgccattatatggatttgctattttttgattaatgcaaaagtatatgactttgttttttatgtgatacaccataaatattaaagtgttgaatactaacagtgctgactacaagaaggatgtagtattttggctttctgcattacaacgtcttctggaggaagggagcaggatgggtttcatttgtatctagtgtgtgtcttaacatctttctaaatcggcagtgtaactgcatagtttaacttcctgtctgtctccctcattttactcttccctccttgtcttatgttttggcttttgtgtatcagagcatctttctttgcagcatcctagtcttgcttcagtttctgtggtctcttttcatcctgcttgaagattcggagtgtggaaggaggctaggaagtctggtgcagtaggtgagcagacctcttgctgcccagcccagggtgggtggggcgcacacctgtctttgtgcatgcaaatctgatacacctggcgcatcctctggagagcacaacgcatggaaaggtctggaagctctgtgtagccattccttctgcagtcatcctacccaagtaaaagtaaccttggctatgttaccaccgttttggtcacccaggaggacatcttagcaagggtgcctgcgagggagtgtgggactgggcctcatcctcgccggcgttggaaaccaaggccttgtatgccacgccttatgaagcactgtttcacagttactttcacttcccgaataaaggttaccaggtaattaa

SEQ ID NO: 363352 - DNA, 813 bp, Homo sapiens
  misc_feature (2)..(2): n is a, c, g, or t
  misc_feature (5)..(5): n is a, c, g, or t
  misc_feature (12)..(12): n is a, c, g, or t
  misc_feature (14)..(14): n is a, c, g, or t
  misc_feature (53)..(53): n is a, c, g, or t
gnttngctgccngntgtcgctctagaggatccccgccattcctgcctttgccntttggatttgctattttttgattaatgcaaaagtatatgactttgttttttatgtgatacaccataaatattaaagtgttgaatactaacagtgctgactacaagaaggatgtagtattttggctttctgcattacaacgtcttctggaggaagggagcaggatgggtttcatttgtatctagtgtgtgtcttaacatctttctaaatcggcagtgtaactgcatagtttaacttcctgtctgtctccctcattttactcttccctccttgtcttatgttttggcttttgtgtatcagagcatctttctttgcagcatcctagtcttgcttcagtttctgtggtctcttttcatcctgcttgaagattcggagtgtggaaggaggctaggaagtctggtgcagtaggtgagcagacctcttgctgcccagcccagggtgggtggggcgcacacctgtctttgtgcatgcaaatctgatacacctggcgcatcctctggagagcacaacgcatggaaaggtctggaagctctgtgtagccattccttctgcagtcatcctacccaagtaaaagtaaccttggctatgttaccaccgttttggtcacccaggaggacatcttagcaagggtgcctgcgagggagtgtgggactgggcctcatcctcgccggcgttggaaaccaaggccttgtatgccacgccttatgaagcactgtttcacagttactttcacttcccgaataaaggttaccaggtaattaa

SEQ ID NO: 363353 - DNA, 1465 bp, Homo sapiens
cgcgcgcgcgcgcgcggcagttcggccacgtccctggccacgtcgcgggcgatctcgccatcttcgccgcttcctctcaggggccgccgcctcctgagccgcccagccccggggccgccgcgctgcgccgaccgccaccgccgccgccgccatgaacattttccggctgactggggacctgtcccacctggcggccatcgtcatcctgctgctgaagatctggaagacgcgctcctgcgccggtatttctgggaaaagccagcttctgtttgcactggtcttcacaactcgttacctggatctttttacttcatttatttcattgtataacacatctatgaaggttatctaccttgcctgctcctatgccacagtgtacctgatctacctgaaatttaaggcaacctacgatggaaatcatgataccttccgagtggagtttctggtggtccctgtgggaggcctctcatttttagttaatcacgatttctctcctcttgagatcctctggaccttctccatctacctggagtccgtggctatccttccgcagctgtttatgatcagcaagactggggaggccgagaccatcaccacccactacctgttcttcctgggcctctatcgtgctttgtatcttgtcaactggatctggcgcttctactttgagggcttctttgacctcattgctgtggtggccggcgtagtccagaccatcctatactgtgacttcttctacttgtacattacaaaagtactcaagggaaagaagctcagtttgccagcataagtgccaaagaccatcaccagcatctgtccttcagggtgctcggacagaattcttaccacagcaaaggcataagatgcttgatacggaaaatcagaaacttaactcttttgttgcagatagtcatcagtggctctgtaaaaacgcagaggaaaagagccagaaggtttctgtttaatgcatcttgccttatctttttttattactgtgtacaaagatttttttacacaaagaaacttaatgctgtattaataaattcagtgtgtagcttcaaaaaaaaaaaaaaaaaaaaaaaaaaaaaaaaaaaaaaaaacaaaaaaaaaaaaagaaaaaaagcaaaaaagaaaaaaaaagaaaaaaaaaaaaagaaaaacaagggggggcgggcgcagcacaaaataatacctcctagcggggcgggccacaacgaagcgcgccagacgcgctgtctctttgtaaagagaaggggggcggcccccacatggaaggtgcggtagattaatataaaaggcgaggggcggcgcgccggcggcgtttataaacacaaccccggagtgggggacgagcaacacacgcgctggctgggtgcagctcgttgtggtggagagacaacaccaccactcctgggggtgggggcgacatcactagatggggcacgcccaccctcagcgacggggt

SEQ ID NO: 363354 - DNA, 808 bp, Homo sapiens
cgcgcgcgcgcgcgcggcagttcggccacgtccctggccacgtcgcgggcgatctcgccatcttcgccgcttcctctcaggggccgccgcctcctgagccgcccagccccggggccgccgcgctgcgccgaccgccaccgccgccgccgccatgaacattttccggctgactggggacctgtcccacctggcggccatcgtcatcctgctgctgaagatctggaagacgcgctcctgcgccggtatttctgggaaaagccagcttctgtttgcactggtcttcacaactcgttacctggatctttttacttcatttatttcattgtataacacatctatgaaggttatctaccttgcctgctcctatgccacagtgtacctgatctacctgaaatttaaggcaacctacgatggaaatcatgataccttccgagtggagtttctggtggtccctgtgggaggcctctcatttttagttaatcacgatttctctcctcttgagtactcaagggaaagaagctcagtttgccagcataagtgccaaagaccatcaccagcatctgtccttcagggtgctcggacagaattcttaccacagcaaaggcataagatgcttgatacggaaaatcagaaacttaactcttttgttgcagatagtcatcagtggctctgtaaaaacgcagaggaaaagagccagaaggtttctgtttaatgcatcttgccttatctttttttattactgtgtacaaagatttttttacacaaagaaacttaatgctgtattaataaattcagtgtgtagcttcaa

SEQ ID NO: 363355 - DNA, 825 bp, Homo sapiens
cgcgcgcgcgcgcgcggcagttcggccacgtccctggccacgtcgcgggcgatctcgccatcttcgccggccatgaacattttccggctgactggggacctgtcccacctggcggccatcgtcatcctgctgctgaagatctggaagacgcgctcctgcgccggtatttctgggaaaagccagcttctgtttgcactggtcttcacaactcgttacctggatctttttacttcatttatttcattgtataacacatctatgaaggttatctaccttgcctgctcctatgccacagtgtacctgatctacctgaaatttaaggcaacctacgatggaaatcatgataccttccgagtggagtttctggtggtccctgtgggaggcctctcatttttagttaatcacgatttctctcctcttgagatcctctggaccttctccatctacctggagtccgtggctatccttccgcagctgtttatgatcagcaagactggggaggccgagaccatcaccacccactacctgttcttcctgggcctctatcgtgctttgtatcttgtcaactggatctggcgcttctactttgagggcttctttgacctcattgctgtggtggccggcgtagtccagaccatcctatactgtgacttcttctacttgtacattacaaaagtactcaagggaaagaagctcagtttgccagcataagtgccaaagaccatcaccagcatctgtccttcagggtgctacaggtagatcttgtagtcagtgcctggttataaacctgtgatggtgtagcttctgacatctggacgtaagaag

SEQ ID NO: 363356 - DNA, 2866 bp, Homo sapiens
  misc_feature (2866)..(2866): n is a, c, g, or t
cgcgcgcgcgcgcgcggcagttcggccacgtccctggccacgtcgcgggcgatctcgccatcttcgccgcttcctctcaggggccgccgcctcctgagccgcccagccccggggccgccgcgctgcgccgaccgccaccgccgccgccgccatgaacattttccggctgactggggacctgtcccacctggcggccatcgtcatcctgctgctgaagatctggaagacgcgctcctgcgccggtatttctgggaaaagccagcttctgtttgcactggtcttcacaactcgttacctggatctttttacttcatttatttcattgtataacacatctatgaaggttatctaccttgcctgctcctatgccacagtgtacctgatctacctgaaatttaaggcaacctacgatggaaatcatgataccttccgagtggagtttctggtggtccctgtgggaggcctctcatttttagttaatcacgatttctctcctcttgagatcctctggaccttctccatctacctggagtccgtggctatccttccgcagctgtttatgatcagcaagactggggaggccgagaccatcaccacccactacctgttcttcctgggcctctatcgtgctttgtatcttgtcaactggatctggcgcttctactttgagggcttctttgacctcattgctgtggtggccggcgtagtccagaccatcctatactgtgacttcttctacttgtacattacaaaagtactcaagggaaagaagctcagtttgccagcataagtgccaaagaccatcaccagcatctgtccttcagggtgctcggacagaattcttaccacagcaaaggcataagatgcttgatacggaaaatcagaaacttaactcttttgttgcagatagtcatcagtggctctgtaaaaacgcagaggaaaagagccagaaggtttctgtttaatgcatcttgccttatctttttttattactgtgtacaaagatttttttacacaaagaaacttaatgctgtattaataaattcagtgtgtagcttcaattgggatagttccaaaagtgaagattttgtgaggaataagtgcaaattttttttttattttaaaaaattctttgaaactcttaagtctttgtgtctgcaatgaaattgtactccttgacagttgatagattatatattcttccatccctcaaacttgcattccactatatttattttttggcaaaagatgagctgtatttgtttgaaatctgagacactatgttcaattggatgtatctgttcaaatttattcccacgtgacgtggaagtccttcgttggatgtcacaacactacatttaaggttggtaaggatgacttggaggtccatggttttcattaccaacattttaagattctgaatgtcgatggagtctcactgaagagtcaccaaaggtgcctgccctcctcccctgctgggaagtgtcagttggagactgtcccaagggtgctgaagaatccagtggcaggggttctggctgctttccatctgagtgtgggatgggaggggtgttcatgatcatttggatatagcaatctactctgagaaatggaacacaaggagttacctatcactttcacttataattccaaaagatgactacaaccatgtccatgctcagattcaaacagttttccatatcacttttgggtggtaagatgatttacagttttttttttaattggcagcaccactaaccattccttacattcttttttgtatgtgtggttttctttttatttaacccgcagccgacatcgtagtttcttgttttgttttgttttacagagctgttgcatgacttatgttaccatcctaaaaaacactatattaaacatggaataaattgtctttttatgaattaggctttttgaacatcctgtgttgggatttttttgtttttcaattggcaacaaaagctctgtagggctgcagacatttaaagttcacataatcatctgtaagacattatgtattttgtggaaatactagaatttttttcctgattttgccattatatggatttgctattttttgattaatgcaaaagtatatgactttgttttttatgtgatacaccataaatattaaagtgttgaatactaacagtgctgactacaagaaggatgtagtattttggctttctgcattacaacgtcttctggaggaagggagcaggatgggtttcatttgtatctagtgtgtgtcttaacatctttctaaatcggcagtgtaactgcatagtttaacttcctgtctgtctccctcattttactcttccctccttgtcttatgttttggcttttgtgtatcagagcatctttctttgcagcatcctagtcttgcttcagtttctgtggtctcttttcatcctgcttgaagattcggagtgtggaaggaggctaggaagtctggtgcagtaggtgagcagacctcttgctgcccagcccagggtgggtggggcgcacacctgtctttgtgcatgcaaatctgatacacctggcgcatcctctggagagcacaacgcatggaaaggtctggaagctctgtgtagccattccttctgcagtcatcctacccaagtaaaagtaaccttggctatgttaccaccgttttggtcacccaggaggacatcttagcaagggtgcctgcgagggagtgtgggactgggcctcatcctcgccggcgttggaaaccaaggccttgtatgccacgccttatgaagcactgtttcacagttactttcacttcccgaataaaggttaccaggtaattaatatttttaaaaaaacacaaaaaaaaggn

SEQ ID NO: 363357 - DNA, 3038 bp, Homo sapiens
ggggttcgccgttactctgcgcacatcgctattgcggttccgaggcagtgggaagagatgcggcccctggacatcgtcgagctggcggaaccggaggaagtggaggtgctggagcccgaggaggatttcgagcagtttctgctcccggtcatcaacgagatgcgcgaggacatcgcgtcgctgacgcgcgagcacgggcgggcgtacctgcggaaccggagcaagctgtgggagatggacaatatgctcatccagatcaaaacgcaggtggaggcctcggaggagagcgccctcaaccacctccagaacccgggccgccgcgctgcgccgaccgccaccgccgccgccgccatgaacattttccggctgactggggacctgtcccacctggcggccatcgtcatcctgctgctgaagatctggaagacgcgctcctgcgccggtatttctgggaaaagccagcttctgtttgcactggtcttcacaactcgttacctggatctttttacttcatttatttcattgtataacacatctatgaaggttatctaccttgcctgctcctatgccacagtgtacctgatctacctgaaatttaaggcaacctacgatggaaatcatgataccttccgagtggagtttctggtggtccctgtgggaggcctctcatttttagttaatcacgatttctctcctcttgagatcctctggaccttctccatctacctggagtccgtggctatccttccgcagctgtttatgatcagcaagactggggaggccgagaccatcaccacccactacctgttcttcctgggcctctatcgtgctttgtatcttgtcaactggatctggcgcttctactttgagggcttctttgacctcattgctgtggtggccggcgtagtccagaccatcctatactgtgacttcttctacttgtacattacaaaagtactcaagggaaagaagctcagtttgccagcataagtgccaaagaccatcaccagcatctgtccttcagggtgctcggacagaattcttaccacagcaaaggcataagatgcttgatacggaaaatcagaaacttaactcttttgttgcagatagtcatcagtggctctgtaaaaacgcagaggaaaagagccagaaggtttctgtttaatgcatcttgccttatctttttttattactgtgtacaaagatttttttacacaaagaaacttaatgctgtattaataaattcagtgtgtagcttcaattgggatagttccaaaagtgaagattttgtgaggaataagtgcaaattttttttttattttaaaaaattctttgaaactcttaagtctttgtgtctgcaatgaaattgtactccttgacagttgatagattatatattcttccatccctcaaacttgcattccactatatttattttttggcaaaagatgagctgtatttgtttgaaatctgagacactatgttcaattggatgtatctgttcaaatttattcccacgtgacgtggaagtccttcgttggatgtcacaacactacatttaaggttggtaaggatgacttggaggtccatggttttcattaccaacattttaagattctgaatgtcgatggagtctcactgaagagtcaccaaaggtgcctgccctcctcccctgctgggaagtgtcagttggagactgtcccaagggtgctgaagaatccagtggcaggggttctggctgctttccatctgagtgtgggatgggaggggtgttcatgatcatttggatatagcaatctactctgagaaatggaacacaaggagttacctatcactttcacttataattccaaaagatgactacaaccatgtccatgctcagattcaaacagttttccatatcacttttgggtggtaagatgatttacagttttttttttaattggcagcaccactaaccattccttacattcttttttgtatgtgtggttttctttttatttaacccgcagccgacatcgtagtttcttgttttgttttgttttacagagctgttgcatgacttatgttaccatcctaaaaaacactatattaaacatggaataaattgtctttttatgaattaggctttttgaacatcctgtgttgggatttttttgtttttcaattggcaacaaaagctctgtagggctgcagacatttaaagttcacataatcatctgtaagacattatgtattttgtggaaatactagaatttttttcctgattttgccattatatggatttgctattttttgattaatgcaaaagtatatgactttgttttttatgtgatacaccataaatattaaagtgttgaatactaacagtgctgactacaagaaggatgtagtattttggctttctgcattacaacgtcttctggaggaagggagcaggatgggtttcatttgtatctagtgtgtgtcttaacatctttctaaatcggcagtgtaactgcatagtttaacttcctgtctgtctccctcattttactcttccctccttgtcttatgttttggcttttgtgtatcagagcatctttctttgcagcatcctagtcttgcttcagtttctgtggtctcttttcatcctgcttgaagattcggagtgtggaaggaggctaggaagtctggtgcagtaggtgagcagacctcttgctgcccagcccagggtgggtggggcgcacacctgtctttgtgcatgcaaatctgatacacctggcgcatcctctggagagcacaacgcatggaaaggtctggaagctctgtgtagccattccttctgcagtcatcctacccaagtaaaagtaaccttggctatgttaccaccgttttggtcacccaggaggacatcttagcaagggtgcctgcgagggagtgtgggactgggcctcatcctcgccggcgttggaaaccaaggccttgtatgccacgccttatgaagcactgtttcacagttactttcacttcccgaataaaggttaccaggtaattaa

SEQ ID NO: 363358 - DNA, 2791 bp, Homo sapiens
cgcgcgcgcgcgcgcggcagttcggccacgtccctggccacgtcgcgggcgatctcgccatcttcgccgcttcctctcaggggccgccgcctcctgagccgcccagccccggggccgccgcgctgcgccgaccgccaccgccgccgccgccatgaacattttccggctgactggggacctgtcccacctggcggccatcgtcatcctgctgctgaagatctggaagacgcgctcctgcgccggtatttctgggaaaagccagcttctgtttgcactggtcttcacaactcgttacctggatctttttacttcatttatttcattgtataacacatctatgaaggttatctaccttgcctgctcctatgccacagtgtacctgatctacctgaaatttaaggcaacctacgatggaaatcatgataccttccgagtggagtttctggtggtccctgtgggaggcctctcatttttagttaatcacgatttctctcctcttgagatcctctggaccttctccatctacctggagtccgtggctatccttccgcagctgtttatgatcagcaagactggggaggccgagaccatcaccacccactacctgttcttcctgggcctctatcgtgctttgtatcttgtcaactggatctggcgcttctactttgagggcttctttgacctcattgctgtggtggccggcgtagtccagaccatcctatactgtgacttcttctacttgtacattacaaaagtactcaagggaaagaagctcagtttgccagcataagtgccaaagaccatcaccagcatctgtccttcagggtgctcggacagaattcttaccacagcaaaggcataagatgcttgatacggaaaatcagaaacttaactcttttgttgcagatagtcatcagtggctctgtaaaaacgcagaggaaaagagccagaaggtttctgtttaatgcatcttgccttatctttttttattactgtgtacaaagatttttttacacaaagaaacttaatgctgtattaataaattcagtgtgtagcttcaattgggatagttccaaaagtgaagattttgtgaggaataagtgcaaattttttttttattttaaaaaattctttgaaactcttaagtctttgtgtctgcaatgaaattgtactccttgacagttgatagattatatattcttccatccctcaaacttgcattccactatatttattttttggcaaaagatgagctgtatttgtttgaaatctgagacactatgttcaattggatgtatctgttcaaatttattcccacgtgacgtggaagtccttcgttggatgtcacaacactacatttaaggttggtaaggatgacttggaggtccatggttttcattaccaacattttaagattctgaatgtcgatggagtctcactgaagagtcaccaaaggtgcctgccctcctcccctgctgggaagtgtcagttggagactgtcccaagggtgctgaagaatccagtggcaggggttctggctgctttccatctgagtgtgggatgggaggggtgttcatgatcatttggatatagcaatctactctgagaaatggaacacaaggagttacctatcactttcacttataattccaaaagatgactacaaccatgtccatgctcagattcaaacagttttccatatcacttttgggtggtaagatgatttacagttttttttttaattggcagcaccactaaccattccttacattcttttttgtatgtgtggttttctttttatttaacccgcagccgacatcgtagtttcttgttttgttttgttttacagagctgttgcatgacttatgttaccatcctaaaaaacactatattaaacatggaataaattgtctttttatgaattaggctttttgaacatcctgtgttgggatttttttgtttttcaattggcaacaaaagctctgtagggctgcagacatttaaagttcacataatcatctgtaagacattatgtattttgtggaaatactagaatttttttcctgattttgccattatatggatttgctattttttgattaatgcaaaagtatatgactttgttttttatgtgatacaccataaatattaaagtgttgaatactaacagtgctgactacaagaaggatgtagtattttggctttctgcattacaacgtcttctggaggaagggagcaggatgggtttcatttgtatctagtgtgtgtcttaacatctttctaaatcggcagtgtaactgcatagtttaacttcctgtctgtctccctcattttactcttccctccttgtcttatgttttggcttttgtgtatcagagcatctttctttgcagcatcctagtcttgcttcagtttctgtggtctcttttcatcctgcttgaagattcggagtgtggaaggaggctaggaagtctggtgcagtaggtgagcagacctcttgctgcccagcccagggtgggtggggcgcacacctgtctttgtgcatgcaaatctgatacacctggcgcatcctctggagagcacaacgcatggaaaggtctggaagctctgtgtagccattccttctgcagtcatcctacggaggacatcttagcaagggtgcctgcgagggagtgtgggactgggcctcatcctcgccggcgttggaaaccaaggccttgtatgccacgccttatgaagcactgtttcacagttactttcacttcccgaataaaggttaccaggtaattaa

SEQ ID NO: 363359 - DNA, 2609 bp, Homo sapiens
  misc_feature (2585)..(2586): n is a, c, g, or t
cgcgcgcgcgcgcgcggcagttcggccacgtccctggccacgtcgcgggcgatctcgccatcttcgccgcttcctctcaggggccgccgcctcctgagccgcccagccccggggccgccgcgctgcgccgaccgccaccgccgccgccgccatgaacattttccggctgactggggacctgtcccacctggcggccatcgtcatcctgctgctgaagatctggaagacgcgctcctgcgccggtatttctgggaaaagccagcttctgtttgcactggtcttcacaactcgttacctggatctttttacttcatttatttcattgtataacacatctatgaaggttatctaccttgcctgctcctatgccacagtgtacctgatctacctgaaatttaaggcaacctacgatggaaatcatgataccttccgagtggagtttctggtggtccctgtgggaggcctctcatttttagttaatcacgatttctctcctcttgagatcctctggaccttctccatctacctggagtccgtggctatccttccgcagctgtttatgatcagcaagactggggaggccgagaccatcaccacccactacctgttcttcctgggcctctatcgtgctttgtatcttgtcaactggatctggcgcttctactttgagggcttctttgacctcattgctgtggtggccggcgtagtccagaccatcctatactgtgacttcttctacttgtacattacaaaagtactcaagggaaagaagctcagtttgccagcataagtgccaaagaccatcaccagcatctgtccttcagggtgctcggacagaattcttaccacagcaaaggcataagatgcttgatacggaaaatcagaaacttaactcttttgttgcagatagtcatcagtggctctgtaaaaacgcagaggaaaagagccagaaggtttctgtttaatgcatcttgccttatctttttttattactgtgtacaaagatttttttacacaaagaaacttaatgctgtattaataaattcagtgtgtagcttcaattgggatagttccaaaagtgaagattttgtgaggaataagtgcaaattttttttttattttaaaaaattctttgaaactcttaagtctttgtgtctgcaatgaaattgtactccttgacagttgatagattatatattcttccatccctcaaacttgcattccactatatttattttttggcaaaagatgagctgtatttgtttgaaatctgagacactatgttcaattggatgtatctgttcaaatttattcccacgtgacgtggaagtccttcgttggatgtcacaacactacatttaaggttggtaaggatgacttggaggtccatggttttcattaccaacattttaagattctgaatgtcgatggagtctcactgaagagtcaccaaaggtgcctgccctcctcccctgctgggaagtgtcagttggagactgtcccaagggtgctgaagaatccagtggcaggggttctggctgctttccatctgagtgtgggatgggaggggtgttcatgatcatttggatatagcaatctactctgagaaatggaacacaaggagttacctatcactttcacttataattccaaaagatgactacaaccatgtccatgctcagattcaaacagttttccatatcacttttgggtggtaagatgatttacagttttttttttaattggcagcaccactaaccattccttacattcttttttgtatgtgtggttttctttttatttaacccgcagccgacatcgtagtttcttgttttgttttgttttacagagctgttgcatgacttatgttaccatcctaaaaaacactatattaaacatggaataaattgtctttttatgaattaggctttttgaacatcctgtgttgggatttttttgtttttcaattggcaacaaaagctctgtagggctgcagacatttaaagttcacataatcatctgtaagacattatgtattttgtggaaatactagaatttttttcctgattttgccattatatggatttgctattttttgattaatgcaaaagtatatgactttgttttttatgtgatacaccataaatattaaagtgttgaatactaacagtgctgactacaagaaggatgtagtattttggctttctgcattacaacgtcttctggaggaagggagcaggatgggtttcatttgtatctagtgtgtgtcttaacatctttctaaatcggcagtgtaactgcatagtttaacttcctgtctgtctccctcattttactcttccctccttgtcttatgttttggcttttgtgtatcagagcatctttctttgcagcatcctagtcttgcttcagtttctgtggtctcttttcatcctgcttgaagattcggagtgtggaaggaggctaggaagtctggtgcagtaggtgagcagacctcttgctgcccagcccagggtgggtggggcgcacacctgtctttgtgcatgcaaatctgatacacctggcgcatcctctggatgcacaannccggaagggtaccggagctcgaa

SEQ ID NO: 363360 - DNA, 2772 bp, Homo sapiens
cgcgcgcgcgcgcgcggcagttcggccacgtccctggccacgtcgcgggcgatctcgccatcttcgccgcttcctctcaggggccgccgcctcctgagccgcccagccccggggccgccgcgctgcgccgaccgccaccgccgccgccgccatgaacattttccggctgactggggacctgtcccacctggcggccatcgtcatcctgctgctgaagatctggaagacgcgctcctgcgccacttcatttatttcattgtataacacatctatgaaggttatctaccttgcctgctcctatgccacagtgtacctgatctacctgaaatttaaggcaacctacgatggaaatcatgataccttccgagtggagtttctggtggtccctgtgggaggcctctcatttttagttaatcacgatttctctcctcttgagatcctctggaccttctccatctacctggagtccgtggctatccttccgcagctgtttatgatcagcaagactggggaggccgagaccatcaccacccactacctgttcttcctgggcctctatcgtgctttgtatcttgtcaactggatctggcgcttctactttgagggcttctttgacctcattgctgtggtggccggcgtagtccagaccatcctatactgtgacttcttctacttgtacattacaaaagtactcaagggaaagaagctcagtttgccagcataagtgccaaagaccatcaccagcatctgtccttcagggtgctcggacagaattcttaccacagcaaaggcataagatgcttgatacggaaaatcagaaacttaactcttttgttgcagatagtcatcagtggctctgtaaaaacgcagaggaaaagagccagaaggtttctgtttaatgcatcttgccttatctttttttattactgtgtacaaagatttttttacacaaagaaacttaatgctgtattaataaattcagtgtgtagcttcaattgggatagttccaaaagtgaagattttgtgaggaataagtgcaaattttttttttattttaaaaaattctttgaaactcttaagtctttgtgtctgcaatgaaattgtactccttgacagttgatagattatatattcttccatccctcaaacttgcattccactatatttattttttggcaaaagatgagctgtatttgtttgaaatctgagacactatgttcaattggatgtatctgttcaaatttattcccacgtgacgtggaagtccttcgttggatgtcacaacactacatttaaggttggtaaggatgacttggaggtccatggttttcattaccaacattttaagattctgaatgtcgatggagtctcactgaagagtcaccaaaggtgcctgccctcctcccctgctgggaagtgtcagttggagactgtcccaagggtgctgaagaatccagtggcaggggttctggctgctttccatctgagtgtgggatgggaggggtgttcatgatcatttggatatagcaatctactctgagaaatggaacacaaggagttacctatcactttcacttataattccaaaagatgactacaaccatgtccatgctcagattcaaacagttttccatatcacttttgggtggtaagatgatttacagttttttttttaattggcagcaccactaaccattccttacattcttttttgtatgtgtggttttctttttatttaacccgcagccgacatcgtagtttcttgttttgttttgttttacagagctgttgcatgacttatgttaccatcctaaaaaacactatattaaacatggaataaattgtctttttatgaattaggctttttgaacatcctgtgttgggatttttttgtttttcaattggcaacaaaagctctgtagggctgcagacatttaaagttcacataatcatctgtaagacattatgtattttgtggaaatactagaatttttttcctgattttgccattatatggatttgctattttttgattaatgcaaaagtatatgactttgttttttatgtgatacaccataaatattaaagtgttgaatactaacagtgctgactacaagaaggatgtagtattttggctttctgcattacaacgtcttctggaggaagggagcaggatgggtttcatttgtatctagtgtgtgtcttaacatctttctaaatcggcagtgtaactgcatagtttaacttcctgtctgtctccctcattttactcttccctccttgtcttatgttttggcttttgtgtatcagagcatctttctttgcagcatcctagtcttgcttcagtttctgtggtctcttttcatcctgcttgaagattcggagtgtggaaggaggctaggaagtctggtgcagtaggtgagcagacctcttgctgcccagcccagggtgggtggggcgcacacctgtctttgtgcatgcaaatctgatacacctggcgcatcctctggagagcacaacgcatggaaaggtctggaagctctgtgtagccattccttctgcagtcatcctacccaagtaaaagtaaccttggctatgttaccaccgttttggtcacccaggaggacatcttagcaagggtgcctgcgagggagtgtgggactgggcctcatcctcgccggcgttggaaaccaaggccttgtatgccacgccttatgaagcactgtttcacagttactttcacttcccgaataaaggttaccaggtaattaa

SEQ ID NO: 363361 - DNA, 2188 bp, Homo sapiens
cgcgcgcgcgcgcgcggcagttcggccacgtccctggccacgtcgcgggcgatctcgccatcttcgccgcttcctctcaggggccgccgcctcctgagccgcccagccccggggccgccgcgctgcgccgaccgccaccgccgccgccgccatgaacattttccggctgactggggacctgtcccacctggcggccatcgtcatcctgctgctgaagatctggaagacgcgctcctgcgccggtatttctgggaaaagccagcttctgtttgcactggtcttcacaactcgttacctggatctttttacttcatttatttcattgtataacacatctatgaaggttatctaccttgcctgctcctatgccacagtgtacctgatctacctgaaatttaaggcaacctacgatggaaatcatgataccttccgagtggagtttctggtggtccctgtgggaggcctctcatttttagttaatcacgatttctctcctcttgagatcctctggaccttctccatctacctggagtccgtggctatccttccgcagctgtttatgatcagcaagactggggaggccgagaccatcaccacccactacctgttcttcctgggcctctatcgtgctttgtatcttgtcaactggatctggcgcttctactttgagggcttctttgacctcattgctgtggtggccggcgtagtccagaccatcctatactgtgacttcttctacttgtacattacaaaagtactcaagggaaagaagctcagtttgccagcataagtgccaaagaccatcaccagcatctgtccttcagggtgctcggacagaattcttaccacagcaaaggcataagatgcttgatacggaaaatcagaaacttaactcttttgttgcagatagtcatcagtggctctgtaaaaacgcagaggaaaagagccagaaggtttctgtttaatgcatcttgccttatctttttttattactgtgtacaaagatttttttacacaaagaaacttaatgctgtattaataaattcagtgtgtagcttcaattgggatagttccaaaagtgaagattttgtgaggaataagtgcaaattttttttttattttaaaaaattctttgaaactcttaagtctttgtgtctgcaatgaaattgtactccttgacagttgatagattatatattcttccatccctcaaacttgcattccactatatttattttttggcaaaagatgagctgtatttgtttgaaatctgagacactatgttcaattggatgtatctgttcaaatttattcccacgtgacgtggaagtccttcgttggatgtcacaacactacatttaaggttggtaaggatgacttggaggtccatggttttcattaccaacattttaagattctgaatgtcgatggagtctcactgaagagtcaccaaaggtgcctgccctcctcccctgctgggaagtgtcagttggagactgtcccaagggtgctgaagaatccagtggcaggggttctggctgctttccatctgagtgtgggatgggaggggtgttcatgatcatttggatatagcaatctactctgagaaatggaacacaaggagttacctatcactttcacttataattccaaaagatgactacaaccatgtccatgctcagattcaaacagttttccatatcacttttgggtggtaagatgatttacagttttttttttaattggcagcaccactaaccattccttacattcttttttgtatgtgtggttttctttttatttaacccgcagccgacatcgtagtttcttgttttgttttgttttacagagctgttgcatgacttatgttaccatcctaaaaaacactatattaaacatggaataaattgtctttttatgaattaggctttttgaacatcctgtgttgggatttttttgtttttcaattggcaacaaaagctctgtagggctgcagacatttaaagttcacataatcatctgtaagacattatgtattttgtggaaatactagaatttttttcctgattttgccattatatggatttgctattttttgattaatgcaaaagtatatgactttgttttttatgtgatacaccataaatattaaagtgttgaatactaacagtgctgactacaagaagga

SEQ ID NO: 363362 - DNA, 2644 bp, Homo sapiens
cccgccgtaccagttgcggtgtttcattcataaagcagcagatgaggccatgcttctccctgtcgacacctccttgtcctctcaacataactgtcctgcaggcacagacatatttccagacaatgcaggcgatgctcctgctacaacgacatggtgaataccaacccatctctcaagaatacctaaaaattaaggttttctttttccaacgtgcccacaccaccccctatgtcccgcctgaagtagttattaagaaagttgtcccttttcccttttctataaccaaatagacaggaatgtaagattctccccggggcctgaaagcttaaggggatgaataactcctccccttctcaggcccagttccaaggtgcaagactggggaggccgagaccatcaccacccactacctgttcttcctgggcctctatcgtgctttgtatcttgtcaactggatctggcgcttctactttgagggcttctttgacctcattgctgtggtggccggcgtagtccagaccatcctatactgtgacttcttctacttgtacattacaaaagtactcaagggaaagaagctcagtttgccagcataagtgccaaagaccatcaccagcatctgtccttcagggtgctcggacagaattcttaccacagcaaaggcataagatgcttgatacggaaaatcagaaacttaactcttttgttgcagatagtcatcagtggctctgtaaaaacgcagaggaaaagagccagaaggtttctgtttaatgcatcttgccttatctttttttattactgtgtacaaagatttttttacacaaagaaacttaatgctgtattaataaattcagtgtgtagcttcaattgggatagttccaaaagtgaagattttgtgaggaataagtgcaaattttttttttattttaaaaaattctttgaaactcttaagtctttgtgtctgcaatgaaattgtactccttgacagttgatagattatatattcttccatccctcaaacttgcattccactatatttattttttggcaaaagatgagctgtatttgtttgaaatctgagacactatgttcaattggatgtatctgttcaaatttattcccacgtgacgtggaagtccttcgttggatgtcacaacactacatttaaggttggtaaggatgacttggaggtccatggttttcattaccaacattttaagattctgaatgtcgatggagtctcactgaagagtcaccaaaggtgcctgccctcctcccctgctgggaagtgtcagttggagactgtcccaagggtgctgaagaatccagtggcaggggttctggctgctttccatctgagtgtgggatgggaggggtgttcatgatcatttggatatagcaatctactctgagaaatggaacacaaggagttacctatcactttcacttataattccaaaagatgactacaaccatgtccatgctcagattcaaacagttttccatatcacttttgggtggtaagatgatttacagttttttttttaattggcagcaccactaaccattccttacattcttttttgtatgtgtggttttctttttatttaacccgcagccgacatcgtagtttcttgttttgttttgttttacagagctgttgcatgacttatgttaccatcctaaaaaacactatattaaacatggaataaattgtctttttatgaattaggctttttgaacatcctgtgttgggatttttttgtttttcaattggcaacaaaagctctgtagggctgcagacatttaaagttcacataatcatctgtaagacattatgtattttgtggaaatactagaatttttttcctgattttgccattatatggatttgctattttttgattaatgcaaaagtatatgactttgttttttatgtgatacaccataaatattaaagtgttgaatactaacagtgctgactacaagaaggatgtagtattttggctttctgcattacaacgtcttctggaggaagggagcaggatgggtttcatttgtatctagtgtgtgtcttaacatctttctaaatcggcagtgtaactgcatagtttaacttcctgtctgtctccctcattttactcttccctccttgtcttatgttttggcttttgtgtatcagagcatctttctttgcagcatcctagtcttgcttcagtttctgtggtctcttttcatcctgcttgaagattcggagtgtggaaggaggctaggaagtctggtgcagtaggtgagcagacctcttgctgcccagcccagggtgggtggggcgcacacctgtctttgtgcatgcaaatctgatacacctggcgcatcctctggagagcacaacgcatggaaaggtctggaagctctgtgtagccattccttctgcagtcatcctacccaagtaaaagtaaccttggctatgttaccaccgttttggtcacccaggaggacatcttagcaagggtgcctgcgagggagtgtgggactgggcctcatcctcgccggcgttggaaaccaaggccttgtatgccacgccttatgaagcactgtttcacagttactttcacttcccgaataaaggttaccaggtaattaa

SEQ ID NO: 363363 - DNA, 1856 bp, Homo sapiens
  misc_feature (1776)..(1776): n is a, c, g, or t
  misc_feature (1778)..(1778): n is a, c, g, or t
  misc_feature (1780)..(1780): n is a, c, g, or t
cgcgcgcgcgcgcgcggcagttcggccacgtccctggccacgtcgcgggcgatctcgccatcttcgccgcttcctctcaggggccgccgcctcctgagccgcccagccccggggccgccgcgctgcgccgaccgccaccgccgccgccgccatgaacattttccggctgactggggacctgtcccacctggcggccatcgtcatcctgctgctgaagatctggaagacgcgctcctgcgccggtatttctgggaaaagccagcttctgtttgcactggtcttcacaactcgttacctggatctttttacttcatttatttcattgtataacacatctatgaaggttatctaccttgcctgctcctatgccacagtgtacctgatctacctgaaatttaaggcaacctacgatggaaatcatgataccttccgagtggagtttctggtggtccctgtgggaggcctctcatttttagttaatcacgatttctctcctcttgagatcctctggaccttctccatctacctggagtccgtggctatccttccgcagctgtttatgatcagcaagactggggaggccgagaccatcaccacccactacctgttcttcctgggcctctatcgtgctttgtatcttgtcaactggatctggcgcttctactttgagggcttctttgacctcattgctgtggtggccggcgtagtccagaccatcctatactgtgacttcttctacttgtacattacaaaagtactcaagggaaagaagctcagtttgccagcataagtgccaaagaccatcaccagcatctgtccttcagggtgctcggacagaattcttaccacagcaaaggcataagatgcttgatacggaaaatcagaaacttaactcttttgttgcagatagtcatcagtggctctgtaaaaacgcagaggaaaagagccagaaggtttctgtttaatgcatcttgccttatctttttttattactgtgtacaaagatttttttacacaaagaaacttaatgctgtattaataaattcagtgtgtagcttcaattgggatagttccaaaagtgaagattttgtgaggaataagtgcaaattttttttttattttaaaaaattctttgaaactcttaagtctttgtgtctgcaatgaaattgtactccttgacagttgatagattatatattcttccatccctcaaacttgcattccactatatttattttttggcaaaagatgagctgtatttgtttgaaatctgagacactatgttcaattggatgtatctgttcaaatttattcccacgtgacgtggaagtccttcgttggatgtcacaacactacatttaaggttggtaaggatgacttggaggtccatggttttcattaccaacattttaagattctgaatgtcgatggagtctcactgaagagtcaccaaaggtgcctgccctcctcccctgctgggaagtgtcagttggagactgtcccaagggtgctgaagaatccagtggcaggggttctggctgctttccatctgagtgtgggatgggaggggtgttcatgatcatttggatatagcaatctactctgagaaatggaacacaaggagttacctatcactttcacttataattccaaaagatgactacaaccatgtccatgctcagattcaaacagttttccatatcacttttgggtggtaagatgatttacagtttttttttaatgtggaggaccactaacattccttacatcttttgnangngggggccttaataaaccgcaccgacaacggagtcggtcgcgtgtgtcacagcgggcggttttcaccaaggctttag

SEQ ID NO: 363364 - DNA, 1519 bp, Homo sapiens
  misc_feature (1400)..(1400): n is a, c, g, or t
  misc_feature (1418)..(1418): n is a, c, g, or t
  misc_feature (1425)..(1425): n is a, c, g, or t
  misc_feature (1442)..(1442): n is a, c, g, or t
  misc_feature (1454)..(1454): n is a, c, g, or t
  misc_feature (1500)..(1500): n is a, c, g, or t
  misc_feature (1518)..(1518): n is a, c, g, or t
cgcgcgcgcgcgcgcggcagttcggccacgtccctggccacgtcgcgggcgatctcgccatcttcgccgcttcctctcaggggccgccgcctcctgagccgcccagccccggggccgccgcgctgcgccgaccgccaccgccgccgccgccatgaacattttccggctgactggggacctgtcccacctggcggccatcgtcatcctgctgctgaagatctggaagacgcgctcctgcgccggtatttctgggaaaagccagcttctgtttgcactggtcttcacaactcgttacctggatctttttacttcatttatttcattgtataacacatctatgaaggttatctaccttgcctgctcctatgccacagtgtacctgatctacctgaaatttaaggcaacctacgatggaaatcatgataccttccgagtggagtttctggtggtccctgtgggaggcctctcatttttagttaatcacgatttctctcctcttgagatcctctggaccttctccatctacctggagtccgtggctatccttccgcagctgtttatgatcagcaagactggggaggccgagaccatcaccacccactacctgttcttcctgggcctctatcgtgctttgtatcttgtcaactggatctggcgcttctactttgagggcttctttgacctcattgctgtggtggccggcgtagtccagaccatcctatactgtgacttcttctacttgtacattacaaaagtactcaagggaaagaagctcagtttgccagcataagtgccaaagaccatcaccagcatctgtccttcagggtgctcggacagaattcttaccacagcaaaggcataagatgcttgatacggaaaatcagaaacttaactcttttgttgcagatagtcatcagtggctctgtaaaaacgcagaggaaaagagccagaaggtttctgtttaatgcatcttgccttatctttttttattactgtgtacaaagatttttttacacaaagaaacttaatgctgtattaataaattcagtgtgtagcttcaattgggatagttccaaaagtgaagattttgtgaggaataagtgcaaattttttttttattttaaaaaattctttgaaactcttaagtctttgtgtctgcaatgaaattgtactccttgacagttgatagattatatattcttccatccctcaaacttgcattccactatatttattttttggcaaaagatgagctgtatttgtttgaaatctgagacactatgttcaattggatgtatctgttcaaatttattcccacgtgacgtggaagtccttcgttggatgtcacaacactacatttaaggttggttacccaaccattttgaagattctggaatgtncgatgggagtctccactngaagagncaccccaaagggcgctngcccctgcctgncccctggcttggggaaagtgtcccagtttgggagactgtgcccccnaagggtgcctggaaagant

SEQ ID NO: 363365 - DNA, 1061 bp, Homo sapiens
cgcgcgcgcgcgcgcggcagttcggccacgtccctggccacgtcgcgggcgatctcgccatcttcgccgcttcctctcaggggccgccgcctcctgagccgcccagccccggggccgccgcgctgcgccgaccgccaccgccgccgccgccatgaacattttccggctgactggggacctgtcccacctggcggccatcgtcatcctgctgctgaagatctggaagacgcgctcctgcgccggtatttctgggaaaagccagcttctgtttgcactggtcttcacaactcgttacctggatctttttacttcatttatttcattgtataacacatctatgaaggttatctaccttgcctgctcctatgccacagtgtacctgatctacctgaaatttaaggcaacctacgatggaaatcatgataccttccgagtggagtttctggtggtccctgtgggaggcctctcatttttagttaatcacgatttctctcctcttgagatcctctggaccttctccatctacctggagtccgtggctatccttccgcagctgtttatgatcagcaagactggggaggccgagaccatcaccacccactacctgttcttcctgggcctctatcgtgctttgtatcttgtcaactggatctggcgcttctactttgagggcttctttgacctcattgctgtggtggccggcgtagtccagaccatcctatactgtgacttcttctacttgtacattacaaaagtactcaagggaaagaagctcagtttgccagcataagtgccaaagaccatcaccagcatctgtccttcagggtgctcggacagaattcttaccacagcaaaggcataagatgcttgatacggaaaatcagaaacttaactcttttgttgcagatagtcatcagtggctctgtaaaaacgcagaggaaaagagccagaaggtttctgtttaatgcatcttgccttatctttttttattactgtgtacaaagatttttttacacaaagaaacttaatgctgtattaataaattcagtgtgtagcttcaa

SEQ ID NO: 363366 - DNA, 940 bp, Homo sapiens
cgcgcgcgcgcgcgcggcagttcggccacgtccctggccacgtcgcgggcgatctcgccatcttcgccgcttcctctcaggggccgccgcctcctgagccgcccagccccggggccgccgcgctgcgccgaccgccaccgccgccgccgccatgaacattttccggctgactggggacctgtcccacctggcggccatcgtcatcctgctgctgaagatctggaagacgcgctcctgcgccggtatttctgggaaaagccagcttctgtttgcactggtcttcacaactcgttacctggatctttttacttcatttatttcattgtataacacatctatgaaggttatctaccttgcctgctcctatgccacagtgtacctgatctacctgaaatttaaggcaacctacgatggaaatcatgataccttccgagtggagtttctggtggtccctgtgggaggcctctcatttttagttaatcacgatttctctcctcttgagatcctctggaccttctccatctacctggagtccgtggctatccttccgcagctgtttatgatcagcaagactggggaggccgagaccatcaccacccactacctgttcttcctgggcctctatcgtgctttgtatcttgtcaactggatctggcgcttctactttgagggcttctttgacctcattgctgtggtggccggcgtagtccagaccatcctatactgtgacttcttctacttgtacattacaaaagtactcaagggaaagaagctcagtttgccagcataagtgccaaagaccatcaccagcatctgtccttcagggtgccgatctgggagatggccaattgggttcaccgtctggggggggctgcttattagtctcctggactaggggggcaagagatcacagtgtcatccaacgtgtcagaaggtgctc

SEQ ID NO: 363367 - DNA, 904 bp, Homo sapiens
cgcgcgcgcgcgcgcggcagttcggccacgtccctggccacgtcgcgggcgatctcgccatcttcgccgcttcctctcaggggccgccgcctcctgagccgcccagccccggggccgccgcgctgcgccgaccgccaccgccgccgccgccatgaacattttccggctgactggggacctgtcccacctggcggccatcgtcatcctgctgctgaagatctggaagacgcgctcctgcgccggtatttctgggaaaagccagcttctgtttgcactggtcttcacaactcgttacctggatctttttacttcatttatttcattgtataacacatctatgaaggttatctaccttgcctgctcctatgccacagtgtacctgatctacctgaaatttaaggcaacctacgatggaaatcatgataccttccgagtggagtttctggtggtccctgtgggaggcctctcatttttagttaatcacgatttctctcctcttgagatcctctggaccttctccatctacctggagtccgtggctatccttccgcagctgtttatgatcagcaagactggggaggccgagaccatcaccacccactacctgttcttcctgggcctctatcgtgctttgtatcttgtcaactggatctggcgcttctactttgagggcttctttgacctcattgctgtggtggccggcgtagtccagaccatcctatactgtgacttcttctacttgtacattacaaaagtactcaagggaaagaagctcagtttgccagcataagtgccaaagaccatcaccagcatctgtccttcagggtgctacaggtagatcttgtagtcagtgcctggttataaacctgtgatggtgtagcttctgacatctggacgtaagaag

SEQ ID NO: 363368 - DNA, 1009 bp, Homo sapiens
cccaagtgtggttgcagatttttcttggctatcttaaagagtaaagtaagcaaattacaaatcaaagaaactctgaaccagtggtcttcatccaagagagcctctggtggtcagaaggaaagtctcaagcattcagactgtggcaggaaccctgtcatggaatctggcagctaaacccgaaagcaagaggcttgaccactgcagaacactcgggtaggtaggaaacaatgaaagagcttccaaaatcaaaatcagaaacccaattccaggacttggtgactgcagtacttcctgcctgtcaccatctagggcagctcagatgtgcagtccagcatgaacacaccttgaggatgaggcagcgcatccctgctgctgccgccgctgatggcaccatcagggcagactaggtttgctgaccaggctaggtgtggaccagcacacctacctttccctaaatgggcccgtggcatgtgtcctttcaaaatgttcccttggcagtgtgctccttgcatggctttgctcctaggacacatccaaaagggtcccctgcacactgcgaagggcttctggggcgtgacctgtctttagtggttctgagtctcaggacttggggctgatgcagggcctctagctgaagggactttgatggaaatgtgcagacacaaatgttgcccaaggaccacgagtacagcaggtgctgcagttacggggcacgcccattcctaatcattgtgctttgtgtctcctcagggagaaacaaaggcagcgctgccctcgggggagcattggccctggcggaacgcagcagccgcgaaggatccagccagaggatgccacgccagcccagcgctaccaggctgcccaaggggggcgggcctgggaagagccctacacggggcagcacctaggatggggcagagacttgttgcatctttgtccccagcaaaggctacatgttacctccttcaattgataataaacctttctgagatgcagagggtccaggtca

SEQ ID NO: 363369 - DNA, 625 bp, Homo sapiens
gagagagagagagagagagagagagagagagagagagagagagagagatggcggcgcagggcgtagggcctgggccggggtcggcggcgcccccggggctggaggcggcccggcagaagctggcgctgcggcggaagaaggtgctgagcaccgaggagatggagctgtacgagctggcgcaggcggcgggcggcgctatcgaccccgacgtgttcaagatcctggtggacctgctgaagctgaacgtggcccccctcgccgtcttccagatgctcaagtccatgtgtgccgggcagaggctagcgagcgagccccaggaccctgcggccgtgtctctgcccacgtcgagcgtgcccgagacccgagggagaaacaaaggcagcgctgccctcgggggagcattggccctggcggaacgcagcagccgcgaaggatccagccagaggatgccacgccagcccagcgctaccaggctgcccaaggggggcgggcctgggaagagccctacacggggcagcacctaggatggggcagagacttgttgcatctttgtccccagcaaaggctacatgttacctccttcaattgataataaacctttctgagatgcagagggtccaggtca

SEQ ID NO: 363370 - DNA, 2369 bp, Homo sapiens
aagacagtctcgatctctgtcctgtggtatacagcatccagggaagtgcccagggaccagggcaggcagaggtcttcctgcctttaccccacctgggcccagttcctgcgcaggggcttggccagtcctggtcagctttccctctgatgactgcaggaagagagtcagacgcggaactcccagggtgcagaggcctgcggggtctgaagggcctcctccctctccagtgtggtgactgggctgaggagatgctgggactgagagtgtcatggtggagcctccgtccctgctcatcctctccgcatgttgcttctgctcccgatggctctctctgaaatgcagcacaacctcctaggccaatggaagaaggcccagagctggctccctgcctggaagcacgaggagacccgcacaggcatcctgagaaggcgtggagagcaggctgccttcatggggggagtgccagggcctgggcacccacacccgctgacccaagagggcccgggcacctgcgtgctggcctcttcactgaccttcgctctgtctgctctctttgtgtctctctctgacctccagaggcctcctttctctctgccaggaacagtagcccccctgcaaggccctccttttcctccagcccgcagcctgcggcctctccggttctgctccacagcccggctgccacacactcgcctctctctccaggccccccgggttccctccgcctctcttgctgcctgttctctccttttgcaggttgcgtttattggcttatctctgggggttggtgctctcccttgtttccatggaaactgcctggccccaggaggcccaagcagctttgagctccaagggcaggaccatgcaggccatcgctgccctgccgcttagccacagggcacgatttctgactcggtttattagagacatagtgtggcagtctctagaccccacagtcgggctggcatctggggacaggaccaacacccccacaccccagaggcgaactgtggtgagtgtaaagagcccctctccaggggaagacagccggccagagtgcggtgtgctgtgctggagagcacagccccaggcgtgacaaacacctcggcctcttagaagttgtcccttatctggacaggaagtctggaggctgaaacagagactcccaccttcccagagtctcctgggcagtgccacacagatgccatatgctggccccgtggccacactccagcactcagcccccttgcccacctcactcctgagttagcacactttccaggtgtcagcaggtgtgatcaggggctcagagccagggtcctgtgagagcccaggggtctttggttgcacctcctgcgtgcacttcctgacagcgcccacctcactgccacccagagctcagacccaagggagggtggagaggggctgagggacaggcctggagtaggggtgtatgcactgcaggctgagatgagcaattgaggggcaagtgtccagcaggagggagaaactgggaacagagtccttgtcactccaggggatgttgctgctcactcagcactcactcagggctctgggagccaggcctagctctcagggcagagggtgtggcagggaagtgagatgatcacactcagagcccagtgagaggcagtgaggaaaaccaccagcgagaccagtgtggtggctcacacctgtaatcccagcactttgggaagtcaaggcaggtggatcccttgagctcaggagttcaagaccagcctgggcaacatagcaagaccccatctctacaaaaaatacaaaaactagccaggcagggctgggcgcggtggctcacgcctgtaatcccagcactttgggaggccgaggcgggcggatctcgaggtcaggagattgagaccatcccggctaacacggtgaaaccccgtctctactaaaaatacaaaaaaaattagctgggcatggtggcaggtgcctgtagtcccagctactcgggaggctgaggcagaagaatggcgtgaacttgggaggtggagcttacagtgagccgagatcacaccactgcactccagcctgggggacagagcgagactccgtctcaaaaaaaaaaaaaaaaaaactagccaggcgggcatggtggtggcacccatctgtagtcccagctacttgggaggctgaggtgggaggatcgcctgagcctgagggggatgttgccgtgagccaagagcttgtgactggactccagcctgggcaacagagcaagaccctgtctcaaaaaaaaaaaaaaaagaaaaaccgctagcaatggagatgggaggaggcttcagagcccagagagcagcaagggttacacaggggggtaacaaggg

SEQ ID NO: 363371 - DNA, 1030 bp, Homo sapiens
agcggcacgctttcttgaaagaggcatttaccgagcgcccaatgtatgcctggcactgggctgggtgctgccacctaagcgagcacgaccaatgcagtctatcagggaggcccagatcgccaagcagcggacccctgcggtccgccatgccactcccggctcctagagcgccgctcagcacaccgtgagcgcccaataactgttgggcttcaatgacgccgcggaggcggccccgtccccgcgctcccgcccctcccgccaggcagcccgggaggccagacgttgacgctgcagggagagggtggtgggcgcagccgctagggggcgcggcggggcggagcgcacctttccgcgggccgcggggatggcggcgcagggcgtagggcctgggccggggtcggcggcgcccccggggctggaggcggcccggcagaagctggcgctgcggcggaagaaggtgctgagcaccgaggagatggagctgtacgagctggcgcaggcggcgggcggcgctatcgaccccgacgtgttcaagatcctggtggacctgctgaagctgaacgtggcccccctcgccgtcttccagatgctcaagtccatgtgtgccgggcagaggctagcgagcgagccccaggaccctgcggccgtgtctctgcccacgtcgagcgtgcccgagacccgagggagaaacaaaggcagcgctgccctcgggggagcattggccctggcggaacgcagcagccgcgaaggatccagccagaggatgccacgccagcccagcgctaccaggctgcccaaggggggcgggcctgggaagagccctacacggggcagcacctaggatggggcagagacttgttgcatctttgtccccagcaaaggctacatgttacctccttcaattgataataaacctttctgagatgcagagggtccaggtcaaaaaaaaaaaactctcagcggatacggcaaaaggccaacactagagggccgaccacttgcccttagaggaaaacgcggaacaggaacg

SEQ ID NO: 363372 - DNA, 793 bp, Homo sapiens
agcggcacgctttcttgaaagaggcatttaccgagcgcccaatgtatgcctggcactgggctgggtgctgccacctaagcgagcacgaccaatgcagtctatcagggaggcccagatcgccaagcagcggacccctgcggtccgccatgccactcccggctcctagagcgccgctcagcacaccgtgagcgcccaataactgttgggcttcaatgacgccgcggaggcggccccgtccccgcgctcccgcccctcccgccaggcagcccgggaggccagacgttgacgctgcagggagagggtggtgggcgcagccgctagggggcgcggcggggcggagcgcacctttccgcgggccgcggggatggcggcgcagggcgtagggcctgggccggggtcggcggcgcccccggggctggaggcggcccggcagaagctggcgctgcggcggaagaaggtgctgagcaccgaggagatggagctgtacgagctggcgcaggcggcgggcggcgctatcgaccccgacgtgttcaaggagaaacaaaggcagcgctgccctcgggggagcattggccctggcggaacgcagcagccgcgaaggatccagccagaggatgccacgccagcccagcgctaccaggctgcccaaggggggcgggcctgggaagagccctacacggggcagcacctaggatggggcagagacttgttgcatctttgtccccagcaaaggctacatgttacctccttcaattgataataaacctttctgagatgcagagggtccaggtca

SEQ ID NO: 363373 - DNA, 1079 bp, Homo sapiens
agcggcacgctttcttgaaagaggcatttaccgagcgcccaatgtatgcctggcactgggctgggtgctgccacctaagcgagcacgaccaatgcagtctatcagggaggcccagatcgccaagcagcggacccctgcggtccgccatgccactcccggctcctagagcgccgctcagcacaccgtgagcgcccaataactgttgggcttcaatgacgccgcggaggcggccccgtccccgcgctcccgcccctcccgccaggcagcccgggaggccagacgttgacgctgcagggagagggtggtgggcgcagccgctagggggcgcggcggggcggagcgcacctttccgcgggccgcggggatggcggcgcagggcgtagggcctgggccggggtcggcggcgcccccggggctggaggcggcccggcagaagctggcgctgcggcggaagaaggtgctgagcaccgaggagatggagctgtacgagctggcgcaggcggcgggcggcgctatcgaccccgacgtgttcaagatcctggtggacctgctgaagctgaacgtggcccccctcgccgtcttccagatgctcaagtccatgtgtgccgggcagaggctagcgagcgagccccaggaccctgcggccgtgtctctgcccacgtcgagcgtgcccgagacccgaggtcagagctgggcccgctgtccctgccccagtggcgggggtggcgggcggggagggggcaggcgcggcacagcggcggcgtggccctgagtggccaggcctgtctgtcggtctaggcccagcacctgcagggcccatccgtgggctctgctcctgggcttcgctgccagccttaggaggcacgtccaggtcaggtggacgcagagtgcgtaccccagggtggtccaggctgggtagggctcctccgcttagctcccctccacctcttcactcaggccttcatcctacaacgtcgggaatcaagacagtttggggctgggcgccctggctcacgcctataatctttgggaccccagggcgggaggatcgtttgaggccatgagttttagaccactct

SEQ ID NO: 363374 - DNA, 970 bp, Homo sapiens
agcggcacgctttcttgaaagaggcatttaccgagcgcccaatgtatgcctggcactgggctgggtgctgccacctaagcgagcacgaccaatgcagtctatcagggaggcccagatcgccaagcagcggacccctgcggtccgccatgccactcccggctcctagagcgccgctcagcacaccgtgagcgcccaataactgttgggcttcaatgacgccgcggaggcggccccgtccccgcgctcccgcccctcccgccaggcagcccgggaggccagacgttgacgctgcagggagagggtggtgggcgcagccgctagggggcgcggcggggcggagcgcacctttccgcgggccgcggggatggcggcgcagggcgtagggcctgggccggggtcggcggcgcccccggggctggaggcggcccggcagaagctggcgctgcggcggaagaaggtgctgagcaccgaggagatggagctgtacgagctggcgcaggcggcgggcggcgctatcgaccccgacgtgttcaagatcctggtggacctgctgaagctgaacgtggcccccctcgccgtcttccagatgctcaagtccatgtgtgccgggcagaggctagcgagcgagccccaggaccctgcggccgtgtctctgcccacgtcgagcgtgcccgagacccgagggagaaacaaaggcagcgctgccctcgggggagcattggccctggcggaacgcagcagccgcgaaggatccagccagaggatgccacgccagcccagcgctaccaggctgcccaaggggggcgggcctgggaagagccctacacggggcagcacctaggatggggcagagacttgttgcatctttgtccccagcaaaggctacatgttacctccttcaattgataataaacctttctgagatgcagagggtccaggtcaaaaaaaataggaaaaaaaaagaaacact

SEQ ID NO: 363375 - DNA, 963 bp, Homo sapiens
agcggcacgctttcttgaaagaggcatttaccgagcgcccaatgtatgcctggcactgggctgggtgctgccacctaagcgagcacgaccaatgcagtctatcagggaggcccagatcgccaagcagcggacccctgcggtccgccatgccactcccggctcctagagcgccgctcagcacaccgtgagcgcccaataactgttgggcttcaatgacgccgcggaggcggccccgtccccgcgctcccgcccctcccgccaggcagcccgggaggccagacgttgacgctgcagggagagggtggtgggcgcagccgctagggggcgcggcggggcggagcgcacctttccgcgggccgcggggatggcggcgcagggcgtagggcctgggccggggtcggcggcgcccccggggctggaggcggcccggcagaagctggcgctgcggcggaagaaggtgctgagcaccgaggagatggagctgtacgagctggcgcaggcggcgggcggcgctatcgaccccgacgtgttcaagatcctggtggacctgctgaagctgaacgtggcccccctcgccgtcttccagatgctcaagtccatgtgtgccgggcagaggctagcgagcgagccccaggaccctgcggccgtgtctctgcccacgtcgagcgtgcccgagacccgagggagaaacaaaggcagcgctgccctcgggggagcattggccctggcggaacgcagcagccgcgaaggatccagccagaggatgccacgccagcccagcgctaccaggctgcccaaggggggcgggcctgggaagagccctacacggggcagcacctaggatggggcagagacttgttgcatctttgtccccagcaaaggctacatgttacctccttcaattgataataaacctttctgagatgcagagggtccaggtcaaaaaaaaaaaagtcgacgcgg

SEQ ID NO: 363376 - DNA, 936 bp, Homo sapiens
agcggcacgctttcttgaaagaggcatttaccgagcgcccaatgtatgcctggcactgggctgggtgctgccacctaagcgagcacgaccaatgcagtctatcagggaggcccagatcgccaagcagcggacccctgcggtccgccatgccactcccggctcctagagcgccgctcagcacaccgtgagcgcccaataactgttgggcttcaatgacgccgcggaggcggccccgtccccgcgctcccgcccctcccgccaggcagcccgggaggccagacgttgacgctgcagggagagggtggtgggcgcagccgctagggggcgcggcggggcggagcgcacctttccgcgggccgcggggatggcggcgcagggcgtagggcctgggccggggtcggcggcgcccccggggctggaggcggcccggcagaagctggcgctgcggcggaagaaggtgctgagcaccgaggagatggagctgtacgagctggcgcaggcggcgggcggcgctatcgaccccgacgtgttcaagatcctggtggacctgctgaagctgaacgtggcccccctcgccgtcttccagatgctcaagtccatgtgtgccgggcagaggctagcgagcgagccccaggaccctgcggccgtgtctctgcccacgtcgagcgtgcccgagacccgagggagaaacaaaggcagcgctgccctcgggggagcattggccctggcggaacgcagcagccgcgaaggatccagccagaggatgccacgccagcccagcgctaccaggctgcccaaggggggcgggcctgggaagagccctacacggggcagcacctaggatggggcagagacttgttgcatctttgtccccagcaaaggctacatgttacctcctctgcctcctctgtgctgtccgggatcctctagaacact

SEQ ID NO: 363377 - DNA, 1266 bp, Homo sapiens
agcggcacgctttcttgaaagaggcatttaccgagcgcccaatgtatgcctggcactgggctgggtgctgccacctaagcgagcacgaccaatgcagtctatcagggaggcccagatcgccaagcagcggacccctgcggtccgccatgccactcccggctcctagagcgccgctcagcacaccgtgagcgcccaataactgttgggcttcaatgacgccgcggaggcggccccgtccccgcgctcccgcccctcccgccaggcagcccgggaggccagacgttgacgctgcagggagagggtggtgggcgcagccgctagggggcgcggcggggcggagcgcacctttccgcgggccgcggggatggcggcgcagggcgtagggcctgggccggggtcggcggcgcccccggggctggaggcggcccggcagaagctggcgctgcggcggaagaaggtgctgagcaccgaggagatggagctgtacgagctggcgcaggcggcgggcggcgctatcgaccccgacgtgttcaagatcctggtggacctgctgaagctgaacgtggcccccctcgccgtcttccagatgctcaagtccatgtgtgccgggcagaggctagcgagcgagccccaggaccctgcggccgtgtctctgcccacgtcgagcgtgcccgagacccgagcagcccagcgctaccaggctgcccaaggggggcgggcctgggaagagccctacacggggcagcacctaggatggggcagagacttgttgcatctttgtccccagcaaaggctacatgttacctccttcaattgataataaacctttctgagatgcagagggtccaggtcaaaaaaaaaaaaaaaaaaaaaaaaaaaaaattgtggtggggcggctgtgggcccctggggaaaaggtttttaagaccacttgggttgggggcgccgggggcccccgagtagaggatcaggtggaacacgtgtggtccaaaacgtgtgttccccaagaggaagaactcgtgggaccaagagaaggaagggcgtgctgtggggattctctcccccaagataaaaaaaaagagcgcgccggggggggccagacaccaggagcgtgggttcctggagacaaaagattccccaaagaggggggaggtgtcccgagggggcgccaaataacaaggggcagccacaaaccaaacaggggaggggcacaaagcgaggacgctccgagaattcaaatgtaaaagcgcccgggcctcgtggggg

SEQ ID NO: 363378 - DNA, 942 bp, Homo sapiens
agcggcacgctttcttgaaagaggcatttaccgagcgcccaatgtatgcctggcactgggctgggtgctgccacctaagcgagcacgaccaatgcagtctatcagggaggcccagatcgccaagcagcggacccctgcggtccgccatgccactcccggctcctagagcgccgctcagcacaccgtgagcgcccaataactgttgggcttcaatgacgccgcggaggcggccccgtccccgcgctcccgcccctcccgccaggcagcccgggaggccagacgttgacgctgcagggagagggtggtgggcgcagccgctagggggcgcggcggggcggagcgcacctttccgcgggccgcggggatggcggcgcagggcgtagggcctgggccggggtcggcggcgcccccggggctggaggcggcccggcagaagctggcgctgcggcggaagaaggtgctgagcaccgaggagatggagctgtacgagctggcgcaggcggcgggcggcgctatcgaccccgacgtgttcaagatcctggtggacctgctgaagctgaacgtggcccccctcgccgtcttccagatgctcaagtccatgtgtgccgggcagaggctagcgagcgagccccaggaccctgcggccgtgtctctgcccacgtcgagcgtgcccgagacccgagggagaaacaaaggcagcgctgccctcgggggagcattggccctggcggaacgcagcagccgcgaaggatccagccagaggatgccacgccagcccagcgctaccaggctgcccaaggggggcgggcctgggaagagccctacacggggcagcacctaggatggggcagagacttgttgcatctttgtccccagcaaaggctacatgttacctccttcaattgataataaacctttctgagatgcagagggtccaggtca

SEQ ID NO: 363379 - DNA, 536 bp, Homo sapiens
ctcaaaaggcgcgtgcgcaaagcgaaggccggccgggcggggaagagaaatggcgaggcaggagtgcgggggagggagtggtccttagctgaatgcgcctgcgttgtggcggcctccggcgccccaaggatcctggtggacctgctgaagctgaacgtggcccccctcgccgtcttccagatgctcaagtccatgtgtgccgggcagaggctagcgagcgagccccaggaccctgcggccgtgtctctgcccacgtcgagcgtgcccgagacccgagggagaaacaaaggcagcgctgccctcgggggagcattggccctggcggaacgcagcagccgcgaaggatccagccagaggatgccacgccagcccagcgctaccaggctgcccaaggggggcgggcctgggaagagccctacacggggcagcacctaggatggggcagagacttgttgcatctttgtccccagcaaaggctacatgttacctccttcaattgataataaacctttctgagatgcagagggtccaggtca

SEQ ID NO: 363380 - DNA, 457 bp, Homo sapiens
gccgcgccgggcggagagggctcaccggccccgcgtctgtccccgccaggatcctggtggacctgctgaagctgaacgtggcccccctcgccgtcttccagatgctcaagtccatgtgtgccgggcagaggctagcgagcgagccccaggaccctgcggccgtgtctctgcccacgtcgagcgtgcccgagacccgagggagaaacaaaggcagcgctgccctcgggggagcattggccctggcggaacgcagcagccgcgaaggatccagccagaggatgccacgccagcccagcgctaccaggctgcccaaggggggcgggcctgggaagagccctacacggggcagcacctaggatggggcagagacttgttgcatctttgtccccagcaaaggctacatgttacctccttcaattgataataaacctttctgagatgcagagggtccaggtca

SEQ ID NO: 363381 - DNA, 626 bp, Homo sapiens
  misc_feature (11)..(11): n is a, c, g, or t
  misc_feature (504)..(504): n is a, c, g, or t
  misc_feature (541)..(541): n is a, c, g, or t
  misc_feature (557)..(557): n is a, c, g, or t
  misc_feature (562)..(562): n is a, c, g, or t
  misc_feature (564)..(564): n is a, c, g, or t
  misc_feature (567)..(567): n is a, c, g, or t
  misc_feature (580)..(580): n is a, c, g, or t
  misc_feature (588)..(588): n is a, c, g, or t
ggcgcaggcgntagggcctgggccggggtcggcgctatcgaccccgacgtgttcaagatcctggtggacctgctgaagctgaacgtggcccccctcgccgtcttccagatgctcaagtccatgtgtgccgggcagaggctagcgagcgagccccaggaccctgcggccgtgtctctgcccacgtcgagcgtgcccgagacccgagggagaaacaaaggcagcgctgccctcgggggagcattggccctggcggaacgcagcagccgcgaaggatccagccagaggatgccacgccagcccagcgctaccaggctgcccaaggggggcgggcctgggaagagccctacacggggcagcacctaggatggggcagagacttgttgcatctttgtccccagcaaaggctacatgttacctccttcaattgataataaacctttctgagatgcagagggtccaggtcaaaaaaaaaaaaaaaaaaaaaaaaaaaagggcttctttgcnggggggggaaaaaggggttggaagggccctgggccanagtgttcccggacccnttttntntgncccagggggaaancggcgggncccctaaggggagcgaataaattcgaaaacccgggtac

SEQ ID NO: 363382 - DNA, 1355 bp, Homo sapiens
agcggcacgctttcttgaaagaggcatttaccgagcgcccaatgtatgcctggcactgggctgggtgctgccacctaagcgagcacgaccaatgcagtctatcagggaggcccagatcgccaagcagcggacccctgcggtccgccatgccactcccggctcctagagcgccgctcagcacaccgtgagcgcccaataactgttgggcttcaatgacgccgcggaggcggccccgtccccgcgctcccgcccctcccgccaggcagcccgggaggccagacgttgacgctgcagggagagggtggtgggcgcagccgctagggggcgcggcggggcggagcgcacctttccgcgggccgcggggatggcggcgcagggcgtagggcctgggccggggtcggcggcgcccccggggctggaggcggcccggcagaagctggcgctgcggcggaagaaggtgctgagcaccgaggagatggagctgtacgagctggcgcaggcggcgggcggcgctatcgaccccgacgtgttcaagatcctggtggacctgctgaagctgaacgtggcccccctcgccgtcttccagatgctcaagtccatgtgtgccgggcagaggctagcgagcgagccccaggaccctgcggccgtgtctctgcccacgtcgagcgtgcccgagacccgagggagaaacaaaggcagcgctgccctcgggggagcattggccctggcggaacgcagcagccgcgaaggatccagccagaggatgccacgccagcccagcgctaccaggctgcccaaggggggcgggcctgggaagagccctacacggggcagcacctaggatggggcagagacttgttgcatctttgtccccagcaaaggctacatgttacctccttcaattgataataaacctttctgagatgcagagggtccaggtcaaaaaaaaaaaaaaaaaaaaaaaaaaaaaattgtggtggggcggctgtgggcccctggggaaaaggtttttaagaccacttgggttgggggcgccgggggcccccgagtagaggatcaggtggaacacgtgtggtccaaaacgtgtgttccccaagaggaagaactcgtgggaccaagagaaggaagggcgtgctgtggggattctctcccccaagataaaaaaaaagagcgcgccggggggggccagacaccaggagcgtgggttcctggagacaaaagattccccaaagaggggggaggtgtcccgagggggcgccaaataacaaggggcagccacaaaccaaacaggggaggggcacaaagcgaggacgctccgagaattcaaatgtaaaagcgcccgggcctcgtggggg

SEQ ID NO: 363383 - DNA, 969 bp, Homo sapiens
agcggcacgctttcttgaaagaggcatttaccgagcgcccaatgtatgcctggcactgggctgggtgctgccacctaagcgagcacgaccaatgcagtctatcagggaggcccagatcgccaagcagcggacccctgcggtccgccatgccactcccggctcctagagcgccgctcagcacaccgtgagcgcccaataactgttgggcttcaatgacgccgcggaggcggccccgtccccgcgctcccgcccctcccgccaggcagcccgggaggccagacgttgacgctgcagggagagggtggtgggcgcagccgctagggggcgcggcggggcggagcgcacctttccgcgggccgcggggatggcggcgcagggcgtagggcctgggccggggtcggcggcgcccccggggctggaggcggcccggcagaagctggcgctgcggcggaagaaggtgctgagcaccgaggagatggagctgtacgagctggcgcaggcggcgggcggcgctatcgaccccgacgtgttcaagatcctggtggacctgctgaagctgaacgtggcccccctcgccgtcttccagatgctcaagtccatgtgtgccgggcagaggctagcgagcgagccccaggaccctgcggccgtgtctctgcccacgtcgagcgtgcccgagacccgagggagaaacaaaggcagcgctgccctcgggggagcattggccctggcggaacgcagcagccgcgaaggatccagccagaggatgccacgccagcccagcgctaccaggctgcccaaggggggcgggcctgggaagagccctacacggggcagcacctaggatggggcagagacttgttgcatctttgtccccagcaaaggctacatgttacctccttcaattgataataaacctttctgagatgcagagggtccaggtcatttatacccttatgaaaccaggtctat

SEQ ID NO: 363384 - DNA, 1122 bp, Homo sapiens
agcggcacgctttcttgaaagaggcatttaccgagcgcccaatgtatgcctggcactgggctgggtgctgccacctaagcgagcacgaccaatgcagtctatcagggaggcccagatcgccaagcagcggacccctgcggtccgccatgccactcccggctcctagagcgccgctcagcacaccgtgagcgcccaataactgttgggcttcaatgacgccgcggaggcggccccgtccccgcgctcccgcccctcccgccaggcagcccgggaggccagacgttgacgctgcagggagagggtggtgggcgcagccgctagggggcgcggcggggcggagcgcacctttccgcgggccgcggggatggcggcgcagggcgtagggcctgggccggggtcggcggcgcccccggggctggaggcggcccggcagaagctggcgctgcggcggaagaaggtgctgagcaccgaggagatggagctgtacgagctggcgcaggcggcgggcggcgctatcgaccccgacgtgttcaagatcctggtggacctgctgaagctgaacgtggcccccctcgccgtcttccagatgctcaagtccatgtgtgccgggcagaggctagcgagcgagccccaggaccctgcggccgtgtctctgcccacgtcgagcgtgcccgagacccgagaggcctcctttctctctgccaggaacagtagcccccctgcaaggccctccttttcctccagcccgcagcctgcggcctctccggttctgctccacagcccggctgccacacactcgcctctctctccaggccccccgggttccctccgcctctcttgctgcctgttctctccttttgcagggagaaacaaaggcagcgctgccctcgggggagcattggccctggcggaacgcagcagccgcgaaggatccagccagaggatgccacgccagcccagcgctaccaggctgcccaaggggggcgggcctgggaagagccctacacggggcagcacctaggatggggcagagacttgttgcatctttgtccccagcaaaggctacatgttacctccttcaattgataataaacctttctgagatgcagagggtccaggtca

SEQ ID NO: 363385 - DNA, 447 bp, Homo sapiens
gagagagagagagagagagagagagagagagagagagagagagagagatggcggcgcagggcgtagggcctgggccggggtcggcggcgcccccggggctggaggcggcccggcagaagctggcgctgcggcggaagaaggtgctgagcaccgaggagatggagctgtacgagctggcgcaggcggcgggcggcgctatcgaccccgacgtgttcaagatcctggtggacctgctgaagctgaacgtggcccccctcgccgtcttccagatgctcaacagcccagcgctaccaggctgcccaaggggggcgggcctgggaagagccctacacggggcagcacctaggatggggcagagacttgttgcatctttgtccccagcaaaggctacatgttacctccttcaattgataataaacctttctgagatgcagagggtccaggtca

SEQ ID NO: 363386 - DNA, 1430 bp, Homo sapiens
acttgtagtcccagctgctagagaggctgagatgggagggtggcttgagcccaggataccaaggctgtggtgagccatgattgtgccactgcattccagcagtgacaaagcaaggccccatctcaaaaataaataaataaaaagtaaaacaaccctccacacctggtctgaaattttctgtgattattcagccctcgaaacaactttcaggtacagtgactgccataatgtaaactggctcccaagaaggtcatactctccaatgtacattcagagtactgactctgagttttctgccaggtatgaatggtggtactgtcaactgaatatggaggtagatctgctattgctggttagttggcagtatacaccatgtatcaatgttaacatgtccaaagcttgaggattctatggaacatatagatagacatatctagtgtatatttagaaatttaggtatgaaaatctataatggtgggagctgaaagtaagagtgttgggactcttcagtatgtaaatccatatttgaaactatagaagtggaaaaactctttaggaatagtatttagattgaaacaggaaagaggaggataaagccgtcgaggaatactagcatttaagaaaaaaagaactagtgagcaagtaatgattatacaaggcaatatgagacaccaaatatgatgtcaaaaaagccaagaggggaaacatatccaaaaaataaatgagctgggcacaggggctcacgcctgtagtcccagctacttgggaggctaaggcaggaggatagcctaagccccaggagttgcaggctgcagtgagctgtaattgagccactgtactccagcctgggcaacagagtgagacccctatctctaaaaaaagaaacaaaaagtagatgatttcacagttaaacaatgagagctttttcaataaaatcaagagacaaggatatcagtgctatgatttttagtcactattgtgtttgctaacttctgttcttcttacaggtttcagtctacatgttacttccttgagaagcagtgtttgacacccttctcccccaatccagccatcccccaagtctgagttaggtatttctcttctgtattcccatagcacagtgtaattcccctataatagcatgtatcaccttgaattatgggtgtttattgttctgtctctcctgttagaacgaaagctccatgaagggattgtcattttattcaccagtgtaccctctatgcccagcacaacttttggtcatattaaacaaagaatgaataaataaatccaagagcataggaggaggagcatccaaatgagcctgaaaaattagagaaatatttgtagtagtatgtgatatcttagctgagcttaacaagtataatgagatcaagagtttggattgaaaatgaggtactcaggaataa

SEQ ID NO: 363387 - DNA, 3653 bp, Homo sapiens
acgccggcgagcttccggggcggccccgggcaggtcggcggcggcggcccgcagtcgtggaggagcggtgggagcgtcggcggccgcgggcgatgcaacttccggacgggactcccctctgtccgcgcctcacatctccccttcctctcgcctagtcctgtgccgttttccgtccgcgactcttccggcccagagctttcggagtgcggttgctcaggggaagccgtcgccgcccccgcctcggggccgagtgagagtgcccgtcgcgtcgcgccgcgtcgccccccgggccgcctccttgccgccagtggcgggctccgttctccctcgaagcactccccccagctccatgaatggaaatcggctccgcaggacccgctggggcccagcccctactcatggtgcccagaagacctggctatggcaccatgggcaaacccattaaactgctggctaactgttttcaagttgaaatcccaaagattgatgtctacctctatgaggtagatattaaaccagacaagtgtcctaggagagtgaacagggaggtggttgactcaatggttcagcattttaaagtaactatatttggagaccgtagaccagtttatgatggaaaaagaagtctttacaccgccaatccacttcctgtggcaactacaggggtagatttagacgttactttacctggggaaggtggaaaagatcgacctttcaaggtgtcaatcaaatttgtctctcgggtgagttggcacctactgcatgaagtactgacaggacggaccttgcctgagccactggaattagacaagccaatcagcactaaccctgtccatgccgttgatgtggtgctacgacatctgccctccatgaaatacacacctgtggggcgttcatttttctccgctccagaaggatatgaccaccctctgggagggggcagggaagtgtggtttggattccatcagtctgttcggcctgccatgtggaaaatgatgcttaatatcgatgtttctgccactgccttctacaaagcacaacctgtaattcagttcatgtgtgaagttcttgatattcataatattgatgagcaaccaagacctctgactgattctcatcgggtaaaattcaccaaagagataaaaggtttgaaggttgaagtgactcattgtggaacaatgagacggaaataccgtgtttgtaatgtaacaaggaggcctgccagtcatcaaacctttcctttacagttagaaaacggccaaactgtggagagaacagtagcgcagtatttcagagaaaagtatactcttcagctgaagtacccgcaccttccctgtctgcaagtcgggcaggaacagaaacacacctacctgccactagaagtctgtaatattgtggcagggcaacgatgtatcaagaagctaacagacaatcagacttccactatgatcaaggcaacagcaagatctgcaccagatagacaagaggaaattagcagattggtaagaagtgcaaattatgaaacagatccatttgttcaggagtttcaatttaaagttcgggatgaaatggctcatgtaactggacgcgtacttccagcacctatgctccagtatggaggacggaatcggacagtagcaacaccgagccatggagtatgggacatgcgagggaaacaattccacacaggagttgaaatcaaaatgtgggctatcgcttgttttgccacacagaggcagtgcagagaagaaatattgaagggtttcacagaccagctgcgtaagatttctaaggatgcagggatgcccatccagggccagccatgcttctgcaaatatgcacagggggcagacagcgtagagcccatgttccggcatctcaagaacacatattctggcctacagcttattatcgtcatcctgccggggaagacaccagtgtatgcggaagtgaaacgtgtaggagacacacttttgggtatggctacacaatgtgttcaagtcaagaatgtaataaaaacatctcctcaaactctgtcaaacttgtgcctaaagataaatgttaaactcggagggatcaataatattcttgtacctcatcaaagaccttctgtgttccagcaaccagtgatctttttgggagccgatgtcactcatccacctgctggtgatggaaagaagccttctattgctgctgttgtaggtagtatggatgcacacccaagcagatactgtgccacagtaagagttcagagaccccgacaggagatcatccaggacttggcctccatggtccgggaacttcttattcaattttataagtcaactcggttcaagcctactcgtatcatcttttatcgggatggtgtttcagaggggcagtttaggcaggtattatattatgaactactagcaattcgagaagcctgcatcagtttggagaaagactatcaacctggaataacctacattgtagttcagaagagacatcacactcgattattttgtgctgataggacagaaagggttggaagaagtggcaatatcccagctggaacaacagttgatacagacattacacacccatatgagttcgatttttacctctgtagccatgctggaatacagggtaccagtcgtccttcacactatcatgttttatgggatgataactgctttactgcagatgaacttcagctgctaacttaccagctctgccacacttacgtacgctgtacacgatctgtttctatacctgcaccagcgtattatgctcacctggtagcatttagagccagatatcatcttgtggacaaagaacatgacagtgctgaaggaagtcacgtttcaggacaaagcaatgggcgagatccacaagctcttgccaaggctgtacagattcaccaagataccttacgcacaatgtacttcgcttaaatagtccaagtatattctctgagaggaagtactgaaagatgaattgacatacaacgtatgtttccagtgaagtcaattgagtaaggacacctccagccatacagaaaccaacactgtgtgggggccaaggtctgatccttatgttaatacaaggaagattgtttacttcatcaaggaacacagcatcattatgcaatatgaaaccagccaactgctttttgtgcggtctcctataggaagtatcgcaattgttttgttttcatttcttgtagtctaacccttttaatgcctttacctcaagttgcttggcagcacaactatctttgcaaaaaaaagtaaagaaaaagtaaatgatggtttaaaaaatacacaccttcatgaataatcaaagtgatttttcagaattatgtgtgcaaaaaattaatgtgcattcatatattcttgtaaaaggtgtctgtgtatttttaaaatatatacatccatacttcatatgcatatatatctagatctggattgataatagatatatatgtgtctgttatatattttagagttcattccattggggaattttctttcccttttattctacccccactaccgcctttatttctctatttcccttgccttcatcacctacatttttttcccagtcctaccagtgacattcaaatgttgatgtatctggttcgtttgaatataaaatatggcaaacta

SEQ ID NO: 363388 - DNA, 3356 bp, Homo sapiens
gcgaccgccgacgctcccaccgctcctccacgactgcgggccgcgccagctccatgaatggaaatcggctccgcagacccgctggggcccagcccctactcatggtgcccagaagacctggctatggcaccatgggcaaacccattaaactgctggctaactgttttcaagttgaaatcccaaagattgatgtctacctctatgaggtagatattaaaccagacaagtgtcctaggagagtgaacagggaggtggttgactcaatggttcagcattttaaagtaactatatttggagaccgtagaccagtttatgatggaaaaagaagtctttacaccgccaatccacttcctgtggcaactacaggggtagatttagacgttactttacctggggaaggtggaaaagatcgacctttcaaggtgtcaatcaaatttgtctctcgggtgagttggcacctactgcatgaagtactgacaggacggaccttgcctgagccactggaattagacaagccaatcagcactaaccctgtccatgccgttgatgtggtgctacgacatctgccctccatgaaatacacacctgtggggcgttcatttttctccgctccagaaggatatgaccaccctctgggagggggcagggaagtgtggtttggattccatcagtctgttcggcctgccatgtggaaaatgatgcttaatatcgatgtttctgccactgccttctacaaagcacaacctgtaattcagttcatgtgtgaagttcttgatattcataatattgatgagcaaccaagacctctgactgattctcatcgggtaaaattcaccaaagagataaaaggtttgaaggttgaagtgactcattgtggaacaatgagacggaaataccgtgtttgtaatgtaacaaggaggcctgccagtcatcaaacctttcctttacagttagaaaacggccaaactgtggagagaacagtagcgcagtatttcagagaaaagtatactcttcagctgaagtacccgcaccttccctgtctgcaagtcgggcaggaacagaaacacacctacctgccactagaagtctgtaatattgtggcagggcaacgatgtatcaagaagctaacagacaatcagacttccactatgatcaaggcaacagcaagatctgcaccagatagacaagaggaaattagcagattggtaagaagtgcaaattatgaaacagatccatttgttcaggagtttcaatttaaagttcgggatgaaatggctcatgtaactggacgcgtacttccagcacctatgctccagtatggaggacggaatcggacagtagcaacaccgagccatggagtatgggacatgcgagggaaacaattccacacaggagttgaaatcaaaatgtgggctatcgcttgttttgccacacagaggcagtgcagagaagaaatattgaagggtttcacagaccagctgcgtaagatttctaaggatgcagggatgcccatccagggccagccatgcttctgcaaatatgcacagggggcagacagcgtagagcccatgttccggcatctcaagaacacatattctggcctacagcttattatcgtcatcctgccggggaagacaccagtgtatgcggaagtgaaacgtgtaggagacacacttttgggtatggctacacaatgtgttcaagtcaagaatgtaataaaaacatctcctcaaactctgtcaaacttgtgcctaaagataaatgttaaactcggagggatcaataatattcttgtacctcatcaaagaccttctgtgttccagcaaccagtgatctttttgggagccgatgtcactcatccacctgctggtgatggaaagaagccttctattgctgctgttgtaggtagtatggatgcacacccaagcagatactgtgccacagtaagagttcagagaccccgacaggagatcatccaggacttggcctccatggtccgggaacttcttattcaattttataagtcaactcggttcaagcctactcgtatcatcttttatcgggatggtgtttcagaggggcagtttaggcaggtattatattatgaactactagcaattcgagaagcctgcatcagtttggagaaagactatcaacctggaataacctacattgtagttcagaagagacatcacactcgattattttgtgctgataggacagaaagggttggaagaagtggcaatatcccagctggaacaacagttgatacagacattacacacccatatgagttcgatttttacctctgtagccatgctggaatacagggtaccagtcgtccttcacactatcatgttttatgggatgataactgctttactgcagatgaacttcagctgctaacttaccagctctgccacacttacgtacgctgtacacgatctgtttctatacctgcaccagcgtattatgctcacctggtagcatttagagccagatatcatcttgtggacaaagaacatgacagtgctgaaggaagtcacgtttcaggacaaagcaatgggcgagatccacaagctcttgccaaggctgtacagattcaccaagataccttacgcacaatgtacttcgcttaaatagtccaagtatattctctgagaggaagtactgaaagatgaattgacatacaacgtatgtttccagtgaagtcaattgagtaaggacacctccagccatacagaaaccaacactgtgtgggggccaaggtctgatccttatgttaatacaaggaagattgtttacttcatcaaggaacacagcatcattatgcaatatgaaaccagccaactgctttttgtgcggtctcctataggaagtatcgcaattgttttgttttcatttcttgtagtctaacccttttaatgcctttacctcaagttgcttggcagcacaactatctttgcaaaaaaaagtaaagaaaaagtaaatgatggtttaaaaaatacacaccttcatgaataatcaaagtgatttttcagaattatgtgtgcaaaaaattaatgtgcattcatatattcttgtaaaaggtgtctgtgtatttttaaaatatatacatccatacttcatatgcatatatatctagatctggattgataatagatatatatgtgtctgttatatattttagagttcattccattggggaattttctttcccttttattctacccccactaccgcctttatttctctatttcccttgccttcatcacctacatttttttcccagtcctaccagtgacattcaaatgttgatgtatctggttcgtttgaatataaaatatggcaaacta

SEQ ID NO: 363389 - DNA, 1382 bp, Homo sapiens
acgccggcgagcttccggggcggccccgggcaggtcggcggcggcggcccgcagtcgtggaggagcggtgggagcgtcggcggccgcgggcgatgcaacttccggacgggactcccctctgtccgcgcctcacatctccccttcctctcgcctagtcctgtgccgttttccgtccgcgactcttccggcccagagctttcggagtgcggttgctcaggggaagccgtcgccgcccccgcctcggggccgagtgagagtgcccgtcgcgtcgcgccgcgtcgccccccgggccgcctccttgccgccagtggcgggctccgttctccctcgaagcactccccccagctccatgaatggaaatcggctccgcaggacccgctggggcccagcccctactcatggtgcccagaagacctggctatggcaccatgggcaaacccattaaactgctggctaactgttttcaagttgaaatcccaaagattgatgtctacctctatgaggtagatattaaaccagacaagtgtcctaggagagtgaacagggaggtggttgactcaatggttcagcattttaaagtaactatatttggagaccgtagaccagtttatgatggaaaaagaagtctttacaccgccaatccacttcctgtggcaactacaggggtagatttagacgttactttacctggggaaggtggaaaagatcgacctttcaaggtgtcaatcaaatttgtctctcgggtgagttggcacctactgcatgaagtactgacaggacggaccttgcctgagccactggaattagacaagccaatcagcactaaccctgtccatgccgttgatgtggtgctacgacatctgccctccatgaaatacacacctgtggggcgttcatttttctccgctccagaaggatatgaccaccctctgggagggggcagggaagtgtggtttggattccatcagtctgttcggcctgccatgtggaaaatgatgcttaatatcgatggtaagggaactaaagccatattctgtattgggtggtggatttctgtatgatgtgtgtacataaattttatatataattatacatactggtgtctcgaagtaatatttggacatgtattatgatctactggagaaacctttatatttttattacatttcatttagaaagcctgtagaatttaccttggaatgctgctaaacatgaagcaagcacatgaagacagatttaaaagccctgatgattatctgagcaatcttctattataactcacttttgcccttttaactctaagccaacattttattatgaaatatatattttaagaaagataattctgttgggcatggtgacccccagatgttatacccact

SEQ ID NO: 363390 - DNA, 123 bp, Homo sapiens
ggaatacagcttgtaactgtgactctttttttttccctttcccctggcaggacccgctggggcccagcccctactcatggtgcccagaagacctggctatggcaccatgggcaaacccattaa

SEQ ID NO: 363391 - DNA, 1730 bp, Homo sapiens
aggaaggagggtggccctaccccagcgggctcggctcggggcctccgcggcagttcggggtccttcacccgccggctccagtcctgtgccgttttccgtccgcgactcttccggcccagagctttcggagtgcggttgctcaggggaagccgtcgccgcccccgcctcggggccgagtgagagtgcccgtcgcgtcgcgccgcgtcgccccccgggccgcctccttgccgccagtggcgggctccgttctccctcgaagcactccccccagctccatgaatggaaatcggctccgcaggacccgctggggcccagcccctactcatggtgcccagaagacctggctatggcaccatgggcaaacccattaaactgctggctaactgttttcaagttgaaatcccaaagattgatgtctacctctatgaggtagatattaaaccagacaagtgtcctaggagagtgaacagggaggtggttgactcaatggttcagcattttaaagtaactatatttggagaccgtagaccagtttatgatggaaaaagaagtctttacaccgccaatccacttcctgtggcaactacaggggtagatttagacgttactttacctggggaaggtggaaaagatcgacctttcaaggtgtcaatcaaatttgtctctcgggtgagttggcacctactgcatgaagtactgacaggacggaccttgcctgagccactggaattagacaagccaatcagcactaaccctgtccatgccgttgatgtggtgctacgacatctgccctccatgaaatacacacctgtggggcgttcatttttctccgctccagaaggatatgaccaccctctgggagggggcagggaagtgtggtttggattccatcagtctgttcggcctgccatgtggaaaatgatgcttaatatcgatgaaagagacctctggcagcagtgtggagaatagatagaggagaaaaaactaatctgagaagccagttaggaggcttttcaatcactagttcaggtaagagatggtgatggtctaatgtgggatggagaggaaggattaagctgaaaaaataggtttaagaaccatgtccagaaaaaaaaaactttgggtgtagtactggtacatggaacggattggaaaaaaatagaccagagctttactagatttttgaaagaattgtttttgcaaataaactacaagcctggcatatcagtcaaggttcagaacctagagaagcagaaccagtacgaagtatagagagagagtttatgcaattgtaggggctagctaggcaagtctgaaattttgggggcaggctgtcaggaagggcagggaaattcaggcatgggctgaagcagttatctataagtggaatttcttgctctcagggaagcttcagccctacttttaagacctttcacctaattgaatcaggcccatccacattattcaggataatctccattacttaaagtcaacagattatggattttaattacatctacaaaataccttcatagcaacacctagattagtgtttgattaaacaaatggcagctggtagcctagcaagttaacacattaaaaacaacacctgccatgatggcttacacttgtaatcccagcactttgggaggccaaagtgggaggatcacttgagattaggagtttgcgatcaggctgaacaacatagtgagacctgatctctaccaaaa

SEQ ID NO: 363392 - DNA, 3507 bp, Homo sapiens
acgccggcgagcttccggggcggccccgggcaggtcggcggcggcggcccgcagtcgtggaggagcggtgggagcgtcggcggccgcgggcgatgcaacttccggacgggactcccctctgtccgcgccgcgtcgccccccgggccgcctccttgccgccagtggcgggctccgttctccctcgaagcactccccccagctccatgaatggaaatcggctccgcaggacccgctggggcccagcccctactcatggtgcccagaagacctggctatggcaccatgggcaaacccattaaactgctggctaactgttttcaagttgaaatcccaaagattgatgtctacctctatgaggtagatattaaaccagacaagtgtcctaggagagtgaacagggaggtggttgactcaatggttcagcattttaaagtaactatatttggagaccgtagaccagtttatgatggaaaaagaagtctttacaccgccaatccacttcctgtggcaactacaggggtagatttagacgttactttacctggggaaggtggaaaagatcgacctttcaaggtgtcaatcaaatttgtctctcgggtgagttggcacctactgcatgaagtactgacaggacggaccttgcctgagccactggaattagacaagccaatcagcactaaccctgtccatgccgttgatgtggtgctacgacatctgccctccatgaaatacacacctgtggggcgttcatttttctccgctccagaaggatatgaccaccctctgggagggggcagggaagtgtggtttggattccatcagtctgttcggcctgccatgtggaaaatgatgcttaatatcgatgtttctgccactgccttctacaaagcacaacctgtaattcagttcatgtgtgaagttcttgatattcataatattgatgagcaaccaagacctctgactgattctcatcgggtaaaattcaccaaagagataaaaggtttgaaggttgaagtgactcattgtggaacaatgagacggaaataccgtgtttgtaatgtaacaaggaggcctgccagtcatcaaacctttcctttacagttagaaaacggccaaactgtggagagaacagtagcgcagtatttcagagaaaagtatactcttcagctgaagtacccgcaccttccctgtctgcaagtcgggcaggaacagaaacacacctacctgccactagaagtctgtaatattgtggcagggcaacgatgtatcaagaagctaacagacaatcagacttccactatgatcaaggcaacagcaagatctgcaccagatagacaagaggaaattagcagattggtaagaagtgcaaattatgaaacagatccatttgttcaggagtttcaatttaaagttcgggatgaaatggctcatgtaactggacgcgtacttccagcacctatgctccagtatggaggacggaatcggacagtagcaacaccgagccatggagtatgggacatgcgagggaaacaattccacacaggagttgaaatcaaaatgtgggctatcgcttgttttgccacacagaggcagtgcagagaagaaatattgaagggtttcacagaccagctgcgtaagatttctaaggatgcagggatgcccatccagggccagccatgcttctgcaaatatgcacagggggcagacagcgtagagcccatgttccggcatctcaagaacacatattctggcctacagcttattatcgtcatcctgccggggaagacaccagtgtatgcggaagtgaaacgtgtaggagacacacttttgggtatggctacacaatgtgttcaagtcaagaatgtaataaaaacatctcctcaaactctgtcaaacttgtgcctaaagataaatgttaaactcggagggatcaataatattcttgtacctcatcaaagaccttctgtgttccagcaaccagtgatctttttgggagccgatgtcactcatccacctgctggtgatggaaagaagccttctattgctgctgttgtaggtagtatggatgcacacccaagcagatactgtgccacagtaagagttcagagaccccgacaggagatcatccaggacttggcctccatggtccgggaacttcttattcaattttataagtcaactcggttcaagcctactcgtatcatcttttatcgggatggtgtttcagaggggcagtttaggcaggtattatattatgaactactagcaattcgagaagcctgcatcagtttggagaaagactatcaacctggaataacctacattgtagttcagaagagacatcacactcgattattttgtgctgataggacagaaagggttggaagaagtggcaatatcccagctggaacaacagttgatacagacattacacacccatatgagttcgatttttacctctgtagccatgctggaatacagggtaccagtcgtccttcacactatcatgttttatgggatgataactgctttactgcagatgaacttcagctgctaacttaccagctctgccacacttacgtacgctgtacacgatctgtttctatacctgcaccagcgtattatgctcacctggtagcatttagagccagatatcatcttgtggacaaagaacatgacagtgctgaaggaagtcacgtttcaggacaaagcaatgggcgagatccacaagctcttgccaaggctgtacagattcaccaagataccttacgcacaatgtacttcgcttaaatagtccaagtatattctctgagaggaagtactgaaagatgaattgacatacaacgtatgtttccagtgaagtcaattgagtaaggacacctccagccatacagaaaccaacactgtgtgggggccaaggtctgatccttatgttaatacaaggaagattgtttacttcatcaaggaacacagcatcattatgcaatatgaaaccagccaactgctttttgtgcggtctcctataggaagtatcgcaattgttttgttttcatttcttgtagtctaacccttttaatgcctttacctcaagttgcttggcagcacaactatctttgcaaaaaaaagtaaagaaaaagtaaatgatggtttaaaaaatacacaccttcatgaataatcaaagtgatttttcagaattatgtgtgcaaaaaattaatgtgcattcatatattcttgtaaaaggtgtctgtgtatttttaaaatatatacatccatacttcatatgcatatatatctagatctggattgataatagatatatatgtgtctgttatatattttagagttcattccattggggaattttctttcccttttattctacccccactaccgcctttatttctctatttcccttgccttcatcacctacatttttttcccagtcctaccagtgacattcaaatgttgatgtatctggttcgtttgaatataaaatatggcaaacta

SEQ ID NO: 363393 - DNA, 3395 bp, Homo sapiens
acgccggcgagcttccggggcggccccgggcaggtcggcggcggcggcccgcagtcgtggaggagcggtgggagcgtcggcggccgcgggcgatgcaacttccggacgggactcccctctgtccgcgcctcacatctccccttcctctcgcctagtcctgtgccgttttccgtccgcgactcttccggcccagagctttcggagtgcggttgctcaggggaagccgtcgccgcccccgcctcggggccgagtgagagtgcccgtcgcgtcgcgccgcgtcgccccccgggccgcctccttgccgccagtggcgggctccgttctccctcgaagcactccccccagctccatgaatggaaatcggctccgcaggacccgctggggcccagcccctactcatggtgcccagaagacctggctatggcaccatgggcaaacccattaaactgctggctaactgttttcaagttgaaatcccaaagattgatgtctacctctatgaggtagatattaaaccagacaagtgtcctaggagagtgaacaggtagatttagacgttactttacctggggaaggtggaaaagatcgacctttcaaggtgtcaatcaaatttgtctctcgggtgagttggcacctactgcatgaagtactgacaggacggaccttgcctgagccactggaattagacaagccaatcagcactaaccctgtccatgccgttgatgtggtgctacgacatctgccctccatgaatttctgccactgccttctacaaagcacaacctgtaattcagttcatgtgtgaagttcttgatattcataatattgatgagcaaccaagacctctgactgattctcatcgggtaaaattcaccaaagagataaaaggtttgaaggttgaagtgactcattgtggaacaatgagacggaaataccgtgtttgtaatgtaacaaggaggcctgccagtcatcaaacctttcctttacagttagaaaacggccaaactgtggagagaacagtagcgcagtatttcagagaaaagtatactcttcagctgaagtacccgcaccttccctgtctgcaagtcgggcaggaacagaaacacacctacctgccactagaagtctgtaatattgtggcagggcaacgatgtatcaagaagctaacagacaatcagacttccactatgatcaaggcaacagcaagatctgcaccagatagacaagaggaaattagcagattggtaagaagtgcaaattatgaaacagatccatttgttcaggagtttcaatttaaagttcgggatgaaatggctcatgtaactggacgcgtacttccagcacctatgctccagtatggaggacggaatcggacagtagcaacaccgagccatggagtatgggacatgcgagggaaacaattccacacaggagttgaaatcaaaatgtgggctatcgcttgttttgccacacagaggcagtgcagagaagaaatattgaagggtttcacagaccagctgcgtaagatttctaaggatgcagggatgcccatccagggccagccatgcttctgcaaatatgcacagggggcagacagcgtagagcccatgttccggcatctcaagaacacatattctggcctacagcttattatcgtcatcctgccggggaagacaccagtgtatgcggaagtgaaacgtgtaggagacacacttttgggtatggctacacaatgtgttcaagtcaagaatgtaataaaaacatctcctcaaactctgtcaaacttgtgcctaaagataaatgttaaactcggagggatcaataatattcttgtacctcatcaaagaccttctgtgttccagcaaccagtgatctttttgggagccgatgtcactcatccacctgctggtgatggaaagaagccttctattgctgctgttgtaggtagtatggatgcacacccaagcagatactgtgccacagtaagagttcagagaccccgacaggagatcatccaggacttggcctccatggtccgggaacttcttattcaattttataagtcaactcggttcaagcctactcgtatcatcttttatcgggatggtgtttcagaggggcagtttaggcaggtattatattatgaactactagcaattcgagaagcctgcatcagtttggagaaagactatcaacctggaataacctacattgtagttcagaagagacatcacactcgattattttgtgctgataggacagaaagggttggaagaagtggcaatatcccagctggaacaacagttgatacagacattacacacccatatgagttcgatttttacctctgtagccatgctggaatacagggtaccagtcgtccttcacactatcatgttttatgggatgataactgctttactgcagatgaacttcagctgctaacttaccagctctgccacacttacgtacgctgtacacgatctgtttctatacctgcaccagcgtattatgctcacctggtagcatttagagccagatatcatcttgtggacaaagaacatgacagtgctgaaggaagtcacgtttcaggacaaagcaatgggcgagatccacaagctcttgccaaggctgtacagattcaccaagataccttacgcacaatgtacttcgcttaaatagtccaagtatattctctgagaggaagtactgaaagatgaattgacatacaacgtatgtttccagtgaagtcaattgagtaaggacacctccagccatacagaaaccaacactgtgtgggggccaaggtctgatccttatgttaatacaaggaagattgtttacttcatcaaggaacacagcatcattatgcaatatgaaaccagccaactgctttttgtgcggtctcctataggaagtatcgcaattgttttgttttcatttcttgtagtctaacccttttaatgcctttacctcaagttgcttggcagcacaactatctttgcaaaaaaaagtaaagaaaaagtaaatgatggtttaaaaaatacacaccttcatgaataatcaaagtgatttttcagaattatgtgtgcaaaaaattaatgtgcattcatatattcttgtaaaaggtgtctgtgtatttttaaaatatatacatccatacttcatatgcatatatatctagatctggattgataatagatatatatgtgtctgttatatattttagagttcattccattggggaattttctttcccttttattctacccccactaccgcctttatttctctatttcccttgccttcatcacctacatttttttcccagtcctaccagtgacattcaaatgttgatgtatctggttcgtttgaatataaaatatggcaaacta

SEQ ID NO: 363394 - DNA, 1526 bp, Homo sapiens
acgccggcgagcttccggggcggccccgggcaggtcggcggcggcggcccgcagtcgtggaggagcggtgggagcgtcggcggccgcgggcgatgcaacttccggacgggactcccctctgtccgcgcctcacatctccccttcctctcgcctagtcctgtgccgttttccgtccgcgactcttccggcccagagctttcggagtgcggttgctcaggggaagccgtcgccgcccccgcctcggggccgagtgagagtgcccgtcgcgtcgcgccgcgtcgccccccgggccgcctccttgccgccagtggcgggctccgttctccctcgaagcactccccccagctccatgaatggaaatcggctccgcaggacccgctggggcccagcccctactcatggtgcccagaagacctggctatggcaccatgggcaaacccattaaactgctggctaactgttttcaagttgaaatcccaaagattgatgtctacctctatgaggtagatattaaaccagacaagtgtcctaggagagtgaacagggaggtggttgactcaatggttcagcattttaaagtaactatatttggagaccgtagaccagtttatgatggaaaaagaagtctttacaccgccaatccacttcctgtggcaactacaggggtagatttagacgttactttacctggggaaggtggaaaagatcgacctttcaaggtgtcaatcaaatttgtctctcgggtgagttggcacctactgcatgaagtactgacaggacggaccttgcctgagccactggaattagacaagccaatcagcactaaccctgtccatgccgttgatgtggtgctacgacatctgccctccatgaaatacacacctgtggggcgttcatttttctccgctccagaaggatatgaccaccctctgggagggggcagggaagtgtggtttggattccatcagtctgttcggcctgccatgtggaaaatgatgcttaatatcgatgaaagagacctctggcagcagtgtggagaatagatagaggagaaaaaactaatctgagaagccagttaggaggcttttcaatcactagttcaggtttcagtctacatgttacttccttgagaagcagtgtttgacacccttctcccccaatccagccatcccccaagtctgagttaggtatttctcttctgtattcccatagcacagtgtaattcccctataatagcatgtatcaccttgaattatgggtgtttattgttctgtctctcctgttagaacgaaagctccatgaagggattgtcattttattcaccagtgtaccctctatgcccagcacaacttttggtcatattaaacaaagaatgaataaataaatccaagagcataggaggaggagcatccaaatgagcctgaaaaattagagaaatatttgtagtagtatgtgatatcttagctgagcttaacaagtataatgagatcaagagtttggattgaaaatgaggtactcaggaataa

SEQ ID NO: 363395 - DNA, 476 bp, Homo sapiens
ccagcgcatcctcaagtaccacctgctgctccaggaaattgccaagcattttgatgaagaagaggatggctttgaggtggtggaggatgccattgacaccatgacctgtgtggcctggtacatcaacgacatgaagaggaggcatgagcacgcggtccggctccaggagattcagtcactcctcatcaactggaaggggcccgacctgaccacctacggggagcttgtcctggagggcacattccgcgtgcatcgcgtgcgcaatgaaaggacctttttcctctttgacaaaacactgcttatcaccaagaagcggggcgatcactttgtctacaagggcaacatcccggtaaccaggccctgccccatctcctctgccatcttctctccttcccaaaggatctgggctccccttcttgtctgcttcttggggctccagcaccacccttctgagatcaccctccctgcttccccag

SEQ ID NO: 363396 - DNA, 736 bp, Homo sapiens
ccagcgcatcctcaagtaccacctgctgctccaggaaattgccaagcattttgatgaagaagaggatggctttgaggtggtggaggatgccattgacaccatgacctgtgtggcctggtacatcaacgacatgaagaggaggcatgagcacgcggtccggctccaggagattcagtcactcctcatcaactggaaggggcccgacctgaccacctacggggagcttgtcctggagggcacattccgcgtgcatcgcgtgcgcaatgaaaggacctttttcctctttgacaaaacactgcttatcaccaagaagcggggcgatcactttgtctacaagggcaacatcccgtgctcctccctgatgctgatcgaaagcaccagagactccctgtgcttcactgtcacccactacaagcacagcaagcagcagtacagcatccaggccaagacagtggaggagaaacggaactggactcaccacatcaagaggctcatcctagagaaccaccatgccaccattccccagaaggccaaggaagccatcttggaaatggattcctattatcccaatcggtaccgctgcagcccagagcggctgaagaaggcttggtcctcccaggatgaggtgtccaccaatgtgcgccaggggcgccggcaatctgagccaaccaaacacctgctcaggcaactcaacgagaaagcccgagcagcaggaatgaaggtaaaggccagtggg

SEQ ID NO: 363397 - DNA, 3311 bp, Homo sapiens
gcgccctcccgcctggcgtcctccgcagattcgcgctgagaggcccgcggagacccgccccagaggctcaagaaaacccgcgggagcctcgcccggacccaggaactcgtgctcggggccaaccggctgggccgcgatcgcgtttcgtccggggccgcggcggccgtggggaatcggctgcagcgaatcggtggcgcgcggcgcctgagcgcgctgcagtcacccgggagccgggtccaggtcgtcttcccgtgacgcccagatctgtcctgcaggatggagccagcaccctcagaggttcgactcgccgtccgggaagccattcatgccctctcgtcttcggaggatggcggccacatcttctgcaccctggagtccctgaagcggtatctcggtgagatggagcctccagcgctcccgagggagaaggaggagtttgcctcggcccacttctcgcctgtcctcagatgtcttgccagcaggctgagcccagcctggctggagctgctgccccatggccgcctggaggagctgtgggccagcttcttcctggagggcccggcggaccaagccttcctggtgttgatggagaccatcgagggtgctgcgggccccagcttccggctgatgaagatggcgcggctgctggccagattcctgcgcgagggccggctggcagtgctgatggaggcgcagtgtcggcagcagacgcggcccggcttcatcctgctccgggagacgctgctgggcaaggtggtggccctgcccgatcacctgggcaaccgcctgcagcaggagaacttggccgagttcttcccccagaactacttccgcctgctcggcgaggaggtcgtccgggtgctgcaggcggttgtggactctctccaaggtggcctggattcctccgtgtccttcgtgtctcaggtccttgggaaagcctgtgtccacgggaggcagcaggagatcctgggcgtgctggtaccccggctggcagcgctcacccagggcagctacctgcaccagcgcgtctgctggcgcctggtggagcaagtgccggaccgggccatggaggctgtgctgaccgggctggtggaggccgcactggggcctgaggtcctttcgagactgctggggaacctggtggtgaagaacaagaaggcccagtttgtgatgacccagaagcttctgttcttacagtcccggctcacgacgcccatgctgcagagcctgctgggccatctggccatggacagccagcggcgcccgctcctgctgcaggtgctgaaggagctgttggagacgtggggcagcagcagtgccatccgccacactcccctgccgcagcagcgccacgtcagcaaggctgtcctcatctgcctggcgcaactcggggagccggaactgcgggacagccgggatgaactgctggccagcatgatggcgggcgtgaagtgccgcctggacagtagcctgccccccgtgcgacgcctgggcatgatcgtggcagaggtcgttagtgcccggatccaccccgaggggcctcccctgaaattccagtacgaagaggatgaactgagcctcgagctgctggccttggcctccccccagcctgcgggtgacggcgcctcggaggcgggcacgtccctcgttccagccacggcagagccccctgcagagacccccgcagagatcgtggatggcggcgtcccccaagcacagctggcgggctctgactcggacctggacagcgatgatgagtttgtcccctacgacatgtcgggggacagagagctgaagagcagcaaggctcctgcctacgtccgggactgcgtggaagccctgaccacgtctgaggacatagagcgctgggaggcagccctgcgggcccttgagggcctggtctacaggagccccacagccactcgggaggtgagcgtggagctggccaaggtgcttctgcatctggaggagaagacctgtgtggtgggatttgcagggctgcgccagagagccctggtggccgtcacggtcacagacccggccccggtggccgactatctgacctcacagttctatgccctcaactacagcctccggcagcgcatggacatcctggatgtgctgactctggctgcccaggagctgtctaggcctgggtgcctcgggaggactccccaacctggctccccaagtcccaacaccccgtgcctgccagaggcagccgtctctcagcctggcagtgccgtggcgtctgactggcgggtggtggtggaggagcggatcagaagcaagacccagcggctctccaagggtggcccgaggcagggcccggcaggcagccccagcagattcaactccgtggccggccacttcttcttccccctccttcagcgctttgacaggcctctggtgaccttcgacctcttgggagaagaccagctggttctcggaaggctggcgcacaccttaggggccctgatgtgcctggctgttaacaccacggtggctgtggccatgggcaaggccctgctggaattcgtgtgggcccttcgcttccacatcgatgcctacgtgcgccaggggctgttgtcggccgtctcctccgtcctgctcagcctgcctgctgcgcgcctgctggaggacctgatggacgagctgctggaagcccggtcctggctggcggacgtggctgagaaagacccggacgaggactgcaggacgctggcactgagggccctgctgcttctgcagagactcaagaacaggctcctcccacccgcgtctccctagtccctggaggcctccccaggaccaccctcgccgacagcaaggcaggcggctgagcagcggcctggagcagcagagccaggctttgtagcgaggccaggtcttcggccgcatccggtacggagagtgcagatgcaggaaggcccggcctgccgctatttatagtgcagccagtccgctaaaaatacactgggcctgggcactgcccgccgggacatggcagcctggacgtggggctggggctgtgggcgctgctggcggggttgactcttccagtgagggcagaaccaggctggcaggaggggaggacggtgtacctgctgctcagagcccccaaggctctcctctgagagccaccaagcaggacagagcagctcttgtcccaggtccctcgggctgagcgccgtgtcaccaggagaatagtgctcacagcccaggcagggtgtgtggctcctggatgggctcgtggggcgggatgggacagggcacgggctctcagaaaataaactgctttattggaatta

SEQ ID NO: 363398 - DNA, 780 bp, Homo sapiens
gttgtcctggggggtttgtttttttgctctcttattgtcccccgtgtgtgattaagtataaatttgatctgtttcgcgccggataatgtgtactcttagactcgctgtctggctggtttggtcgcgcacatttgtgtttcggtcgcctgcgccctgtgcccgcttcgtcccgatgttgttggtcgccgtggtgtggttgtgttgtttgtcagctccccgtggtgttggggggcgggtgtgctggtaggatctgtatctattatttatgtgcgccggtatgggggcgtggtgtgttaattattccggctctgtgtgtgtgttgggttgttcgctcgactatttttgttcccgccctcgtcgtgggggtatgggggtgttctttttttctcctatgtaggtgcccccgcgtgtgctgccgccgttcttctccccgctcttcttccttttttttataacccgcgccgccccgccgccgtggctgtatatatatagtagccgcctcctcttattgagggcgccccctttgttcccacaaaaccgtggggcgcgcgcgcgcgtggatcgtgggcgcccctccgtggggagaggcttcttctttcgcgcgcccgccccctctctcttttttttttttttttttttttttttttttttttttttttttttttttttttttttttttttttttttattttggcagggtgtgtggctcctggatgggctcgtggggcgggatgggacagggcacgggctctcagaaaataaactgctttattggaatta

SEQ ID NO: 363399 - DNA, 203 bp, Homo sapiens
tgtgtggaattttaagtgataagtgagggagaaatccagccatatctgtttccacactggctggatagacttgtggggctctttctggagacccataacctctcaccgggaggactctttcagtctggaccaggggcctacaggctacttggacaaaatttggcccgctgcatgtttttgtaaataaaatttttttggcactg

SEQ ID NO: 363400 - DNA, 4061 bp, Homo sapiens
gcgccctcccgcctggcgtcctccgcagattcgcgctgagaggcccgcggagacccgccccagaggctcaagaaaacccgcgggagcctcgcccggacccaggaactcgtgctcggggccaaccggctgggccgcgatcgcgtttcgtccggggccgcggcggccgtggggaatcggctgcagcgaatcggtggcgcgcggcgcctgagcgcgctgcagtcacccgggagccgggtccaggtcgtcttcccgtgacgcccagatctgtcctgcaggatggagccagcaccctcagaggttcgactcgccgtccgggaagccattcatgccctctcgtcttcggaggatggcggccacatcttctgcaccctggagtccctgaagcggtatctcggtgagatggagcctccagcgctcccgagggagaaggaggagtttgcctcggcccacttctcgcctgtcctcagatgtcttgccagcaggctgagcccagcctggctggagctgctgccccatggccgcctggaggagctgtgggccagcttcttcctggagggcccggcggaccaagccttcctggtgttgatggagaccatcgagggtgctgcgggccccagcttccggctgatgaagatggcgcggctgctggccagattcctgcgcgagggccggctggcagtgctgatggaggcgcagtgtcggcagcagacgcggcccggcttcatcctgctccgggagacgctgctgggcaaggtggtggccctgcccgatcacctgggcaaccgcctgcagcaggagaacttggccgagttcttcccccagaactacttccgcctgctcggcgaggaggtcgtccgggtgctgcaggcggttgtggactctctccaaggtggcctggattcctccgtgtccttcgtgtctcaggtccttgggaaagcctgtgtccacgggaggcagcaggagatcctgggcgtgctggtaccccggctggcagcgctcacccagggcagctacctgcaccagcgcgtctgctggcgcctggtggagcaagtgccggaccgggccatggaggctgtgctgaccgggctggtggaggccgcactggggcctgaggtcctttcgagactgctggggaacctggtggtgaagaacaagaaggcccagtttgtgatgacccagaagcttctgttcttacagtcccggctcacgacgcccatgctgcagagcctgctgggccatctggccatggacagccagcggcgcccgctcctgctgcaggtgctgaaggagctgttggagacgtggggcagcagcagtgccatccgccacactcccctgccgcagcagcgccacgtcagcaaggctgtcctcatctgcctggcgcaactcggggagccggaactgcgggacagccgggatgaactgctggccagcatgatggcgggcgtgaagtgccgcctggacagtagcctgccccccgtgcgacgcctgggcatgatcgtggcagaggtcgttagtgcccggatccaccccgaggggcctcccctgaaattccagtacgaagaggatgaactgagcctcgagctgctggccttggcctccccccagcctgcgggtgacggcgcctcggaggcgggcacgtccctcgttccagccacggcagagccccctgcagagacccccgcagagatcgtggatggcggcgtcccccaagcacagctggcgggctctgactcggacctggacagcgatgatgagtttgtcccctacgacatgtcgggggacagagagctgaagagcagcaaggctcctgcctacgtccgggactgcgtggaagccctgaccacgtctgaggacatagagcgctgggaggcagccctgcgggcccttgagggcctggtctacaggagccccacagccactcgggaggtgagcgtggagctggccaaggtgcttctgcatctggaggagaagacctgtgtggtgggatttgcagggctgcgccagagagccctggtggccgtcacggtcacagacccggccccggtggccgactatctgacctcacagttctatgccctcaactacagcctccggcagcgcatggacatcctggatgtgctgactctggctgcccaggagctgtctaggcctgggtgcctcgggaggactccccaacctggctccccaagtcccaacaccccgtgcctgccagaggcagccgtctctcagcctggcagtgccgtggcgtctgactggcgggtggtggtggaggagcggatcagaagcaagacccagcggctctccaagggtggcccgaggcagggcccggcaggcagccccagcagattcaactccgtggccggccacttcttcttccccctccttcagcgctttgacaggcctctggtgaccttcgacctcttgggagaagaccagctggttctcggaaggctggcgcacaccttaggggccctgatgtgcctggctgttaacaccacggtggctgtggccatgggcaaggccctgctggaattcgtgtgggcccttcgcttccacatcgatgcctacgtgcgccaggggctgttgtcggccgtctcctccgtcctgctcagcctgcctgctgcgcgcctgctggaggacctgatggacgagctgctggaagcccggtcctggctggcggacgtggctgagaaagacccggacgaggactgcaggacgctggcactgagggccctgctgcttctgcagagactcaagaacaggctcctcccacccgcgtctccctagtccctggaggcctccccaggaccaccctcgccgacagcaaggcaggcggctgagcagcggcctggagcagcagagccaggctttgtagcgaggccaggtcttcggccgcatccggtacggagagtgcagatgcaggaaggcccggcctgccgctatttatagtgcagccagtccgctaaaaatacactgggcctgggcactgcccgccgggacatggcagcctggacgtggggctggggctgtgggcgctgctggcggggttgactcttccagtgagggcagaaccaggctggcaggaggggaggacggtgtacctgctgctcagagcccccaaggctctcctctgagagccaccaagcaggacagagcagctcttgtcccaggtccctcgggctgagcgccgtgtcaccaggagaatagtgctcacagcccaggcagggtgtgtggctcctggatgggctcgtggggcgggatgggacagggcacgggctctcagaaaataaactgctttattggaattacaggagtgttggtggccggtgggcagagcctagcagggggtgcagccgccaaggcccgggtgtcccagctgttgctcaggagccgtgggccctgcaggagtatggggaggatatgatgtgtggggagcaggggggcaggtgccccagccctccagctgcagcttcctgaggttctagaagtttctcaggctttacaatgtgtagttgggagaatacgatggaagggtgaacccgactcccttcaaaggaatgaatccaaaaatctagtggagctgccgggcacccagaggcaggtgggacagagcaaggtgcagacgggtcacaccctccgccggcccgggccgctgcgttctcgcccagctctgtcgcgtattccaacacagacatgttttttcccagcaaaaatgctggctttgccacagctgacaaaaaaattccagaagatgcctttctgcagcagcacgctggtcctggggcccaggcccctcaggggtcgtcatctgcctcttccaccacctcctcgtccagctccctggcgtcctccatgctgttgtggcggacctgctcggggacggtgcgtggcagtgggagacccagcccccggtgcacggcgtccacggcctgcgggctcacgtagtaggacatgttggccaaggaataccagacggcctacagattcctggaggagatgcggcggcggcttcccttggccaacatgtccacggcctgcgggctcacgtagtaggacat

SEQ ID NO: 363401 - DNA, 3781 bp, Homo sapiens
gcgccctcccgcctggcgtcctccgcagattcgcgctgagaggcccgcggagacccgccccagaggctcaagaaaacccgcgggagcctcgcccggacccaggaactcgtgctcggggccaaccggctgggccgcgatcgcgtttcgtccggggccgcggcggccgtggggaatcggctgcagcgaatcggtggcgcgcggcgcctgagcgcgctgcagtcacccgggagccgggtccaggtcgtcttcccgtgacgcccagatctgtcctgcaggatggagccagcaccctcagaggttcgactcgccgtccgggaagccattcatgccctctcgtcttcggaggatggcggccacatcttctgcaccctggagtccctgaagcggtatctcggtgagatggagcctccagcgctcccgagggagaaggaggagtttgcctcggcccacttctcgcctgtcctcagatgtcttgccagcaggctgagcccagcctggctggagctgctgccccatggccgcctggaggagctgtgggccagcttcttcctggagggcccggcggaccaagccttcctggtgttgatggagaccatcgagggtgctgcgggccccagcttccggctgatgaagatggcgcggctgctggccagattcctgcgcgagggccggctggcagtgctgatggaggcgcagtgtcggcagcagacgcggcccggcttcatcctgctccgggagacgctgctgggcaaggtggtggccctgcccgatcacctgggcaaccgcctgcagcaggagaacttggccgagttcttcccccagaactacttccgcctgctcggcgaggaggtcgtccgggtgctgcaggcggttgtggactctctccaaggtggcctggattcctccgtgtccttcgtgtctcaggtccttgggaaagcctgtgtccacgggaggcagcaggagatcctgggcgtgctggtaccccggctggcagcgctcacccagggcagctacctgcaccagcgcgtctgctggcgcctggtggagcaagtgccggaccgggccatggaggctgtgctgaccgggctggtggaggccgcactggggcctgaggtcctttcgagactgctggggaacctggtggtgaagaacaagaaggcccagtttgtgatgacccagaagcttctgttcttacagtcccggctcacgacgcccatgctgcagagcctgctgggccatctggccatggacagccagcggcgcccgctcctgctgcaggtgctgaaggagctgttggagacgtggggcagcagcagtgccatccgccacactcccctgccgcagcagcgccacgtcagcaaggctgtcctcatctgcctggcgcaactcggggagccggaactgcgggacagccgggatgaactgctggccagcatgatggcgggcgtgaagtgccgcctggacagtagcctgccccccgtgcgacgcctgggcatgatcgtggcagaggtcgttagtgcccggatccaccccgaggggcctcccctgaaattccagtacgaagaggatgaactgagcctcgagctgctggccttggcctccccccagcctgcgggtgacggcgcctcggaggcgggcacgtccctcgttccagccacggcagagccccctgcagagacccccgcagagatcgtggatggcggcgtcccccaagcacagctggcgggctctgactcggacctggacagcgatgatgagtttgtcccctacgacatgtcgggggacagagagctgaagagcagcaaggctcctgcctacgtccgggactgcgtggaagccctgaccacgtctgaggacatagagcgctgggaggcagccctgcgggcccttgagggcctggtctacaggagccccacagccactcgggaggtgagcgtggagctggccaaggtgcttctgcatctggaggagaagacctgtgtggtgggatttgcagggctgcgccagagagccctggtggccgtcacggtcacagacccggccccggtggccgactatctgacctcacagttctatgccctcaactacagcctccggcagcgcatggacatcctggatgtgctgactctggctgcccaggagctgtctaggcctgggtgcctcgggaggactccccaacctggctccccaagtcccaacaccccgtgcctgccagaggcagccgtctctcagcctggcagtgccgtggcgtctgactggcgggtggtggtggaggagcggatcagaagcaagacccagcggctctccaagggtggcccgaggcagggcccggcaggcagccccagcagattcaactccgtggccggccacttcttcttccccctccttcagcgctttgacagagggagcgtcccgcaagattcctctgtggttgagctttgccatgaggcaccaggcatctgctccgatgctgggcttgtggcatggccggcagtgccgcccgcacgtgcccgacgccatcacctgctgggccctgctcgcctcctcctgcctcagccggcgctgcactggccccacgttcagggcgtgaggctctcgagatggcagagaagtgtggggcctgggttgtgctgcagcaggggtgggggtctcggcgttgggaactcctggcccaggtggacttgtgccagacagccctgcagggggagtaggcacccggaaatgtctgctcctacgatctcggtgcaggcaaggcggtgggcacgggaggaggggctgtgtggggctccctcggtctcccacggtggcccaggaggttggggacctggccctgaggcacccgctgcaccttgggctccatcctgtgctctaggcctctggtgaccttcgacctcttgggagaagaccagctggttctcggaaggctggcgcacaccttaggggccctgatgtgcctggctgttaacaccacggtggctgtggccatgggcaaggccctgctggaattcgtgtgggcccttcgcttccacatcgatgcctacgtgcgccaggggctgttgtcggccgtctcctccgtcctgctcagcctgcctgctgcgcgcctgctggaggacctgatggacgagctgctggaagcccggtcctggctggcggacgtggctgagaaagacccggacgaggactgcaggacgctggcactgagggccctgctgcttctgcagagactcaagaacaggctcctcccacccgcgtctccctagtccctggaggcctccccaggaccaccctcgccgacagcaaggcaggcggctgagcagcggcctggagcagcagagccaggctttgtagcgaggccaggtcttcggccgcatccggtacggagagtgcagatgcaggaaggcccggcctgccgctatttatagtgcagccagtccgctaaaaatacactgggcctgggcactgcccgccgggacatggcagcctggacgtggggctggggctgtgggcgctgctggcggggttgactcttccagtgagggcagaaccaggctggcaggaggggaggacggtgtacctgctgctcagagcccccaaggctctcctctgagagccaccaagcaggacagagcagctcttgtcccaggtccctcgggctgagcgccgtgtcaccaggagaatagtgctcacagcccaggcagggtgtgtggctcctggatgggctcgtggggcgggatgggacagggcacgggctctcagaaaataaactgctttattggaatta

SEQ ID NO: 363402 - DNA, 3276 bp, Homo sapiens
gcgccctcccgcctggcgtcctccgcagattcgcgctgagaggcccgcggagacccgccccagaggctcaagaaaacccgcgggagcctcgcccggacccaggaactcgtgctcggggccaaccggctgggccgcgatcgcgtttcgtccggggccgcggcggccgtggggaatcggctgcagcgaatcggtggcgcgcggcgcctgagcgcgctgcagtcacccgggagccgggtccaggatggagccagcaccctcagaggttcgactcgccgtccgggaagccattcatgccctctcgtcttcggaggatggcggccacatcttctgcaccctggagtccctgaagcggtatctcggtgagatggagcctccagcgctcccgagggagaaggaggagtttgcctcggcccacttctcgcctgtcctcagatgtcttgccagcaggctgagcccagcctggctggagctgctgccccatggccgcctggaggagctgtgggccagcttcttcctggagggcccggcggaccaagccttcctggtgttgatggagaccatcgagggtgctgcgggccccagcttccggctgatgaagatggcgcggctgctggccagattcctgcgcgagggccggctggcagtgctgatggaggcgcagtgtcggcagcagacgcggcccggcttcatcctgctccgggagacgctgctgggcaaggtggtggccctgcccgatcacctgggcaaccgcctgcagcaggagaacttggccgagttcttcccccagaactacttccgcctgctcggcgaggaggtcgtccgggtgctgcaggcggttgtggactctctccaaggtggcctggattcctccgtgtccttcgtgtctcaggtccttgggaaagcctgtgtccacgggaggcagcaggagatcctgggcgtgctggtaccccggctggcagcgctcacccagggcagctacctgcaccagcgcgtctgctggcgcctggtggagcaagtgccggaccgggccatggaggctgtgctgaccgggctggtggaggccgcactggggcctgaggtcctttcgagactgctggggaacctggtggtgaagaacaagaaggcccagtttgtgatgacccagaagcttctgttcttacagtcccggctcacgacgcccatgctgcagagcctgctgggccatctggccatggacagccagcggcgcccgctcctgctgcaggtgctgaaggagctgttggagacgtggggcagcagcagtgccatccgccacactcccctgccgcagcagcgccacgtcagcaaggctgtcctcatctgcctggcgcaactcggggagccggaactgcgggacagccgggatgaactgctggccagcatgatggcgggcgtgaagtgccgcctggacagtagcctgccccccgtgcgacgcctgggcatgatcgtggcagaggtcgttagtgcccggatccaccccgaggggcctcccctgaaattccagtacgaagaggatgaactgagcctcgagctgctggccttggcctccccccagcctgcgggtgacggcgcctcggaggcgggcacgtccctcgttccagccacggcagagccccctgcagagacccccgcagagatcgtggatggcggcgtcccccaagcacagctggcgggctctgactcggacctggacagcgatgatgagtttgtcccctacgacatgtcgggggacagagagctgaagagcagcaaggctcctgcctacgtccgggactgcgtggaagccctgaccacgtctgaggacatagagcgctgggaggcagccctgcgggcccttgagggcctggtctacaggagccccacagccactcgggaggtgagcgtggagctggccaaggtgcttctgcatctggaggagaagacctgtgtggtgggatttgcagggctgcgccagagagccctggtggccgtcacggtcacagacccggccccggtggccgactatctgacctcacagttctatgccctcaactacagcctccggcagcgcatggacatcctggatgtgctgactctggctgcccaggagctgtctaggcctgggtgcctcgggaggactccccaacctggctccccaagtcccaacaccccgtgcctgccagaggcagccgtctctcagcctggcagtgccgtggcgtctgactggcgggtggtggtggaggagcggatcagaagcaagacccagcggctctccaagggtggcccgaggcagggcccggcaggcagccccagcagattcaactccgtggccggccacttcttcttccccctccttcagcgctttgacaggcctctggtgaccttcgacctcttgggagaagaccagctggttctcggaaggctggcgcacaccttaggggccctgatgtgcctggctgttaacaccacggtggctgtggccatgggcaaggccctgctggaattcgtgtgggcccttcgcttccacatcgatgcctacgtgcgccaggggctgttgtcggccgtctcctccgtcctgctcagcctgcctgctgcgcgcctgctggaggacctgatggacgagctgctggaagcccggtcctggctggcggacgtggctgagaaagacccggacgaggactgcaggacgctggcactgagggccctgctgcttctgcagagactcaagaacaggctcctcccacccgcgtctccctagtccctggaggcctccccaggaccaccctcgccgacagcaaggcaggcggctgagcagcggcctggagcagcagagccaggctttgtagcgaggccaggtcttcggccgcatccggtacggagagtgcagatgcaggaaggcccggcctgccgctatttatagtgcagccagtccgctaaaaatacactgggcctgggcactgcccgccgggacatggcagcctggacgtggggctggggctgtgggcgctgctggcggggttgactcttccagtgagggcagaaccaggctggcaggaggggaggacggtgtacctgctgctcagagcccccaaggctctcctctgagagccaccaagcaggacagagcagctcttgtcccaggtccctcgggctgagcgccgtgtcaccaggagaatagtgctcacagcccaggcagggtgtgtggctcctggatgggctcgtggggcgggatgggacagggcacgggctctcagaaaataaactgctttattggaatta

SEQ ID NO: 363403 - DNA, 3657 bp, Homo sapiens
gcgccctcccgcctggcgtcctccgcagattcgcgctgagaggcccgcggagacccgccccagaggctcaagaaaacccgcgggagcctcgcccggacccaggaactcgtgctcggggccaaccggctgggccgcgatcgcgtttcgtccggggccgcggcggccgtggggaatcggctgcagcgaatcggtggcgcgcggcgcctgagcgcgctgcagtcacccgggagccgggtccaggtcgtcttcccgtgacgcccagatctgtcctgcaggatggagccagcaccctcagaggttcgactcgccgtccgggaagccattcatgccctctcgtcttcggaggatggcggccacatcttctgcaccctggagtccctgaagcggtatctcggtgagatggagcctccagcgctcccgagggagaaggaggagtttgcctcggcccacttctcgcctgtcctcagatgtcttgccagcaggctgagcccagcctggctggagctgctgccccatggccgcctggaggagctgtgggccagcttcttcctggagggcccggcggaccaagccttcctggtgttgatggagaccatcgagggtgctgcgggccccagcttccggctgatgaagatggcgcggctgctggccagattcctgcgcgagggccggctggcagtgctgatggaggcgcagtgtcggcagcagacgcggcccggcttcatcctgctccgggagacgctgctgggcaaggtggtggccctgcccgatcacctgggcaaccgcctgcagcaggagaacttggccgagttcttcccccagaactacttccgcctgctcggcgaggaggtcgtccgggtgctgcaggcggttgtggactctctccaaggtggcctggattcctccgtgtccttcgtgtctcaggtccttgggaaagcctgtgtccacgggaggcagcaggagatcctgggcgtgctggtaccccggctggcagcgctcacccagggcagctacctgcaccagcgcgtctgctggcgcctggtggagcaagtgccggaccgggccatggaggctgtgctgaccgggctggtggaggccgcactggggcctgaggtcctttcgagactgctggggaacctggtggtgaagaacaagaaggcccagtttgtgatgacccagaagcttctgttcttacagtcccggctcacgacgcccatgctgcagagcctgctgggccatctggccatggacagccagcggcgcccgctcctgctgcaggtgctgaaggagctgttggagacgtggggcagcagcagtgccatccgccacactcccctgccgcagcagcgccacgtcagcaaggctgtcctcatctgcctggcgcaactcggggagccggaactgcgggacagccgggatgaactgctggccagcatgatggcgggcgtgaagtgccgcctggacagtagcctgccccccgtgcgacgcctgggcatgatcgtggcagaggtcgttagtgcccggatccaccccgaggggcctcccctgaaattccagtacgaagaggatgaactgagcctcgagctgctggccttggcctccccccagcctgcgggtgacggcgcctcggaggcgggcacgtccctcgttccagccacggcagagccccctgcagagacccccgcagagatcgtggatggcggcgtcccccaagcacagctggcgggctctgactcggacctggacagcgatgatgagtttgtcccctacgacatgtcgggggacagagagctgaagagcagcaaggctcctgcctacgtccgggactgcgtggaagccctgaccacgtctgaggacatagagcgctgggaggcagccctgcgggcccttgagggcctggtctacaggagccccacagccactcgggaggtgagcgtggagctggccaaggtgcttctgcatctggaggagaagacctgtgtggtgggatttgcagggctgcgccagagagccctggtggccgtcacggtcacagacccggccccggtggccgactatctgacctcacagttctatgccctcaactacagcctccggcagcgcatggacatcctggatgtgctgactctggctgcccaggagctgtctaggcctgggtgcctcgggaggactccccaacctggctccccaagtcccaacaccccgtgcctgccagaggcagccgtctctcagcctggcagtgccgtggcgtctgactggcgggtggtggtggaggagcggatcagaagcaagacccagcggctctccaagggtggcccgaggcagggcccggcaggcagccccagcagattcaactccgtggccggccacttcttcttccccctccttcagcgctttgacagagggagcgtcccgcaagattcctctgtggttgagctttgccatgaggcaccaggcatctgctccgatgctgggcttgtggcatggccggcagtgccgcccgcacgtgcccgacgccatcacctgctgggccctgctcgcctcctcctgcctcagccggcgctgcactggccccacgttcagggcgtgaggctctcgagatggcagagaagtgtggggcctgggttgtgctgcagcaggggtgggggtctcggcgttgggaactcctggcccaggtggacttgtgccagacagccctgcagggggagtaggcacccggaaatgtctgctcctacgatctcggtgcaggcctctggtgaccttcgacctcttgggagaagaccagctggttctcggaaggctggcgcacaccttaggggccctgatgtgcctggctgttaacaccacggtggctgtggccatgggcaaggccctgctggaattcgtgtgggcccttcgcttccacatcgatgcctacgtgcgccaggggctgttgtcggccgtctcctccgtcctgctcagcctgcctgctgcgcgcctgctggaggacctgatggacgagctgctggaagcccggtcctggctggcggacgtggctgagaaagacccggacgaggactgcaggacgctggcactgagggccctgctgcttctgcagagactcaagaacaggctcctcccacccgcgtctccctagtccctggaggcctccccaggaccaccctcgccgacagcaaggcaggcggctgagcagcggcctggagcagcagagccaggctttgtagcgaggccaggtcttcggccgcatccggtacggagagtgcagatgcaggaaggcccggcctgccgctatttatagtgcagccagtccgctaaaaatacactgggcctgggcactgcccgccgggacatggcagcctggacgtggggctggggctgtgggcgctgctggcggggttgactcttccagtgagggcagaaccaggctggcaggaggggaggacggtgtacctgctgctcagagcccccaaggctctcctctgagagccaccaagcaggacagagcagctcttgtcccaggtccctcgggctgagcgccgtgtcaccaggagaatagtgctcacagcccaggcagggtgtgtggctcctggatgggctcgtggggcgggatgggacagggcacgggctctcagaaaataaactgctttattggaatta

SEQ ID NO: 363404 - DNA, 608 bp, Homo sapiens
ggctgaggctggaagctgtggcaggttctcagccctgagctcctggggccacacagggtcgggtgagcacagggcccccagaaggattgcctggacacgttcacagactctctctagacgggggcccgagggaggctggggttaagggggccaccccctgcagtttgtccggccggggctgcagggcagccaggtcgctctgggtcggtggccgtgggtgtcagcctctctgctgccggctgcctggccatggaggagccctgtctgccttcaggctgtggaggtgacggcctgtcctcttatctgctgagaacctgggatctctctggggcattggccttgggggaggcccagctccttcgagaggggccacggcccctcagctttgagcactcccagtgctacccttggcctgaggtggaatcttagaaagtcgcttttaaaaagacacctggctatccagggcccagccactgagtgagaccgggctgcgagggaggccacagtggggagtggctcccgtggctccgtctcggggaggggcgctgcagcctggcggatgccgctgagcctgctcccctgctgtagtacgaagaggatgaactgag

SEQ ID NO: 363405 - DNA, 478 bp, Homo sapiens
ttggcactgtcaaaggaggccttcgagggtggacccgcctccgcccgggctgaggtgcagggaaggaggctgtcgggggtggacccgcctccgcccgggctgcggtgcacgcgctctctgggttgtggcatttatgccccagagaagggaggatgaaggcccagctcaggcagtcggaggatggaaccagaggctcgtggctaggaattggcaggccgggagtcaggccgccgtctgtgggcatcggagttcacgctctcgctcctccctgtctccaggccggcttgcagctctggcccctgactctgtcttgcaggcctgaggtcctttcgagactgctggggaacctggtggtgaagaacaagaaggcccagtttgtgatgacccagaagcttctgttcttacagtcccggctcacggtgaggacgccacggagggtgcaggctgctggctgccccatcacagcaagaatggctgc

SEQ ID NO: 363406 - DNA, 432 bp, Homo sapiens
gtggctgacaggcagcctggcctggtacttcccaaataggaagtgtgccaggcagggccgcagcgtgggtggtctgccacactgaggggagtgggaggtctggggtgtggtccctgccgagctcagcccccgccttcttgccggcagctacgtgcgccaggggctgttgtcggccgtctcctccgtcctgctcagcctgcctgctgcgcgcctgctggaggacctgatggacgagctgctggaagcccggtcctggctggcgggtgagtgtcggcctgcggtgtgtgtgtgagatgtgtgtcggcccggggtgtgtgtgtatgtgtgtgtgtgtgtgtgagagatgtgtcggcccggggtgtgtgtgtgtgtgtgtgtgatgtgtgttggcccggggtgtgtgtgtgtgtgtgtgtgtgtgtgtgtgtgtgt

SEQ ID NO: 363407 - DNA, 3030 bp, Homo sapiens
gcgccctcccgcctggcgtcctccgcagattcgcgctgagaggcccgcggagacccgccccagaggctcaagaaaacccgcgggagcctcgcccggacccaggaactcgtgctcggggccaaccggctgggccgcgatcgcgtttcgtccggggccgcggcggccgtggggaatcggctgcagcgaatcggtggcgcgcggcgcctgagcgcgctgcagtcacccgggagccgggtccaggtcgtcttcccgtgacgcccagatctgtcctgcaggatggagccagcaccctcagaggttcgactcgccgtccgggaagccattcatgccctctcgtcttcggaggatggcggccacatcttctgcaccctggagtccctgaagcggtatctcggtgagatggagcctccagcgctcccgagggagaaggaggagtttgcctcggcccacttctcgcctgtcctcagatgtcttgccagcaggctgagcccagcctggctggagctgctgccccatggccgcctggaggagctgtgggccagcttcttcctggagggcccggcggaccaagccttcctggtgttgatggagaccatcgagggtgctgcgggccccagcttccggctgatgaagatggcgcggctgctggccagattcctgcgcgagggccggctggcagtgctgatggaggcgcagtgtcggcagcagacgcggcccggcttcatcctgctccgggagacgctgctgggcaaggtggtggccctgcccgatcacctgggcaaccgcctgcagcaggagaacttggccgagttcttcccccagaactacttccgcctgctcggcgaggaggtcgtccgggtgctgcaggcggttgtggactctctccaaggtggcctggattcctccgtgtccttcgtgtctcaggtccttgggaaagcctgtgtccacgggaggcagcaggagatcctgggcgtgctggtaccccggctggcagcgctcacccagggcagctacctgcaccagcgcgtctgctggcgcctggtggagcaagtgccggaccgggccatggaggctgtgctgaccgggctggtggaggccgcactggggcctgaggtcctttcgagactgctggggaacctggtggtgaagaacaagaaggcccagtttgtgatgacccagaagcttctgttcttacagtcccggctcacgacgcccatgctgcagagcctgctgggccatctggccatggacagccagcggcgcccgctcctgctgcaggtgctgaaggagctgttggagacgtggggcagcagcagtgccatccgccacactcccctgccgcagcagcgccacgtcagcaaggctgtcctcatctgcctggcgcaactcggggagccggaactgcgggacagccgggatgaactgctggccagcatgatggcgggcgtgaagtgccgcctggacagtagcctgccccccgtgcgacgcctgggcatgatcgtggcagaggtcgttagtgcccggatccaccccgaggggcctcccctgaaattccagtacgaagaggatgaactgagcctcgagctgctggccttggcctccccccagcctgcgggtgacggcgcctcggaggcgggcacgtccctcgttccagccacggcagagccccctgcagagacccccgcagagatcgtggatggcggcgtcccccaagcacagctggcgggctctgactcggacctggacagcgatgatgagtttgtcccctacgacatgtcgggggacagagagctgaagagcagcaaggctcctgcctacgtccgggactgcgtggaaggtgctgactctggctgcccaggagctgtctaggcctgggtgcctcgggaggactccccaacctggctccccaagtcccaacaccccgtgcctgccagaggcagccgtctctcagcctggcagtgccgtggcgtctgactggcgggtggtggtggaggagcggatcagaagcaagacccagcggctctccaagggtggcccgaggcagggcccggcaggcagccccagcagattcaactccgtggccggccacttcttcttccccctccttcagcgctttgacaggcctctggtgaccttcgacctcttgggagaagaccagctggttctcggaaggctggcgcacaccttaggggccctgatgtgcctggctgttaacaccacggtggctgtggccatgggcaaggccctgctggaattcgtgtgggcccttcgcttccacatcgatgcctacgtgcgccaggggctgttgtcggccgtctcctccgtcctgctcagcctgcctgctgcgcgcctgctggaggacctgatggacgagctgctggaagcccggtcctggctggcggacgtggctgagaaagacccggacgaggactgcaggacgctggcactgagggccctgctgcttctgcagagactcaagaacaggctcctcccacccgcgtctccctagtccctggaggcctccccaggaccaccctcgccgacagcaaggcaggcggctgagcagcggcctggagcagcagagccaggctttgtagcgaggccaggtcttcggccgcatccggtacggagagtgcagatgcaggaaggcccggcctgccgctatttatagtgcagccagtccgctaaaaatacactgggcctgggcactgcccgccgggacatggcagcctggacgtggggctggggctgtgggcgctgctggcggggttgactcttccagtgagggcagaaccaggctggcaggaggggaggacggtgtacctgctgctcagagcccccaaggctctcctctgagagccaccaagcaggacagagcagctcttgtcccaggtccctcgggctgagcgccgtgtcaccaggagaatagtgctcacagcccaggcagggtgtgtggctcctggatgggctcgtggggcgggatgggacagggcacgggctctcagaaaataaactgctttattggaatta

SEQ ID NO: 363408 - DNA, 3205 bp, Homo sapiens
gcgccctcccgcctggcgtcctccgcagattcgcgctgagaggcccgcggagacccgccccagaggctcaagaaaacccgcgggagcctcgcccggacccaggaactcgtgctcggggccaaccggctgggccgcgatcgcgtttcgtccggggccgcggcggccgtggggaatcggctgcagcgaatcggtggcgcgcggcgcctgagcgcgctgcagtcacccgggagccgggtccaggtcgtcttcccgtgacgcccagatctgtcctgcaggatggagccagcaccctcagaggttcgactcgccgtccgggaagccattcatgccctctcgtcttcggaggatggcggccacatcttctgcaccctggagtccctgaagcggtatctcggtgagatggagcctccagcgctcccgagggagaaggaggagtttgcctcggcccacttctcgcctgtcctcagatgtcttgccagcaggctgagcccagcctggctggagctgctgccccatggccgcctggaggagctgtgggccagcttcttcctggagggcccggcggaccaagccttcctggtgttgatggagaccatcgagggtgctgcgggccccagcttccggctgatgaagatggcgcggctgctggccagattcctgcgcgagggccggctggcagtgctgatggaggcgcagtgtcggcagcagacgcggcccggcttcatcctgctccgggagacgctgctgggcaaggtggtggccctgcccgatcacctgggcaaccgcctgcagcaggagaacttggccgagttcttcccccagaactacttccgcctgctcggcgaggaggtcgtccgggtgctgcaggcggttgtggactctctccaaggtggcctggattcctccgtgtccttcgtgtctcaggtccttgggaaagcctgtgtccacgggaggcagcaggagatcctgggcgtgctggtaccccggctggcagcgctcacccagggcagctacctgcaccagcgcgtctgctggcgcctggtggagcaagtgccggaccgggccatggaggctgtgctgaccgggctggtggaggccgcactggggcctgaggtcctttcgagactgctggggaacctggtggtgaagaacaagaaggcccagtttgtgatgacccagaagcttctgttcttacagtcccggctcacgacgcccatgctgcagagcctgctgggccatctggccatggacagccagcggcgcccgctcctgctgcaggtgctgaaggagctgttggagacgtggggcagcagcagtgccatccgccacactcccctgccgcagcagcgccacgtcagcaaggctgtcctcatctgcctggcgcaactcggggagccggaactgcgggacagccgggatgaactgctggccagcatgatggcgggcgtgaagtgccgcctggacagtagcctgccccccgtgcgacgcctgggcatgatcgtggcagaggtcgttagtgcccggatccaccccgaggggcctcccctgaaattccagtacgaagaggatgaactgagcctcgagctgctggccttggcgtcccccaagcacagctggcgggctctgactcggacctggacagcgatgatgagtttgtcccctacgacatgtcgggggacagagagctgaagagcagcaaggctcctgcctacgtccgggactgcgtggaagccctgaccacgtctgaggacatagagcgctgggaggcagccctgcgggcccttgagggcctggtctacaggagccccacagccactcgggaggtgagcgtggagctggccaaggtgcttctgcatctggaggagaagacctgtgtggtgggatttgcagggctgcgccagagagccctggtggccgtcacggtcacagacccggccccggtggccgactatctgacctcacagttctatgccctcaactacagcctccggcagcgcatggacatcctggatgtgctgactctggctgcccaggagctgtctaggcctgggtgcctcgggaggactccccaacctggctccccaagtcccaacaccccgtgcctgccagaggcagccgtctctcagcctggcagtgccgtggcgtctgactggcgggtggtggtggaggagcggatcagaagcaagacccagcggctctccaagggtggcccgaggcagggcccggcaggcagccccagcagattcaactccgtggccggccacttcttcttccccctccttcagcgctttgacaggcctctggtgaccttcgacctcttgggagaagaccagctggttctcggaaggctggcgcacaccttaggggccctgatgtgcctggctgttaacaccacggtggctgtggccatgggcaaggccctgctggaattcgtgtgggcccttcgcttccacatcgatgcctacgtgcgccaggggctgttgtcggccgtctcctccgtcctgctcagcctgcctgctgcgcgcctgctggaggacctgatggacgagctgctggaagcccggtcctggctggcggacgtggctgagaaagacccggacgaggactgcaggacgctggcactgagggccctgctgcttctgcagagactcaagaacaggctcctcccacccgcgtctccctagtccctggaggcctccccaggaccaccctcgccgacagcaaggcaggcggctgagcagcggcctggagcagcagagccaggctttgtagcgaggccaggtcttcggccgcatccggtacggagagtgcagatgcaggaaggcccggcctgccgctatttatagtgcagccagtccgctaaaaatacactgggcctgggcactgcccgccgggacatggcagcctggacgtggggctggggctgtgggcgctgctggcggggttgactcttccagtgagggcagaaccaggctggcaggaggggaggacggtgtacctgctgctcagagcccccaaggctctcctctgagagccaccaagcaggacagagcagctcttgtcccaggtccctcgggctgagcgccgtgtcaccaggagaatagtgctcacagcccaggcagggtgtgtggctcctggatgggctcgtggggcgggatgggacagggcacgggctctcagaaaataaactgctttattggaatta

SEQ ID NO: 363409 - DNA, 3838 bp, Homo sapiens
gcgccctcccgcctggcgtcctccgcagattcgcgctgagaggcccgcggagacccgccccagaggctcaagaaaacccgcgggagcctcgcccggacccaggaactcgtgctcggggccaaccggctgggccgcgatcgcgtttcgtccggggccgcggcggccgtggggaatcggctgcagcgaatcggtggcgcgcggcgcctgagcgcgctgcagtcacccgggagccgggtccaggtcgtcttcccgtgacgcccagatctgtcctgcaggatggagccagcaccctcagaggttcgactcgccgtccgggaagccattcatgccctctcgtcttcggaggatggcggccacatcttctgcaccctggagtccctgaagcggtatctcggtgagatggagcctccagcgctcccgagggagaaggaggagtttgcctcggcccacttctcgcctgtcctcagatgtcttgccagcaggctgagcccagcctggctggagctgctgccccatggccgcctggaggagctgtgggccagcttcttcctggagggcccggcggaccaagccttcctggtgttgatggagaccatcgagggtgctgcgggccccagcttccggctgatgaagatggcgcggctgctggccagattcctgcgcgagggccggctggcagtgctgatggaggcgcagtgtcggcagcagacgcggcccggcttcatcctgctccgggagacgctgctgggcaaggtggtggccctgcccgatcacctgggcaaccgcctgcagcaggagaacttggccgagttcttcccccagaactacttccgcctgctcggcgaggaggtcgtccgggtgctgcaggcggttgtggactctctccaaggtggcctggattcctccgtgtccttcgtgtctcaggtccttgggaaagcctgtgtccacgggaggcagcaggagatcctgggcgtgctggtaccccggctggcagcgctcacccagggcagctacctgcaccagcgcgtctgctggcgcctggtggagcaagtgccggaccgggccatggaggctgtgctgaccgggctggtggaggccgcactggggcctgaggtcctttcgagactgctggggaacctggtggtgaagaacaagaaggcccagtttgtgatgacccagaagcttctgttcttacagtcccggctcacgacgcccatgctgcagagcctgctgggccatctggccatggacagccagcggcgcccgctcctgctgcaggtgctgaaggagctgttggagacgtggggcagcagcagtgccatccgccacactcccctgccgcagcagcgccacgtcagcaaggctgtcctcatctgcctggcgcaactcggggagccggaactgcgggacagccgggatgaactgctggccagcatgatggcgggcgtgaagtgccgcctggacagtagcctgccccccgtgcgacgcctgggcatgatcgtggcagaggtcgttagtgcccggatccaccccgaggggcctcccctgaaattccagtacgaagaggatgaactgagcctcgagctgctggccttggcctccccccagcctgcgggtgacggcgcctcggaggcgggcacgtccctcgttccagccacggcagagccccctgcagagacccccgcagagatcgtggatggcggcgtcccccaagcacagctggcgggctctgactcggacctggacagcgatgatgagtttgtcccctacgacatgtcgggggacagagagctgaagagcagcaaggctcctgcctacgtccgggactgcgtggaagccctgaccacgtctgaggacatagagcgctgggaggcagccctgcgggcccttgagggcctggtctacaggagccccacagccactcgggaggtgagcgtggagctggccaaggtgcttctgcatctggaggagaagacctgtgtggtgggatttgcagggctgcgccagagagccctggtggccgtcacggtcacagacccggccccggtggccgactatctgacctcacagttctatgccctcaactacagcctccggcagcgcatggacatcctggatgtgctgactctggctgcccaggagctgtctaggcctgggtgcctcgggaggactccccaacctggctccccaagtcccaacaccccgtgcctgccagaggcagccgtctctcagcctggcagtgccgtggcgtctgactggcgggtggtggtggaggagcggatcagaagcaagacccagcggctctccaagggtggcccgaggcagggcccggcaggcagccccagcagattcaactccgtggccggccacttcttcttccccctccttcagcgctttgacaggcctctggtgaccttcgacctcttgggagaagaccagctggttctcggaaggctggcgcacaccttaggggccctgatgtgcctggctgttaacaccacggtggctgtggccatgggcaaggccctgctggaattcgtgtgggcccttcgcttccacatcgatgcctacgtgcgccaggggctgttgtcggccgtctcctccgtcctgctcagcctgcctgctgcgcgcctgctggaggacctgatggacgagctgctggaagcccggtcctggctggcggacgtggctgagaaagacccggacgaggactgcaggacgctggcactgagggccctgctgcttctgcagagactcaagaacaggctcctcccacccgcgtctccctagtccctggaggcctccccaggaccaccctcgccgacagcaaggcaggcggctgagcagcggcctggagcagcagagccaggctttgtagcgaggccaggtcttcggccgcatccggtacggagagtgcagatgcaggaaggcccggcctgccgctatttatagtgcagccagtccgctaaaaatacactgggcctgggcactgcccgccgggacatggcagcctggacgtggggctggggctgtgggcgctgctggcggggttgactcttccagtgagggcagaaccaggctggcaggaggggaggacggtgtacctgctgctcagagcccccaaggctctcctctgagagccaccaagcaggacagagcagctcttgtcccaggtccctcgggctgagcgccgtgtcaccaggagaatagtgctcacagcccaggcagggtgtgtggctcctggatgggctcgtggggcgggatgggacagggcacgggctctcagaaaataaactgctttattggaattacaggagtgttggtggccggtgggcagagcctagcagggggaatgtggtgatgaggggatgcggtgcccgcggaccgcacacatgccatgtgtggacactcaacaggaagcttcggtcagcatttcagctggaaatgcagagccagggccctggaaagtccctcagcagctgtgcacaggcctgctcaccgtgcgtgtgcgggcagagcctcctggggaggcagaggccccgcgttctgcactcgagtcttgcgggtggacatgcatatgtcagagtggagggcaggcagcgatatctactggtttggcttgggtattttttttttttgagatggagtctcagctatgaagatataataagcttgttggatggcccctcccatcacctggcagtggacctgcgtttaaggaaggcctcagctggggtgggcgctggtggagtgcaagccttccacacagtctcaaacgagaggctgagggcaaacatccacacctgaaaagatgctgccttacatgctgacaaaccac

SEQ ID NO: 363410 - DNA, 2701 bp, Homo sapiens
gcgccctcccgcctggcgtcctccgcagattcgcgctgagaggcccgcggagacccgccccagaggctcaagaaaacccgcgggagcctcgcccggacccaggaactcgtgctcggggccaaccggctgggccgcgatcgcgtttcgtccggggccgcggcggccgtggggaatcggctgcagcgaatcggtggcgcgcggcgcctgagcgcgctgcagtcacccgggagccgggtccaggtcgtcttcccgtgacgcccagatctgtcctgcaggatggagccagcaccctcagaggttcgactcgccgtccgggaagccattcatgccctctcgtcttcggaggatggcggccacatcttctgcaccctggagtccctgaagcggtatctcggtgagatggagcctccagcgctcccgagggagaaggaggagtttgcctcggcccacttctcgcctgtcctcagatgtcttgccagcaggctgagcccagcctggctggagctgctgccccatggccgcctggaggagctgtgggccagcttcttcctggagggcccggcggaccaagccttcctggtgttgatggagaccatcgagggtgctgcgggccccagcttccggctgatgaagatggcgcggctgctggccagattcctgcgcgagggccggctggcagtgctgatggaggcgcagtgtcggcagcagacgcggcccggcttcatcctgctccgggagacgctgctgggcaaggtggtggccctgcccgatcacctgggcaaccgcctgcagcaggagaacttggccgagttcttcccccagaactacttccgcctgctcggcgaggaggtcgtccgggtgctgcaggcggttgtggactctctccaaggtggcctggattcctccgtgtccttcgtgtctcaggtccttgggaaagcctgtgtccacgggaggcagcaggagatcctgggcgtgctggtaccccggctggcagcgctcacccagggcagctacctgcaccagcgcgtctgctggcgcctggtggagcaagtgccggaccgggccatggaggctgtgctgaccgggctggtggaggccgcactggggcctgaggtcctttcgagactgctggggaacctggtggtgaagaacaagaaggcccagtttgtgatgacccagaagcttctgttcttacagtcccggctcacgacgcccatgctgcagagcctgctgggccatctggccatggacagccagcggcgcccgctcctgctgcaggtgctgaaggagctgttggagacgtggggcagcagcagtgccatccgccacactcccctgccgcagcagcgccacgtcagcaaggctgtcctcatctgcctggcgcaactcggggagccggaactgcgggacagccgggatgaactgctggccagcatgatggcgggcgtgaagtgccgcctggacagtagcctgccccccgtgcgacgcctgggcatgatcgtggcagaggtcgttagtgcccggatccaccccgaggggcctcccctgaaattccagtacgaagaggatgaactgagcctcgagctgctggccttggcctccccccagcctgcgggtgacggcgcctcggaggcgggcacgtccctcgttccagccacggcagagccccctgcagagacccccgcagagatcgtggatggcggcgtcccccaagcacagctggcgggctctgactcggacctggacagcgatgatgagtttgtcccctacgacatgtcgggggacagagagctgaagagcagcaaggctcctgcctacgtccgggactgcgtggaagccctgaccacgtctgaggacatagagcgctgggaggcagccctgcgggcccttgagggcctggtctacaggagccccacagccactcgggaggtgagcgtggagctggccaaggtgcttctgcatctggaggagaagacctgtgtggtgggatttgcagggctgcgccagagagccctggtggccgtcacggtcacagacccggccccggtggccgactatctgacctcacagttctatgccctcaactacagcctccggcagcgcatggacatcctggatgtgctgactctggctgcccaggagctgtctaggcctgggtgcctcgggaggactccccaacctggctccccaagtcccaacaccccgtgcctgccagaggcagccgtctctcagcctggcagtgccgtggcgtctgactggcgggtggtggtggaggagcggatcagaagcaagacccagcggctctccaagggtggcccgaggcagggcccggcaggcagccccagcagattcaactccgtggccggccacttcttcttccccctccttcagcgctttgacaggcctctggtgaccttcgacctcttgggagaagaccagctggttctcggaaggctggcgcacaccttaggggccctgatgtgcctggctgttaacaccacggtggctgtggccatgggcaaggccctgctggaattcgtgtgggcccttcgcttccacatcgatgcctacgtgcgccaggggctgttgtcggccgtctcctccgtcctgctcagcctgcctgctgcgcgcctgctggaggacctgatggacgagctgctctcagaaaataaactgctttattggaattaaaaaaaaaaaa

SEQ ID NO: 363411 - DNA, 326 bp, Homo sapiens
gtggccgactatctgacctcacagttctatgccctcaactacagcctccggcagcgcatggacatcctggatgtaagtgcctcctgggcctcagtccccctggtctggcccaagctgccctaaggtggggctgccaaaacctgggtctccttgttgctgggccccaagggctcgtgcaggcctgtccactgccttcgtgagtgtgtgacccggcaggactcagcagtgggggagtcagggctcccggggcagagagttttgtttgtttaaaataacagctttactgatataattcacacgccataaaattcaccgctttagggtaa

SEQ ID NO: 363412 - DNA, 663 bp, Homo sapiens
acctgttcaacctgtgagtaatccaattactgttctgtctttgaggccaagagcctcagtccaagccagccatgttcatgctgtgtctgccccaagtgaggaggctaaggctggtgcatagcccgctctagggtggggtaaagcgggcagcagtaactttgcctctcataggctggggttggtcctggtcaattctttattttgtgtgaatcgcaaacatagttcaggtatacgtaacggaagtgcccctccctatgcattctccagctgtagggtacagtcatctccggggcattatagtaaatctcattagttcagacctgattaatgttgaactcacgactgttgagatgtaggtagtgcagtatacagaaaagaacaagagctctggaatgaggcatgtcagggctggaatcctggctccatcatagactagctgcatggccttgggtaaaagatttatcctttctaagtctctgtttagtctgtgtaaaatgggctgccagtatctcatgaggggattctaaatattgagagggcatatgatagacattcagtaaatgcctcttgccttccctgtgccaactttgtttatcctccactccatctaatttataatattcaaacagtgtcatgattgacatttttagttttattaagaaa

SEQ ID NO: 363413 - DNA, 650 bp, Homo sapiens
gggaaagctggaaggcagtgtgagagtgtggatcagagcccgctctagggtggggtaaagcgggcagcagtaactttgcctctcataggctggggttggtcctggtcaattctttattttgtgtgaatcgcaaacatagttcaggtatacgtaacggaagtgcccctccctatgcattctccagctgtagggtacagtcatctccggggcattatagtaaatctcattagttcagacctgattaatgttgaactcacgactgttgagatgtaggtagtgcagtatacagaaaagaacaagagctctggaatgaggcatgtcagggctggaatcctggctccatcatagactagctgcatggccttgggtaaaagatttatcctttctaagtctctgtttagtctgtgtaaaatgggctgccagtatctcatgaggggattctaaatattgagagggcatatgatagacattcagtaaatgcctcttgccttccctgtgccaactttgtttatcctccactccatctaatttataatattcaaacagtgtcatgattgacatttttagttttattaagaaattgaatttttaggaaaaaagtaaatataggaagaggaaggattatgatgctactgcttctccagggattt

SEQ ID NO: 363414 - DNA, 677 bp, Homo sapiens
gtaaatctgacaatatgtatattccccaccttcgagtctttgaaactatagctgtgaagatgtactttgagaacgtgaaatgtatttgcttgttaaattggggttcagattttaaaggagaaacttcccttggtttaggagctgtgtcataatgactgaaataattcagtttgagaaagtaccgacaataaaaaattgttgagaatagtgagtgagccctgatacgagtagttatatattttcagtttcattctgagcctgcctaattctgtgcagtccttgcagcatctcctgctagtaggtaattatcactttttctctggggaggcagtgctgcttttggactataatgtggaaactattactagagagtctagaagttggggtgggatagggtgtgtttactgagcttaaagcaagtaatgtcaatttgtgaagcaagcctaagaatgtgtgtatgtgtgttgaactgagaagagtatatcttaaatagggcagccatcatcttcaggtgatagttgctgtaagaatgatatcctgtattactgtatcttcctattttttcaagaaaagctggaaatctggacttgcgggtaaaaatctctggattattaaatgttggcaacgtattcagataaaacactttatggttcaaataaatcatgcccaacccactg

SEQ ID NO: 363415 - DNA, 458 bp, Homo sapiens
atgtcccctggatcgaccagcactgtcattccactgtgccctatttcttggttatgatgaaaagactcttaattccagtatgaaatcatttctgcattccataaatttcatttggcatctgtggaattaaggcatcttcattgtatttggatctctgaatcataagtgatatttgcctataaattaagcaatgatatttaaataagagattaccacaatcatattttataaatatacaaccatttttaaaaacctgacaaaatctacaaaaaaaagaaaatgaaatatatgtggagttttagaaaagactgactaggtccaaggttgaggcacatagtggttaagcacattgtcagctccggactctgcctcttacaaggaaggagggggctttagatgttatttagctgttatttagcctttctacacctaagttcccctcacctgtaaaaaaaaaa

SEQ ID NO: 363416 - DNA, 2863 bp, Homo sapiens
aggcggaagagaccgccccgtgggcggaagtgacgcaaggcctactgtcggctgggaggggaggtgtagccggtctttgggggtaggcggtagtggcggaagaggttcggcggctgatggcggatcaggatcggaagcctgcgtaactttctcccttgatccgggagtctttccactggattcacaatgacatcctttcaagaagtcccattgcagacttccaactttgcccatgtcatctttcaaaatgtggccaagagttaccttcctaatgcacacctggaatgtcattacaccttaactccatatattcatccacatccaaaagattgggttggtatattcaaggttggatggagtactgctcgtgattattacacgtttttatggtcccctatgcctgaacattatgtggaaggatcaacagtcaattgtgtactagcattccaaggatattaccttccaaatgatgatggagaattttatcagttctgttacgttacccataagggtgaaattcgtggagcaagtacacctttccagtttcgagcttcttctccagttgaagagctgcttactatggaagatgaaggaaattctgacatgttagtggtgaccacaaaagcaggccttcttgagttgaaaattgagaaaaccatgaaagaaaaagaagaactgttaaagttaattgccgttctggaaaaagaaacagcacaacttcgagaacaagttgggagaatggaaagagaacttaaccatgagaaagaaagatgtgaccaactgcaagcagaacaaaagggtcttactgaagtaacacaaagcttaaaaatggaaaatgaagagtttaagaagaggttcagtgatgctacatccaaagcccatcagcttgaggaagatattgtgtcagtaacacataaagcaattgaaaaagaaaccgaattagacagtttaaaggacaaactcaagaaggcacaacatgaaagagaacaacttgaatgtcagttgaagacagagaaggatgaaaaggaactttataaggtacatttgaagaatacagaaatagaaaataccaagcttatgtcagaggtccagactttaaaaaatttagatgggaacaaagaaagcgtgattactcatttcaaagaagagattggcaggctgcagttatgtttggctgaaaaggaaaatctgcaaagaactttcctgcttacaacctcaagtaaagaagatacttgttttttaaaggagcaacttcgtaaagcagaggaacaggttcaggcaactcggcaagaagttgtctttctggctaaagaactcagtgatgctgtcaacgtacgagacagaacgatggcagacctgcatactgcacgcttggaaaacgagaaagtgaaaaagcagttagctgatgcagtggcagaacttaaactaaatgctatgaaaaaagatcaggacaagactgatacactggaacacgaactaagaagagaagttgaagatctgaaactccgtcttcagatggctgcagaccattataaagaaaaatttaaggaatgccaaaggctccaaaaacaaataaacaaactttcagatcaatcagctaataataataatgtcttcacaaagaaaacggggaatcagcagaaagtgaatgatgcttcagtaaacacagacccagccacttctgcctctactgtagatgtaaagccatcaccttctgcagcagaggcagattttgacatagtaacaaaggggcaagtctgtgaaatgaccaaagaaattgctgacaaaacagaaaagtataataaatgtaaacaactcttgcaggatgagaaagcaaaatgcaataaatatgctgatgaacttgcaaaaatggagctgaaatggaaagaacaagtgaaaattgctgaaaatgtaaaacttgaactagctgaagtacaggacaattataaagaacttaaaaggagtctagaaaatccagcagaaaggaaaatggaagatggagcagatggtgctttttacccagatgaaatacaaaggccacctgtcagagtcccctcttggggactggaagacaatgttgtctgcagccagcctgctcgaaactttagtcggcctgatggcttagaggactctgaggatagcaaagaagatgagaatgtgcctactgctcctgatcctccaagtcaacatttacgtgggcatgggacaggcttttgctttgattccagctttgatgttcacaagaagtgtcccctctgtgagttaatgtttcctcctaactatgatcagagcaaatttgaagaacatgttgaaagtcactggaaggtgtgcccgatgtgcagcgagcagttccctcctgactatgaccagcaggtgtttgaaaggcatgtgcagacccattttgatcagaatgttctaaattttgactagttactttttattatgagttaatatagtttagcagtaaaaaaaaaaaaaaaaaaccacacctaaaatagaccactgaggagaccatagagcggatgctttcatgcaccctttactgcactttctgaccaggagctactttgagtttggtgttactaggatcagggtcagtctttggcttatcaataaattttaatctctgttaatcttacctgctttaaaaaaaagttcttgtgtgttcgtatctttatttattccctagtttgcagaactgtctgaataaaggatacaaggattatttcaatgttactgcactgaaaaacgtgtatgtattagtgtgctagattatttagcagaatattcacaagtttctgttgaccttgttgattgagcatgactactaaatattatgtaataaaaagcatttgtcataaca

SEQ ID NO: 363417 - DNA, 2992 bp, Homo sapiens
aggcggaagagaccgccccgtgggcggaagtgacgcaaggcctactgtcggctgggaggggaggtgtagccggtctttgggggtaggcggtagtggcggaagaggttcggcggctgatggcggatcaggatcggaagcctgcgtaactttctcccttgatccgggagtctttccactggattcacaatgacatcctttcaagaagtcccattgcagacttccaactttgcccatgtcatctttcaaaatgtggccaagagttaccttcctaatgcacacctggaatgtcattacaccttaactccatatattcatccacatccaaaagattgggttggtatattcaaggttggatggagtactgctcgtgattattacacgtttttatggtcccctatgcctgaacattatgtggaaggatcaacagtcaattgtgtactagcattccaaggatattaccttccaaatgatgatggagaattttatcagttctgttacgttacccataagggtgaaattcgtggagcaagtacacctttccagtttcgagcttcttctccagttgaagagctgcttactatggaagatgaaggaaattctgacatgttagtggtgaccacaaaagcaggccttcttgagttgaaaattgagaaaaccatgaaagaaaaagaagaactgttaaagttaattgccgttctggaaaaagaaacagcacaacttcgagaacaagttgggagaatggaaagagaacttaaccatgagaaagaaagatgtgaccaactgcaagcagaacaaaagggtcttactgaagtaacacaaagcttaaaaatggaaaatgaagagtttaagaagaggttcagtgatgctacatccaaagcccatcagcttgaggaagatattgtgtcagtaacacataaagcaattgaaaaagaaaccgaattagacagtttaaaggacaaactcaagaaggcacaacatgaaagagaacaacttgaatgtcagttgaagacagagaaggatgaaaaggaactttataaggtacatttgaagaatacagaaatagaaaataccaagcttatgtcagaggtccagactttaaaaaatttagatgggaacaaagaaagcgtgattactcatttcaaagaagagattggcaggctgcagttatgtttggctgaaaaggaaaatctgcaaagaactttcctgcttacaacctcaagtaaagaagatacttgttttttaaaggagcaacttcgtaaagcagaggaacaggttcaggcaactcggcaagaagttgtctttctggctaaagaactcagtgatgctgtcaacgtacgagacagaacgatggcagacctgcatactgcacgcttggaaaacgagaaagtgaaaaagcagttagctgatgcagtggcagaacttaaactaaatgctatgaaaaaagatcaggacaagactgatacactggaacacgaactaagaagagaagttgaagatctgaaactccgtcttcagatggctgcagaccattataaagaaaaatttaaggaatgccaaaggctccaaaaacaaataaacaaactttcagatcaatcagctaataataataatgtcttcacaaagaaaacggggaatcagcagaaagtgaatgatgcttcagtaaacacagacccagccacttctgcctctactgtagatgtaaagccatcaccttctgcagcagaggcagattttgacatagtaacaaaggggcaagtctgtgaaatgaccaaagaaattgctgacaaaacagaaaagtataataaatgtaaacaactcttgcaggatgagaaagcaaaatgcaataaatatgctgatgaacttgcaaaaatggagctgaaatggaaagaacaagtgaaaattgctgaaaatgtaaaacttgaactagctgaagtacaggacaattataaagaacttaaaaggagtctagaaaatccagcagaaaggaaaatggaagaaggtcagaattcccagagtcctcaatgtttcaaaacatgctcagagcaaaatggttatgttctcacattgtcaaatgcacaaccagttctgcaatatggtaatccttatgcatctcaggaaacaagagatggagcagatggtgctttttacccagatgaaatacaaaggccacctgtcagagtcccctcttggggactggaagacaatgttgtctgcagccagcctgctcgaaactttagtcggcctgatggcttagaggactctgaggatagcaaagaagatgagaatgtgcctactgctcctgatcctccaagtcaacatttacgtgggcatgggacaggcttttgctttgattccagctttgatgttcacaagaagtgtcccctctgtgagttaatgtttcctcctaactatgatcagagcaaatttgaagaacatgttgaaagtcactggaaggtgtgcccgatgtgcagcgagcagttccctcctgactatgaccagcaggtgtttgaaaggcatgtgcagacccattttgatcagaatgttctaaattttgactagttactttttattatgagttaatatagtttagcagtaaaaaaaaaaaaaaaaaaccacacctaaaatagaccactgaggagaccatagagcggatgctttcatgcaccctttactgcactttctgaccaggagctactttgagtttggtgttactaggatcagggtcagtctttggcttatcaataaattttaatctctgttaatcttacctgctttaaaaaaaagttcttgtgtgttcgtatctttatttattccctagtttgcagaactgtctgaataaaggatacaaggattatttcaatgttactgcactgaaaaacgtgtatgtattagtgtgctagattatttagcagaatattcacaagtttctgttgaccttgttgattgagcatgactactaaatattatgtaataaaaagcatttgtcataaca

SEQ ID NO: 363418 - DNA, 1763 bp, Homo sapiens
cagtgttagtttatagtgaaatactctgcaaagtttcaaacatgtttatttgaaagtctaattaaatgatagcagagagaaaatttcctgaagtgtaatcttcttttatactgtcagtatgtgcttgattgaattaaggaatttatatttggttttacttttcttaaaagttccaaaattatttttcccctaggaagatgagaatgtgcctactgctcctgatcctccaagtcaacatttacgtgggcatgggacaggcttttgctttgattccagctttgatgttcacaagaagtgtcccctctgtgagttaatgtttcctcctaactatgatcagagcaaatttgaagaacatgttgaaagtcactggaaggtgtgcccgatgtgcagcgagcagttccctcctgactatgaccagcaggtgtttgaaaggcatgtgcagacccattttgatcagaatgttctaaattttgactagttactttttattatgagttaatatagtttagcagtaaaaaaaaaaaaaaaaaaccacacctaaaatagaccactgaggagaccatagagcggatgctttcatgcaccctttactgcactttctgaccaggagctactttgagtttggtgttactaggatcagggtcagtctttggcttatcaataaattttaatctctgttaatcttacctgctttaaaaaaaagttcttgtgtgttcgtatctttatttattccctagtttgcagaactgtctgaataaaggatacaaggattatttcaatgttactgcactgaaaaacgtgtatgtattagtgtgctagattatttagcagaatattcacaagtttctgttgaccttgttgattgagcatgactactaaatattatgtaataaaaagcatttgtcataacagtcttatgaagtagttcttcgaatatagaaagttctataatttagcccatgaaatgataggtttttaattttcagaaatggagctgcatgtagaatgagatcacatgcttttatatgtgaaatattggttttagcaattaacagaaggcatactttgctaattttatggcaaaattttagaataacctgaatgattatttttaaactatcttgaagttgtatgtatatatctaatgggaaaatggaacaagagatgtcagtataattgttttcctattaaatgatctcataacaggggtgtttgtggcataaaaatcatagaatatatatcagtatcttttttacattttcctgatgagaatataaatttgaaatattctcagtaagtgattaaaagtacaatacataaacccaaatcaaagtaatgtgtttcttcagttatgtctgtgctgtatagaactgtcactaacattaaagaaagaggacacatttttcaagatctgtaatttcattgttgtcaaatttatttgtgaaagtttttcattaatctagcatcttgaacatctttttttggtttgggcctttaaaatacttctgaattgtattccctttcccttttataatgtgcgtgtgaataatttaaagcaccaacttttgattttgccgcttttgtagttatcatcaaaatagtttacatttgttctgagcaaactagctattgaagatgttaacctaatatttagacttggtggcattttgagttgctatatgtgaactgcagcatatcatgtcgtcacttgtatttgtttgtggaagcagagtttgtatattgttagaatcctttaaaaagtt

SEQ ID NO: 363419 - DNA, 911 bp, Homo sapiens
cagtgttagtttatagtgaaatactctgcaaagtttcaaacatgtttatttgaaagtctaattaaatgatagcagagagaaaatttcctgaagtgtaatcttcttttatactgtcagtatgtgcttgattgaattaaggaatttatatttggttttacttttcttaaaagttccaaaattatttttcccctaggaagatgagaatgtgcctactgctcctgatcctccaagtcaacatttacgtgggcatgggacaggcttttgctttgattccagctttgatgttcacaagaagtgtcccctctgtgagttaatgtttcctcctaactatgatcagagcaaatttgaagaacatgttgaaagtcactggaaggtgtgcccgatgtgcagcgagcagttccctcctgactatgaccagcaggtgtttgaaaggcatgtgcagacccattttgatcagaatgttctaaattttgactagttactttttattatgagttaatatagtttagcagtaaaaaaaaaaaaaaaaaaccacacctaaaatagaccactgaggagaccatagagcggatgctttcatgcaccctttactgcactttctgaccaggagctactttgagtttggtgttactaggatcagggtcagtctttggcttatcaataaattttaatctctgttaatcttacctgctttaaaaaaaagttcttgtgtgttcgtatctttatttattccctagtttgcagaactgtctgaataaaggatacaaggattatttcaatgttactgcactgaaaaacgtgtatgtattagtgtgctagattatttagcagaatattcacaagtttctgttgaccttgttgattgagcatgactactaaatattatgtaataaaaagcatttgtcataaca

SEQ ID NO: 363420 - DNA, 106 bp, Homo sapiens
cttaaacctaagagaagaaaaaatttaactttgagtaggaaggaagaatctagttttgataatttgcgaaaggaggaaggacatatcccagattcttgtcaagaac

SEQ ID NO: 363421 - DNA, 2802 bp, Homo sapiens
aggcggaagagaccgccccgtgggcggaagtgacgcaaggcctactgtcggctgggaggggaggtgtagccggtctttgggggtaggcggtagtggcggaagaggttcggcggctgatggcggatcaggatcggaagcctgcgtaactttctcccttgatccgggagtctttccactggattcacaatgacatcctttcaagaagtcccattgcagacttccaactttgcccatgtcatctttcaaaatgtggccaagagttaccttcctaatgcacacctggaatgtcattacaccttaactccatatattcatccacatccaaaagattgggttggtatattcaaggttggatggagtactgctcgtgattattacacgtttttatggtcccctatgcctgaacattatgtggaaggatcaacagtcaattgtgtactagcattccaaggatattaccttccaaatgatgatggagaattttatcagttctgttacgttacccataagggtgaaattcgtggagcaagtacacctttccagtttcgagcttcttctccagttgaagagctgcttactatggaagatgaaggaaattctgacatgttagtggtgaccacaaaagcaggccttcttgagttgaaaattgagaaaaccatgaaagaaaaagaagaactgttaaagttaattgccgttctggaaaaagaaacagcacaacttcgagaacaagttgggagaatggaaagagaacttaaccatgagaaagaaagatgtgaccaactgcaagcagaacaaaagggtcttactgaagtaacacaaagcttaaaaatggaaaatgaagagtttaagaagaggttcagtgatgctacatccaaagcccatcagcttgaggaagatattgtgtcagtaacacataaagcaattgaaaaagaaaccgaattagacagtttaaaggacaaactcaagaaggcacaacatgaaagagaacaacttgaatgtcagttgaagacagagaaggatgaaaaggaactttataaggtacatttgaagaatacagaaatagaaaataccaagcttatgtcagaggtccagactttaaaaaatttagatgggaacaaagaaagcgtgattactcatttcaaagaagagattggcaggctgcagttatgtttggctgaaaaggaaaatctgcaaagaactttcctgcttacaacctcaagtaaagaagatacttgttttttaaaggagcaacttcgtaaagcagaggaacaggttcaggcaactcggcaagaagttgtctttctggctaaagaactcagtgatgctgtcaacgtacgagacagaacgatggcagacctgcatactgcacgcttggaaaacgagaaagtgaaaaagcagttagctgatgcagtggcagaacttaaactaaatgctatgaaaaaagatcaggacaagactgatacactggaacacgaactaagaagagaagttgaagatctgaaactccgtcttcagatggctgcagaccattataaagaaaaatttaaggaatgccaaaggctccaaaaacaaataaacaaactttcagatcaatcagctaataataataatgtcttcacaaagaaaacggggaatcagcagaaagtgaatgatgcttcagtaaacacagacccagccacttctgcctctactgtagatgtaaagccatcaccttctgcagcagaggcagattttgacatagtaacaaaggggcaagtctgtgaaatgaccaaagaaattgctgacaaaacagaaaagtataataaatgtaaacaactcttgcaggatgagaaagcaaaatgcaataaatatgctgatgaacttgcaaaaatggagctgaaatggaaagaacaagtgaaaattgctgaaaatgtaaaacttgaactagctgaagtacaggacaattataaagaacttaaaaggagtctagaaaatccagcagaaaggaaaatggaagatggagcagatggtgctttttacccagatgaaatacaaaggccacctgtcagagtcccctcttggggactggaagacaatgttgtctgcagccagcctgctcgaaactttagtcggcctgatggcttagaggactctgaggatagcaaagaagatgagaatgtgcctactgctcctgatcctccaagtcaacatttacgtgggcatgggacaggcttttgctttgattccagctttgatgttcacaagaagtgtcccctctgtgagttaatgtttcctcctaactatgatcagagcaaatttgaagaacatgttgaaagtcactggaaggtgtgcccgatgtgcagcgagcagttccctcctgactatgaccagcaggtgtttgaaaggcatgtgcagacccattttgatcagaatgttctaaattttgactagttactttttattatgagttaatatagtttagcagtaaaaaaaaaaaaaaaaaaccacacctaaaatagaccactgaggagaccatagagcggatgctttcatgcaccctttactgcactttctgaccaggagctactttgagtttggtgttactaggatcagggtcagtctttggcttatcaataaattttaatctctgttaatcttacctgctttaaaaaaaagttcttgtgtgttcgtatctttatttattccctagtttgcagaactgtctgaagtcgaagcattgcagacggataatcatctatatttcgtctagtgcaatacagtgtacgaactcagtgtgctacgattatatcgcaggagattcca

SEQ ID NO: 363422 - DNA, 3599 bp, Homo sapiens
ggagacgcagacagggatacggtactgtccatggacctctgagctgccctttccacatcgctgattcacaatgacatcctttcaagaagtcccattgcagacttccaactttgcccatgtcatctttcaaaatgtggccaagagttaccttcctaatgcacacctggaatgtcattacaccttaactccatatattcatccacatccaaaagattgggttggtatattcaaggttggatggagtactgctcgtgattattacacgtttttatggtcccctatgcctgaacattatgtggaaggatcaacagtcaattgtgtactagcattccaaggatattaccttccaaatgatgatggagaattttatcagttctgttacgttacccataagggtgaaattcgtggagcaagtacacctttccagtttcgagcttcttctccagttgaagagctgcttactatggaagatgaaggaaattctgacatgttagtggtgaccacaaaagcaggccttcttgagttgaaaattgagaaaaccatgaaagaaaaagaagaactgttaaagttaattgccgttctggaaaaagaaacagcacaacttcgagaacaagttgggagaatggaaagagaacttaaccatgagaaagaaagatgtgaccaactgcaagcagaacaaaagggtcttactgaagtaacacaaagcttaaaaatggaaaatgaagagtttaagaagaggttcagtgatgctacatccaaagcccatcagcttgaggaagatattgtgtcagtaacacataaagcaattgaaaaagaaaccgaattagacagtttaaaggacaaactcaagaaggcacaacatgaaagagaacaacttgaatgtcagttgaagacagagaaggatgaaaaggaactttataaggtacatttgaagaatacagaaatagaaaataccaagcttatgtcagaggtccagactttaaaaaatttagatgggaacaaagaaagcgtgattactcatttcaaagaagagattggcaggctgcagttatgtttggctgaaaaggaaaatctgcaaagaactttcctgcttacaacctcaagtaaagaagatacttgttttttaaaggagcaacttcgtaaagcagaggaacaggttcaggcaactcggcaagaagttgtctttctggctaaagaactcagtgatgctgtcaacgtacgagacagaacgatggcagacctgcatactgcacgcttggaaaacgagaaagtgaaaaagcagttagctgatgcagtggcagaacttaaactaaatgctatgaaaaaagatcaggacaagactgatacactggaacacgaactaagaagagaagttgaagatctgaaactccgtcttcagatggctgcagaccattataaagaaaaatttaaggaatgccaaaggctccaaaaacaaataaacaaactttcagatcaatcagctaataataataatgtcttcacaaagaaaacggggaatcagcagaaagtgaatgatgcttcagtaaacacagacccagccacttctgcctctactgtagatgtaaagccatcaccttctgcagcagaggcagattttgacatagtaacaaaggggcaagtctgtgaaatgaccaaagaaattgctgacaaaacagaaaagtataataaatgtaaacaactcttgcaggatgagaaagcaaaatgcaataaatatgctgatgaacttgcaaaaatggagctgaaatggaaagaacaagtgaaaattgctgaaaatgtaaaacttgaactagctgaagtacaggacaattataaagaacttaaaaggagtctagaaaatccagcagaaaggaaaatggaagatggagcagatggtgctttttacccagatgaaatacaaaggccacctgtcagagtcccctcttggggactggaagacaatgttgtctgcagccagcctgctcgaaactttagtcggcctgatggcttagaggactctgaggatagcaaagaagatgagaatgtgcctactgctcctgatcctccaagtcaacatttacgtgggcatgggacaggcttttgctttgattccagctttgatgttcacaagaagtgtcccctctgtgagttaatgtttcctcctaactatgatcagagcaaatttgaagaacatgttgaaagtcactggaaggtgtgcccgatgtgcagcgagcagttccctcctgactatgaccagcaggtgtttgaaaggcatgtgcagacccattttgatcagaatgttctaaattttgactagttactttttattatgagttaatatagtttagcagtaaaaaaaaaaaaaaaaaaccacacctaaaatagaccactgaggagaccatagagcggatgctttcatgcaccctttactgcactttctgaccaggagctactttgagtttggtgttactaggatcagggtcagtctttggcttatcaataaattttaatctctgttaatcttacctgctttaaaaaaaagttcttgtgtgttcgtatctttatttattccctagtttgcagaactgtctgaataaaggatacaaggattatttcaatgttactgcactgaaaaacgtgtatgtattagtgtgctagattatttagcagaatattcacaagtttctgttgaccttgttgattgagcatgactactaaatattatgtaataaaaagcatttgtcataacagtcttatgaagtagttcttcgaatatagaaagttctataatttagcccatgaaatgataggtttttaattttcagaaatggagctgcatgtagaatgagatcacatgcttttatatgtgaaatattggttttagcaattaacagaaggcatactttgctaattttatggcaaaattttagaataacctgaatgattatttttaaactatcttgaagttgtatgtatatatctaatgggaaaatggaacaagagatgtcagtataattgttttcctattaaatgatctcataacaggggtgtttgtggcataaaaatcatagaatatatatcagtatcttttttacattttcctgatgagaatataaatttgaaatattctcagtaagtgattaaaagtacaatacataaacccaaatcaaagtaatgtgtttcttcagttatgtctgtgctgtatagaactgtcactaacattaaagaaagaggacacatttttcaagatctgtaatttcattgttgtcaaatttatttgtgaaagtttttcattaatctagcatcttgaacatctttttttggtttgggcctttaaaatacttctgaattgtattccctttcccttttataatgtgcgtgtgaataatttaaagcaccaacttttgattttgccgcttttgtagttatcatcaaaatagtttacatttgttctgagcaaactagctattgaagatgttaacctaatatttagacttggtggcattttgagttgctatatgtgaactgcagcatatcatgtcgtcacttgtatttgtttgtggaagcagagtttgtatattgttagaatcctttaaaaagtt

SEQ ID NO: 363423 - DNA, 3792 bp, Homo sapiens
aggcggaagagaccgccccgtgggcggaagtgacgcaaggcctactgtcggctgggaggggaggtgtagccggtctttgggggtaggcggtagtggcggaagaggttcggcggctgatggcggatcaggatcggaagcctgcgtaactttctcccttgatccgggagtctttccactggattcacaatgacatcctttcaagaagtcccattgcagacttccaactttgcccatgtcatctttcaaaatgtggccaagagttaccttcctaatgcacacctggaatgtcattacaccttaactccatatattcatccacatccaaaagattgggttggtatattcaaggttggatggagtactgctcgtgattattacacgtttttatggtcccctatgcctgaacattatgtggaaggatcaacagtcaattgtgtactagcattccaaggatattaccttccaaatgatgatggagaattttatcagttctgttacgttacccataagggtgaaattcgtggagcaagtacacctttccagtttcgagcttcttctccagttgaagagctgcttactatggaagatgaaggaaattctgacatgttagtggtgaccacaaaagcaggccttcttgagttgaaaattgagaaaaccatgaaagaaaaagaagaactgttaaagttaattgccgttctggaaaaagaaacagcacaacttcgagaacaagttgggagaatggaaagagaacttaaccatgagaaagaaagatgtgaccaactgcaagcagaacaaaagggtcttactgaagtaacacaaagcttaaaaatggaaaatgaagagtttaagaagaggttcagtgatgctacatccaaagcccatcagcttgaggaagatattgtgtcagtaacacataaagcaattgaaaaagaaaccgaattagacagtttaaaggacaaactcaagaaggcacaacatgaaagagaacaacttgaatgtcagttgaagacagagaaggatgaaaaggaactttataaggtacatttgaagaatacagaaatagaaaataccaagcttatgtcagaggtccagactttaaaaaatttagatgggaacaaagaaagcgtgattactcatttcaaagaagagattggcaggctgcagttatgtttggctgaaaaggaaaatctgcaaagaactttcctgcttacaacctcaagtaaagaagatacttgttttttaaaggagcaacttcgtaaagcagaggaacaggttcaggcaactcggcaagaagttgtctttctggctaaagaactcagtgatgctgtcaacgtacgagacagaacgatggcagacctgcatactgcacgcttggaaaacgagaaagtgaaaaagcagttagctgatgcagtggcagaacttaaactaaatgctatgaaaaaagatcaggacaagactgatacactggaacacgaactaagaagagaagttgaagatctgaaactccgtcttcagatggctgcagaccattataaagaaaaatttaaggaatgccaaaggctccaaaaacaaataaacaaactttcagatcaatcagctaataataataatgtcttcacaaagaaaacggggaatcagcagaaagtgaatgatgcttcagtaaacacagacccagccacttctgcctctactgtagatgtaaagccatcaccttctgcagcagaggcagattttgacatagtaacaaaggggcaagtctgtgaaatgaccaaagaaattgctgacaaaacagaaaagtataataaatgtaaacaactcttgcaggatgagaaagcaaaatgcaataaatatgctgatgaacttgcaaaaatggagctgaaatggaaagaacaagtgaaaattgctgaaaatgtaaaacttgaactagctgaagtacaggacaattataaagaacttaaaaggagtctagaaaatccagcagaaaggaaaatggaagaaggtcagaattcccagagtcctcaatgtttcaaaacatgctcagagctaatccttatgcatctcaggaaacaagagatggagcagatggtgctttttacccagatgaaatacaaaggccacctgtcagagtcccctcttggggactggaagacaatgttgtctgcagccagcctgctcgaaactttagtcggcctgatggcttagaggactctgaggatagcaaagaagatgagaatgtgcctactgctcctgatcctccaagtcaacatttacgtgggcatgggacaggcttttgctttgattccagctttgatgttcacaagaagtgtcccctctgtgagttaatgtttcctcctaactatgatcagagcaaatttgaagaacatgttgaaagtcactggaaggtgtgcccgatgtgcagcgagcagttccctcctgactatgaccagcaggtgtttgaaaggcatgtgcagacccattttgatcagaatgttctaaattttgactagttactttttattatgagttaatatagtttagcagtaaaaaaaaaaaaaaaaaaccacacctaaaatagaccactgaggagaccatagagcggatgctttcatgcaccctttactgcactttctgaccaggagctactttgagtttggtgttactaggatcagggtcagtctttggcttatcaataaattttaatctctgttaatcttacctgctttaaaaaaaagttcttgtgtgttcgtatctttatttattccctagtttgcagaactgtctgaataaaggatacaaggattatttcaatgttactgcactgaaaaacgtgtatgtattagtgtgctagattatttagcagaatattcacaagtttctgttgaccttgttgattgagcatgactactaaatattatgtaataaaaagcatttgtcataacagtcttatgaagtagttcttcgaatatagaaagttctataatttagcccatgaaatgataggtttttaattttcagaaatggagctgcatgtagaatgagatcacatgcttttatatgtgaaatattggttttagcaattaacagaaggcatactttgctaattttatggcaaaattttagaataacctgaatgattatttttaaactatcttgaagttgtatgtatatatctaatgggaaaatggaacaagagatgtcagtataattgttttcctattaaatgatctcataacaggggtgtttgtggcataaaaatcatagaatatatatcagtatcttttttacattttcctgatgagaatataaatttgaaatattctcagtaagtgattaaaagtacaatacataaacccaaatcaaagtaatgtgtttcttcagttatgtctgtgctgtatagaactgtcactaacattaaagaaagaggacacatttttcaagatctgtaatttcattgttgtcaaatttatttgtgaaagtttttcattaatctagcatcttgaacatctttttttggtttgggcctttaaaatacttctgaattgtattccctttcccttttataatgtgcgtgtgaataatttaaagcaccaacttttgattttgccgcttttgtagttatcatcaaaatagtttacatttgttctgagcaaactagctattgaagatgttaacctaatatttagacttggtggcattttgagttgctatatgtgaactgcagcatatcatgtcgtcacttgtatttgtttgtggaagcagagtttgtatattgttagaatcctttaaaaagtt

SEQ ID NO: 363424 - DNA, 3460 bp, Homo sapiens
gatggagtactgctccatccaaccttgaatataccaacccaatcttttggatgtggatgaatattatggagttaaggtgtaatgacattccaggttggatggagtactgctcgtgattattacacgtttttatggtcccctatgcctgaacattatgtggaaggatcaacagtcaattgtgtactagcattccaaggatattaccttccaaatgatgatggagaattttatcagttctgttacgttacccataagggtgaaattcgtggagcaagtacacctttccagtttcgagcttcttctccagttgaagagctgcttactatggaagatgaaggaaattctgacatgttagtggtgaccacaaaagcaggccttcttgagttgaaaattgagaaaaccatgaaagaaaaagaagaactgttaaagttaattgccgttctggaaaaagaaacagcacaacttcgagaacaagttgggagaatggaaagagaacttaaccatgagaaagaaagatgtgaccaactgcaagcagaacaaaagggtcttactgaagtaacacaaagcttaaaaatggaaaatgaagagtttaagaagaggttcagtgatgctacatccaaagcccatcagcttgaggaagatattgtgtcagtaacacataaagcaattgaaaaagaaaccgaattagacagtttaaaggacaaactcaagaaggcacaacatgaaagagaacaacttgaatgtcagttgaagacagagaaggatgaaaaggaactttataaggtacatttgaagaatacagaaatagaaaataccaagcttatgtcagaggtccagactttaaaaaatttagatgggaacaaagaaagcgtgattactcatttcaaagaagagattggcaggctgcagttatgtttggctgaaaaggaaaatctgcaaagaactttcctgcttacaacctcaagtaaagaagatacttgttttttaaaggagcaacttcgtaaagcagaggaacaggttcaggcaactcggcaagaagttgtctttctggctaaagaactcagtgatgctgtcaacgtacgagacagaacgatggcagacctgcatactgcacgcttggaaaacgagaaagtgaaaaagcagttagctgatgcagtggcagaacttaaactaaatgctatgaaaaaagatcaggacaagactgatacactggaacacgaactaagaagagaagttgaagatctgaaactccgtcttcagatggctgcagaccattataaagaaaaatttaaggaatgccaaaggctccaaaaacaaataaacaaactttcagatcaatcagctaataataataatgtcttcacaaagaaaacggggaatcagcagaaagtgaatgatgcttcagtaaacacagacccagccacttctgcctctactgtagatgtaaagccatcaccttctgcagcagaggcagattttgacatagtaacaaaggggcaagtctgtgaaatgaccaaagaaattgctgacaaaacagaaaagtataataaatgtaaacaactcttgcaggatgagaaagcaaaatgcaataaatatgctgatgaacttgcaaaaatggagctgaaatggaaagaacaagtgaaaattgctgaaaatgtaaaacttgaactagctgaagtacaggacaattataaagaacttaaaaggagtctagaaaatccagcagaaaggaaaatggaagatggagcagatggtgctttttacccagatgaaatacaaaggccacctgtcagagtcccctcttggggactggaagacaatgttgtctgcagccagcctgctcgaaactttagtcggcctgatggcttagaggactctgaggatagcaaagaagatgagaatgtgcctactgctcctgatcctccaagtcaacatttacgtgggcatgggacaggcttttgctttgattccagctttgatgttcacaagaagtgtcccctctgtgagttaatgtttcctcctaactatgatcagagcaaatttgaagaacatgttgaaagtcactggaaggtgtgcccgatgtgcagcgagcagttccctcctgactatgaccagcaggtgtttgaaaggcatgtgcagacccattttgatcagaatgttctaaattttgactagttactttttattatgagttaatatagtttagcagtaaaaaaaaaaaaaaaaaaccacacctaaaatagaccactgaggagaccatagagcggatgctttcatgcaccctttactgcactttctgaccaggagctactttgagtttggtgttactaggatcagggtcagtctttggcttatcaataaattttaatctctgttaatcttacctgctttaaaaaaaagttcttgtgtgttcgtatctttatttattccctagtttgcagaactgtctgaataaaggatacaaggattatttcaatgttactgcactgaaaaacgtgtatgtattagtgtgctagattatttagcagaatattcacaagtttctgttgaccttgttgattgagcatgactactaaatattatgtaataaaaagcatttgtcataacagtcttatgaagtagttcttcgaatatagaaagttctataatttagcccatgaaatgataggtttttaattttcagaaatggagctgcatgtagaatgagatcacatgcttttatatgtgaaatattggttttagcaattaacagaaggcatactttgctaattttatggcaaaattttagaataacctgaatgattatttttaaactatcttgaagttgtatgtatatatctaatgggaaaatggaacaagagatgtcagtataattgttttcctattaaatgatctcataacaggggtgtttgtggcataaaaatcatagaatatatatcagtatcttttttacattttcctgatgagaatataaatttgaaatattctcagtaagtgattaaaagtacaatacataaacccaaatcaaagtaatgtgtttcttcagttatgtctgtgctgtatagaactgtcactaacattaaagaaagaggacacatttttcaagatctgtaatttcattgttgtcaaatttatttgtgaaagtttttcattaatctagcatcttgaacatctttttttggtttgggcctttaaaatacttctgaattgtattccctttcccttttataatgtgcgtgtgaataatttaaagcaccaacttttgattttgccgcttttgtagttatcatcaaaatagtttacatttgttctgagcaaactagctattgaagatgttaacctaatatttagacttggtggcattttgagttgctatatgtgaactgcagcatatcatgtcgtcacttgtatttgtttgtggaagcagagtttgtatattgttagaatcctttaaaaagtt

SEQ ID NO: 363425 - DNA, 3527 bp, Homo sapiens
aggcggaagagaccgccccgtgggcggaagtgacgcaaggcctactgtcggctgggaggggaggtgtagccggtctttgggggtaggcggtagtggcggaagaggttcggcggctgatggcggatcaggatcggaagcctgcgtaactttctcccttgatccgggagtctttccactggattcacaatgacatcctttcaagaagtcccattgcagacttccaactttgcccatgtcatctttcaaaatgtggccaagagttaccttcctaatgcacacctggaatgtcattacaccttaactccatatattcatccacatccaaaagattgggttggtatattcaaggttggatggagtactgctcgtgattattacacgtttttatggtcccctatgcctgaacattatgtggaaggatcaacagtcaattgtgtactagcattccaagttgaaaattgagaaaaccatgaaagaaaaagaagaactgttaaagttaattgccgttctggaaaaagaaacagcacaacttcgagaacaagttgggagaatggaaagagaacttaaccatgagaaagaaagatgtgaccaactgcaagcagaacaaaagggtcttactgaagtaacacaaagcttaaaaatggaaaatgaagagtttaagaagaggttcagtgatgctacatccaaagcccatcagcttgaggaagatattgtgtcagtaacacataaagcaattgaaaaagaaaccgaattagacagtttaaaggacaaactcaagaaggcacaacatgaaagagaacaacttgaatgtcagttgaagacagagaaggatgaaaaggaactttataaggtacatttgaagaatacagaaatagaaaataccaagcttatgtcagaggtccagactttaaaaaatttagatgggaacaaagaaagcgtgattactcatttcaaagaagagattggcaggctgcagttatgtttggctgaaaaggaaaatctgcaaagaactttcctgcttacaacctcaagtaaagaagatacttgttttttaaaggagcaacttcgtaaagcagaggaacaggttcaggcaactcggcaagaagttgtctttctggctaaagaactcagtgatgctgtcaacgtacgagacagaacgatggcagacctgcatactgcacgcttggaaaacgagaaagtgaaaaagcagttagctgatgcagtggcagaacttaaactaaatgctatgaaaaaagatcaggacaagactgatacactggaacacgaactaagaagagaagttgaagatctgaaactccgtcttcagatggctgcagaccattataaagaaaaatttaaggaatgccaaaggctccaaaaacaaataaacaaactttcagatcaatcagctaataataataatgtcttcacaaagaaaacggggaatcagcagaaagtgaatgatgcttcagtaaacacagacccagccacttctgcctctactgtagatgtaaagccatcaccttctgcagcagaggcagattttgacatagtaacaaaggggcaagtctgtgaaatgaccaaagaaattgctgacaaaacagaaaagtataataaatgtaaacaactcttgcaggatgagaaagcaaaatgcaataaatatgctgatgaacttgcaaaaatggagctgaaatggaaagaacaagtgaaaattgctgaaaatgtaaaacttgaactagctgaagtacaggacaattataaagaacttaaaaggagtctagaaaatccagcagaaaggaaaatggaagatggagcagatggtgctttttacccagatgaaatacaaaggccacctgtcagagtcccctcttggggactggaagacaatgttgtctgcagccagcctgctcgaaactttagtcggcctgatggcttagaggactctgaggatagcaaagaagatgagaatgtgcctactgctcctgatcctccaagtcaacatttacgtgggcatgggacaggcttttgctttgattccagctttgatgttcacaagaagtgtcccctctgtgagttaatgtttcctcctaactatgatcagagcaaatttgaagaacatgttgaaagtcactggaaggtgtgcccgatgtgcagcgagcagttccctcctgactatgaccagcaggtgtttgaaaggcatgtgcagacccattttgatcagaatgttctaaattttgactagttactttttattatgagttaatatagtttagcagtaaaaaaaaaaaaaaaaaaccacacctaaaatagaccactgaggagaccatagagcggatgctttcatgcaccctttactgcactttctgaccaggagctactttgagtttggtgttactaggatcagggtcagtctttggcttatcaataaattttaatctctgttaatcttacctgctttaaaaaaaagttcttgtgtgttcgtatctttatttattccctagtttgcagaactgtctgaataaaggatacaaggattatttcaatgttactgcactgaaaaacgtgtatgtattagtgtgctagattatttagcagaatattcacaagtttctgttgaccttgttgattgagcatgactactaaatattatgtaataaaaagcatttgtcataacagtcttatgaagtagttcttcgaatatagaaagttctataatttagcccatgaaatgataggtttttaattttcagaaatggagctgcatgtagaatgagatcacatgcttttatatgtgaaatattggttttagcaattaacagaaggcatactttgctaattttatggcaaaattttagaataacctgaatgattatttttaaactatcttgaagttgtatgtatatatctaatgggaaaatggaacaagagatgtcagtataattgttttcctattaaatgatctcataacaggggtgtttgtggcataaaaatcatagaatatatatcagtatcttttttacattttcctgatgagaatataaatttgaaatattctcagtaagtgattaaaagtacaatacataaacccaaatcaaagtaatgtgtttcttcagttatgtctgtgctgtatagaactgtcactaacattaaagaaagaggacacatttttcaagatctgtaatttcattgttgtcaaatttatttgtgaaagtttttcattaatctagcatcttgaacatctttttttggtttgggcctttaaaatacttctgaattgtattccctttcccttttataatgtgcgtgtgaataatttaaagcaccaacttttgattttgccgcttttgtagttatcatcaaaatagtttacatttgttctgagcaaactagctattgaagatgttaacctaatatttagacttggtggcattttgagttgctatatgtgaactgcagcatatcatgtcgtcacttgtatttgtttgtggaagcagagtttgtatattgttagaatcctttaaaaagtt

SEQ ID NO: 363426 - DNA, 3796 bp, Homo sapiens
aggcggaagagaccgccccgtgggcggaagtgacgcaaggcctactgtcggctgggaggggaggtgtagccggtctttgggggtaggcggtagtggcggaagaggttcggcggctgatggcggatcaggatcggaagcctgcgtaactttctcccttgatccgggagtctttccactggattcacaatgacatcctttcaagaagtcccattgcagacttccaactttgcccatgtcatctttcaaaatgtggccaagagttaccttcctaatgcacacctggaatgtcattacaccttaactccatatattcatccacatccaaaagattgggttggtatattcaaggttggatggagtactgctcgtgattattacacgtttttatggtcccctatgcctgaacattatgtggaaggatcaacagtcaattgtgtactagcattccaaggatattaccttccaaatgatgatggagaattttatcagttctgttacgttacccataagggtgaaattcgtggagcaagtacacctttccagtttcgagcttcttctccagttgaagagctgcttactatggaagatgaaggaaattctgacatgttagtggtgaccacaaaagcaggccttcttgagttgaaaattgagaaaaccatgaaagaaaaagaagaactgttaaagttaattgccgttctggaaaaagaaacagcacaacttcgagaacaagttgggagaatggaaagagaacttaaccatgagaaagaaagatgtgaccaactgcaagcagaacaaaagggtcttactgaagtaacacaaagcttaaaaatggaaaatgaagagtttaagaagaggttcagtgatgctacatccaaagcccatcagcttgaggaagatattgtgtcagtaacacataaagcaattgaaaaagaaaccgaattagacagtttaaaggacaaactcaagaaggcacaacatgaaagagaacaacttgaatgtcagttgaagacagagaaggatgaaaaggaactttataaggtacatttgaagaatacagaaatagaaaataccaagcttatgtcagaggtccagactttaaaaaatttagatgggaacaaagaaagcgtgattactcatttcaaagaagagattggcaggctgcagttatgtttggctgaaaaggaaaatctgcaaagaactttcctgcttacaacctcaagtaaagaagatacttgttttttaaaggagcaacttcgtaaagcagaggaacaggttcaggcaactcggcaagaagttgtctttctggctaaagaactcagtgatgctgtcaacgtacgagacagaacgatggcagacctgcatactgcacgcttggaaaacgagaaagtgaaaaagcagttagctgatgcagtggcagaacttaaactaaatgctatgaaaaaagatcaggacaagactgatacactggaacacgaactaagaagagaagttgaagatctgaaactccgtcttcagatggctgcagaccattataaagaaaaatttaaggaatgccaaaggctccaaaaacaaataaacaaactttcagatcaatcagctaataataataatgtcttcacaaagaaaacggggaatcagcagaaagtgaatgatgcttcagtaaacacagacccagccacttctgcctctactgtagatgtaaagccatcaccttctgcagcagaggcagattttgacatagtaacaaaggggcaagtctgtgaaatgaccaaagaaattgctgacaaaacagaaaagtataataaatgtaaacaactcttgcaggatgagaaagcaaaatgcaataaatatgctgatgaacttgcaaaaatggagctgaaatggaaagaacaagtgaaaattgctgaaaatgtaaaacttgaactagctgaagtacaggacaattataaagaacttaaaaggagtctagaaaatccagcagaaaggaaaatggaagatggagcagatggtgctttttacccagatgaaatacaaaggccacctgtcagagtcccctcttggggactggaagacaatgttgtctgcagccagcctgctcgaaactttagtcggcctgatggcttagaggactctgaggatagcaaagaagatgagaatgtgcctactgctcctgatcctccaagtcaacatttacgtgggcatgggacaggcttttgctttgattccagaggctctataaatgggttacacaattgtctacagcaagcatttagaagcagagaaatgtttctggagtaaagacttttaagctttgatgttcacaagaagtgtcccctctgtgagttaatgtttcctcctaactatgatcagagcaaatttgaagaacatgttgaaagtcactggaaggtgtgcccgatgtgcagcgagcagttccctcctgactatgaccagcaggtgtttgaaaggcatgtgcagacccattttgatcagaatgttctaaattttgactagttactttttattatgagttaatatagtttagcagtaaaaaaaaaaaaaaaaaaccacacctaaaatagaccactgaggagaccatagagcggatgctttcatgcaccctttactgcactttctgaccaggagctactttgagtttggtgttactaggatcagggtcagtctttggcttatcaataaattttaatctctgttaatcttacctgctttaaaaaaaagttcttgtgtgttcgtatctttatttattccctagtttgcagaactgtctgaataaaggatacaaggattatttcaatgttactgcactgaaaaacgtgtatgtattagtgtgctagattatttagcagaatattcacaagtttctgttgaccttgttgattgagcatgactactaaatattatgtaataaaaagcatttgtcataacagtcttatgaagtagttcttcgaatatagaaagttctataatttagcccatgaaatgataggtttttaattttcagaaatggagctgcatgtagaatgagatcacatgcttttatatgtgaaatattggttttagcaattaacagaaggcatactttgctaattttatggcaaaattttagaataacctgaatgattatttttaaactatcttgaagttgtatgtatatatctaatgggaaaatggaacaagagatgtcagtataattgttttcctattaaatgatctcataacaggggtgtttgtggcataaaaatcatagaatatatatcagtatcttttttacattttcctgatgagaatataaatttgaaatattctcagtaagtgattaaaagtacaatacataaacccaaatcaaagtaatgtgtttcttcagttatgtctgtgctgtatagaactgtcactaacattaaagaaagaggacacatttttcaagatctgtaatttcattgttgtcaaatttatttgtgaaagtttttcattaatctagcatcttgaacatctttttttggtttgggcctttaaaatacttctgaattgtattccctttcccttttataatgtgcgtgtgaataatttaaagcaccaacttttgattttgccgcttttgtagttatcatcaaaatagtttacatttgttctgagcaaactagctattgaagatgttaacctaatatttagacttggtggcattttgagttgctatatgtgaactgcagcatatcatgtcgtcacttgtatttgtttgtggaagcagagtttgtatattgttagaatcctttaaaaagtt

SEQ ID NO: 363427 - DNA, 2396 bp, Homo sapiens
aggcggaagagaccgccccgtgggcggaagtgacgcaaggcctactgtcggctgggaggggaggtgtagccggtctttgggggtaggcggtagtggcggaagaggttcggcggctgatggcggatcaggatcggaagcctgcgtaactttctcccttgatccgggagtctttccactggattcacaatgacatcctttcaagaagtcccattgcagacttccaactttgcccatgtcatctttcaaaatgtggccaagagttaccttcctaatgcacacctggaatgtcattacaccttaactccatatattcatccacatccaaaagattgggttggtatattcaaggttggatggagtactgctcgtgattattacacgtttttatggtcccctatgcctgaacattatgtggaaggatcaacagtcaattgtgtactagcattccaaggatattaccttccaaatgatgatggagaattttatcagttctgttacgttacccataagggtgaaattcgtggagcaagtacacctttccagtttcgagcttcttctccagttgaagagctgcttactatggaagatgaaggaaattctgacatgttagtggtgaccacaaaagcaggccttcttgagttgaaaattgagaaaaccatgaaagaaaaagaagaactgttaaagttaattgccgttctggaaaaagaaacagcacaacttcgagaacaagttgggagaatggaaagagaacttaaccatgagaaagaaagatgtgaccaactgcaagcagaacaaaagggtcttactgaagtaacacaaagcttaaaaatggaaaatgaagagtttaagaagaggttcagtgatgctacatccaaagcccatcagcttgaggaagatattgtgtcagtaacacataaagcaattgaaaaagaaaccgaattagacagtttaaaggacaaactcaagaaggcacaacatgaaagagaacaacttgaatgtcagttgaagacagagaaggatgaaaaggaactttataaggtacatttgaagaatacagaaatagaaaataccaagcttatgtcagaggtccagactttaaaaaatttagatgggaacaaagaaagcgtgattactcatttcaaagaagagattggcaggctgcagttatgtttggctgaaaaggaaaatctgcaaagaactttcctgcttacaacctcaagtaaagaagatacttgttttttaaaggagcaacttcgtaaagcagaggaacaggttcaggcaactcggcaagaagttgtctttctggctaaagaactcagtgatgctgtcaacgtacgagacagaacgatggcagacctgcatactgcacgcttggaaaacgagaaagtgaaaaagcagttagctgatgcagtggcagaacttaaactaaatgctatgaaaaaagatcaggacaagactgatacactggaacacgaactaagaagagaagttgaagatctgaaactccgtcttcagatggctgcagaccattataaagaaaaatttaaggaatgccaaaggctccaaaaacaaataaacaaactttcagatcaatcagctaataataataatgtcttcacaaagaaaacggggaatcagcagaaagtgaatgatgcttcagtaaacacagacccagccacttctgcctctactgtagatgtaaagccatcaccttctgcagcagaggcagattttgacatagtaacaaaggggcaagtctgtgaaatgaccaaagaaattgctgacaaaacagaaaagtataataaatgtaaacaactcttgcaggatgagaaagcaaaatgcaataaatatgctgatgaacttgcaaaaatggagctgaaatggaaagaacaagtgaaaattgctgaaaatgtaaaacttgaactagctgaagtacaggacaattataaagaacttaaaaggagtctagaaaatccagcagaaaggaaaatggaaggtaaaaaaaaaaaaaaaaaaccacacctaaaatagaccactgaggagaccatagagcggatgctttcatgcaccctttactgcactttctgaccaggagctactttgagtttggtgttactaggatcagggtcagtctttggcttatcaataaattttaatctctgttaatcttacctgctttaaaaaaaagttcttgtgtgttcgtatctttatttattccctagtttgcagaactgtctgaataaaggatacaaggattatttcaatgttactgcactgaaaaacgtgtatgtattagtgtgctagattatttagcagaatattcacaagtttctgttgaccttgttgattgagcatgactactaaatattatgtaataaaaagcatttgtcataaca

SEQ ID NO: 363428 - DNA, 2288 bp, Homo sapiens
atgatgtgtataactttagtctttgttggcttttaaaacaagagcagctttgtggacttcttaggatttcctaaagtaatatgtaaaaatattatttacttagttactgcaaggaggaaatataactaattcattgactcatttaacaacttattaacattttgaataggctaataataataatgtcttcacaaagaaaacggggaatcagcagaaagtgaatgatgcttcagtaaacacagacccagccacttctgcctctactgtagatgtaaagccatcaccttctgcagcagaggcagattttgacatagtaacaaaggggcaagtctgtgaaatgaccaaagaaattgctgacaaaacagaaaagtataataaatgtaaacaactcttgcaggatgagaaagcaaaatgcaataaatatgctgatgaacttgcaaaaatggagctgaaatggaaagaacaagtgaaaattgctgaaaatgtaaaacttgaactagctgaagtacaggacaattataaagaacttaaaaggagtctagaaaatccagcagaaaggaaaatggaagatggagcagatggtgctttttacccagatgaaatacaaaggccacctgtcagagtcccctcttggggactggaagacaatgttgtctgcagccagcctgctcgaaactttagtcggcctgatggcttagaggactctgaggatagcaaagaagatgagaatgtgcctactgctcctgatcctccaagtcaacatttacgtgggcatgggacaggcttttgctttgattccagctttgatgttcacaagaagtgtcccctctgtgagttaatgtttcctcctaactatgatcagagcaaatttgaagaacatgttgaaagtcactggaaggtgtgcccgatgtgcagcgagcagttccctcctgactatgaccagcaggtgtttgaaaggcatgtgcagacccattttgatcagaatgttctaaattttgactagttactttttattatgagttaatatagtttagcagtaaaaaaaaaaaaaaaaaaccacacctaaaatagaccactgaggagaccatagagcggatgctttcatgcaccctttactgcactttctgaccaggagctactttgagtttggtgttactaggatcagggtcagtctttggcttatcaataaattttaatctctgttaatcttacctgctttaaaaaaaagttcttgtgtgttcgtatctttatttattccctagtttgcagaactgtctgaataaaggatacaaggattatttcaatgttactgcactgaaaaacgtgtatgtattagtgtgctagattatttagcagaatattcacaagtttctgttgaccttgttgattgagcatgactactaaatattatgtaataaaaagcatttgtcataacagtcttatgaagtagttcttcgaatatagaaagttctataatttagcccatgaaatgataggtttttaattttcagaaatggagctgcatgtagaatgagatcacatgcttttatatgtgaaatattggttttagcaattaacagaaggcatactttgctaattttatggcaaaattttagaataacctgaatgattatttttaaactatcttgaagttgtatgtatatatctaatgggaaaatggaacaagagatgtcagtataattgttttcctattaaatgatctcataacaggggtgtttgtggcataaaaatcatagaatatatatcagtatcttttttacattttcctgatgagaatataaatttgaaatattctcagtaagtgattaaaagtacaatacataaacccaaatcaaagtaatgtgtttcttcagttatgtctgtgctgtatagaactgtcactaacattaaagaaagaggacacatttttcaagatctgtaatttcattgttgtcaaatttatttgtgaaagtttttcattaatctagcatcttgaacatctttttttggtttgggcctttaaaatacttctgaattgtattccctttcccttttataatgtgcgtgtgaataatttaaagcaccaacttttgattttgccgcttttgtagttatcatcaaaatagtttacatttgttctgagcaaactagctattgaagatgttaacctaatatttagacttggtggcattttgagttgctatatgtgaactgcagcatatcatgtcgtcacttgtatttgtttgtggaagcagagtttgtatattgttagaatcctttaaaaagtt

SEQ ID NO: 363429 - DNA, 2417 bp, Homo sapiens
atgatgtgtataactttagtctttgttggcttttaaaacaagagcagctttgtggacttcttaggatttcctaaagtaatatgtaaaaatattatttacttagttactgcaaggaggaaatataactaattcattgactcatttaacaacttattaacattttgaataggctaataataataatgtcttcacaaagaaaacggggaatcagcagaaagtgaatgatgcttcagtaaacacagacccagccacttctgcctctactgtagatgtaaagccatcaccttctgcagcagaggcagattttgacatagtaacaaaggggcaagtctgtgaaatgaccaaagaaattgctgacaaaacagaaaagtataataaatgtaaacaactcttgcaggatgagaaagcaaaatgcaataaatatgctgatgaacttgcaaaaatggagctgaaatggaaagaacaagtgaaaattgctgaaaatgtaaaacttgaactagctgaagtacaggacaattataaagaacttaaaaggagtctagaaaatccagcagaaaggaaaatggaagaaggtcagaattcccagagtcctcaatgtttcaaaacatgctcagagcaaaatggttatgttctcacattgtcaaatgcacaaccagttctgcaatatggtaatccttatgcatctcaggaaacaagagatggagcagatggtgctttttacccagatgaaatacaaaggccacctgtcagagtcccctcttggggactggaagacaatgttgtctgcagccagcctgctcgaaactttagtcggcctgatggcttagaggactctgaggatagcaaagaagatgagaatgtgcctactgctcctgatcctccaagtcaacatttacgtgggcatgggacaggcttttgctttgattccagctttgatgttcacaagaagtgtcccctctgtgagttaatgtttcctcctaactatgatcagagcaaatttgaagaacatgttgaaagtcactggaaggtgtgcccgatgtgcagcgagcagttccctcctgactatgaccagcaggtgtttgaaaggcatgtgcagacccattttgatcagaatgttctaaattttgactagttactttttattatgagttaatatagtttagcagtaaaaaaaaaaaaaaaaaaccacacctaaaatagaccactgaggagaccatagagcggatgctttcatgcaccctttactgcactttctgaccaggagctactttgagtttggtgttactaggatcagggtcagtctttggcttatcaataaattttaatctctgttaatcttacctgctttaaaaaaaagttcttgtgtgttcgtatctttatttattccctagtttgcagaactgtctgaataaaggatacaaggattatttcaatgttactgcactgaaaaacgtgtatgtattagtgtgctagattatttagcagaatattcacaagtttctgttgaccttgttgattgagcatgactactaaatattatgtaataaaaagcatttgtcataacagtcttatgaagtagttcttcgaatatagaaagttctataatttagcccatgaaatgataggtttttaattttcagaaatggagctgcatgtagaatgagatcacatgcttttatatgtgaaatattggttttagcaattaacagaaggcatactttgctaattttatggcaaaattttagaataacctgaatgattatttttaaactatcttgaagttgtatgtatatatctaatgggaaaatggaacaagagatgtcagtataattgttttcctattaaatgatctcataacaggggtgtttgtggcataaaaatcatagaatatatatcagtatcttttttacattttcctgatgagaatataaatttgaaatattctcagtaagtgattaaaagtacaatacataaacccaaatcaaagtaatgtgtttcttcagttatgtctgtgctgtatagaactgtcactaacattaaagaaagaggacacatttttcaagatctgtaatttcattgttgtcaaatttatttgtgaaagtttttcattaatctagcatcttgaacatctttttttggtttgggcctttaaaatacttctgaattgtattccctttcccttttataatgtgcgtgtgaataatttaaagcaccaacttttgattttgccgcttttgtagttatcatcaaaatagtttacatttgttctgagcaaactagctattgaagatgttaacctaatatttagacttggtggcattttgagttgctatatgtgaactgcagcatatcatgtcgtcacttgtatttgtttgtggaagcagagtttgtatattgttagaatcctttaaaaagtt

SEQ ID NO: 363430 - DNA, 1877 bp, Homo sapiens
  misc_feature (4)..(4): n is a, c, g, or t
  misc_feature (30)..(30): n is a, c, g, or t
  misc_feature (120)..(120): n is a, c, g, or t
  misc_feature (148)..(148): n is a, c, g, or t
  misc_feature (154)..(154): n is a, c, g, or t
aagnatatgtacactctcagtaaaacaatncataatagtatgacctgcaaaatggagtaatgaaagacaagtaaaatgctgaaatgtaaacgacctagctaagtcaggccattataaagncttaaaggagtctagaaatccacagaanggaaantggaatggagcagatggtgctttttacccagatgaaatacaaaggccacctgtcagagtcccctcttggggactggaagacaatgttgtctgcagccagcctgctcgaaactttagtcggcctgatggcttagaggactctgaggatagcaaagaagatgagaatgtgcctactgctcctgatcctccaagtcaacatttacgtgggcatgggacaggcttttgctttgattccagctttgatgttcacaagaagtgtcccctctgtgagttaatgtttcctcctaactatgatcagagcaaatttgaagaacatgttgaaagtcactggaaggtgtgcccgatgtgcagcgagcagttccctcctgactatgaccagcaggtgtttgaaaggcatgtgcagacccattttgatcagaatgttctaaattttgactagttactttttattatgagttaatatagtttagcagtaaaaaaaaaaaaaaaaaaccacacctaaaatagaccactgaggagaccatagagcggatgctttcatgcaccctttactgcactttctgaccaggagctactttgagtttggtgttactaggatcagggtcagtctttggcttatcaataaattttaatctctgttaatcttacctgctttaaaaaaaagttcttgtgtgttcgtatctttatttattccctagtttgcagaactgtctgaataaaggatacaaggattatttcaatgttactgcactgaaaaacgtgtatgtattagtgtgctagattatttagcagaatattcacaagtttctgttgaccttgttgattgagcatgactactaaatattatgtaataaaaagcatttgtcataacagtcttatgaagtagttcttcgaatatagaaagttctataatttagcccatgaaatgataggtttttaattttcagaaatggagctgcatgtagaatgagatcacatgcttttatatgtgaaatattggttttagcaattaacagaaggcatactttgctaattttatggcaaaattttagaataacctgaatgattatttttaaactatcttgaagttgtatgtatatatctaatgggaaaatggaacaagagatgtcagtataattgttttcctattaaatgatctcataacaggggtgtttgtggcataaaaatcatagaatatatatcagtatcttttttacattttcctgatgagaatataaatttgaaatattctcagtaagtgattaaaagtacaatacataaacccaaatcaaagtaatgtgtttcttcagttatgtctgtgctgtatagaactgtcactaacattaaagaaagaggacacatttttcaagatctgtaatttcattgttgtcaaatttatttgtgaaagtttttcattaatctagcatcttgaacatctttttttggtttgggcctttaaaatacttctgaattgtattccctttcccttttataatgtgcgtgtgaataatttaaagcaccaacttttgattttgccgcttttgtagttatcatcaaaatagtttacatttgttctgagcaaactagctattgaagatgttaacctaatatttagacttggtggcattttgagttgctatatgtgaactgcagcatatcatgtcgtcacttgtatttgtttgtggaagcagagtttgtatattgttagaatcctttaaaaagtt

SEQ ID NO: 363431 - DNA, 2037 bp, Homo sapiens
gttgtttggggatgggaactagttttgcaaaaaacacctaatgttgtataataatgcaccaatgatcttgctggttaaaaatacagtatttttggccaaaaacaaaaacatgtcctccgactgattctgatgcatacaagcatttgagaaccagtgccataaaaactttgctattaaaccaaatgcactggtgggaagttatgagttgtatttatccttacagtcttacaaaaggcattttctgttaaacgtggaagaattcttggtactaatttcacgtaattgtgattggatttgggaggttttaagggggaaaaacggttttgttaatctaattgtaaaattgaatttagaggctctataaatgggttacacaattgtctacagcaagcatttagaagcagagaaatgtttctggagtaaagacttttaaggtaggttgtttagtatgaatatcagctaactagataaatggaaccttgtcatatatggacaagttgttgttctacatttattagaaacatgtaattctttcatttttctctttaagctttgatgttcacaagaagtgtcccctctgtgagttaatgtttcctcctaactatgatcagagcaaatttgaagaacatgttgaaagtcactggaaggtgtgcccgatgtgcagcgagcagttccctcctgactatgaccagcaggtgtttgaaaggcatgtgcagacccattttgatcagaatgttctaaattttgactagttactttttattatgagttaatatagtttagcagtaaaaaaaaaaaaaaaaaaccacacctaaaatagaccactgaggagaccatagagcggatgctttcatgcaccctttactgcactttctgaccaggagctactttgagtttggtgttactaggatcagggtcagtctttggcttatcaataaattttaatctctgttaatcttacctgctttaaaaaaaagttcttgtgtgttcgtatctttatttattccctagtttgcagaactgtctgaataaaggatacaaggattatttcaatgttactgcactgaaaaacgtgtatgtattagtgtgctagattatttagcagaatattcacaagtttctgttgaccttgttgattgagcatgactactaaatattatgtaataaaaagcatttgtcataacagtcttatgaagtagttcttcgaatatagaaagttctataatttagcccatgaaatgataggtttttaattttcagaaatggagctgcatgtagaatgagatcacatgcttttatatgtgaaatattggttttagcaattaacagaaggcatactttgctaattttatggcaaaattttagaataacctgaatgattatttttaaactatcttgaagttgtatgtatatatctaatgggaaaatggaacaagagatgtcagtataattgttttcctattaaatgatctcataacaggggtgtttgtggcataaaaatcatagaatatatatcagtatcttttttacattttcctgatgagaatataaatttgaaatattctcagtaagtgattaaaagtacaatacataaacccaaatcaaagtaatgtgtttcttcagttatgtctgtgctgtatagaactgtcactaacattaaagaaagaggacacatttttcaagatctgtaatttcattgttgtcaaatttatttgtgaaagtttttcattaatctagcatcttgaacatctttttttggtttgggcctttaaaatacttctgaattgtattccctttcccttttataatgtgcgtgtgaataatttaaagcaccaacttttgattttgccgcttttgtagttatcatcaaaatagtttacatttgttctgagcaaactagctattgaagatgttaacctaatatttagacttggtggcattttgagttgctatatgtgaactgcagcatatcatgtcgtcacttgtatttgtttgtggaagcagagtttgtatattgttagaatcctttaaaaagtt

SEQ ID NO: 363432 - DNA, 718 bp, Homo sapiens
agtgggttttgccctagtgaagatacaaggggaaaggatattctgggaatataagcttaaacctaagagaagaaaaaatttaactttgagtaggaaggaagaatctagttttgataatttgcgaaaggaggaaggacatatcccagattcttgtcaagaacagtgtggggaatgagacatggcaagtattgttaaattgaaataacatgaattttataataggaagtttaataattttgtttgttaacttcctcttaggatattaccttccaaatgatgatggagaattttatcagttctgttacgttacccataagggtgaaattcgtggagcaagtacacctttccagtttcgagcttcttctccagttgaagagctgcttactatggaagatgaaggaaattctgacatgttagtggtgaccacaaaagcaggccttcttgaggttggtgttcacagtgagatagtgattcattgataattttaagaacagagctcatgttggttggcattttaagaattttaaggttatgtgagagttgccacaaaaatcgaatgctttggctgggcgcagtggctcacgcctgtaatcccggcactctgggaggccgaggcaggcagatcacgatgtcaggatatcgagaccatcctggctaacacggtgtaactctgtctctactaagaatacaaaaaattagacgggcgtggtggcaggca

SEQ ID NO: 363433 - DNA, 3715 bp, Homo sapiens
aggcggaagagaccgccccgtgggcggaagtgacgcaaggcctactgtcggctgggaggggaggtgtagccggtctttgggggtaggcggtagtggcggaagaggttcggcggctgatggcggatcaggatcggaagcctgcgtaactttctcccttgatccgggagtctttccactggattcacaatgacatcctttcaagaagtcccattgcagacttccaactttgcccatgtcatctttcaaaatgtggccaagagttaccttcctaatgcacacctggaatgtcattacaccttaactccatatattcatccacatccaaaagattgggttggtatattcaaggttggatggagtactgctcgtgattattacacgtttttatggtcccctatgcctgaacattatgtggaaggatcaacagtcaattgtgtactagcattccaaggatattaccttccaaatgatgatggagaattttatcagttctgttacgttacccataagggtgaaattcgtggagcaagtacacctttccagtttcgagcttcttctccagttgaagagctgcttactatggaagatgaaggaaattctgacatgttagtggtgaccacaaaagcaggccttcttgagttgaaaattgagaaaaccatgaaagaaaaagaagaactgttaaagttaattgccgttctggaaaaagaaacagcacaacttcgagaacaagttgggagaatggaaagagaacttaaccatgagaaagaaagatgtgaccaactgcaagcagaacaaaagggtcttactgaagtaacacaaagcttaaaaatggaaaatgaagagtttaagaagaggttcagtgatgctacatccaaagcccatcagcttgaggaagatattgtgtcagtaacacataaagcaattgaaaaagaaaccgaattagacagtttaaaggacaaactcaagaaggcacaacatgaaagagaacaacttgaatgtcagttgaagacagagaaggatgaaaaggaactttataaggtacatttgaagaatacagaaatagaaaataccaagcttatgtcagaggtccagactttaaaaaatttagatgggaacaaagaaagcgtgattactcatttcaaagaagagattggcaggctgcagttatgtttggctgaaaaggaaaatctgcaaagaactttcctgcttacaacctcaagtaaagaagatacttgttttttaaaggagcaacttcgtaaagcagaggaacaggttcaggcaactcggcaagaagttgtctttctggctaaagaactcagtgatgctgtcaacgtacgagacagaacgatggcagacctgcatactgcacgcttggaaaacgagaaagtgaaaaagcagttagctgatgcagtggcagaacttaaactaaatgctatgaaaaaagatcaggacaagactgatacactggaacacgaactaagaagagaagttgaagatctgaaactccgtcttcagatggctgcagaccattataaagaaaaatttaaggaatgccaaaggctccaaaaacaaataaacaaactttcagatcaatcagctaataataataatgtcttcacaaagaaaacggggaatcagcagaaagtgaatgatgcttcagtaaacacagacccagccacttctgcctctactgtagatgtaaagccatcaccttctgcagcagaggcagattttgacatagtaacaaaggggcaagtctgtgaaatgaccaaagaaattgctgacaaaacagaaaagtataataaatgtaaacaactcttgcaggatgagaaagcaaaatgcaataaatatgctgatgaacttgcaaaaatggagctgaaatggaaagaacaagtgaaaattgctgaaaatgtaaaacttgaactagctgaagtacaggacaattataaagaacttaaaaggagtctagaaaatccagcagaaaggaaaatggaagatggagcagatggtgctttttacccagatgaaatacaaaggccacctgtcagagtcccctcttggggactggaagacaatgttgtctgcagccagcctgctcgaaactttagtcggcctgatggcttagaggactctgaggatagcaaagaagatgagaatgtgcctactgctcctgatcctccaagtcaacatttacgtgggcatgggacaggcttttgctttgattccagctttgatgttcacaagaagtgtcccctctgtgagttaatgtttcctcctaactatgatcagagcaaatttgaagaacatgttgaaagtcactggaaggtgtgcccgatgtgcagcgagcagttccctcctgactatgaccagcaggtgtttgaaaggcatgtgcagacccattttgatcagaatgttctaaattttgactagttactttttattatgagttaatatagtttagcagtaaaaaaaaaaaaaaaaaaccacacctaaaatagaccactgaggagaccatagagcggatgctttcatgcaccctttactgcactttctgaccaggagctactttgagtttggtgttactaggatcagggtcagtctttggcttatcaataaattttaatctctgttaatcttacctgctttaaaaaaaagttcttgtgtgttcgtatctttatttattccctagtttgcagaactgtctgaataaaggatacaaggattatttcaatgttactgcactgaaaaacgtgtatgtattagtgtgctagattatttagcagaatattcacaagtttctgttgaccttgttgattgagcatgactactaaatattatgtaataaaaagcatttgtcataacagtcttatgaagtagttcttcgaatatagaaagttctataatttagcccatgaaatgataggtttttaattttcagaaatggagctgcatgtagaatgagatcacatgcttttatatgtgaaatattggttttagcaattaacagaaggcatactttgctaattttatggcaaaattttagaataacctgaatgattatttttaaactatcttgaagttgtatgtatatatctaatgggaaaatggaacaagagatgtcagtataattgttttcctattaaatgatctcataacaggggtgtttgtggcataaaaatcatagaatatatatcagtatcttttttacattttcctgatgagaatataaatttgaaatattctcagtaagtgattaaaagtacaatacataaacccaaatcaaagtaatgtgtttcttcagttatgtctgtgctgtatagaactgtcactaacattaaagaaagaggacacatttttcaagatctgtaatttcattgttgtcaaatttatttgtgaaagtttttcattaatctagcatcttgaacatctttttttggtttgggcctttaaaatacttctgaattgtattccctttcccttttataatgtgcgtgtgaataatttaaagcaccaacttttgattttgccgcttttgtagttatcatcaaaatagtttacatttgttctgagcaaactagctattgaagatgttaacctaatatttagacttggtggcattttgagttgctatatgtgaactgcagcatatcatgtcgtcacttgtatttgtttgtggaagcagagtttgtatattgttagaatcctttaaaaagtt

SEQ ID NO: 363434 - DNA, 3674 bp, Homo sapiens
aggcggaagagaccgccccgtgggcggaagtgacgcaaggcctactgtcggctgggaggggaggtgtagccggtctttgggggtaggcggtagtggcggaagaggttcggcggctgatggcggatcaggatcggaagcctgcgtaactttctcccttgatccgggagtctttccactggattcacaatgacatcctttcaagaagtcccattgcagacttccaactttgcccatgtcatctttcaaaatgtggccaagagttaccttcctaatgcacacctggaatgtcattacaccttaactccatatattcatccacatccaaaagattgggttggtatattcaaggttggatggagtactgctcgtgattattacacgtttttatggtcccctatgcctgaacattatgtggaaggatcaacagtcaattgtgtactagcattccaaggatattaccttccaaatgatgatggagaattttatcagttctgttacgttacccataagggtgaaattcgtggagcaagtacacctttccagtttcgagcttcttctccagttgaagagctgcttactatggaagatgaaggaaattctgacatgttagtggtgaccacaaaagcaggccttcttgagttgaaaattgagaaaaccatgaaagaaaaagaagaactgttaaagttaattgccgttctggaaaaagaaacagcacaacttcgagaacaagttgggagaatggaaagagaacttaaccatgagaaagaaagatgtgaccaactgcaagcagaacaaaagggtcttactgaagtaacacaaagcttaaaaatggaaaatgaagagtttaagaagaggttcagtgatgctacatccaaagcccatcagcttgaggaagatattgtgtcagtaacacataaagcaattgaaaaagaaaccgaattagacagtttaaaggacaaactcaagaaggcacaacatgaaagagaacaacttgaatgtcagttgaagacagagaaggatgaaaaggaactttataaggtacatttgaagaatacagaaatagaaaataccaagcttatgtcagaggtccagactttaaaaaatttagatgggaacaaagaaagcgtgattactcatttcaaagaagagattggcaggctgcagttatgtttggctgaaaagggaagatacttgttttttaaaggagcaacttcgtaaagcagaggaacaggttcaggcaactcggcaagaagttgtctttctggctaaagaactcagtgatgctgtcaacgtacgagacagaacgatggcagacctgcatactgcacgcttggaaaacgagaaagtgaaaaagcagttagctgatgcagtggcagaacttaaactaaatgctatgaaaaaagatcaggacaagactgatacactggaacacgaactaagaagagaagttgaagatctgaaactccgtcttcagatggctgcagaccattataaagaaaaatttaaggaatgccaaaggctccaaaaacaaataaacaaactttcagatcaatcagctaataataataatgtcttcacaaagaaaacggggaatcagcagaaagtgaatgatgcttcagtaaacacagacccagccacttctgcctctactgtagatgtaaagccatcaccttctgcagcagaggcagattttgacatagtaacaaaggggcaagtctgtgaaatgaccaaagaaattgctgacaaaacagaaaagtataataaatgtaaacaactcttgcaggatgagaaagcaaaatgcaataaatatgctgatgaacttgcaaaaatggagctgaaatggaaagaacaagtgaaaattgctgaaaatgtaaaacttgaactagctgaagtacaggacaattataaagaacttaaaaggagtctagaaaatccagcagaaaggaaaatggaagatggagcagatggtgctttttacccagatgaaatacaaaggccacctgtcagagtcccctcttggggactggaagacaatgttgtctgcagccagcctgctcgaaactttagtcggcctgatggcttagaggactctgaggatagcaaagaagatgagaatgtgcctactgctcctgatcctccaagtcaacatttacgtgggcatgggacaggcttttgctttgattccagctttgatgttcacaagaagtgtcccctctgtgagttaatgtttcctcctaactatgatcagagcaaatttgaagaacatgttgaaagtcactggaaggtgtgcccgatgtgcagcgagcagttccctcctgactatgaccagcaggtgtttgaaaggcatgtgcagacccattttgatcagaatgttctaaattttgactagttactttttattatgagttaatatagtttagcagtaaaaaaaaaaaaaaaaaaccacacctaaaatagaccactgaggagaccatagagcggatgctttcatgcaccctttactgcactttctgaccaggagctactttgagtttggtgttactaggatcagggtcagtctttggcttatcaataaattttaatctctgttaatcttacctgctttaaaaaaaagttcttgtgtgttcgtatctttatttattccctagtttgcagaactgtctgaataaaggatacaaggattatttcaatgttactgcactgaaaaacgtgtatgtattagtgtgctagattatttagcagaatattcacaagtttctgttgaccttgttgattgagcatgactactaaatattatgtaataaaaagcatttgtcataacagtcttatgaagtagttcttcgaatatagaaagttctataatttagcccatgaaatgataggtttttaattttcagaaatggagctgcatgtagaatgagatcacatgcttttatatgtgaaatattggttttagcaattaacagaaggcatactttgctaattttatggcaaaattttagaataacctgaatgattatttttaaactatcttgaagttgtatgtatatatctaatgggaaaatggaacaagagatgtcagtataattgttttcctattaaatgatctcataacaggggtgtttgtggcataaaaatcatagaatatatatcagtatcttttttacattttcctgatgagaatataaatttgaaatattctcagtaagtgattaaaagtacaatacataaacccaaatcaaagtaatgtgtttcttcagttatgtctgtgctgtatagaactgtcactaacattaaagaaagaggacacatttttcaagatctgtaatttcattgttgtcaaatttatttgtgaaagtttttcattaatctagcatcttgaacatctttttttggtttgggcctttaaaatacttctgaattgtattccctttcccttttataatgtgcgtgtgaataatttaaagcaccaacttttgattttgccgcttttgtagttatcatcaaaatagtttacatttgttctgagcaaactagctattgaagatgttaacctaatatttagacttggtggcattttgagttgctatatgtgaactgcagcatatcatgtcgtcacttgtatttgtttgtggaagcagagtttgtatattgttagaatcctttaaaaagtt

SEQ ID NO: 363435 - DNA, 3815 bp, Homo sapiens
aggcggaagagaccgccccgtgggcggaagtgacgcaaggcctactgtcggctgggaggggaggtgtagccggtctttgggggtaggcggtagtggcggaagaggttcggcggctgatggcggatcaggatcggaagcctgcgtaactttctcccttgatccgggagtctttccactggattcacaatgacatcctttcaagaagtcccattgcagacttccaactttgcccatgtcatctttcaaaatgtggccaagagttaccttcctaatgcacacctggaatgtcattacaccttaactccatatattcatccacatccaaaagattgggttggtatattcaaggttggatggagtactgctcgtgattattacacgtttttatggtcccctatgcctgaacattatgtggaaggatcaacagtcaattgtgtactagcattccaaggatattaccttccaaatgatgatggagaattttatcagttctgttacgttacccataagggtgaaattcgtggagcaagtacacctttccagtttcgagcttcttctccagttgaagagctgcttactatggaagatgaaggaaattctgacatgttagtggtgaccacaaaagcaggccttcttgagttgaaaattgagaaaaccatgaaagaaaaagaagaactgttaaagttaattgccgttctggaaaaagaaacagcacaacttcgagaacaagttgggagaatggaaagagaacttaaccatgagaaagaaagatgtgaccaactgcaagcagaacaaaagggtcttactgaagtaacacaaagcttaaaaatggaaaatgaagagtttaagaagaggttcagtgatgctacatccaaagcccatcagcttgaggaagatattgtgtcagtaacacataaagcaattgaaaaagaaaccgaattagacagtttaaaggacaaactcaagaaggcacaacatgaaagagaacaacttgaatgtcagttgaagacagagaaggatgaaaaggaactttataaggtacatttgaagaatacagaaatagaaaataccaagcttatgtcagaggtccagactttaaaaaatttagatgggaacaaagaaagcgtgattactcatttcaaagaagagattggcaggctgcagttatgtttggctgaaaaggaaaatctgcaaagaactttcctgcttacaacctcaagtaaagaagatacttgttttttaaaggagcaacttcgtaaagcagaggaacaggttcaggcaactcggcaagaagttgtctttctggctaaagaactcagtgatgctgtcaacgtacgagacagaacgatggcagacctgcatactgcacgcttggaaaacgagaaagtgaaaaagcagttagctgatgcagtggcagaacttaaactaaatgctatgaaaaaagatcaggacaagactgatacactggaacacgaactaagaagagaagttgaagatctgaaactccgtcttcagatggctgcagaccattataaagaaaaatttaaggaatgccaaaggctccaaaaacaaataaacaaactttcagatcaatcagctaataataataatgtcttcacaaagaaaacggggaatcagcagaaagtgaatgatgcttcagtaaacacagacccagccacttctgcctctactgtagatgtaaagccatcaccttctgcagcagaggcagattttgacatagtaacaaaggggcaagtctgtgaaatgaccaaagaaattgctgacaaaacagaaaagtataataaatgtaaacaactcttgcaggatgagaaagcaaaatgcaataaatatgctgatgaacttgcaaaaatggagctgaaatggaaagaacaagtgaaaattgctgaaaatgtaaaacttgaactagctgaagtacaggacaattataaagaacttaaaaggagtctagaaaatccagcagaaaggaaaatggaagaaggtcagaattcccagagtcctcaatgtttcaaaacatgctcagagcaaaatggttatgttctcacattgtcaaatgcacaaccagttctgcaatatggatggagcagatggtgctttttacccagatgaaatacaaaggccacctgtcagagtcccctcttggggactggaagacaatgttgtctgcagccagcctgctcgaaactttagtcggcctgatggcttagaggactctgaggatagcaaagaagatgagaatgtgcctactgctcctgatcctccaagtcaacatttacgtgggcatgggacaggcttttgctttgattccagctttgatgttcacaagaagtgtcccctctgtgagttaatgtttcctcctaactatgatcagagcaaatttgaagaacatgttgaaagtcactggaaggtgtgcccgatgtgcagcgagcagttccctcctgactatgaccagcaggtgtttgaaaggcatgtgcagacccattttgatcagaatgttctaaattttgactagttactttttattatgagttaatatagtttagcagtaaaaaaaaaaaaaaaaaaccacacctaaaatagaccactgaggagaccatagagcggatgctttcatgcaccctttactgcactttctgaccaggagctactttgagtttggtgttactaggatcagggtcagtctttggcttatcaataaattttaatctctgttaatcttacctgctttaaaaaaaagttcttgtgtgttcgtatctttatttattccctagtttgcagaactgtctgaataaaggatacaaggattatttcaatgttactgcactgaaaaacgtgtatgtattagtgtgctagattatttagcagaatattcacaagtttctgttgaccttgttgattgagcatgactactaaatattatgtaataaaaagcatttgtcataacagtcttatgaagtagttcttcgaatatagaaagttctataatttagcccatgaaatgataggtttttaattttcagaaatggagctgcatgtagaatgagatcacatgcttttatatgtgaaatattggttttagcaattaacagaaggcatactttgctaattttatggcaaaattttagaataacctgaatgattatttttaaactatcttgaagttgtatgtatatatctaatgggaaaatggaacaagagatgtcagtataattgttttcctattaaatgatctcataacaggggtgtttgtggcataaaaatcatagaatatatatcagtatcttttttacattttcctgatgagaatataaatttgaaatattctcagtaagtgattaaaagtacaatacataaacccaaatcaaagtaatgtgtttcttcagttatgtctgtgctgtatagaactgtcactaacattaaagaaagaggacacatttttcaagatctgtaatttcattgttgtcaaatttatttgtgaaagtttttcattaatctagcatcttgaacatctttttttggtttgggcctttaaaatacttctgaattgtattccctttcccttttataatgtgcgtgtgaataatttaaagcaccaacttttgattttgccgcttttgtagttatcatcaaaatagtttacatttgttctgagcaaactagctattgaagatgttaacctaatatttagacttggtggcattttgagttgctatatgtgaactgcagcatatcatgtcgtcacttgtatttgtttgtggaagcagagtttgtatattgttagaatcctttaaaaagtt

SEQ ID NO: 363436 - DNA, 3520 bp, Homo sapiens
aggcggaagagaccgccccgtgggcggaagtgacgcaaggcctactgtcggctgggaggggaggtgtagccggtctttgggggtaggcggtagtggcggaagaggttcggcggctgatggcggatcaggatcggaagcctgcgtaactttctcccttgatccgggagtctttccactggattcacaatgacatcctttcaagaagtcccattgcagacttccaactttgcccatgtcatctttcaaaatgtggccaagagttaccttcctaatgcacacctggaatgtcattacaccttaactccatatattcatccacatccaaaagattgggttggtatattcaaggttggatggagtactgctcgtgattattacacgtttttatggtcccctatgcctgaacattatgtggaaggatcaacagtcaattgtgtactagcattccaaggatattaccttccaaatgatgatggagaattttatcagttctgttacgttacccataagggtgaaattcgtggagcaagtacacctttccagtttcgagcttcttctccagttgaagagctgcttactatggaagatgaaggaaattctgacatgttagtggtgaccacaaaagcaggccttcttgagttgaaaattgagaaaaccatgaaagaaaaagaagaactgttaaagttaattgccgttctggaaaaagaaacagcacaacttcgagaacaagttgggagaatggaaagagaacttaaccatgagaaagaaagatgtgaccaactgcaagcagaacaaaagggtcttactgaagtaacacaaagcttaaaaatggaaaatgaagagtttaagaagaggttcagtgatgctacatccaaagcccatcagcttgaggaagatattgtgtcagtaacacataaagcaattgaaaaagaaaccgaattagacagtttaaaggacaaactcaagaaggcacaacatgaaagagaacaacttgaatgtcagttgaagacagagaaggatgaaaaggaactttataaggtacatttgaagaatacagaaatagaaaataccaagcttatgtcagaggtccagactttaaaaaatttagatgggaacaaagaaagcgtgattactcatttcaaagaagagattggcaggctgcagttatgtttggctgaaaaggaaaatctgcaaagaactttcctgcttacaacctcaagtaaagaagatacttgttttttaaaggagcaacttcgtaaagcagaggaacaggttcaggcaactcggcaagaagttgtctttctggctaaagaactcagtgatgctgtcaacgtacgagacagaacgatggcagacctgcatactgcacgcttggaaaacgagaaagtgaaaaagcagttagctgatgcagtggcagaacttaaactaaatgctatgaaaaaagatcaggacaagactgatacactggaacacgaactaagaagagaagttgaagatctgaaactccgtcttcagatggctgcagaccattataaagaaaaatttaaggaatgccaaaggctccaaaaacaaataaacaaactttcagatcaatcagctaataataataatgtcttcacaaagaaaacggggaatcagcagaaagtgaatgatgcttcagtaaacacagacccagccacttctgcctctactgtagatgtaaagccatcaccttctgcagcagaggcagattttgacatagtaacaaaggggcaagtctgtgaaatgaccaaagaaattgctgacaaaacagaaaagtataataaatgtaaacaactcttgcaggatgagaaagcaaaatgcaataaatatgctgatgaacttgcaaaaatggagctgaaatggaaagaacaagtgaaaattgctgaaaatgtaaaacttgaactagctgaagtacaggacaattataaagaagatgagaatgtgcctactgctcctgatcctccaagtcaacatttacgtgggcatgggacaggcttttgctttgattccagctttgatgttcacaagaagtgtcccctctgtgagttaatgtttcctcctaactatgatcagagcaaatttgaagaacatgttgaaagtcactggaaggtgtgcccgatgtgcagcgagcagttccctcctgactatgaccagcaggtgtttgaaaggcatgtgcagacccattttgatcagaatgttctaaattttgactagttactttttattatgagttaatatagtttagcagtaaaaaaaaaaaaaaaaaaccacacctaaaatagaccactgaggagaccatagagcggatgctttcatgcaccctttactgcactttctgaccaggagctactttgagtttggtgttactaggatcagggtcagtctttggcttatcaataaattttaatctctgttaatcttacctgctttaaaaaaaagttcttgtgtgttcgtatctttatttattccctagtttgcagaactgtctgaataaaggatacaaggattatttcaatgttactgcactgaaaaacgtgtatgtattagtgtgctagattatttagcagaatattcacaagtttctgttgaccttgttgattgagcatgactactaaatattatgtaataaaaagcatttgtcataacagtcttatgaagtagttcttcgaatatagaaagttctataatttagcccatgaaatgataggtttttaattttcagaaatggagctgcatgtagaatgagatcacatgcttttatatgtgaaatattggttttagcaattaacagaaggcatactttgctaattttatggcaaaattttagaataacctgaatgattatttttaaactatcttgaagttgtatgtatatatctaatgggaaaatggaacaagagatgtcagtataattgttttcctattaaatgatctcataacaggggtgtttgtggcataaaaatcatagaatatatatcagtatcttttttacattttcctgatgagaatataaatttgaaatattctcagtaagtgattaaaagtacaatacataaacccaaatcaaagtaatgtgtttcttcagttatgtctgtgctgtatagaactgtcactaacattaaagaaagaggacacatttttcaagatctgtaatttcattgttgtcaaatttatttgtgaaagtttttcattaatctagcatcttgaacatctttttttggtttgggcctttaaaatacttctgaattgtattccctttcccttttataatgtgcgtgtgaataatttaaagcaccaacttttgattttgccgcttttgtagttatcatcaaaatagtttacatttgttctgagcaaactagctattgaagatgttaacctaatatttagacttggtggcattttgagttgctatatgtgaactgcagcatatcatgtcgtcacttgtatttgtttgtggaagcagagtttgtatattgttagaatcctttaaaaagtt

SEQ ID NO: 363437 - DNA, 3912 bp, Homo sapiens
aggcggaagagaccgccccgtgggcggaagtgacgcaaggcctactgtcggctgggaggggaggtgtagccggtctttgggggtaggcggtagtggcggaagaggttcggcggctgatggcggatcaggatcggaagcctgcgtaactttctcccttgatccgggagtctttccactggattcacaatgacatcctttcaagaagtcccattgcagacttccaactttgcccatgtcatctttcaaaatgtggccaagagttaccttcctaatgcacacctggaatgtcattacaccttaactccatatattcatccacatccaaaagattgggttggtatattcaaggttggatggagtactgctcgtgattattacacgtttttatggtcccctatgcctgaacattatgtggaaggatcaacagtcaattgtgtactagcattccaaggatattaccttccaaatgatgatggagaattttatcagttctgttacgttacccataagggtgaaattcgtggagcaagtacacctttccagtttcgagcttcttctccagttgaagagctgcttactatggaagatgaaggaaattctgacatgttagtggtgaccacaaaagcaggccttcttgagttgaaaattgagaaaaccatgaaagaaaaagaagaactgttaaagttaattgccgttctggaaaaagaaacagcacaacttcgagaacaagttgggagaatggaaagagaacttaaccatgagaaagaaagatgtgaccaactgcaagcagaacaaaagggtcttactgaagtaacacaaagcttaaaaatggaaaatgaagagtttaagaagaggttcagtgatgctacatccaaagcccatcagcttgaggaagatattgtgtcagtaacacataaagcaattgaaaaagaaaccgaattagacagtttaaaggacaaactcaagaaggcacaacatgaaagagaacaacttgaatgtcagttgaagacagagaaggatgaaaaggaactttataaggtacatttgaagaatacagaaatagaaaataccaagcttatgtcagaggtccagactttaaaaaatttagatgggaacaaagaaagcgtgattactcatttcaaagaagagattggcaggctgcagttatgtttggctgaaaaggaaaatctgcaaagaactttcctgcttacaacctcaagtaaagaagatacttgttttttaaaggagcaacttcgtaaagcagaggaacaggttcaggcaactcggcaagaagttgtctttctggctaaagaactcagtgatgctgtcaacgtacgagacagaacgatggcagacctgcatactgcacgcttggaaaacgagaaagtgaaaaagcagttagctgatgcagtggcagaacttaaactaaatgctatgaaaaaagatcaggacaagactgatacactggaacacgaactaagaagagaagttgaagatctgaaactccgtcttcagatggctgcagaccattataaagaaaaatttaaggaatgccaaaggctccaaaaacaaataaacaaactttcagatcaatcagctaataataataatgtcttcacaaagaaaacggggaatcagcagaaagtgaatgatgcttcagtaaacacagacccagccacttctgcctctactgtagatgtaaagccatcaccttctgcagcagaggcagattttgacatagtaacaaaggggcaagtctgtgaaatgaccaaagaaattgctgacaaaacagaaaagtataataaatgtaaacaactcttgcaggatgagaaagcaaaatgcaataaatatgctgatgaacttgcaaaaatggagctgaaatggaaagaacaagtgaaaattgctgaaaatgtaaaacttgaactagctgaagtacaggacaattataaagaacttaaaaggagtctagaaaatccagcagaaaggaaaatggaagatggagcagatggtgctttttacccagatgaaatacaaaggccacctgtcagagtcccctcttggggactggaagacaatgttgtctgcagccagcctgctcgaaactttagtcggcctgatggcttagaggactctgaggatagcaaagaagatgagaatgtgcctactgctcctgatcctccaagtcaacatttacgtgggcatgggacaggcttttgctttgattccagaggctctataaatgggttacacaattgtctacagcaagcatttagaagcagagaaatgtttctggagtaaagacttttaaggtaggttgtttagtatgaatatcagctaactagataaatggaaccttgtcatatatggacaagttgttgttctacatttattagaaacatgtaattctttcatttttctctttaagctttgatgttcacaagaagtgtcccctctgtgagttaatgtttcctcctaactatgatcagagcaaatttgaagaacatgttgaaagtcactggaaggtgtgcccgatgtgcagcgagcagttccctcctgactatgaccagcaggtgtttgaaaggcatgtgcagacccattttgatcagaatgttctaaattttgactagttactttttattatgagttaatatagtttagcagtaaaaaaaaaaaaaaaaaaccacacctaaaatagaccactgaggagaccatagagcggatgctttcatgcaccctttactgcactttctgaccaggagctactttgagtttggtgttactaggatcagggtcagtctttggcttatcaataaattttaatctctgttaatcttacctgctttaaaaaaaagttcttgtgtgttcgtatctttatttattccctagtttgcagaactgtctgaataaaggatacaaggattatttcaatgttactgcactgaaaaacgtgtatgtattagtgtgctagattatttagcagaatattcacaagtttctgttgaccttgttgattgagcatgactactaaatattatgtaataaaaagcatttgtcataacagtcttatgaagtagttcttcgaatatagaaagttctataatttagcccatgaaatgataggtttttaattttcagaaatggagctgcatgtagaatgagatcacatgcttttatatgtgaaatattggttttagcaattaacagaaggcatactttgctaattttatggcaaaattttagaataacctgaatgattatttttaaactatcttgaagttgtatgtatatatctaatgggaaaatggaacaagagatgtcagtataattgttttcctattaaatgatctcataacaggggtgtttgtggcataaaaatcatagaatatatatcagtatcttttttacattttcctgatgagaatataaatttgaaatattctcagtaagtgattaaaagtacaatacataaacccaaatcaaagtaatgtgtttcttcagttatgtctgtgctgtatagaactgtcactaacattaaagaaagaggacacatttttcaagatctgtaatttcattgttgtcaaatttatttgtgaaagtttttcattaatctagcatcttgaacatctttttttggtttgggcctttaaaatacttctgaattgtattccctttcccttttataatgtgcgtgtgaataatttaaagcaccaacttttgattttgccgcttttgtagttatcatcaaaatagtttacatttgttctgagcaaactagctattgaagatgttaacctaatatttagacttggtggcattttgagttgctatatgtgaactgcagcatatcatgtcgtcacttgtatttgtttgtggaagcagagtttgtatattgttagaatcctttaaaaagtt

SEQ ID NO: 363438 - DNA, 3064 bp, Homo sapiens
aggcggaagagaccgccccgtgggcggaagtgacgcaaggcctactgtcggctgggaggggaggtgtagccggtctttgggggtaggcggtagtggcggaagaggttcggcggctgatggcggatcaggatcggaagcctgcgtaactttctcccttgatccgggagtctttccactggattcacaatgacatcctttcaagaagtcccattgcagacttccaactttgcccatgtcatctttcaaaatgtggccaagagttaccttcctaatgcacacctggaatgtcattacaccttaactccatatattcatccacatccaaaagattgggttggtatattcaaggttggatggagtactgctcgtgattattacacgtttttatggtcccctatgcctgaacattatgtggaaggatcaacagtcaattgtgtactagcattccaaggatattaccttccaaatgatgatggagaattttatcagttctgttacgttacccataagggtgaaattcgtggagcaagtacacctttccagtttcgagcttcttctccagttgaagagctgcttactatggaagatgaaggaaattctgacatgttagtggtgaccacaaaagcaggccttcttgagttgaaaattgagaaaaccatgaaagaaaaagaagaactgttaaagttaattgccgttctggaaaaagaaacagcacaacttcgagaacaagttgggagaatggaaagagaacttaaccatgagaaagaaagatgtgaccaactgcaagcagaacaaaagggtcttactgaagtaacacaaagcttaaaaatggaaaatgaagagtttaagaagaggttcagtgatgctacatccaaagcccatcagcttgaggaagatattgtgtcagtaacacataaagcaattgaaaaagaaaccgaattagacagtttaaaggacaaactcaagaaggcacaacatgaaagagaacaacttgaatgtcagttgaagacagagaaggatgaaaaggaactttataaggtacatttgaagaatacagaaatagaaaataccaagcttatgtcagaggtccagactttaaaaaatttagatgggaacaaagaaagcgtgattactcatttcaaagaagagattggcaggctgcagttatgtttggctgaaaaggaaaatctgcaaagaactttcctgcttacaacctcaagtaaagaagatacttgttttttaaaggagcaacttcgtaaagcagaggaacaggttcaggcaactcggcaagaagttgtctttctggctaaagaactcagtgatgctgtcaacgtacgagacagaacgatggcagacctgcatactgcacgcttggaaaacgagaaagtgaaaaagcagttagctgatgcagtggcagaacttaaactaaatgctatgaaaaaagatcaggacaagactgatacactggaacacgaactaagaagagaagttgaagatctgaaactccgtcttcagatggctgcagaccattataaagaaaaatttaaggaatgccaaaggctccaaaaacaaataaacaaactttcagatcaatcagctaataataataatgtcttcacaaagaaaacggggaatcagcagaaagtgaatgatgcttcagtaaacacagacccagccacttctgcctctactgtagatgtaaagccatcaccttctgcagcagaggcagattttgacatagtaacaaaggggcaagtctgtgaaatgaccaaagaaattgctgacaaaacagaaaagtataataaatgtaaacaactcttgcaggatgagaaagcaaaatgcaataaatatgctgatgaacttgcaaaaatggagctgaaatggaaagaacaagtgaaaattgctgaaaatgtaaaacttgaactagctgaagtacaggacaattataaagaacttaaaaggagtctagaaaatccagcagaaaggaaaatggaagatggagcagatggtgctttttacccagatgaaatacaaaggccacctgtcagagtcccctcttggggactggaagacaatgttgtctgcagccagcctgctcgaaactttagtcggcctgatggcttagaggactctgaggatagcaaagaagatgagaatgtgcctactgctcctgatcctccaagtcaacatttacgtgggcatgggacaggcttttgctttgattccagaggctctataaatgggttacacaattgtctacagcaagcatttagaagcagagaaatgtttctggagtaaagacttttaagctttgatgttcacaagaagtgtcccctctgtgagttaatgtttcctcctaactatgatcagagcaaatttgaagaacatgttgaaagtcactggaaggtgtgcccgatgtgcagcgagcagttccctcctgactatgaccagcaggtgtttgaaaggaactgggcaggcaaaaggcttctcttcccctccattcatgcacatggagctgaggatggcttcggagctgatggcactctctgtggtccaggactcatcgctgtccgactcctcatagtccacctcctcctcgtcatactcgctgcctgcaggacaagagaagtgcaaggactgtcaggagcgctcatctccccacaggttcacccggccacttccaggacaggagatgtggccgtggcagagcagcgctgacggcccagggagagggcactcccggcaccaggggactgcaaacacggctattcccttacaaccctggaagcaggagccctgcgttcccacctaagagaccagggcaagggcttcccaacaattcacagctaggagttggcggagcaagaacattaactcggttctatggcaacccagcctgtggctgcaaaggcacagggaagacttgctctggggccaaaaccaaaaataagcaacgatgacaggctcctcacactccccatgctagtgcctgacactcccaaatgagcagaacactgtccccttagttttatgctttactggcctagtaaatgcagaagtctcc

SEQ ID NO: 363439 - DNA, 2047 bp, Homo sapiens
  misc_feature (20)..(20): n is a, c, g, or t
  misc_feature (24)..(24): n is a, c, g, or t
  misc_feature (29)..(29): n is a, c, g, or t
aagcaggctggtaccgcccnggangtaanggataagccatcaccttctgcagcagaggcagattttgacatagtaacaaaggggcaagtctgtgaaatgaccaaagaaattgctgacaaaacagaaaagtataataaatgtaaacaactcttgcaggatgagaaagcaaaatgcaataaatatgctgatgaacttgcaaaaatggagctgaaatggaaagaacaagtgaaaattgctgaaaatgtaaaacttgaactagctgaagtacaggacaattataaagaacttaaaaggagtctagaaaatccagcagaaaggaaaatggaagatggagcagatggtgctttttacccagatgaaatacaaaggccacctgtcagagtcccctcttggggactggaagacaatgttgtctgcagccagcctgctcgaaactttagtcggcctgatggcttagaggactctgaggatagcaaagaagatgagaatgtgcctactgctcctgatcctccaagtcaacatttacgtgggcatgggacaggcttttgctttgattccagctttgatgttcacaagaagtgtcccctctgtgagttaatgtttcctcctaactatgatcagagcaaatttgaagaacatgttgaaagtcactggaaggtgtgcccgatgtgcagcgagcagttccctcctgactatgaccagcaggtgtttgaaaggcatgtgcagacccattttgatcagaatgttctaaattttgactagttactttttattatgagttaatatagtttagcagtaaaaaaaaaaaaaaaaaaccacacctaaaatagaccactgaggagaccatagagcggatgctttcatgcaccctttactgcactttctgaccaggagctactttgagtttggtgttactaggatcagggtcagtctttggcttatcaataaattttaatctctgttaatcttacctgctttaaaaaaaagttcttgtgtgttcgtatctttatttattccctagtttgcagaactgtctgaataaaggatacaaggattatttcaatgttactgcactgaaaaacgtgtatgtattagtgtgctagattatttagcagaatattcacaagtttctgttgaccttgttgattgagcatgactactaaatattatgtaataaaaagcatttgtcataacagtcttatgaagtagttcttcgaatatagaaagttctataatttagcccatgaaatgataggtttttaattttcagaaatggagctgcatgtagaatgagatcacatgcttttatatgtgaaatattggttttagcaattaacagaaggcatactttgctaattttatggcaaaattttagaataacctgaatgattatttttaaactatcttgaagttgtatgtatatatctaatgggaaaatggaacaagagatgtcagtataattgttttcctattaaatgatctcataacaggggtgtttgtggcataaaaatcatagaatatatatcagtatcttttttacattttcctgatgagaatataaatttgaaatattctcagtaagtgattaaaagtacaatacataaacccaaatcaaagtaatgtgtttcttcagttatgtctgtgctgtatagaactgtcactaacattaaagaaagaggacacatttttcaagatctgtaatttcattgttgtcaaatttatttgtgaaagtttttcattaatctagcatcttgaacatctttttttggtttgggcctttaaaatacttctgaattgtattccctttcccttttataatgtgcgtgtgaataatttaaagcaccaacttttgattttgccgcttttgtagttatcatcaaaatagtttacatttgttctgagcaaactagctattgaagatgttaacctaatatttagacttggtggcattttgagttgctatatgtgaactgcagcatatcatgtcgtcacttgtatttgtttgtggaagcagagtttgtatattgttagaatcctttaaaaagtt

SEQ ID NO: 363440 - DNA, 1411 bp, Homo sapiens
aggcggaagagaccgccccgtgggcggaagtgacgcaaggcctactgtcggctgggaggggaggtgtagccggtctttgggggtaggcggtagtggcggaagaggttcggcggctgatggcggatcaggatcggaagcctgcgtaactttctcccttgatccgggagtctttccactggattcacaatgacatcctttcaagaagtcccattgcagacttccaactttgcccatgtcatctttcaaaatgtggccaagagttaccttcctaatgcacacctggaatgtcattacaccttaactccatatattcatccacatccaaaagattgggttggtatattcaaggttggatggagtactgctcgtgattattacacgtttttatggtcccctatgcctgaacattatgtggaaggatcaacagtcaattgtgtactagcattccaaggatattaccttccaaatgatgatggagaattttatcagttctgttacgttacccataagggtgaaattcgtggagcaagtacacctttccagtttcgagcttcttctccagttgaagagctgcttactatggaagatgaaggaaattctgacatgttagtggtgaccacaaaagcaggccttcttgagttgaaaattgagaaaaccatgaaagaaaaagaagaactgttaaagttaattgccgttctggaaaaagaaacagcacaacttcgagaacaagttgggagaatggaaagagaacttaaccatgagaaagaaagatgtgaccaactgcaagcagaacaaaaggaaccagagaatcatcaaggaaggactacaatataaagtgtcatccaacaggactggaaattcatagcatttccctcagattctaaaagtataatggatacataatgtaaccaaaaaaaccctctaagttataagacatatgtggtgacaattgtttatttctggggataaaacgtgttggccaggagagatagttcctctttgttactagtcaatggacttttagtttttttttttttatgaatttgcttcatattccaaaattagtctccattttaatcaagcatgcctgctgggcagctacaactccagactttcaaactggtctggttggatggcttataaaatctgtgacatttcttggcacttgttttaaatctgttccatggtgtgaatcctatagtagttctagaggtcttctatttgaggtactgagtatataaactgttgaatatctgaaagattgttctgatgtatcatctataatttcatttaaagttttgtaatggattctccatgtaataagcagagaccttcattttcttcataataggagaaatttattgcatttccattcttttataaaataatatgactagcttattacctattc

SEQ ID NO: 363441 - DNA, 1816 bp, Homo sapiens
gtctgacacaagcattagtgagatgctcccctcgaagaatagtcttgtttcttctaaggactgattctcaccccggctttggctctcctaattttagagggtcctccaaatgcagtgaggttaggaaggacgtctgcgctcagatcaagaatccagttacctcaaagctccccaacttccacctccgcagagctatgacgtcatggcaggcacgccagaggccgaaggatgcaaaagtggttttctgctttcgatgatgcaatcattcagcgacagtggcgggcaaacccctcccggggcgggggaggtgtgagcttcacgaaggaggttgacaccaacgtggccaccggcgcccctccacgccgccaacgagtccccgggcgtgcgtgcccttggagggagccaatccgcggccggcgtggggcccggcctggcggaggtgatgctggtatgtgcgtcgccaccgcccctcccagcactgacgggcctgagggacgacaagttgacgctcctttcgtcatcacctggtctaggagggacgcccggggagaccgtacgtcactgctctgcgccggaagaccctattttcaggttctcttccctccattcctaccccttccccggtaccataaaatcccgggatatgagctggaagaggcatcacctgatcccggagacctttggagttaagaggcggcggaagcgagggcctgtggagtcggatcctcttcggggtgagccagggtcggcgcgcgcggctgtctcagaactcatgcagctgttcccgcgaggcctgtttgaggacgcgctgccgcccatcgtgctgaggagccaggtgtacagccttgtgcctgacaggaccgtggccgaccggcagctgaaggagcttcaagagcagggggagatcagaatcgtccagctgggcttcgacttggatgcccatggaattatcttcactgaggactacaggaccagagtcctcaaggcctgtgatggccgaccgtatgctggggcagtgcagaaatttctagcttcagtacttccagcctgtggggaccttagtttccagcaggaccaaatgacacagacctttggcttcagggactcagaaatcacgcatctggtgaatgctggagtcctcaccgtccgagatgctgggagctggtggctagctgtgcctggagctgggagattcatcaagtactttgttaaagggcgccaggctgtccttagcatggtccggaaggcaaagtaccgggaactgctcctatcagagctcctgggccggcgggcgcctgtcgtggtgcggcttggcctcacctaccatgtgcacgacctcattggggcccagctagtggactgcatctctaccacttcaggaaccctcctccgcctgccagagacatgaagattctgctcatcattgctcagctcctcagagtgggccgggaggggactagaagagctgcatgatggtggctgagacagggtcaccttgggaaggcttgggagccaggatgagtgtcgggctctcgtgtgtgcaaaaggtcagatgtgactgctgctgtttgcctggtttctgacccagtggtggggtttgagcaatgcttctctgcccttccatggaaagtggaaccagaaatggtgccaaggctgtggctgttccctttcgtgtaaaatggtgctgttattactctgtcttgaaataggaaggtgggatttctggggaggctggtgaaggagggcagggttcttttctctacgtgtcatgttaaaattgccaaataaagtacctctgcctgtgaaaaaaaaaaaa

SEQ ID NO: 363442 - DNA, 1679 bp, Homo sapiens
gtctgacacaagcattagtgagatgctcccctcgaagaatagtcttgtttcttctaaggactgattctcaccccggctttggctctcctaattttagagggtcctccaaatgcagtgaggttaggaaggacgtctgcgctcagatcaagaatccagttacctcaaagctccccaacttccacctccgcagagctatgacgtcatggcaggcacgccagaggccgaaggatgcaaaagtggttttctgctttcgatgatgcaatcattcagcgacagtggcgggcaaacccctcccggggcgggggaggtgtgagcttcacgaaggaggttgacaccaacgtggccaccggcgcccctccacgccgccaacgagtccccgggcgtgcgtgcccttggagggagccaatccgcggccggcgtggggcccggcctggcggaggtgatgctggtatgtgcgtcgccaccgcccctcccagcactgacgggcctgagggacgacaagttgacgctcctttcgtcatcacctggtctaggagggacgcccggggagaccgtacgtcactgctctgcgccggaagaccctattttcaggttctcttccctccattcctaccccttccccggtaccataaaatcccgggatatgagctggaagaggcatcacctgatcccggagacctttggagttaagaggcggcggaagcgagggcctgtggagtcggatcctcttcggggtgagccagaaggagcttcaagagcagggggagatcagaatcgtccagctgggcttcgacttggatgcccatggaattatcttcactgaggactacaggaccagagtcctcaaggcctgtgatggccgaccgtatgctggggcagtgcagaaatttctagcttcagtacttccagcctgtggggaccttagtttccagcaggaccaaatgacacagacctttggcttcagggactcagaaatcacgcatctggtgaatgctggagtcctcaccgtccgagatgctgggagctggtggctagctgtgcctggagctgggagattcatcaagtactttgttaaagggcgccaggctgtccttagcatggtccggaaggcaaagtaccgggaactgctcctatcagagctcctgggccggcgggcgcctgtcgtggtgcggcttggcctcacctaccatgtgcacgacctcattggggcccagctagtggactgcatctctaccacttcaggaaccctcctccgcctgccagagacatgaagattctgctcatcattgctcagctcctcagagtgggccgggaggggactagaagagctgcatgatggtggctgagacagggtcaccttgggaaggcttgggagccaggatgagtgtcgggctctcgtgtgtgcaaaaggtcagatgtgactgctgctgtttgcctggtttctgacccagtggtggggtttgagcaatgcttctctgcccttccatggaaagtggaaccagaaatggtgccaaggctgtggctgttccctttcgtgtaaaatggtgctgttattactctgtcttgaaataggaaggtgggatttctggggaggctggtgaaggagggcagggttcttttctctacgtgtcatgttaaaattgccaaataaagtacctctgcctgtgaaaaaaaaaaaa

SEQ ID NO: 363443 - DNA, 977 bp, Homo sapiens
ccctgatacgcctcttttcactctcttctctgtggagacagaaggagcttcaagagcagggggagatcagaatcgtccagctgggcttcgacttggatgcccatggaattatcttcactgaggactacaggaccagagtcctcaaggcctgtgatggccgaccgtatgctggggcagtgcagaaatttctagcttcagtacttccagcctgtggggaccttagtttccagcaggaccaaatgacacagacctttggcttcagggactcagaaatcacgcatctggtgaatgctggagtcctcaccgtccgagatgctgggagctggtggctagctgtgcctggagctgggagattcatcaagtactttgttaaagggcgccaggctgtccttagcatggtccggaaggcaaagtaccgggaactgctcctatcagagctcctgggccggcgggcgcctgtcgtggtgcggcttggcctcacctaccatgtgcacgacctcattggggcccagctagtggactgcatctctaccacttcaggaaccctcctccgcctgccagagacatgaagattctgctcatcattgctcagctcctcagagtgggccgggaggggactagaagagctgcatgatggtggctgagacagggtcaccttgggaaggcttgggagccaggatgagtgtcgggctctcgtgtgtgcaaaaggtcagatgtgactgctgctgtttgcctggtttctgacccagtggtggggtttgagcaatgcttctctgcccttccatggaaagtggaaccagaaatggtgccaaggctgtggctgttccctttcgtgtaaaatggtgctgttattactctgtcttgaaataggaaggtgggatttctggggaggctggtgaaggagggcagggttcttttctctacgtgtcatgttaaaattgccaaataaagtacctctgcctgtgaaaaaaaaaaaa

SEQ ID NO: 363444 - DNA, 1676 bp, Homo sapiens
gtctgacacaagcattagtgagatgctcccctcgaagaatagtcttgtttcttctaaggactgattctcaccccggctttggctctcctaattttagagggtcctccaaatgcagtgaggttaggaaggacgtctgcgctcagatcaagaatccagttacctcaaagctccccaacttccacctccgcagagctatgacgtcatggcaggcacgccagaggccgaaggatgcaaaagtggttttctgctttcgatgatgcaatcattcagcgacagtggcgggcaaacccctcccggggcgggggaggtgtgagcttcacgaaggaggttgacaccaacgtggccaccggcgcccctccacgccgccaacgagtccccgggcgtgcgtgcccttggagggagccaatccgcggccggcgtggggcccggcctggcggaggtgatgctggtatgtgcgtcgccaccgcccctcccagcactgacgggcctgagggacgacaagttgacgctcctttcgtcatcacctggtctaggagggacgcccggggagaccgtacgtcactgctctgcgccggaagaccctattttcaggttctcttccctccattcctaccccttccccggtaccataaaatcccgggatatgagctggaagaggcatcacctgatcccggagacctttggagttaagaggcggcggaagcgagggcctgtggagtcggatcctcttcggggtgagccagggtcggcgcgcgcggctgtctcagaactcatgcagctgttcccgcgaggcctgtttgaggacgcgctgccgcccatcgtgctgaggagccaggtgtacagccttgtgcctgacaggaccgtggccgaccggcagctgaaggagcttcaagagcagggggagatcagaatcgtccagctgggcttcgacttggatgcccatggaattatcttcactgaggactacaggaccagagcatctggtgaatgctggagtcctcaccgtccgagatgctgggagctggtggctagctgtgcctggagctgggagattcatcaagtactttgttaaagggcgccaggctgtccttagcatggtccggaaggcaaagtaccgggaactgctcctatcagagctcctgggccggcgggcgcctgtcgtggtgcggcttggcctcacctaccatgtgcacgacctcattggggcccagctagtggactgcatctctaccacttcaggaaccctcctccgcctgccagagacatgaagattctgctcatcattgctcagctcctcagagtgggccgggaggggactagaagagctgcatgatggtggctgagacagggtcaccttgggaaggcttgggagccaggatgagtgtcgggctctcgtgtgtgcaaaaggtcagatgtgactgctgctgtttgcctggtttctgacccagtggtggggtttgagcaatgcttctctgcccttccatggaaagtggaaccagaaatggtgccaaggctgtggctgttccctttcgtgtaaaatggtgctgttattactctgtcttgaaataggaaggtgggatttctggggaggctggtgaaggagggcagggttcttttctctacgtgtcatgttaaaattgccaaataaagtacctctgcctgtgaaaaaaaaaaaa

SEQ ID NO: 363445 - DNA, 1177 bp, Homo sapiens
gtctgacacaagcattagtgagatgctcccctcgaagaatagtcttgtttcttctaaggactgattctcaccccggctttggctctcctaattttagagggtcctccaaatgcagtgaggttaggaaggacgtctgcgctcagatcaagaatccagttacctcaaagctccccaacttccacctccgcagagctatgacgtcatggcaggcacgccagaggccgaaggatgcaaaagtggttttctgctttcgatgatgcaatcattcagcgacagtggcgggcaaacccctcccggggcgggggaggtgtgagcttcacgaaggaggttgacaccaacgtggccaccggcgcccctccacgccgccaacgagtccccgggcgtgcgtgcccttggagggagccaatccgcggccggcgtggggcccggcctggcggaggtgatgctggagggacgcccggggagaccgtacgtcactgctctgcgccggaagaccctattttcaggttctcttccctccattcctaccccttccccggtaccataaaatcccgggatatgagctggaagaggcatcacctgatcccggagacctttggagttaagaggcggcggaagcgagggcctgtggagtcggatcctcttcggggtgagccagggtcggcgcgcgcggctgtctcagaactcatgcagctgttcccgcgaggcctgtttgaggacgcgctgccgcccatcgtgctgaggagccaggtgtacagccttgtgcctgacaggaccgtggccgaccggcagctgaaggagcttcaagagcagggggagatcagaatcgtccagctgggcttcgacttggatgcccatggaattatcttcactgaggactacaggaccagagtcctcaaggcctgtgatggccgaccgtatgctggggcagtgcagaaatttctagcttcagtacttccagcctgtggggaccttagtttccagcaggaccaaatgacacagacctttggcttcagggactcagaaatcacgtgagacttgtggaaccaaccaaagtcaggcatctggtgcttccctgcctccctcctacgacatctcagtccagacctcctgtgccagccgtccccttcttcctcacctcctgaccgctcattccactgaattccctccagttgca

SEQ ID NO: 363446 - DNA, 719 bp, Homo sapiens
gcgggcgcctgtcgtggtgcggcttggcctcacctaccatgtgcacgacctcattggggcccagctagtggactggtgagtctttccctggcctctggcagattatggagcaatgacccaaagtgggatttcctcccagctcatgcttagtttcctagtgaaggccagtggctctcattcttctctggaacccgggagcaccccttcccaagttctaagttctcctcacagcttgagcctaggcgtctggctccagccttgtctttctcctgcacagcatctctaccacttcaggaaccctcctccgcctgccagagacatgaagattctgctcatcattgctcagctcctcagagtgggccgggaggggactagaagagctgcatgatggtggctgagacagggtcaccttgggaaggcttgggagccaggatgagtgtcgggctctcgtgtgtgcaaaaggtcagatgtgactgctgctgtttgcctggtttctgacccagtggtggggtttgagcaatgcttctctgcccttccatggaaagtggaaccagaaatggtgccaaggctgtggctgttccctttcgtgtaaaatggtgctgttattactctgtcttgaaataggaaggtgggatttctggggaggctggtgaaggagggcagggttcttttctctacgtgtcatgttaaaattgccaaataaagtacctctgcctgtg

SEQ ID NO: 363447 - DNA, 1731 bp, Homo sapiens
gtctgacacaagcattagtgagatgctcccctcgaagaatagtcttgtttcttctaaggactgattctcaccccggctttggctctcctaattttagagggtcctccaaatgcagtgaggttaggaaggacgtctgcgctcagatcaagaatccagttacctcaaagctccccaacttccacctccgcagagctatgacgtcatggcaggcacgccagaggccgaaggatgcaaaagtggttttctgctttcgatgatgcaatcattcagcgacagtggcgggcaaacccctcccggggcgggggaggtgtgagcttcacgaaggaggttgacaccaacgtggccaccggcgcccctccacgccgccaacgagtccccgggcgtgcgtgcccttggagggagccaatccgcggccggcgtggggcccggcctggcggaggtgatgctggagggacgcccggggagaccgtacgtcactgctctgcgccggaagaccctattttcaggttctcttccctccattcctaccccttccccggtaccataaaatcccgggatatgagctggaagaggcatcacctgatcccggagacctttggagttaagaggcggcggaagcgagggcctgtggagtcggatcctcttcggggtgagccagggtcggcgcgcgcggctgtctcagaactcatgcagctgttcccgcgaggcctgtttgaggacgcgctgccgcccatcgtgctgaggagccaggtgtacagccttgtgcctgacaggaccgtggccgaccggcagctgaaggagcttcaagagcagggggagatcagaatcgtccagctgggcttcgacttggatgcccatggaattatcttcactgaggactacaggaccagagtcctcaaggcctgtgatggccgaccgtatgctggggcagtgcagaaatttctagcttcagtacttccagcctgtggggaccttagtttccagcaggaccaaatgacacagacctttggcttcagggactcagaaatcacgcatctggtgaatgctggagtcctcaccgtccgagatgctgggagctggtggctagctgtgcctggagctgggagattcatcaagtactttgttaaagggcgccaggctgtccttagcatggtccggaaggcaaagtaccgggaactgctcctatcagagctcctgggccggcgggcgcctgtcgtggtgcggcttggcctcacctaccatgtgcacgacctcattggggcccagctagtggactgcatctctaccacttcaggaaccctcctccgcctgccagagacatgaagattctgctcatcattgctcagctcctcagagtgggccgggaggggactagaagagctgcatgatggtggctgagacagggtcaccttgggaaggcttgggagccaggatgagtgtcgggctctcgtgtgtgcaaaaggtcagatgtgactgctgctgtttgcctggtttctgacccagtggtggggtttgagcaatgcttctctgcccttccatggaaagtggaaccagaaatggtgccaaggctgtggctgttccctttcgtgtaaaatggtgctgttattactctgtcttgaaataggaaggtgggatttctggggaggctggtgaaggagggcagggttcttttctctacgtgtcatgttaaaattgccaaataaagtacctctgcctgtgaaaaaaaaaaaa

SEQ ID NO: 363448 - DNA, 1136 bp, Homo sapiens
cgagagttttgttagaaccgcgtccccgccccagttccctgtccgtgagccgatttatctgccggtcggcgcgcgcggctgtctcagaactcatgcagctgttcccgcgaggcctgtttgaggacgcgctgccgcccatcgtgctgaggagccaggtgtacagccttgtgcctgacaggaccgtggccgaccggcagctgaaggagcttcaagagcagggggagatcagaatcgtccagctgggcttcgacttggatgcccatggaattatcttcactgaggactacaggaccagagtcctcaaggcctgtgatggccgaccgtatgctggggcagtgcagaaatttctagcttcagtacttccagcctgtggggaccttagtttccagcaggaccaaatgacacagacctttggcttcagggactcagaaatcacgcatctggtgaatgctggagtcctcaccgtccgagatgctgggagctggtggctagctgtgcctggagctgggagattcatcaagtactttgttaaagggcgccaggctgtccttagcatggtccggaaggcaaagtaccgggaactgctcctatcagagctcctgggccggcgggcgcctgtcgtggtgcggcttggcctcacctaccatgtgcacgacctcattggggcccagctagtggactgcatctctaccacttcaggaaccctcctccgcctgccagagacatgaagattctgctcatcattgctcagctcctcagagtgggccgggaggggactagaagagctgcatgatggtggctgagacagggtcaccttgggaaggcttgggagccaggatgagtgtcgggctctcgtgtgtgcaaaaggtcagatgtgactgctgctgtttgcctggtttctgacccagtggtggggtttgagcaatgcttctctgcccttccatggaaagtggaaccagaaatggtgccaaggctgtggctgttccctttcgtgtaaaatggtgctgttattactctgtcttgaaataggaaggtgggatttctggggaggctggtgaaggagggcagggttcttttctctacgtgtcatgttaaaattgccaaataaagtacctctgcctgtgaaaaaaaaaaaa

SEQ ID NO: 363449 - DNA, 2628 bp, Homo sapiens
gtctgacacaagcattagtgagatgctcccctcgaagaatagtcttgtttcttctaaggactgattctcaccccggctttggctctcctaattttagagggtcctccaaatgcagtgaggttaggaaggacgtctgcgctcagatcaagaatccagttacctcaaagctccccaacttccacctccgcagagctatgacgtcatggcaggcacgccagaggccgaaggatgcaaaagtggttttctgctttcgatgatgcaatcattcagcgacagtggcgggcaaacccctcccggggcgggggaggtgtgagcttcacgaaggaggttgacaccaacgtggccaccggcgcccctccacgccgccaacgagtccccgggcgtgcgtgcccttggagggagccaatccgcggccggcgtggggcccggcctggcggaggtgatgctggagggacgcccggggagaccgtacgtcactgctctgcgccggaagaccctattttcaggttctcttccctccattcctaccccttccccggtaccataaaatcccgggatatgagctggaagaggcatcacctgatcccggagacctttggagttaagaggcggcggaagcgagggcctgtggagtcggatcctcttcggggtgagccagggtcggcgcgcgcggctgtctcagaactcatgcagctgttcccgcgaggcctgtttgaggacgcgctgccgcccatcgtgctgaggagccaggtgtacagccttgtgcctgacaggaccgtggccgaccggcagctgaaggagcttcaagagcagggggagatcagaatcgtccagctgggcttcgacttggatgcccatggaattatcttcactgaggactacaggaccagagtcctcaaggcctgtgatggccgaccgtatgctggggcagtgcagaaatttctagcttcagtacttccagcctgtggggaccttagtttccagcaggaccaaatgacacagacctttggcttcagggactcagaaatcacgtgagacttgtggaaccaaccaaagtcaggcatctggtgcttccctgcctccctccagttccatccagcctgtcctcctgtttttttggtgaacctgccagaaaagctgccaaaaagctgactcttctttttaataaaatgacccaagtttgtattcctccccacaagagaggaggcctatcttacctgggccttagaaagagccctgaaatagaattcagttcttggtggcttatcaaaagcacacaggggcctggcaggaagtgtaaaagcttgatgttaatcatactgggactaagaggatagagaatggtaggagctgggatacccctaaacattcacattaaaacaaaaaaaacccaaagctaaaaaacaactgggcaggagctaaataaaaatctaattttgagaggctgtatctggctcaggcctcctactttgtaacccatggaatatgtgaaagcatttgaaaaactatagcactgatctcacatgggcagacacactctcagagagatgtggtgggagccatggcgcagtctgcctaggcagtggcaggagcgcagaagactctgattcctctcctcggtcctaagaccgaatgtgtgtcaggacatgtggtcagggaagagaagctatttaactgaaccagtaatagtagcaggaaaagaaaaagtggagggagggcagtccaggtagggggcctggaacaagcaactgcaccaacagaggcagttggtgcgagcacagaaccaccccaggctgggattttgttatccagtctctcttgcatggttgcccgtgtttctggagacttgtgtaaacattaatggatgaggaggagagatggttctcagagcccagccctcatctctgctggcttcccactgccctcaggcatctggtgaatgctggagtcctcaccgtccgagatgctgggagctggtggctagctgtgcctggagctgggagattcatcaagtactttgttaaagggcgccaggctgtccttagcatggtccggaaggcaaagtaccgggaactgctcctatcagagctcctgggccggcgggcgcctgtcgtggtgcggcttggcctcacctaccatgtgcacgacctcattggggcccagctagtggactgcatctctaccacttcaggaaccctcctccgcctgccagagacatgaagattctgctcatcattgctcagctcctcagagtgggccgggaggggactagaagagctgcatgatggtggctgagacagggtcaccttgggaaggcttgggagccaggatgagtgtcgggctctcgtgtgtgcaaaaggtcagatgtgactgctgctgtttgcctggtttctgacccagtggtggggtttgagcaatgcttctctgcccttccatggaaagtggaaccagaaatggtgccaaggctgtggctgttccctttcgtgtaaaatggtgctgttattactctgtcttgaaataggaaggtgggatttctggggaggctggtgaaggagggcagggttcttttctctacgtgtcatgttaaaattgccaaataaagtacctctgcctgtgaaaaaaaaaaaa

SEQ ID NO: 363450 - DNA, 1298 bp, Homo sapiens
cgagagttttgttagaaccgcgtccccgccccagttccctgtccgtgagccgatttatctgccggtcggcgcgcgcggctgtctcagaactcatgcagctgttcccgcgaggcctgtttgaggacgcgctgccgcccatcgtgctgaggagccaggtgtacagccttgtgcctgacaggaccgtggccgaccggcagctggtgaggggcgtcggtgcgaccgccggaagcccctttcctaactcctggaattccctgtcactcagtcactccgccagccgttcagcaagcattaggcctttcaggcgagggcactgtgccaggcactggggtgccacagagaccctgttaaaagtcccgcagaaggagcttcaagagcagggggagatcagaatcgtccagctgggcttcgacttggatgcccatggaattatcttcactgaggactacaggaccagagtcctcaaggcctgtgatggccgaccgtatgctggggcagtgcagaaatttctagcttcagtacttccagcctgtggggaccttagtttccagcaggaccaaatgacacagacctttggcttcagggactcagaaatcacgcatctggtgaatgctggagtcctcaccgtccgagatgctgggagctggtggctagctgtgcctggagctgggagattcatcaagtactttgttaaagggcgccaggctgtccttagcatggtccggaaggcaaagtaccgggaactgctcctatcagagctcctgggccggcgggcgcctgtcgtggtgcggcttggcctcacctaccatgtgcacgacctcattggggcccagctagtggactgcatctctaccacttcaggaaccctcctccgcctgccagagacatgaagattctgctcatcattgctcagctcctcagagtgggccgggaggggactagaagagctgcatgatggtggctgagacagggtcaccttgggaaggcttgggagccaggatgagtgtcgggctctcgtgtgtgcaaaaggtcagatgtgactgctgctgtttgcctggtttctgacccagtggtggggtttgagcaatgcttctctgcccttccatggaaagtggaaccagaaatggtgccaaggctgtggctgttccctttcgtgtaaaatggtgctgttattactctgtcttgaaataggaaggtgggatttctggggaggctggtgaaggagggcagggttcttttctctacgtgtcatgttaaaattgccaaataaagtacctctgcctgtgaaaaaaaaaaaa

SEQ ID NO: 363451 - DNA, 2033 bp, Homo sapiens
cgagagttttgttagaaccgcgtccccgccccagttccctgtccgtgagccgatttatctgccggtcggcgcgcgcggctgtctcagaactcatgcagctgttcccgcgaggcctgtttgaggacgcgctgccgcccatcgtgctgaggagccaggtgtacagccttgtgcctgacaggaccgtggccgaccggcagctgaaggagcttcaagagcagggggagatcagaatcgtccagctgggcttcgacttggatgcccatggaattatcttcactgaggactacaggaccagagtcctcaaggcctgtgatggccgaccgtatgctggggcagtgcagaaatttctagcttcagtacttccagcctgtggggaccttagtttccagcaggaccaaatgacacagacctttggcttcagggactcagaaatcacgtgagacttgtggaaccaaccaaagtcaggcatctggtgcttccctgcctccctccagttccatccagcctgtcctcctgtttttttggtgaacctgccagaaaagctgccaaaaagctgactcttctttttaataaaatgacccaagtttgtattcctccccacaagagaggaggcctatcttacctgggccttagaaagagccctgaaatagaattcagttcttggtggcttatcaaaagcacacaggggcctggcaggaagtgtaaaagcttgatgttaatcatactgggactaagaggatagagaatggtaggagctgggatacccctaaacattcacattaaaacaaaaaaaacccaaagctaaaaaacaactgggcaggagctaaataaaaatctaattttgagaggctgtatctggctcaggcctcctactttgtaacccatggaatatgtgaaagcatttgaaaaactatagcactgatctcacatgggcagacacactctcagagagatgtggtgggagccatggcgcagtctgcctaggcagtggcaggagcgcagaagactctgattcctctcctcggtcctaagaccgaatgtgtgtcaggacatgtggtcagggaagagaagctatttaactgaaccagtaatagtagcaggaaaagaaaaagtggagggagggcagtccaggtagggggcctggaacaagcaactgcaccaacagaggcagttggtgcgagcacagaaccaccccaggctgggattttgttatccagtctctcttgcatggttgcccgtgtttctggagacttgtgtaaacattaatggatgaggaggagagatggttctcagagcccagccctcatctctgctggcttcccactgccctcaggcatctggtgaatgctggagtcctcaccgtccgagatgctgggagctggtggctagctgtgcctggagctgggagattcatcaagtactttgttaaagggcgccaggctgtccttagcatggtccggaaggcaaagtaccgggaactgctcctatcagagctcctgggccggcgggcgcctgtcgtggtgcggcttggcctcacctaccatgtgcacgacctcattggggcccagctagtggactgcatctctaccacttcaggaaccctcctccgcctgccagagacatgaagattctgctcatcattgctcagctcctcagagtgggccgggaggggactagaagagctgcatgatggtggctgagacagggtcaccttgggaaggcttgggagccaggatgagtgtcgggctctcgtgtgtgcaaaaggtcagatgtgactgctgctgtttgcctggtttctgacccagtggtggggtttgagcaatgcttctctgcccttccatggaaagtggaaccagaaatggtgccaaggctgtggctgttccctttcgtgtaaaatggtgctgttattactctgtcttgaaataggaaggtgggatttctggggaggctggtgaaggagggcagggttcttttctctacgtgtcatgttaaaattgccaaataaagtacctctgcctgtgaaaaaaaaaaaa

SEQ ID NO: 363452 - DNA, 430 bp, Homo sapiens
taagaactgtcctcacaccctcatttggacaaaggagctgttggccacctctactgcgttcctgaaccagatcacatgatacacatgtgttaggtctatggcaggttgactatagtgtgggacactttagtgagacagaagtcttagattacaggatcaataataaaaacacattattccttgggaggctgaggcgggtggatcacttgagcccaggagtttgagaccagtttgggcaacatggtgaaaccctgtctctacaaaaaagagaaaagaaaaaatcaaccaggtgtggtggcacacacctatagtcccagctacctggggggctgaggtggaaggatcgcttgagcccagaagatggaggttgcagtgagccaagattctgccactatgctccagcctgggcaacagagtgagagcctatctg

SEQ ID NO: 363453 - DNA, 3137 bp, Homo sapiens
ggcaaactgtcatcaggagcttaaataggacagattttcacggcagtggatataccagcatggctattatctatggagtgttctctgcttcaaatttgattacaccgtcagtggttgccattgtaggacctcaactctctatgtttgccagtggtttattttacagcatgtacattgccgttttcatccagcctttcccgtggtccttgtaacacgtacacagacctctcggccggaatctccagggatgaccagcccctccccacgcatccagataatctccaccgactctgctgtagcctcacctcagcgcattcagattgtcacagaccagcagacaggacagaaaatccagatagtcaccgcagtggacgcctccggatcccccaaacagcagttcatcctgaccagcccagatggagctggaactgggaaggtgatcctggcttccccagagacatccagcgccaagcaactcatattcaccacctcagacaacctcgtccctggcaggatccagattgtcacggattctgcctctgtggagcgtttactggggaagacggacgtccagcggccccaggtggtagagtactgtgtggtctgtggcgacaaagcctccggccgtcactatggggctgtcagttgtgaaggttgcaaaggtttcttcaaaaggagtgtgaggaaaaatttgacctacagctgccggagcaaccaagactgcatcatcaataaacatcaccggaaccgctgtcagttttgccggctgaaaaaatgcttagagatgggcatgaaaatggaatctgtgcagagtgaacggaagcccttcgatgtgcaacgggagaaaccaagcaattgtgctgcttcaactgagaaaatctatatccggaaagacctgagaagtcccctgatagctactcccacgtttgtggcagacaaagatggagcaagacaaacaggtcttcttgatccagggatgcttgtgaacatccagcagcctttgatacgtgaggatggtacagttctcctggccacggattctaaggctgaaacaagccagggagctctgggcacactggcaaatgtagtgacctcccttgccaacctaagtgaatctttgaacaacggtgacacttcagaaatccagccagaggaccagtctgcaagtgagataactcgggcatttgataccttagctaaagcacttaataccacagacagctcctcttctccaagcttggcagatgggatagacaccagtggaggagggagcatccacgtcatcagcagagaccagtcgacacccatcattgaggttgaaggccccctcctttcagacacacacgtcacatttaagctaacaatgcccagtccaatgccagagtacctcaacgtgcactacatctgtgagtctgcatcccgtctgcttttcctctcaatgcactgggctcggtcaatcccagcctttcaggcacttgggcaggactgcaacaccagccttgtgcgggcctgctggaatgagctcttcaccctcggcctggcccagtgtgcccaggtcatgagtctctccaccatcctggctgccattgtcaaccacctgcagaacagcatccaggaagataaactttctggtgaccggataaagcaagtcatggagcacatctggaagctgcaggagttctgtaacagcatggcgaagctggatatagatggctatgagtatgcataccttaaagctatagttctctttagccccgatcatccaggtttgaccagcacaagccagattgaaaaattccaagaaaaggcacagatggagttgcaggactatgttcagaaaacctactcagaagacacctaccgattggcccggatcctcgttcgcctgccggcactcaggctgatgagctccaacataacagaagaacttttttttactggtctcattggcaatgtttcgatagacagcataatcccctacatcctcaagatggagacagcagagtataatggccagatcaccggagccagtctatagcgcaaaccacacacctgccaaggagcaacagaatccttccaggaccgttcacatacaaagaaaagtagtggtattttggtatgtgcaaatatttccatatgttagccatttcctgtctggtttctccttatctgttaatcccagacaatagcaattaaaagactagtaggatcctttcctgacataagaaatgttttaatgccttttgatgaagcagcagattttggaacaatcttttaactcaatttgtatttagaaattctcaaagggcaaaaaacaaaaaaaaaggttttataatgtcagagactagtattaaagaaaactgaaagaacctgagagaatagtatgtgtgtatatatatatataaaaaagtccttggaattatagatactaattaccagggtaataatattagcactttctaagcacttatcaatgtgtaacgttagcaacatcttgcctgtgggcagggcaaatggaaaactgtgtatgtcttttgccgaaatgctaatgatttctgtgaaaactcactagggtacaggagacaatcatttatgtttaagaaaagaaggcatcattcctaattgtgtgcacatgttgtggagttgagctgaattctgtgaatggaaacgtggctcatttgcatcatgcagtaagtgggagtgtggtagcacagtcggtggtgacccagttcagaagcttctagccatagagcagacacttgtcaggttccctgactacttggtcctggtctctgatgggcatctgcagactcctctagaacctggggttctcctttgatgactggttatctgaattggattgcaactagtcagacattaactgccaaatgagatgtacagttcctccagcaagtgaaaacatccccaagtcacatccgccgctcgtggcagatggagccttgtgaccaaaaagtgcaaggtgggcattttgagctcttgacagtacttccaatacaattgggggtgcttgtgtgtttgtccagatggaggagtgtggccttggagtgtgagcgttaccttcccagggctttccactccaaatgcccccttgaaaagggctcgtgtttctgcagctc

SEQ ID NO: 363454 - DNA, 1874 bp, Homo sapiens
gtttcttcaaaatgaaagctattttactgctttatttataatgctaaatgaacactggaaattagagcagtacaaaaaataagaaaaaatcacctcaaatcccaatacccagagcccaactgttagcgtggtgaacattttcccaatactttatatacacatctatacttgctgttttataatctccttttaaacttttattgagcaatatgtcatggatgtctttcctggtcagtaaatacaggtttgtattatcgttttttaaatgagtctctagcagttcatcatatgaagactcctactttagtctgtcctctgttgatgaatttccaggttttctcttggtggtgggggtgaggagagttggaataaacaagagtgaagggaacacatctgtacatacattttgtactcatttggttttttctcatgataaatttctataagaggaactgttgaaatcagaaaagagaggtgggtggatggtggatccgtttggtttgattctgtgcaatacagacgggaccccaggagcctttgctgagctgtggttgaagggcatcaaacagtctccttttctaatgacactcccttttatagattggcccggatcctcgttcgcctgccggcactcaggctgatgagctccaacataacagaagaacttttttttactggtctcattggcaatgtttcgatagacagcataatcccctacatcctcaagatggagacagcagagtataatggccagatcaccggagccagtctatagcgcaaaccacacacctgccaaggagcaacagaatccttccaggaccgttcacatacaaagaaaagtagtggtattttggtatgtgcaaatatttccatatgttagccatttcctgtctggtttctccttatctgttaatcccagacaatagcaattaaaagactagtaggatcctttcctgacataagaaatgttttaatgccttttgatgaagcagcagattttggaacaatcttttaactcaatttgtatttagaaattctcaaagggcaaaaaacaaaaaaaaaggttttataatgtcagagactagtattaaagaaaactgaaagaacctgagagaatagtatgtgtgtatatatatatataaaaaagtccttggaattatagatactaattaccagggtaataatattagcactttctaagcacttatcaatgtgtaacgttagcaacatcttgcctgtgggcagggcaaatggaaaactgtgtatgtcttttgccgaaatgctaatgatttctgtgaaaactcactagggtacaggagacaatcatttatgtttaagaaaagaaggcatcattcctaattgtgtgcacatgttgtggagttgagctgaattctgtgaatggaaacgtggctcatttgcatcatgcagtaagtgggagtgtggtagcacagtcggtggtgacccagttcagaagcttctagccatagagcagacacttgtcaggttccctgactacttggtcctggtctctgatgggcatctgcagactcctctagaacctggggttctcctttgatgactggttatctgaattggattgcaactagtcagacattaactgccaaatgagatgtacagttcctccagcaagtgaaaacatccccaagtcacatccgccgctcgtggcagatggagccttgtgaccaaaaagtgcaaggtgggcattttgagctcttgacagtacttccaatacaattgggggtgcttgtgtgtttgtccagatggaggagtgtggccttggagtgtgagcgttaccttcccagggctttccactccaaatgcccccttgaaaagggctcgtgtttctgcagctc

SEQ ID NO: 363455 - DNA, 1820 bp, Homo sapiens
gtttcttcaaaatgaaagctattttactgctttatttataatgctaaatgaacactggaaattagagcagtacaaaaaataagaaaaaatcacctcaaatcccaatacccagagcccaactgttagcgtggtgaacattttcccaatactttatatacacatctatacttgctgttttataatctccttttaaacttttattgagcaatatgtcatggatgtctttcctggtcagtaaatacaggtttgtattatcgttttttaaatgagtctctagcagttcatcatatgaagactcctactttagtctgtcctctgttgatgaatttccaggttttctcttggtggtgggggtgaggagagttggaataaacaagagtgaagggaacacatctgtacatacattttgtactcatttggttttttctcatgataaatttctataagaggaactgttgaaatcagacgggaccccaggagcctttgctgagctgtggttgaagggcatcaaacagtctccttttctaatgacactcccttttatagattggcccggatcctcgttcgcctgccggcactcaggctgatgagctccaacataacagaagaacttttttttactggtctcattggcaatgtttcgatagacagcataatcccctacatcctcaagatggagacagcagagtataatggccagatcaccggagccagtctatagcgcaaaccacacacctgccaaggagcaacagaatccttccaggaccgttcacatacaaagaaaagtagtggtattttggtatgtgcaaatatttccatatgttagccatttcctgtctggtttctccttatctgttaatcccagacaatagcaattaaaagactagtaggatcctttcctgacataagaaatgttttaatgccttttgatgaagcagcagattttggaacaatcttttaactcaatttgtatttagaaattctcaaagggcaaaaaacaaaaaaaaaggttttataatgtcagagactagtattaaagaaaactgaaagaacctgagagaatagtatgtgtgtatatatatatataaaaaagtccttggaattatagatactaattaccagggtaataatattagcactttctaagcacttatcaatgtgtaacgttagcaacatcttgcctgtgggcagggcaaatggaaaactgtgtatgtcttttgccgaaatgctaatgatttctgtgaaaactcactagggtacaggagacaatcatttatgtttaagaaaagaaggcatcattcctaattgtgtgcacatgttgtggagttgagctgaattctgtgaatggaaacgtggctcatttgcatcatgcagtaagtgggagtgtggtagcacagtcggtggtgacccagttcagaagcttctagccatagagcagacacttgtcaggttccctgactacttggtcctggtctctgatgggcatctgcagactcctctagaacctggggttctcctttgatgactggttatctgaattggattgcaactagtcagacattaactgccaaatgagatgtacagttcctccagcaagtgaaaacatccccaagtcacatccgccgctcgtggcagatggagccttgtgaccaaaaagtgcaaggtgggcattttgagctcttgacagtacttccaatacaattgggggtgcttgtgtgtttgtccagatggaggagtgtggccttggagtgtgagcgttaccttcccagggctttccactccaaatgcccccttgaaaagggctcgtgtttctgcagctc

SEQ ID NO: 363456 - DNA, 830 bp, Homo sapiens
gtttcttcaaaatgaaagctattttactgctttatttataatgctaaatgaacactggaaattagagcagtacaaaaaataagaaaaaatcacctcaaatcccaatacccagagcccaactgttagcgtggtgaacattttcccaatactttatatacacatctatacttgctgttttataatctccttttaaacttttattgagcaatatgtcatggatgtctttcctggtcagtaaatacaggtttgtattatcgttttttaaatgagtctctagcagttcatcatatgaagactcctactttagtctgtcctctgttgatgaatttccaggttttctcttggtggtgggggtgaggagagttggaataaacaagagtgaagggaacacatctgtacatacattttgtactcatttggttttttctcatgataaatttctataagaggaactgttgaaatcagaaaagagaggtgggtggatggtggatccgtttggtttgattctgtgcaatacagacgggaccccaggagcctttgctgagctgtggttgaagggcatcaaacagtctccttttcaaatgagatgtacagttcctccagcaagtgaaaacatccccaagtcacatccgccgctcgtggcagatggagccttgtgaccaaaaagtgcaaggtgggcattttgagctcttgacagtacttccaatacaattgggggtgcttgtgtgtttgtccagatggaggagtgtggccttggagtgtgagcgttaccttcccagggctttccactccaaatgcccccttgaaaagggctcgtgtttctgcagctc

SEQ ID NO: 363457 - DNA, 2889 bp, Homo sapiens
  misc_feature (57)..(57): n is a, c, g, or t
aggggggggggcgggtgggagggtgaagggaaggtcttttgtaacgacgcgctgaanctccagcgctaaacattgtcacagaccagcagacaggacagaaaatccagatagtcaccgcagtggacgcctccggatcccccaaacagcagttcatcctgaccagcccagatggagctggaactgggaaggtgatcctggcttccccagagacatccagcgccaagcaactcatattcaccacctcagacaacctcgtccctggcaggatccagattgtcacggattctgcctctgtggagcgtttactggggaagacggacgtccagcggccccaggtggtagagtactgtgtggtctgtggcgacaaagcctccggccgtcactatggggctgtcagttgtgaaggttgcaaaggtttcttcaaaaggagtgtgaggaaaaatttgacctacagctgccggagcaaccaagactgcatcatcaataaacatcaccggaaccgctgtcagttttgccggctgaaaaaatgcttagagatgggcatgaaaatggaatctgtgcagagtgaacggaagcccttcgatgtgcaacgggagaaaccaagcaattgtgctgcttcaactgagaaaatctatatccggaaagacctgagaagtcccctgatagctactcccacgtttgtggcagacaaagatggagcaagacaaacaggtcttcttgatccagggatgcttgtgaacatccagcagcctttgatacgtgaggatggtacagttctcctggccacggattctaaggctgaaacaagccagggagctctgggcacactggcaaatgtagtgacctcccttgccaacctaagtgaatctttgaacaacggtgacacttcagaaatccagccagaggaccagtctgcaagtgagataactcgggcatttgataccttagctaaagcacttaataccacagacagctcctcttctccaagcttggcagatgggatagacaccagtggaggagggagcatccacgtcatcagcagagaccagtcgacacccatcattgaggttgaaggccccctcctttcagacacacacgtcacatttaagctaacaatgcccagtccaatgccagagtacctcaacgtgcactacatctgtgagtctgcatcccgtctgcttttcctctcaatgcactgggctcggtcaatcccagcctttcaggcacttgggcaggactgcaacaccagccttgtgcgggcctgctggaatgagctcttcaccctcggcctggcccagtgtgcccaggtcatgagtctctccaccatcctggctgccattgtcaaccacctgcagaacagcatccaggaagataaactttctggtgaccggataaagcaagtcatggagcacatctggaagctgcaggagttctgtaacagcatggcgaagctggatatagatggctatgagtatgcataccttaaagctatagttctctttagccccgatcatccaggtttgaccagcacaagccagattgaaaaattccaagaaaaggcacagatggagttgcaggactatgttcagaaaacctactcagaagacacctaccgattggcccggatcctcgttcgcctgccggcactcaggctgatgagctccaacataacagaagaacttttttttactggtctcattggcaatgtttcgatagacagcataatcccctacatcctcaagatggagacagcagagtataatggccagatcaccggagccagtctatagcgcaaaccacacacctgccaaggagcaacagaatccttccaggaccgttcacatacaaagaaaagtagtggtattttggtatgtgcaaatatttccatatgttagccatttcctgtctggtttctccttatctgttaatcccagacaatagcaattaaaagactagtaggatcctttcctgacataagaaatgttttaatgccttttgatgaagcagcagattttggaacaatcttttaactcaatttgtatttagaaattctcaaagggcaaaaaacaaaaaaaaaggttttataatgtcagagactagtattaaagaaaactgaaagaacctgagagaatagtatgtgtgtatatatatatataaaaaagtccttggaattatagatactaattaccagggtaataatattagcactttctaagcacttatcaatgtgtaacgttagcaacatcttgcctgtgggcagggcaaatggaaaactgtgtatgtcttttgccgaaatgctaatgatttctgtgaaaactcactagggtacaggagacaatcatttatgtttaagaaaagaaggcatcattcctaattgtgtgcacatgttgtggagttgagctgaattctgtgaatggaaacgtggctcatttgcatcatgcagtaagtgggagtgtggtagcacagtcggtggtgacccagttcagaagcttctagccatagagcagacacttgtcaggttccctgactacttggtcctggtctctgatgggcatctgcagactcctctagaacctggggttctcctttgatgactggttatctgaattggattgcaactagtcagacattaactgccaaatgagatgtacagttcctccagcaagtgaaaacatccccaagtcacatccgccgctcgtggcagatggagccttgtgaccaaaaagtgcaaggtgggcattttgagctcttgacagtacttccaatacaattgggggtgcttgtgtgtttgtccagatggaggagtgtggccttggagtgtgagcgttaccttcccagggctttccactccaaatgcccccttgaaaagggctcgtgtttctgcagctc

SEQ ID NO: 363458 - DNA, 3129 bp, Homo sapiens
ggccgggtggagaggccggcgcctggtcttgggtcagcaggtgggctgcttccctccgcctggaacgcgtctcgaatgagtactgaggaacaatagtaataaaggtaacacgtacacagacctctcggccggaatctccagggatgaccagcccctccccacgcatccagataatctccaccgactctgctgtagcctcacctcagcgcattcagggctctgaacctgcctctggcccattgagtgttttcacatctttgaacaaagagaagattgtcacagaccagcagacaggacagaaaatccagatagtcaccgcagtggacgcctccggatcccccaaacagcagttcatcctgaccagcccagatggagctggaactgggaaggtgatcctggcttccccagagacatccagcgccaagcaactcatattcaccacctcagacaacctcgtccctggcaggatccagattgtcacggattctgcctctgtggagcgtttactggggaagacggacgtccagcggccccaggtggtagagtactgtgtggtctgtggcgacaaagcctccggccgtcactatggggctgtcagttgtgaaggttgcaaaggtttcttcaaaaggagtgtgaggaaaaatttgacctacagctgccggagcaaccaaagaactggcattcattccactcacaacattccaccggggaacccgctttggtcaggtcttcggccgggttggaacaaactgccttcagcaggatggggcctgacacatttgggaccctcggtccacgaagtacacccggaaatccccttcgatgtgcaacgggagaaaccaagcaattgtgctgcttcaactgagaaaatctatatccggaaagacctgagaagtcccctgatagctactcccacgtttgtggcagacaaagatggagcaagacaaacaggtcttcttgatccagggatgcttgtgaacatccagcagcctttgatacgtgaggatggtacagttctcctggccacggattctaaggctgaaacaagccagggagctctgggcacactggcaaatgtagtgacctcccttgccaacctaagtgaatctttgaacaacggtgacacttcagaaatccagccagaggaccagtctgcaagtgagataactcgggcatttgataccttagctaaagcacttaataccacagacagctcctcttctccaagcttggcagatgggatagacaccagtggaggagggagcatccacgtcatcagcagagaccagtcgacacccatcattgaggttgaaggccccctcctttcagacacacacgtcacatttaagctaacaatgcccagtccaatgccagagtacctcaacgtgcactacatctgtgagtctgcatcccgtctgcttttcctctcaatgcactgggctcggtcaatcccagcctttcaggcacttgggcaggactgcaacaccagccttgtgcgggcctgctggaatgagctcttcaccctcggcctggcccagtgtgcccaggtcatgagtctctccaccatcctggctgccattgtcaaccacctgcagaacagcatccaggaagataaactttctggtgaccggataaagcaagtcatggagcacatctggaagctgcaggagttctgtaacagcatggcgaagctggatatagatggctatgagtatgcataccttaaagctatagttctctttagccccgatcatccaggtttgaccagcacaagccagattgaaaaattccaagaaaaggcacagatggagttgcaggactatgttcagaaaacctactcagaagacacctaccgattggcccggatcctcgttcgcctgccggcactcaggctgatgagctccaacataacagaagaacttttttttactggtctcattggcaatgtttcgatagacagcataatcccctacatcctcaagatggagacagcagagtataatggccagatcaccggagccagtctatagcgcaaaccacacacctgccaaggagcaacagaatccttccaggaccgttcacatacaaagaaaagtagtggtattttggtatgtgcaaatatttccatatgttagccatttcctgtctggtttctccttatctgttaatcccagacaatagcaattaaaagactagtaggatcctttcctgacataagaaatgttttaatgccttttgatgaagcagcagattttggaacaatcttttaactcaatttgtatttagaaattctcaaagggcaaaaaacaaaaaaaaaggttttataatgtcagagactagtattaaagaaaactgaaagaacctgagagaatagtatgtgtgtatatatatatataaaaaagtccttggaattatagatactaattaccagggtaataatattagcactttctaagcacttatcaatgtgtaacgttagcaacatcttgcctgtgggcagggcaaatggaaaactgtgtatgtcttttgccgaaatgctaatgatttctgtgaaaactcactagggtacaggagacaatcatttatgtttaagaaaagaaggcatcattcctaattgtgtgcacatgttgtggagttgagctgaattctgtgaatggaaacgtggctcatttgcatcatgcagtaagtgggagtgtggtagcacagtcggtggtgacccagttcagaagcttctagccatagagcagacacttgtcaggttccctgactacttggtcctggtctctgatgggcatctgcagactcctctagaacctggggttctcctttgatgactggttatctgaattggattgcaactagtcagacattaactgccaaatgagatgtacagttcctccagcaagtgaaaacatccccaagtcacatccgccgctcgtggcagatggagccttgtgaccaaaaagtgcaaggtgggcattttgagctcttgacagtacttccaatacaattgggggtgcttgtgtgtttgtccagatggaggagtgtggccttggagtgtgagcgttaccttcccagggctttccactccaaatgcccccttgaaaagggctcgtgtttctgcagctc

SEQ ID NO: 363459 - DNA, 2394 bp, Homo sapiens
agatatagatagaccccatctctgaaagagagaaagaaaaagagaaagagacaaagagaaaaggaaggaaggaaggaaggaaagagagaaaaggaaggaaaagagagaaagaaaagaaaagaaagaaattgtccatgaagttagataatacatagctcagtgcctaagatgatgtgtagataatacatacaagttttcattgtttgccggatgcagtggctcacgtgtgtaatcccagcactttgagaggccaaggcaggtagatcacctgcagtcaatagtttgagaccagcctggccaacatagtgaaaccccatctctacggtagaatttaattatcttttcccactgtagtttttctaaatcatagctagaattctgttccccctaaaagctgtagattcacaacaattacatgcttcatttttgctcacagggcatttgataccttagctaaagcacttaataccacagacagctcctcttctccaagcttggcagatgggatagacaccagtggaggagggagcatccacgtcatcagcagagaccagtcgacacccatcattgaggttgaaggccccctcctttcagacacacacgtcacatttaagctaacaatgcccagtccaatgccagagtacctcaacgtgcactacatctgtgagtctgcatcccgtctgcttttcctctcaatgcactgggctcggtcaatcccagcctttcaggcacttgggcaggactgcaacaccagccttgtgcgggcctgctggaatgagctcttcaccctcggcctggcccagtgtgcccaggtcatgagtctctccaccatcctggctgccattgtcaaccacctgcagaacagcatccaggaagataaactttctggtgaccggataaagcaagtcatggagcacatctggaagctgcaggagttctgtaacagcatggcgaagctggatatagatggctatgagtatgcataccttaaagctatagttctctttagccccgatcatccaggtttgaccagcacaagccagattgaaaaattccaagaaaaggcacagatggagttgcaggactatgttcagaaaacctactcagaagacacctaccgattggcccggatcctcgttcgcctgccggcactcaggctgatgagctccaacataacagaagaacttttttttactggtctcattggcaatgtttcgatagacagcataatcccctacatcctcaagatggagacagcagagtataatggccagatcaccggagccagtctatagcgcaaaccacacacctgccaaggagcaacagaatccttccaggaccgttcacatacaaagaaaagtagtggtattttggtatgtgcaaatatttccatatgttagccatttcctgtctggtttctccttatctgttaatcccagacaatagcaattaaaagactagtaggatcctttcctgacataagaaatgttttaatgccttttgatgaagcagcagattttggaacaatcttttaactcaatttgtatttagaaattctcaaagggcaaaaaacaaaaaaaaaggttttataatgtcagagactagtattaaagaaaactgaaagaacctgagagaatagtatgtgtgtatatatatatataaaaaagtccttggaattatagatactaattaccagggtaataatattagcactttctaagcacttatcaatgtgtaacgttagcaacatcttgcctgtgggcagggcaaatggaaaactgtgtatgtcttttgccgaaatgctaatgatttctgtgaaaactcactagggtacaggagacaatcatttatgtttaagaaaagaaggcatcattcctaattgtgtgcacatgttgtggagttgagctgaattctgtgaatggaaacgtggctcatttgcatcatgcagtaagtgggagtgtggtagcacagtcggtggtgacccagttcagaagcttctagccatagagcagacacttgtcaggttccctgactacttggtcctggtctctgatgggcatctgcagactcctctagaacctggggttctcctttgatgactggttatctgaattggattgcaactagtcagacattaactgccaaatgagatgtacagttcctccagcaagtgaaaacatccccaagtcacatccgccgctcgtggcagatggagccttgtgaccaaaaagtgcaaggtgggcattttgagctcttgacagtacttccaatacaattgggggtgcttgtgtgtttgtccagatggaggagtgtggccttggagtgtgagcgttaccttcccagggctttccactccaaatgcccccttgaaaagggctcgtgtttctgcagctc

SEQ ID NO: 363460 - DNA, 1609 bp, Homo sapiens
tactgataggtacctgagattttttaaatgaggttaaaacattgttacccactgccctgagtgtactttttctagttgggtaatttggaacctcctccacagagtttctcagtccgggctagataaaatgtgctaccacatttaaagtggtttcatttacatttcatgtactgtttttcataagttagtgttcagggcagtgatcatagtaaaatactagatgtgcatctggggcatttgggaatgacccagtgcagtagccctggttctcactgccttcctgtggctgggccacacttaaggcaactggaagaaacagctttgtcaagacagcccagtttctccggcctcctgaaatcttgagacaggtgagggaatgcaatttaggggtttctgagaataaggatgtattgttttgtgatgtgccaactttgctgactaactgagtagaagttagccagggcaaggctggaagcggccttagctggaccctcatcctccctgcttcagtctcggatccagcacaaagcctgcctcctgccctgcagggttgcagggcatgtttctgcccttcagaatctgtactcatctccgtcttttggtccccgtagcctctcatgaccttggctgcaggacctaagtaactgataccatctcttgggacagtcagtccaggatgctgaggcttttgaaggctgtaggtaatgatggtttggccatacctattaacatttttttattatttaaagaatgttttttaagagaatagttgatcattagaaggattttagttaaaacattcatagacttattcatagacttcatccttttcttgaagaatgatcctggatagcacttcaataaacacttgctgaattcacctgtttgggaaatgctgggacttagtgcctggatgccccacaaccttggagaaatgccaacacacaccacactcagactcctttctatattcctaggcaggactgcaacaccagccttgtgcgggcctgctggaatgagctcttcaccctcggcctggcccagtgtgcccaggtcatgagtctctccaccatcctggctgccattgtcaaccacctgcagaacagcatccaggaaggtagggcacagggacttggggctggggtgtgtcttggttcagcctggtggccatggagcagagcccagccccctggttggaggctcatgtcaaagacacctttgttgacccaggctggcaacatagcaaattggatagcctcagtttcccacagcatccataggctgagagaagtttgactgttaaggtatggaacctttgggctgggcatggtggctcacgcctgtaatcctaacactttgttaggccaggcaggaggatcacttgagcccaggagtttgagaccagtctgggcaacataacgagaccttgtctttacaaaaagtacaagaaattagccaggcctggtggcatctgcctgtagtcccagatactcaggaggctgaggcaggaggattgcttgagcccagagtttgaggctgcagtgagctgtgatcattccaggtactccatcctgggtaatagagcaagatcccatctcaatgaatgaat

SEQ ID NO: 363461 - DNA, 1299 bp, Homo sapiens
ggccgggtggagaggccggcgcctggtcttgggtcagcaggtgggctgcttccctccgcctggaacgcgtctcgaatgagtactgaggaacaatagtaataaaggtaacacgtacacagacctctcggccggaatctccagggatgaccagcccctccccacgcatccagataatctccaccgactctgctgtagcctcacctcagcgcattcagggctctgaacctgcctctggcccattgagtgttttcacatctttgaacaaagagaagattgtcacagaccagcagacaggacagaaaatccagatagtcaccgcagtggacgcctccggatcccccaaacagcagttcatcctgaccagcccagatggagctggaactgggaaggtgatcctggcttccccagagacatccagcgccaagcaactcatattcaccacctcagacaacctcgtccctggcaggatccagattgtcacggattctgcctctgtggagcgtttactggggaagacggacgtccagcggccccaggtggtagagtactgtgtggtctgtggcgacaaagcctccggccgtcactatggggctgtcagttgtgaaggttgcaaaggtttcttcaaaaggagtgtgaggaaaaatttgacctacagctgccggagcaaccaaagaactggcattcattccactcacaacattccaccggggaacccgctttggtcaggtcttcggccgggttggaacaaactgccttcagcaggatggggcctgacacatttgggaccctcggtccacgaagtacacccggaaatccccttcgatgtgcaacgggagaaaccaagcaattgtgctgcttcaactgagaaaatctatatccggaaagacctgagaagtcccctgatagctactcccacgtttgtggcagacaaagatggagcaagacaaacaggtcttcttgatccagggatgcttgtgaacatccagcagcctttgatacgtgaggatggtacagttctcctggccacggattctaaggctgaaacaagccagggagctctgggcacactggcaaatgtagtgacctcccttgccaacctaagtgaatctttgaacaacggtgacacttcagaaatccagccagaggaccagtctgcaagtgagataactcggtacgagcccatgaggatggagtctcccctcctcgcctggacaccctccctctattgtgagggtggaaaacagcattttggtacctgtgctgtatttaactaaggatgataaaattgttacaatgacc

SEQ ID NO: 363462 - DNA, 532 bp, Homo sapiens
caaggtgagataaggtctcagtgctacagttaatttgtatattctttttaatataatctattgaacttactttaaaaggaacggaaagaggggaaaacaagcaatccaaaatgtatcagagagagagctggagttgaggatgccttgctgattttctgaaaatcaagttaacttttctaggcagaatggccacagtctgcagtcatcctggaaagccctgggggatgcatctgcatttcatcctgtctcaagctgtaaacctgactttatgtatatctcattgcagagagacaggggtgggggttctgcttagtcactaagcggctgagtctacttagagcttttctactattcagacagcttcacaaatgtggaaggacaggtaaatgcagcatgatcatactgtgcataaaatgttggaagctactctgagtttctttatgtcttaaatagacaaacaggtcttcttgatccagggatgcttgtgaacatccagcagcctttgatacgtgaggatggtacagttctcctg

SEQ ID NO: 363463 - DNA, 784 bp, Homo sapiens
cacaacctccacctcctgggttcaagcaattctcctgcctcagcctccgaagtagctggaactacaggtgcatgccaccacacctggctaatttttgtatttttaatagagacagggtttcattatgttgcccaggctggtctcgaactcctgacatcaggtgatctgcctgcctcagcctcccaaagtgctgggattacaggcatgagccacccgcacctggcccctgttccccagatttaatttagaccttaacctatggctcaaaatggaattgccatagaacaaataacagtttagctgaggcaagacttgaggagtatgtttttgtgggggtgggctgggaagatccccttaggcttatggaccacattccaaggcccattagaccctagttcactgagcaagaaaacatggggagtccgtgcaagccccccgactgcatgggacttcagaatcagacagcaactctagatgccactgctattgaagcatgacagggatacatgttgacagacaaagccatcccctgtccttccttcacctcctgtgccatgtgcctcctcttttccagctaacaatgcccagtccaatgccagagtacctcaacgtgcactacatctgtgagtctgcatcccgtctgcttttcctctcaatgcactgggctcggtcaatcccagcctttcaggcacttgggtaagtggcctcttgctgtgcatgtatcctcgggcaggagccttcctctccctaggaatgacctggaagaactctgagggcctgtcta

SEQ ID NO: 363464 - DNA, 479 bp, Homo sapiens
tcttcttacattttcaacatttgaaacagctgttttaagattgtattttcctggggggcatcctgtagcaacatctcattgattgctttgtcatcatccttctgggtccatacctcagaaccatacaagttcatcactccaggccacagtgaaagcaagaggcgtggtcttcaggccacctctgggcatcattctgaacccccttgtgatccagcccacttctcacccacaggtgtaacacgtacacagacctctcggccggaatctccagggatgaccagcccctccccacgcatccagataatctccaccgactctgctgtagcctcacctcagcgcattcaggtacctgcaacctgccaatggcaaccctgcctttccagaagaactctttccaaaaacaaaccttcctaagggtttcactaaagagttgtgccttttgggcatgaaatacagtacaacttcatcaattctttaaa

SEQ ID NO: 363465 - DNA, 3169 bp, Homo sapiens
gaattcgccgctcccacctcggcgtctcgtctctcgcccgctgccccgcgagcccgcggcccccggctcccgccatccgccgacaccgggagcccgggctccccgcgccctgccctccgcgccgggggccgcccgccgcagacacgggacccgcttcgaggccgctttggcgcaaatcctgaggtaacacgtacacagacctctcggccggaatctccagggatgaccagcccctccccacgcatccagataatctccaccgactctgctgtagcctcacctcagcgcattcagggctctgaacctgcctctggcccattgagtgttttcacatctttgaacaaagagaagattgtcacagaccagcagacaggacagaaaatccagatagtcaccgcagtggacgcctccggatcccccaaacagcagttcatcctgaccagcccagatggagctggaactgggaaggtgatcctggcttccccagagacatccagcgccaagcaactcatattcaccacctcagacaacctcgtccctggcaggatccagattgtcacggattctgcctctgtggagcgtttactggggaagacggacgtccagcggccccaggtggtagagtactgtgtggtctgtggcgacaaagcctccggccgtcactatggggctgtcagttgtgaaggttgcaaaggtttcttcaaaaggagtgtgaggaaaaatttgacctacagctgccggagcaaccaagactgcatcatcaataaacatcaccggaaccgctgtcagttttgccggctgaaaaaatgcttagagatgggcatgaaaatggaatctgtgcagagtgaacggaagcccttcgatgtgcaacgggagaaaccaagcaattgtgctgcttcaactgagaaaatctatatccggaaagacctgagaagtcccctgatagctactcccacgtttgtggcagacaaagatggagcaagacaaacaggtcttcttgatccagggatgcttgtgaacatccagcagcctttgatacgtgaggatggtacagttctcctggccacggattctaaggctgaaacaagccagggagctctgggcacactggcaaatgtagtgacctcccttgccaacctaagtgaatctttgaacaacggtgacacttcagaaatccagccagaggaccagtctgcaagtgagataactcgggcatttgataccttagctaaagcacttaataccacagacagctcctcttctccaagcttggcagatgggatagacaccagtggaggagggagcatccacgtcatcagcagagaccagtcgacacccatcattgaggttgaaggccccctcctttcagacacacacgtcacatttaagctaacaatgcccagtccaatgccagagtacctcaacgtgcactacatctgtgagtctgcatcccgtctgcttttcctctcaatgcactgggctcggtcaatcccagcctttcaggcacttgggcaggactgcaacaccagccttgtgcgggcctgctggaatgagctcttcaccctcggcctggcccagtgtgcccaggtcatgagtctctccaccatcctggctgccattgtcaaccacctgcagaacagcatccaggaagataaactttctggtgaccggataaagcaagtcatggagcacatctggaagctgcaggagttctgtaacagcatggcgaagctggatatagatggctatgagtatgcataccttaaagctatagttctctttagccccgatcatccaggtttgaccagcacaagccagattgaaaaattccaagaaaaggcacagatggagttgcaggactatgttcagaaaacctactcagaagacacctaccgattggcccggatcctcgttcgcctgccggcactcaggctgatgagctccaacataacagaagaacttttttttactggtctcattggcaatgtttcgatagacagcataatcccctacatcctcaagatggagacagcagagtataatggccagatcaccggagccagtctatagcgcaaaccacacacctgccaaggagcaacagaatccttccaggaccgttcacatacaaagaaaagtagtggtattttggtatgtgcaaatatttccatatgttagccatttcctgtctggtttctccttatctgttaatcccagacaatagcaattaaaagactagtaggatcctttcctgacataagaaatgttttaatgccttttgatgaagcagcagattttggaacaatcttttaactcaatttgtatttagaaattctcaaagggcaaaaaacaaaaaaaaaggttttataatgtcagagactagtattaaagaaaactgaaagaacctgagagaatagtatgtgtgtatatatatatataaaaaagtccttggaattatagatactaattaccagggtaataatattagcactttctaagcacttatcaatgtgtaacgttagcaacatcttgcctgtgggcagggcaaatggaaaactgtgtatgtcttttgccgaaatgctaatgatttctgtgaaaactcactagggtacaggagacaatcatttatgtttaagaaaagaaggcatcattcctaattgtgtgcacatgttgtggagttgagctgaattctgtgaatggaaacgtggctcatttgcatcatgcagtaagtgggagtgtggtagcacagtcggtggtgacccagttcagaagcttctagccatagagcagacacttgtcaggttccctgactacttggtcctggtctctgatgggcatctgcagactcctctagaacctggggttctcctttgatgactggttatctgaattggattgcaactagtcagacattaactgccaaatgagatgtacagttcctccagcaagtgaaaacatccccaagtcacatccgccgctcgtggcagatggagccttgtgaccaaaaagtgcaaggtgggcattttgagctcttgacagtacttccaatacaattgggggtgcttgtgtgtttgtccagatggaggagtgtggccttggagtgtgagcgttaccttcccagggctttccactccaaatgcccccttgaaaagggctcgtgtttctgcagctc

SEQ ID NO: 363466 - DNA, 2635 bp, Homo sapiens
tactgataggtacctgagattttttaaatgaggttaaaacattgttacccactgccctgagtgtactttttctagttgggtaatttggaacctcctccacagagtttctcagtccgggctagataaaatgtgctaccacatttaaagtggtttcatttacatttcatgtactgtttttcataagttagtgttcagggcagtgatcatagtaaaatactagatgtgcatctggggcatttgggaatgacccagtgcagtagccctggttctcactgccttcctgtggctgggccacacttaaggcaactggaagaaacagctttgtcaagacagcccagtttctccggcctcctgaaatcttgagacaggtgagggaatgcaatttaggggtttctgagaataaggatgtattgttttgtgatgtgccaactttgctgactaactgagtagaagttagccagggcaaggctggaagcggccttagctggaccctcatcctccctgcttcagtctcggatccagcacaaagcctgcctcctgccctgcagggttgcagggcatgtttctgcccttcagaatctgtactcatctccgtcttttggtccccgtagcctctcatgaccttggctgcaggacctaagtaactgataccatctcttgggacagtcagtccaggatgctgaggcttttgaaggctgtaggtaatgatggtttggccatacctattaacatttttttattatttaaagaatgttttttaagagaatagttgatcattagaaggattttagttaaaacattcatagacttattcatagacttcatccttttcttgaagaatgatcctggatagcacttcaataaacacttgctgaattcacctgtttgggaaatgctgggacttagtgcctggatgccccacaaccttggagaaatgccaacacacaccacactcagactcctttctatattcctaggcaggactgcaacaccagccttgtgcgggcctgctggaatgagctcttcaccctcggcctggcccagtgtgcccaggtcatgagtctctccaccatcctggctgccattgtcaaccacctgcagaacagcatccaggaagataaactttctggtgaccggataaagcaagtcatggagcacatctggaagctgcaggagttctgtaacagcatggcgaagctggatatagatggctatgagtatgcataccttaaagctatagttctctttagccccgatcatccaggtttgaccagcacaagccagattgaaaaattccaagaaaaggcacagatggagttgcaggactatgttcagaaaacctactcagaagacacctaccgattggcccggatcctcgttcgcctgccggcactcaggctgatgagctccaacataacagaagaacttttttttactggtctcattggcaatgtttcgatagacagcataatcccctacatcctcaagatggagacagcagagtataatggccagatcaccggagccagtctatagcgcaaaccacacacctgccaaggagcaacagaatccttccaggaccgttcacatacaaagaaaagtagtggtattttggtatgtgcaaatatttccatatgttagccatttcctgtctggtttctccttatctgttaatcccagacaatagcaattaaaagactagtaggatcctttcctgacataagaaatgttttaatgccttttgatgaagcagcagattttggaacaatcttttaactcaatttgtatttagaaattctcaaagggcaaaaaacaaaaaaaaaggttttataatgtcagagactagtattaaagaaaactgaaagaacctgagagaatagtatgtgtgtatatatatatataaaaaagtccttggaattatagatactaattaccagggtaataatattagcactttctaagcacttatcaatgtgtaacgttagcaacatcttgcctgtgggcagggcaaatggaaaactgtgtatgtcttttgccgaaatgctaatgatttctgtgaaaactcactagggtacaggagacaatcatttatgtttaagaaaagaaggcatcattcctaattgtgtgcacatgttgtggagttgagctgaattctgtgaatggaaacgtggctcatttgcatcatgcagtaagtgggagtgtggtagcacagtcggtggtgacccagttcagaagcttctagccatagagcagacacttgtcaggttccctgactacttggtcctggtctctgatgggcatctgcagactcctctagaacctggggttctcctttgatgactggttatctgaattggattgcaactagtcagacattaactgccaaatgagatgtacagttcctccagcaagtgaaaacatccccaagtcacatccgccgctcgtggcagatggagccttgtgaccaaaaagtgcaaggtgggcattttgagctcttgacagtacttccaatacaattgggggtgcttgtgtgtttgtccagatggaggagtgtggccttggagtgtgagcgttaccttcccagggctttccactccaaatgcccccttgaaaagggctcgtgtttctgcagctc

SEQ ID NO: 363467 - DNA, 1967 bp, Homo sapiens
  misc_feature (57)..(57): n is a, c, g, or t
aggggggggggcgggtgggagggtgaagggaaggtcttttgtaacgacgcgctgaanctccagcgctaaacattgtcacagaccagcagacaggacagaaaatccagatagtcaccgcagtggacgcctccggatcccccaaacagcagttcatcctgaccagcccagatggagctggaactgggaaggtgatcctggcttccccagagacatccagcgccaagcaactcatattcaccacctcagacaacctcgtccctggcaggatccagattgtcacggattctgcctctgtggagcgtttactggggaagacggacgtccagcggccccaggtggtagagtactgtgtggtctgtggcgacaaagcctccggccgtcactatggggctgtcagttgtgaaggttgcaaaggtttcttcaaaaggagtgtgaggaaaaatttgacctacagctgccggagcaaccaagactgcatcatcaataaacatcaccggaaccgctgtcagttttgccggctgaaaaaatgcttagagatgggcatgaaaatggaatctgtgcagagtgaacggaagcccttcgatgtgcaacgggagaaaccaagcaattgtgctgcttcaactgagaaaatctatatccggaaagacctgagaagtcccctgatagctactcccacgtttgtggcagacaaagatggagcaagacaaacaggtcttcttgatccagggatgcttgtgaacatccagcagcctttgatacgtgaggatggtacagttctcctggccacggattctaaggctgaaacaagccagggagctctgggcacactggcaaatgtagtgacctcccttgccaacctaagtgaatctttgaacaacggtgacacttcagaaatccagccagaggaccagtctgcaagtgagataactcgggcatttgataccttagctaaagcacttaataccacagacagctcctcttctccaagcttggcagatgggatagacaccagtggaggagggagcatccacgtcatcagcagagaccagtcgacacccatcattgaggttgaaggccccctcctttcagacacacacgtcacatttaagctaacaatgcccagtccaatgccagagtacctcaacgtgcactacatctgtgagtctgcatcccgtctgcttttcctctcaatgcactgggctcggtcaatcccagcctttcaggcacttgggcaggactgcaacaccagccttgtgcgggcctgctggaatgagctcttcaccctcggcctggcccagtgtgcccaggtcatgagtctctccaccatcctggctgccattgtcaaccacctgcagaacagcatccaggaagataaactttctggtgaccggataaagcaagtcatggagcacatctggaagctgcaggagttctgtaacagcatggcgaagctggatatagatggctatgagtatgcataccttaaagctatagttctctttagccccgatcatccaggtttgaccagcacaagccagattgaaaaattccaagaaaaggcacagatggagttgcaggactatgttcagaaaacctactcagaagacacctaccggtcaaaccaaacaactcactcattcttccccaagatttttctgatgtgctccatgatctccttattgctcttggtctccacatccaccaggacctgctccccagaatctggaaacggaaagcacggggcagaagagaaacagaactcacagcgcactcagcctcaaaaagttgtaatttgggacttgcttttagtggcagaaacattttaataataaaatagatatacttgtttacataatctgtaatactacccttcctttttccatttttctttagacctgagcaagcataaactttagatatgtaaaaaaacatgccattttaatagaaagacattccatgttcatgga

SEQ ID NO: 363468 - DNA, 586 bp, Homo sapiens
gggagccaccgcatctggctgctttgacatatttttagaccatgggatttcagatcatttttagtgatgccaggatactttctgtttaaaatccatacgtgctactattttcattgaatgtgggagtgtgagaactctcaaataacctaaaagtatatgggtgatagaaagaaggtatattttacagagataagagaaactcgaatgtccttcttagtaagtgtcagaagtgacttttattaatttttacttaaaaatttaaaaaataggacatgctctttagtttaaaaaattgaaataagtaggctgggcgcagtggctcacacctgtaatcccagcatttgggaggccgaggcaggtggattacctgagatcagaagttcaagactaccctgaccaacatgttgaaatcctgtctctactaaaagtataaaaattagccaggcagaggagtgggcacctgtaatcccagctacttgggaggctgaggcaggagaatcgcttgaactcgggaggtggaggttgcagtgagctgagattgcgccactgcactccagcctgggtgacagagcaagactctgtgtcc

SEQ ID NO: 363469 - DNA, 2246 bp, Homo sapiens
gcagaacataaacaatggccagctgccggctgcacgcctataatctcagcactttgagaggccgaggtggggtcagttgagtccaggagttcgagaccagcctgggcaacatggcaaaacctcatctctacaaaaaattagccgggcatggtagcacgcacctgtgatcccagctacttgagagctgaggtgggaggatagcttgagccaggagcagaggttgtagtgagcgagatcacaccattgcactccagcctgcacagagcctgactctgtctcaaataaataaataaataaataaaataaaaatcatgacttctccattgacagcctttatttctattttcttatgtgctttatctacagtatttatcagcatctattacactcttttttaaatttgattttgttgtgtccctcactagaatgtaaactgtgtcatattcttggtgtctttctctatcttcattttcagctattaagactactccttaaatagctgtagtcagattttcataaaaaggttagactataaatacggtgtcagggccttgtgaacccccattgcagcctacatcagtgaccctcaaggagctatcttcagcccaccaacgtcctctcaaattctacggaaatttttggaccactgaattttccatagaaactgtatatactattaagggttagtgcaaatacctgactaatgtggtattcataatctaaattaagacacaatggtcatttgtagattaacttgaagttctacaagagacatggctgttaagaaatagtgcattattttgccaacctcctatgttgtatatgtgcataaagtgatttaaaaatcctttgttttcagaaaggatgctggatgatgagtgatgttataagcttttcagaatggtcaactattactatcttgcttatattatctttctgttaatttaccttttattattgcaattttcttttctctggattgttcatttggttgattcattatctaataacagaatgttgaagttttcatgcactgtggtccaaatgcttcctgctttcctgaatagatagagttgatcgatttattattggtaggaattgtgtttggcaattcatctactctttttaaggttttgtttgttaatacatctgaaaagatgatatacaagattgagacatgagaagcattggttcaacactaatgcatctacaagaattaggtttgggaaggtgggaaagattacctcaacatttttaaaaattggaaactgcaaccaaaataagctgaaaaaatccctattaacacttaagaagagtctgcattaagagtctttccatgatttttattaaactagagagcctcacctggctgctctagggttcctcatatgcaaaacagaaataaggggattcccctgactggtccccatgttgttaagtgttctccccacccccaccctacccccagcttcttaatgaagcaggcctccatcctcctaacttgagaggatgtgaatcattccacagatgtctgtcttctagcaccacccctcgtatttcctctacataacaggtcttcagctgcattctaggaacaccatatactactgagctgcaaatctatgctaagcatataagacaatgactgaaagggaaaaaaatttttttaattacaaactcaattcatttggtgcatttcaaaggtgcaatacttttcttcatttatcagtgaaagaagttagaaattaacttcccaaaaaaatcagcaaatggcaaacaaatgtccttgaaagtcacagtcacatatagtgcgtcctagaaaagaggaggggcaagatgggctccacccactttcatgagtttcatcaaatactggatctactcaagggtggagagaaaaggcaactttcaaaaaggagtatgttattaaatgaggcatttactatactccttcctaagagcaccagatggggaacatgttttctaaactagatctaggaagtggaatgtggaatcaatccgtcctcctccccttaagggctaaccactggttaatgaattaaaaaaacaagactaaaaaacaaaccccacacacactcccccccaaaaaaagaggagggaaaaaaacaaaacaaaacactaagatgtcccagattactctccagagtggaaccagggagcagcttcaacaattccaattagtctgttacagagtcatccacaagcatgccttgcttttaaacaac

SEQ ID NO: 363470 - DNA, 956 bp, Homo sapiens
  misc_feature (296)..(296): n is a, c, g, or t
  misc_feature (305)..(305): n is a, c, g, or t
  misc_feature (307)..(307): n is a, c, g, or t
  misc_feature (318)..(318): n is a, c, g, or t
  misc_feature (325)..(325): n is a, c, g, or t
ttatggtgcttttttttcttgtccttacttctggtttctgtgcttgtcttgttgtttttctcgttcgtcgtcgagtgttgttgccgtcgtggtgattcctcctttttcctcgcggcggctattaactctcctgtgaccccggtgggaaaccctggcccccaacacctcggtgggtgttccaacacaccacgttgccccgcgcattttttttggggggagaaaccaccccctgtgtgagcccgatccctctgaccaccagcccccagtcccaaaaccaaggggcccccccccccacnaatggtttnanacttttccggnccacccncccacaatttttttttttttttttttttttttgaaagggaaaaaaatttttttaattacaaactcaattcatttggtgcatttcaaaggtgcaatacttttcttcatttatcagtgaaagaagttagaaattaacttcccaaaaaaatcagcaaatggcaaacaaatgtccttgaaagtcacagtcacatatagtgcgtcctagaaaagaggaggggcaagatgggctccacccactttcatgagtttcatcaaatactggatctactcaagggtggagagaaaaggcaactttcaaaaaggagtatgttattaaatgaggcatttactatactccttcctaagagcaccagatggggaacatgttttctaaactagatctaggaagtggaatgtggaatcaatccgtcctcctccccttaagggctaaccactggttaatgaattaaaaaaacaagactaaaaaacaaaccccacacacactcccccccaaaaaaagaggagggaaaaaaacaaaacaaaacactaagatgtcccagattactctccagagtggaaccagggagcagcttcaacaattccaattagtctgttacagagtcatccacaagcatgccttgcttttaaacaac

SEQ ID NO: 363471 - DNA, 1019 bp, Homo sapiens
aggaaggcaccagagattagcccttaaaagccttggttcacccttatgcaccaagattaagtttggaaggttggaaagtttcctcacctaaaaattggaactggcacccaaataagcttaaaaactagagagcctcacctggctgctctagggttcctcatatgcaaaacagaaataaggggattcccctgactggtccccatgttgttaagtgttctccccacccccaccctacccccagcttcttaatgaagcaggcctccatcctcctaacttgagaggatgtgaatcattccacagatgtctgtcttctagcaccacccctcgtatttcctctacataacaggtcttcagctgcattctaggaacaccatatactactgagctgcaaatctatgctaagcatataagacaatgactgaaagggaaaaaaatttttttaattacaaactcaattcatttggtgcatttcaaaggtgcaatacttttcttcatttatcagtgaaagaagttagaaattaacttcccaaaaaaatcagcaaatggcaaacaaatgtccttgaaagtcacagtcacatatagtgcgtcctagaaaagaggaggggcaagatgggctccacccactttcatgagtttcatcaaatactggatctactcaagggtggagagaaaaggcaactttcaaaaaggagtatgttattaaatgaggcatttactatactccttcctaagagcaccagatggggaacatgttttctaaactagatctaggaagtggaatgtggaatcaatccgtcctcctccccttaagggctaaccactggttaatgaattaaaaaaacaagactaaaaaacaaaccccacacacactcccccccaaaaaaagaggagggaaaaaaacaaaacaaaacactaagatgtcccagattactctccagagtggaaccagggagcagcttcaacaattccaattagtctgttacagagtcatccacaagcatgccttgcttttaaacaac

SEQ ID NO: 363472 - DNA, 5420 bp, Homo sapiens
ggcggaggcgcggggccacccccaagccgagccggggtgggacggcgcgcctggcgaccgcgcactgagactgccgtgccggacccccgagccggagccgagcgcgccgaggccggggccatggagaaagcgcggccgctgtgggccaactcgctacagttcgtgttcgcctgcatctcgtacgccgtgggcctgggcaacgtgtggcgattcccgtacctgtgccagatgtacggcggaggtagtttcctggtcccctacatcatcatgcttatcgtggagggaatgccgctcttgtacctggaactggctgtggggcagcgcatgcggcagggcagcatcggcgcctggaggaccatcagcccgtacctcagtggtgtcggggtcgccagcgtggtggtctctttcttcctctccatgtactacaacgtcatcaacgcctgggccttctggtacctcttccactccttccaggatcccctgccgtggtctgtctgcccactgaatggtaaccacacgggctacgatgaggagtgcgagaaggcgtcctccacacagtacttctggtacaggaaaaccctcaatatctcgccgtccctccaggagaacgggggtgtgcagtgggagccggcgctgtgcctcctcctggcctggctggtggtgtacctgtgcatcctgcgtggcaccgagtccactggcaaggtggtgtatttcacggcgtcactgccctattgcgtgctcatcatctacctcatcaggggcctcacgctccacggagccaccaatggcctcatgtacatgttcactcccaagatagagcagctggccaaccccaaggcctggatcaatgcagccacccagatcttcttctcacttggcctgggcttcggcagcctgatcgccttcgccagctacaatgagccatccaacaactgccagaagcacgccatcatcgtgtccctcatcaacagcttcacctccatatttgccagcattgtcaccttctccatctatggcttcaaggccaccttcaattatgaaaactgcttgaagaaggtgagtctgctgctgaccaacacttttgaccttgaagatggctttttgacagccagcaacctggagcaggtgaagggctacctcgcatctgcctacccaagcaaatacagcgagatgttcccgcaaatcaaaaactgcagcttggaatcggagctagacacggccgtccagggcactggcctggcattcatcgtctacacagaggccattaaaaacatggaggtgtcccagctgtggtcggtgctctacttcttcatgctgctgatgctgggcattgggagcatgctggggaacacagcggccatcctcacccctctgacagacagcaagatcatctccagccacctgcccaaggaggccatctcaggtctggtgtgccttgtcaactgtgccattggcatggtgttcacgatggaggctgggaactactggtttgacatattcaacgactacgcggccacactgtccctgctgctcatcgtgctggtggagacgattgccgtgtgctacgtgtacgggctgaggagatttgaaagtgaccttaaggccatgaccggccgagctgtgagctggtactggaaggtgatgtgggctggcgtaagcccactgctgattgtcagcctctttgtcttctacctgagcgactacatcctcacggggaccctgaagtatcaagcctgggacgcctcccagggccagctcgtgaccaaagattacccggcctatgcactggctgtcatcgggctgcttgtggcctcctccaccatgtgcatccccctggcggccctggggacttttgttcagcgtcgcctcaagaggggagacgcagaccccgtggcctgagatgtgggcttcccagccgctcacggttttacagatactatttacaggcggaaactcctcggctgctttttcaaatgcttaagccaggagtgctcagcccatcaacttcctgagtgtctaaagaagatgaggaaggtgtgcaggaagaaaactcccttgggagaacgcacaccctcccgtggtggctgttcctccctgtcacctgcctcctcatcatggaagggggtgggctatgaaagccggtctcaaagataactgcatccttcattccaggaaagccctagaattagggcacattgcaaactgaaatatgactataattcttatgggaccaaatttaagcaatttttgtttttggctgaagagacaccaaaatattagaggacaaatatttttagatccatttaaggagttttgaagtgcctaagatgacctatttgtcagtggtgcaaaattaattctcttcttttttgagttgtagtgaatatgcaatttctgtgttccccttccaccctttaaatcttaggatgacaagttataaagaaagaagatctttgtctgggacccccaaagggatcctttctctaaggtctctgacagtgggtccaggaccagacctctctacaaaaaattgccccaactacagtttgcaaccccaaaccacattagaagtctgtgcagacatccctccgtggtgtgtgtcttggtgcattggaaaaggagtcaggagccactgtgaggtgagaatgaaagtggatctcagctgggcacggtggctcacgcctgtaatcctagcaccttgggggtcaaggtgggtggatcacttgaggtcaggagtttgaggccagcctggccaacatggcgaaaccccatttctactaaaaatacaaaaaaattagctgggagtggtggcataggcctgtaattccagctactctggctgctgaggcacaagaatcatttgaacctaggaggtggcggttgctgtgagccaagatcatgccactccactccagtctgggcgacagagcaagactctgactcaaaaaaaaaaaaaagtggctctgactttcccataggcttaatattacatttggacatcgtggccaactctatcaagaccacaaataccacttacaattaattttaaattattcatctgtacatagttttctaaaatgtatataattcaaacagagcatcttgtaactgaagacacaccatatctatgatatcgcattagtccatgtggggaaaagaaagatcagattgttactgtgtctgtgtagaaaaggaagacataagaaactccattttgatctgtactaagaaaaattgtttctgctttgagatgttgttagcctataactttagccccaactctgtgctcacagaaacatgcgctgtaatgaatcaaagtttaatggatttagggctgtgcaggatgtgccttgttaacaatatgtttgcaggctgtatgcttggtagaagtcatcgccattctccattctcgattaaccagggacacaatgcacagcagaaagctgcagggacctctgcccaagaaagcctgggtattgtccaaggtttcccccccactgagacagcctgagatatggcctcatgggaagggaaagacctgactgtcccccagcccgacacctgtaaagggtcggtgctgaggaggaatagtgaaggagggaggcctctttgcagttgagataagaggaaggcttctgtctcctgcttgtccctggtaatggaatgtctcggtgtaaagctgaccattcccattcgttctattctgagataggagaaaaccgccctgtggctggaggtgagatatgctggcagcaatactgctctgttactccttgctacactgagatgtttgggtaaagagaaacataaatctagcctacgtgcacatctgggcacagtacctttccttgaacttattcgtgatacagattcctttgctcacatgtttccctgctgaccttcttcccacctgttgccctgctacactcccctcgctaagacagtaaaaataatgatcaataaatactgagggaactcagaggccagcgccggtgcgggtcctccacatgctgagcgccggtcctgggcccactgttctttctctatactttgtctctgtgtcttatttcttttctcaaaaaaatttttctttttttaactgcaataaagtaggtcgttacccctaaagtgagcgagtcccttcctgctctaacgtccagtgcttccttgagatcatggaattctggagagtttctgtggatatatttgcacagatatctttgaagacacaaacactcacctgggacgttggccggagatgtctttttatttttgtgctgtaaaattctcttacagcaaaaataggctttagaaaggtcttctactgtcttcagcaaccatctcatcttccagcttcacctgattgtccagttatcatacatttgactttcaaatgtatgaaccagcatgtaccccatggatttaatcttatctaccccgtggattcaatcttcttatcagaaggttcttttatgtcaaaaaacctgctgtcaaggcttgaagagccggcacactcaatggcaaacacagcaccgagtctgctctgaatcctggaggatctggccctcctctcaacccccactcacagtcaccgtcttacaactcagggccacctgggatcagtcatcagtcagggtgcgtaagccttgaataccaggtagccgcaggagtgaaaagataaatgtcctagatcattaccttattcagtgtccccaccttgcagcgcattccaaccacctgggagcatttaaaactccagatgcccacaccacaccctggggccacccatcagaccttctggaagcaagacctgggcctccatggccccaaaaactccctaggtgatccgatgtgcagccaaatttgagaggccccatttaaaaaagaaagaacatgggtggtacattgaggagtatttacattttataaaatgacttaaaaatttgaaggcatttttgagcatttccaattatatggaagagttacttctacggaatagtttttgctcatggaactcaaacagatgaagcaccactgttacagaataatgtgctccagatgaaaatgtctcgtttctgtgaatttcatgaagagcagaacatttctcaagaatcctcttgagccagtaatcaatcctgtctcaaaaaatgttctttgccatttcctagatactgcacaaaagtggccatgtcgacatttgtccacccaccctccaataagctggagcgacaaagggacattccatccctgtacccttagtggtagccatgacacgatggccagatcatggactccggaaagctttctgtttttactggaaacatagcaaaccttgatttagctccaagaaattgagtagggaaatatttgttttttagcaattgtcatagtaaataaaactctaagcaaatgtgtgtaca

SEQ ID NO: 363473 - DNA, 5309 bp, Homo sapiens
ggcggaggcgcggggccacccccaagccgagccggggtgggacggcgcgcctggcgaccgcgcactgagactgccgtgccggacccccgagccggagccgagcgcgccgaggccggggccatggagaaagcgcggccgctgtgggccaactcgctacagttcgtgttcgcctgcatctcgtacgccgtgggcctgggcaacgtgtggcgattcccgtacctgtgccagatgtacggcggaggtagtttcctggtcccctacatcatcatgcttatcgtggagggaatgccgctcttgtacctggaactggctgtggggcagcgcatgcggcagggcagcatcggcgcctggaggaccatcagcccgtacctcagtggtgtcggggtcgccagcgtggtggtctctttcttcctctccatgtactacaacgtcatcaacgcctgggccttctggtacctcttccactccttccaggatcccctgccgtggtctgtctgcccactgaatggtaaccacacgggctacgatgaggagtgcgagaaggcgtcctccacacagtacttctggtacaggaaaaccctcaatatctcgccgtccctccaggagaacgggggtgtgcagtgggagccggcgctgtgcctcctcctggcctggctggtggtgtacctgtgcatcctgcgtggcaccgagtccactggcaagatagagcagctggccaaccccaaggcctggatcaatgcagccacccagatcttcttctcacttggcctgggcttcggcagcctgatcgccttcgccagctacaatgagccatccaacaactgccagaagcacgccatcatcgtgtccctcatcaacagcttcacctccatatttgccagcattgtcaccttctccatctatggcttcaaggccaccttcaattatgaaaactgcttgaagaaggtgagtctgctgctgaccaacacttttgaccttgaagatggctttttgacagccagcaacctggagcaggtgaagggctacctcgcatctgcctacccaagcaaatacagcgagatgttcccgcaaatcaaaaactgcagcttggaatcggagctagacacggccgtccagggcactggcctggcattcatcgtctacacagaggccattaaaaacatggaggtgtcccagctgtggtcggtgctctacttcttcatgctgctgatgctgggcattgggagcatgctggggaacacagcggccatcctcacccctctgacagacagcaagatcatctccagccacctgcccaaggaggccatctcaggtctggtgtgccttgtcaactgtgccattggcatggtgttcacgatggaggctgggaactactggtttgacatattcaacgactacgcggccacactgtccctgctgctcatcgtgctggtggagacgattgccgtgtgctacgtgtacgggctgaggagatttgaaagtgaccttaaggccatgaccggccgagctgtgagctggtactggaaggtgatgtgggctggcgtaagcccactgctgattgtcagcctctttgtcttctacctgagcgactacatcctcacggggaccctgaagtatcaagcctgggacgcctcccagggccagctcgtgaccaaagattacccggcctatgcactggctgtcatcgggctgcttgtggcctcctccaccatgtgcatccccctggcggccctggggacttttgttcagcgtcgcctcaagaggggagacgcagaccccgtggcctgagatgtgggcttcccagccgctcacggttttacagatactatttacaggcggaaactcctcggctgctttttcaaatgcttaagccaggagtgctcagcccatcaacttcctgagtgtctaaagaagatgaggaaggtgtgcaggaagaaaactcccttgggagaacgcacaccctcccgtggtggctgttcctccctgtcacctgcctcctcatcatggaagggggtgggctatgaaagccggtctcaaagataactgcatccttcattccaggaaagccctagaattagggcacattgcaaactgaaatatgactataattcttatgggaccaaatttaagcaatttttgtttttggctgaagagacaccaaaatattagaggacaaatatttttagatccatttaaggagttttgaagtgcctaagatgacctatttgtcagtggtgcaaaattaattctcttcttttttgagttgtagtgaatatgcaatttctgtgttccccttccaccctttaaatcttaggatgacaagttataaagaaagaagatctttgtctgggacccccaaagggatcctttctctaaggtctctgacagtgggtccaggaccagacctctctacaaaaaattgccccaactacagtttgcaaccccaaaccacattagaagtctgtgcagacatccctccgtggtgtgtgtcttggtgcattggaaaaggagtcaggagccactgtgaggtgagaatgaaagtggatctcagctgggcacggtggctcacgcctgtaatcctagcaccttgggggtcaaggtgggtggatcacttgaggtcaggagtttgaggccagcctggccaacatggcgaaaccccatttctactaaaaatacaaaaaaattagctgggagtggtggcataggcctgtaattccagctactctggctgctgaggcacaagaatcatttgaacctaggaggtggcggttgctgtgagccaagatcatgccactccactccagtctgggcgacagagcaagactctgactcaaaaaaaaaaaaaagtggctctgactttcccataggcttaatattacatttggacatcgtggccaactctatcaagaccacaaataccacttacaattaattttaaattattcatctgtacatagttttctaaaatgtatataattcaaacagagcatcttgtaactgaagacacaccatatctatgatatcgcattagtccatgtggggaaaagaaagatcagattgttactgtgtctgtgtagaaaaggaagacataagaaactccattttgatctgtactaagaaaaattgtttctgctttgagatgttgttagcctataactttagccccaactctgtgctcacagaaacatgcgctgtaatgaatcaaagtttaatggatttagggctgtgcaggatgtgccttgttaacaatatgtttgcaggctgtatgcttggtagaagtcatcgccattctccattctcgattaaccagggacacaatgcacagcagaaagctgcagggacctctgcccaagaaagcctgggtattgtccaaggtttcccccccactgagacagcctgagatatggcctcatgggaagggaaagacctgactgtcccccagcccgacacctgtaaagggtcggtgctgaggaggaatagtgaaggagggaggcctctttgcagttgagataagaggaaggcttctgtctcctgcttgtccctggtaatggaatgtctcggtgtaaagctgaccattcccattcgttctattctgagataggagaaaaccgccctgtggctggaggtgagatatgctggcagcaatactgctctgttactccttgctacactgagatgtttgggtaaagagaaacataaatctagcctacgtgcacatctgggcacagtacctttccttgaacttattcgtgatacagattcctttgctcacatgtttccctgctgaccttcttcccacctgttgccctgctacactcccctcgctaagacagtaaaaataatgatcaataaatactgagggaactcagaggccagcgccggtgcgggtcctccacatgctgagcgccggtcctgggcccactgttctttctctatactttgtctctgtgtcttatttcttttctcaaaaaaatttttctttttttaactgcaataaagtaggtcgttacccctaaagtgagcgagtcccttcctgctctaacgtccagtgcttccttgagatcatggaattctggagagtttctgtggatatatttgcacagatatctttgaagacacaaacactcacctgggacgttggccggagatgtctttttatttttgtgctgtaaaattctcttacagcaaaaataggctttagaaaggtcttctactgtcttcagcaaccatctcatcttccagcttcacctgattgtccagttatcatacatttgactttcaaatgtatgaaccagcatgtaccccatggatttaatcttatctaccccgtggattcaatcttcttatcagaaggttcttttatgtcaaaaaacctgctgtcaaggcttgaagagccggcacactcaatggcaaacacagcaccgagtctgctctgaatcctggaggatctggccctcctctcaacccccactcacagtcaccgtcttacaactcagggccacctgggatcagtcatcagtcagggtgcgtaagccttgaataccaggtagccgcaggagtgaaaagataaatgtcctagatcattaccttattcagtgtccccaccttgcagcgcattccaaccacctgggagcatttaaaactccagatgcccacaccacaccctggggccacccatcagaccttctggaagcaagacctgggcctccatggccccaaaaactccctaggtgatccgatgtgcagccaaatttgagaggccccatttaaaaaagaaagaacatgggtggtacattgaggagtatttacattttataaaatgacttaaaaatttgaaggcatttttgagcatttccaattatatggaagagttacttctacggaatagtttttgctcatggaactcaaacagatgaagcaccactgttacagaataatgtgctccagatgaaaatgtctcgtttctgtgaatttcatgaagagcagaacatttctcaagaatcctcttgagccagtaatcaatcctgtctcaaaaaatgttctttgccatttcctagatactgcacaaaagtggccatgtcgacatttgtccacccaccctccaataagctggagcgacaaagggacattccatccctgtacccttagtggtagccatgacacgatggccagatcatggactccggaaagctttctgtttttactggaaacatagcaaaccttgatttagctccaagaaattgagtagggaaatatttgttttttagcaattgtcatagtaaataaaactctaagcaaatgtgtgtaca

SEQ ID NO: 363474 - DNA, 1352 bp, Homo sapiens
acctttattcatcaaatttgtcacttgtcagttgttttaaagtatgtcgtcacggataaccctagcgagtcccttcctgctctaacgtccagtgcttccttgagatcatggaattctggagagtttctgtggatatatttgcacagatatctttgaagacacaaacactcacctgggacgttggccggagatgtctttttatttttgtgctgtaaaattctcttacagcaaaaataggctttagaaaggtcttctactgtcttcagcaaccatctcatcttccagcttcacctgattgtccagttatcatacatttgactttcaaatgtatgaaccagcatgtaccccatggatttaatcttatctaccccgtggattcaatcttcttatcagaaggttcttttatgtcaaaaaacctgctgtcaaggcttgaagagccggcacactcaatggcaaacacagcaccgagtctgctctgaatcctggaggatctggccctcctctcaacccccactcacagtcaccgtcttacaactcagggccacctgggatcagtcatcagtcagggtgcgtaagccttgaataccaggtagccgcaggagtgaaaagataaatgtcctagatcattaccttattcagtgtccccaccttgcagcgcattccaaccacctgggagcatttaaaactccagatgcccacaccacaccctggggccacccatcagaccttctggaagcaagacctgggcctccatggccccaaaaactccctaggtgatccgatgtgcagccaaatttgagaggccccatttaaaaaagaaagaacatgggtggtacattgaggagtatttacattttataaaatgacttaaaaatttgaaggcatttttgagcatttccaattatatggaagagttacttctacggaatagtttttgctcatggaactcaaacagatgaagcaccactgttacagaataatgtgctccagatgaaaatgtctcgtttctgtgaatttcatgaagagcagaacatttctcaagaatcctcttgagccagtaatcaatcctgtctcaaaaaatgttctttgccatttcctagatactgcacaaaagtggccatgtcgacatttgtccacccaccctccaataagctggagcgacaaagggacattccatccctgtacccttagtggtagccatgacacgatggccagatcatggactccggaaagctttctgtttttactggaaacatagcaaaccttgatttagctccaagaaattgagtagggaaatatttgttttttagcaattgtcatagtaaataaaactctaagcaaatgtgtgtaca

SEQ ID NO: 363475 - DNA, 2178 bp, Homo sapiens
ggcggaggcgcggggccacccccaagccgagccggggtgggacggcgcgcctggcgaccgcgcactgagactgccgtgccggacccccgagccggagccgagcgcgccgaggccggggccatggagaaagcgcggccgctgtgggccaactcgctacagttcgtgttcgcctgcatctcgtacgccgtgggcctgggcaacgtgtggcgattcccgtacctgtgccagatgtacggcggaggtagtttcctggtcccctacatcatcatgcttatcgtggagggaatgccgctcttgtacctggaactggctgtggggcagcgcatgcggcagggcagcatcggcgcctggaggaccatcagcccgtacctcagtggtgtcggggtcgccagcgtggtggtctctttcttcctctccatgtactacaacgtcatcaacgcctgggccttctggtacctcttccactccttccaggatcccctgccgtggtctgtctgcccactgaatggtaaccacacgggctacgatgaggagtgcgagaaggcgtcctccacacagtacttctggtacaggaaaaccctcaatatctcgccgtccctccaggagaacgggggtgtgcagtgggagccggcgctgtgcctcctcctggcctggctggtggtgtacctgtgcatcctgcgtggcaccgagtccactggcaaggtggtgtatttcacggcgtcactgccctattgcgtgctcatcatctacctcatcaggggcctcacgctccacggagccaccaatggcctcatgtacatgttcactcccaagatagagcagctggccaaccccaaggcctggatcaatgcagccacccagatcttcttctcacttggcctgggcttcggcagcctgatcgccttcgccagctacaatgagccatccaacaactgccagaagcacgccatcatcgtgtccctcatcaacagcttcacctccatatttgccagcattgtcaccttctccatctatggcttcaaggccaccttcaattatgaaaactgcttgaagaaggtgagtctgctgctgaccaacacttttgaccttgaagatggctttttgacagccagcaacctggagcaggtgaagggctacctcgcatctgcctacccaagcaaatacagcgagatgttcccgcaaatcaaaaactgcagcttggaatcggagctagacacggccgtccagggcactggcctggcattcatcgtctacacagaggccattaaaaacatggaggtgtcccagctgtggtcggtgctctacttcttcatgctgctgatgctgggcattgggagcatgctggggaacacagcggccatcctcacccctctgacagacagcaagatcatctccagccacctgcccaaggaggccatctcaggtctggtgtgccttgtcaactgtgccattggcatggtgttcacgatggaggctgggaactactggtttgacatattcaacgactacgcggccacactgtccctgctgctcatcgtgctggtggagacgattgccgtgtgctacgtgtacgggctgaggagatttgaaagtgaccttaaggccatgaccggccgagctgtgagctggtactggaaggtgatgtgggctggcgtaagcccactgctgattgtcagcctctttgtcttctacctgagcgactacatcctcacggggaccctgaagtatcaagcctgggacgcctcccagggccagctcgtgaccaaagattacccggcctatgcactggctgtcatcgggctgcttgtggcctcctccaccatgtgcatccccctggcggccctggggacttttgttcagcgtcgcctcaagaggggagacgcagaccccgtggcctgagatgtgggcttcccagccgctcacggttttacagatactatttacaggcggaaactcctcggctgctttttcaaatgcttaagccaggagtgctcagcccatcaacttcctgagtgtctaaagaagatgaggaaggtgtgcaggaagaaaactcccttgggagaacgcacaccctcccgtggtggctgttcctccctgtcacctgcctcctcatcatggaagggggtgggctatgaaagccggtcacgagatgtaccgagctgattcactgcctgtcac

SEQ ID NO: 363476 - DNA, 2440 bp, Homo sapiens
  misc_feature (567)..(567): n is a, c, g, or t
  misc_feature (807)..(807): n is a, c, g, or t
ggatcacctcctcagccaggtcatccccactccctgttaattctggagcattaagtctttctttcagcttctcctcttcatcctcactgtcccccaactgctgcacccctgccactgcctcacctcaagcccctttcagactgtggaccaagctttttgccatgagcaccactctggtcatcttgcttgcctgcttacatggttccacgcacccgtttccctacagagtttcccaacccacccattctccatgcaccccacacccagggttcatccatggagggtgcactcttgcctttgggatggggcaagttcttcatttggcaaatgcagtccctagaaataaaatgactgtgtcatccttccccttccccattccagacgccaccgatgtcagtgccgagagtcaacccacacctagacctcccctgccaggccacaccccctccatctctgaatgcccagacctgtgcagtaactgcctatgaatcagggccccatttgtgttttaattattttaccctgcagtattccattgcacacctccgcactggcgtatagtggtgngcatagctgcttctggttacacacctcctatggctgaggtgctatggaggatacgtagcaccttatgtcctccacatagcacctgtattctccacagcaccttagccctgggaggtgtgcagcttgaggtgtgtgtttcatctgccagggagtggatggggccaggagagctggtctccagccctaggggtgcccctgatggctgcgtgctgtaggtgagctccttcccctctctgggcnactctcctgttgcgggtctgagcatttgggattccacccagggatcatcagccctgtccctgctggccttccagatagagcagctggccaaccccaaggcctggatcaatgcagccacccagatcttcttctcacttggcctgggcttcggcagcctgatcgccttcgccagctacaatgagccatccaacaactgccagaagcacgccatcatcgtgtccctcatcaacagcttcacctccatatttgccagcattgtcaccttctccatctatggcttcaaggccaccttcaattatgaaaactgcttgaagaaggtgagtctgctgctgaccaacacttttgaccttgaagatggctttttgacagccagcaacctggagcaggtgaagggctacctcgcatctgcctacccaagcaaatacagcgagatgttcccgcaaatcaaaaactgcagcttggaatcggagctagacacggccgtccagggcactggcctggcattcatcgtctacacagaggccattaaaaacatggaggtgtcccagctgtggtcggtgctctacttcttcatgctgctgatgctgggcattgggagcatgctggggaacacagcggccatcctcacccctctgacagacagcaagatcatctccagccacctgcccaaggaggccatctcaggtctggtgtgccttgtcaactgtgccattggcatggtgttcacgatggaggctgggaactactggtttgacatattcaacgactacgcggccacactgtccctgctgctcatcgtgctggtggagacgattgccgtgtgctacgtgtacgggctgaggagatttgaaagtgaccttaaggccatgaccggccgagctgtgagctggtactggaaggtgatgtgggctggcgtaagcccactgctgattgtcagcctctttgtcttctacctgagcgactacatcctcacggggaccctgaagtatcaagcctgggacgcctcccagggccagctcgtgaccaaagattacccggcctatgcactggctgtcatcgggctgcttgtggcctcctccaccatgtgcatccccctggcggccctggggacttttgttcagcgtcgcctcaagaggggagacgcagaccccgtggcctgagatgtgggcttcccagccgctcacggttttacagatactatttacaggcggaaactcctcggctgctttttcaaatgcttaagccaggagtgctcagcccatcaacttcctgagtgtctaaagaagatgaggaaggtgtgcaggaagaaaactcccttgggagaacgcacaccctcccgtggtggctgttcctccctgtcacctgcctcctcatcatggaagggggtgggctatgaaagccggtctcaaagataactgcatccttcattccaggaaagccctagaattagggcacattgcaaactgaaatatgactataattcttatgggaccaaatttaagcaatttttgtttttggctgaagagacaccaaaatattagaggacaaatatttttagatccatttaaggagttttgaagtgcctaagatgacctatttgtcagtggtgcaaaattaattctcttcttttttg

SEQ ID NO: 363477 - DNA, 559 bp, Homo sapiens
ggcggaggcgcggggccacccccaagccgagccggggtgggacggcgcgcctggcgaccgcgcactgagactgccgtgccggacccccgagccggagccgagcgcgccgaggccggggccatggagaaagcgcggccgctgtgggccaactcgctacagttcgtgttcgcctgcatctcgtacgccgtgggcctgggcaacgtgtggcgattcccgtacctgtgccagatgtacggcggagtcatgtaagacgtgcctacttgcccttcaccttcttccaaaattgcaagtttcctgaggcctccccagccatgcttcctgtacagcctgtggaactgttgactgggtttgactccaaatgggaaacttttgggggaagaccaagatggaggcgagtgaatgaagagaaggaaggcgctggggtggagagtctcacagaatagagcagtggttcccaaagtggaacccccaggccagcagcttcagcatcccctggtgtgctcggtgttccttacattaaacattacattaaacattgtgtatatgcacacacatacac

SEQ ID NO: 363478 - DNA, 1995 bp, Homo sapiens
ggcggaggcgcggggccacccccaagccgagccggggtgggacggcgcgcctggcgaccgcgcactgagactgccgtgccggacccccgagccggagccgagcgcgccgaggccggggccatggagaaagcgcggccgctgtgggccaactcgctacagttcgtgttcgcctgcatctcgtacgccgtgggcctgggcaacgtgtggcgattcccgtacctgtgccagatgtacggcggaggtagtttcctggtcccctacatcatcatgcttatcgtggagggaatgccgctcttgtacctggaactggctgtggggcagcgcatgcggcagggcagcatcggcgcctggaggaccatcagcccgtacctcagtggtgtcggggtcgccagcgtggtggtctctttcttcctctccatgtactacaacgtcatcaacgcctgggccttctggtacctcttccactccttccaggatcccctgccgtggtctgtctgcccactgaatggtaaccacacgggctacgatgaggagtgcgagaaggcgtcctccacacagtacttctggtacaggaaaaccctcaatatctcgccgtccctccaggagaacgggggtgtgcagtgggagccggcgctgtgcctcctcctggcctggctggtggtgtacctgtgcatcctgcgtggcaccgagtccactggcaaggtggtgtatttcacggcgtcactgccctattgcgtgctcatcatctacctcatcaggggcctcacgctccacggagccaccaatggcctcatgtacatgttcactcccaagatagagcagctggccaaccccaaggcctggatcaatgcagccacccagatcttcttctcacttggcctgggcttcggcagcctgatcgccttcgccagctacaatgagccatccaacaactgccagaagcacgccatcatcgtgtccctcatcaacagcttcacctccatatttgccagcattgtcaccttctccatctatggcttcaaggccaccttcaattatgaaaactgcttgaagaaggtgagtctgctgctgaccaacacttttgaccttgaagatggctttttgacagccagcaacctggagcaggtgaagggctacctcgcatctgcctacccaagcaaatacagcgagatgttcccgcaaatcaaaaactgcagcttggaatcggagctagacacggccgtccagggcactggcctggcattcatcgtctacacagaggccattaaaaacatggaggtgtcccagctgtggtcggtgctctacttcttcatgctgctgatgctgggcattgggagcatgctggggaacacagcggccatcctcacccctctgacagacagcaagatcatctccagccacctgcccaaggaggccatctcaggtctggtgtgccttgtcaactgtgccattggcatggtgttcacgatggaggctgggaactactggtttgacatattcaacgactacgcggccacactgtccctgctgctcatcgtgctggtggagacgattgccgtgtgctacgtgtacgggctgaggagatttgaaagtgaccttaaggccatgaccggccgagctgtgagccaccgtgcccggctgaagatttttcttaattgcaataaatattcagcattttttctaatgaaaatgaattttgtttaccagtaaaagtatgcattttaaaagactttcagatttatgctttttacgtgaagctgctaactaaaagtaaatggaagaaaccaagtctagtaggttttttctttttttttgtgggggtgggatgggggaggttagttacacttaaaatatcttctccagagactgtatgctcctatactagactgtaagctctttgagggcagtctgtcagatttatctttgtatcttccccagcgcctagtgtagtgccttgcacataataggcgcccaataaatattgatgaagaaaaa

SEQ ID NO: 363479 - DNA, 372 bp, Homo sapiens
  misc_feature (361)..(361): n is a, c, g, or t
tataaaccaagagctgcttgctggttaggcagaaaccaaatttcctcctagctctgccttgcattttcaatcagaattacttgtttgttacaatatgattttcttcaaaaatagatgctctgaggcaaaaggcgagccacaggctatatgttgaatagaaggttgattagttggccgaacttcaggagtgggagcctgaagccatgcttcctagggaaataactccctctctgatagtttgttttgctaattactagtcccaatttgagctcaatattaccaacaattgctttatagttacttatgagtcaggttcaacattttatgctgattttacttgcacttaaacaaatagaaagtntattttctggg

SEQ ID NO: 363480 - DNA, 467 bp, Homo sapiens
tgttggcatatgttttgtgatctactttttcacttactgtgtggttactacttccccatgtcgttaaatagtcatatataatttttaatggttgcatagactttgttctagccagaagatgtactgtggtttgaccaatcccctcttatagggcatttaggttattttgagtattttctatcaatacagcattggacatctgcatagataaatctgtcgacataattctgattatttccttaggagagagtgctaaaaaaaaaaaaaggacttgctggtcaaacaatgtacatatttttaaaggctattgatagatatagctaaattcctctctaggaattctatattaagataataattatttcaccaggcatggtggctcatgcctgtaatcccagtactttgagaggctgaggtgagaggatcgcttgaggccaggagttcaagatcccatctctacaaaaagt

SEQ ID NO: 363481 - DNA, 567 bp, Homo sapiens
gagatacgttttgtgtgccttgaacagtgatggcccatagatagttgggttttttaatttttaaatgttcatatgttaccagtacctaaccatgagaatatttcctattttaaaacaattctatactaatttctgttttttttgtttttgtttttgtttttttgttttttaatcaaagttcagctgctgagttcaggttcaagttttgtaagaatttgctggatgtgggaacagctgtctcctctagacagaccctagctctccagttggccaccacccctgctgcacttagtggtctcaaacctgggcacttcaccctttcacacaactggccaggctgcaggagacattcgactttgggagccctcctttatgatatgcaaattcccataggcttttcccagttctgcctccaccagtatcacggtggaggcagggcggggcttacggtccccacttcacagatgcaaaaactgaggttcaaagagcataagtgacacgactagtcccaaagccaataagttgatgctaatccttctgtctctaagactaatgtacttttcagag

SEQ ID NO: 363482 - DNA, 444 bp, Homo sapiens
gttgtttttatcgtgagttccacaagtgagcaacatttgcagccttgcctaggagacctaggtagtaccaggagggactgattctacaaagcatgcttggccagaggccttcacagaggcaaagtccctttggagaccacataaggagttccagcagaggccaggcctggctgacccacccctgttcctgggccccggatcctggaccaggccagctcagccctgaggagacaggtctggagaaatgtcctgctctcttccctgatccacctcagccctggagactccgggatcaaaacttatgtcttgtctattacccctcctagaatgtaagctccatgcatgcaaggaattttgtttgtttaatcatctactgtagccccagtgcctagaacaatgctgtcacacaaaagcaaaataaatagttgtcagatgaatgacaaa

SEQ ID NO: 363483 - DNA, 598 bp, Homo sapiens
ggacgtgtgtgagtacggaatcaaaggaagcgctgtatctggtcatttcacgagcaggacacagataccattgcggtccttacacacgtttcatcagcatctccagtagttcatgttcacgtcctccatctccgtttggttgctgttgcacattggagtgtgaactgcaaaaatccccaaaaatcccagatcgacagcatatcttgtgcaggccctccaaaccttctgctgcctctaagataaaagctcaacttcttaacagtgtacagtgtgcaacttccaacctttttatctgttctctccaccttcagtttagcgtcattccaaaaccacacccttgcaaagctttgtactccgcaccccagatgatctccaggcagctcagatctctttcctgcctttgccctgcactgttccccggtacttcctcctttattgtagcactcagctccccagccaatctgtacatccctcagaggcagcgatctgatgaattggtttttgaatcccagaaagggtctgccatggagttggcagtcatcacggtagatggcgtatgattttgctgaattttaaataaaatgaaaaccataaatta

SEQ ID NO: 363484 - DNA, 796 bp, Homo sapiens
tgcgctctgctggacccccgctccttgctggtactgcagctcctccagcccagccccttgccaagaaaaaagtcgtaaagcggagagcagatactaccacccctacacctacagccatcttggctcctgggtctccagctagccctcctgggagtcttgagcctaaggcagcacggcttccccctatgcgtagagagagtggtcgccccatcaagcccccacgcaaagacttgcctgactctcagcaacaacaccagagctctaagaaaggaaagctttcagaacagttaaaacattgcaatggcattttgaaggagttactctctaagaagcatgctgcctatgcttggcctttctataaaccagtggacgcttctgcacttggcctgcatgactaccatgacatcattaagcaccccatggaccaacagaaacgggaagagaacaccaacacatacgtccagagtgggtacttgtctgtacgcttcacccgaacagttggaaggatctgagtatgatgccaagtcagatatgtacagcttgggtgtggtcctgctagagctctttcagccgtttggaacagaaatggagcgagcagaagttctaacaggtttaagaactggtcagttgccggaatccctccgtaaaaggtgtccagtgcaagccaagtatatccagcacttaacgagaaggaactcatcgcagagaccatctgccattcagctgctgcagagtgaacttttccaaaattctggaaatgtatgtgcttttctttctcttggtcctggagtgaagg

SEQ ID NO: 363485 - DNA, 656 bp, Homo sapiens
agtacctactaacgtttcagctttcaaaacgaacttaccttcccaagcactgaattcaagtccagcgcattggtggttaaagtcgtgggctcatccgcttggattatgttggttacatccaagtctgcatctggtgtttgaatcatcttggagaggccatcaactgcagctttcaactcatacagacgttttaaaatatcatcttggcgggactcaagagcttgcagagacaggttagactcttcctaaacaaaccaacagccaaatgttcatttcctctcccatcagaccagtgttgtttaaatttgatcacttgtcttactttgccatgcactcaccaaacctcccaccctttaaaagaagacattatgggctgggtgtggtggctcacgcctgtaatcccagcactttgggaagccaaggcgggcagatcatgaggtcaggagatcgagaccatcctggccaacgtggtgaaaccccatttctactaaaaatacaaaaaaattcgccgggcgtggtggcgggcacctgtagtcccagctactcgggaggctgaggcaggagaatggcatgaacccgggcagcagagcttgtggtgagcggagatcgcgccactacactccagcctgggcgacagagtgagactccgtctcaaa

SEQ ID NO: 363486 - DNA, 855 bp, Homo sapiens
  misc_feature (780)..(780): n is a, c, g, or t
  misc_feature (795)..(795): n is a, c, g, or t
  misc_feature (797)..(797): n is a, c, g, or t
ggttttccgtctggtgaggggttacttccgggtcggacggcgctagctgcagcatcggagtgtggcagtgctgggctggccggcgggctgggctgcggcccgcgcgcggccggcgatgcaggggggcaactccggggtccgcaagcgcgaagaggagggcgacggggctggggctgtggctgcgccgccggccatcgactttcccgccgagggcccggaccccgaatatgacgttgcaaaccaactcttgctggtttctttgctggagcacttgagccacgtgcatgaaccaaacccacttcgttcaagacaggtgtttaagctactttgccagacgtttatcaaaatggggctgctgtcttctttcacttgtagtgacgagtttagctcattgagactacatcacaacagagctattactcacttaatgaggtctgctaaagagagagttcgtcaggatccttgtgaggatatttctcgtatccagaaaatcagatcaagggaagtagccttggaagcacaaacttcacgttacttaaatgaatttgaagaacttgccatcttaggaaaaggtggatacggaagagtatacaaggtcaggaataaattagatggtcagtattatgcaataaaaaaaatcctgattaagggtgcaactaaaacagtttgcatgaaggtcctacgggaagtgaaggtgctggcaggtcttcagcaccccaatattgttggctatcacaccgcgtggatagaacatgttcatgtgattcagccacgagcagncgagctgccattgantngcataccttgaagttgcaccccgaccagggagaagaccgcaagcacggggggtcagca

SEQ ID NO: 363487 - DNA, 2856 bp, Homo sapiens
ggttttccgtctggtgaggggttacttccgggtcggacggcgctagctgcagcatcggagtgtggcagtgctgggctggccggcgggctgggctgcggcccgcgcgcggccggcgatgcaggggggcaactccggggtccgcaagcgcgaagaggagggcgacggggctggggctgtggctgcgccgccggccatcgactttcccgccgagggcccggaccccgaatatgacgaatctgatgttccagcagaaatccaggtgttaaaagaacccctacaacagccaaccttcccttttgcagttgcaaaccaactcttgctggtttctttgctggagcacttgagccacgtgcatgaaccaaacccacttcgttcaagacaggtgtttaagctactttgccagacgtttatcaaaatggggctgctgtcttctttcacttgtagtgacgagtttagctcattgagactacatcacaacagagctattactcacttaatgaggtctgctaaagagagagttcgtcaggatccttgtgaggatatttctcgtatccagaaaatcagatcaagggaagtagccttggaagcacaaacttcacgttacttaaatgaatttgaagaacttgccatcttaggaaaaggtggatacggaagagtatacaaggtcaggaataaattagatggtcagtattatgcaataaaaaaaatcctgattaagggtgcaactaaaacagtttgcatgaaggtcctacgggaagtgaaggtgctggcaggtcttcagcaccccaatattgttggctatcacaccgcgtggatagaacatgttcatgtgattcagccacgagcagacagagctgccattgagttgccatctctggaagtgctctccgaccaggaagaggacagagagcaatgtggtgttaaaaatgatgaaagtagcagctcatccattatctttgctgagcccaccccagaaaaagaaaaacgctttggagaatctgacactgaaaatcagaataacaagtcggtgaagtacaccaccaatttagtcataagagaatctggtgaacttgagtcgaccctggagctccaggaaaatggcttggctggtttgtctgccagttcaattgtggaacagcagctgccactcaggcgtaattcccacctagaggagagtttcacatccaccgaagaatcttccgaagaaaatgtcaactttttgggtcagacagaggcacagtaccacctgatgctgcacatccagatgcagctgtgtgagctctcgctgtgggattggatagtcgagagaaacaagcggggccgggagtatgtggacgagtctgcctgtccttatgttatggccaatgttgcaacaaaaatttttcaagaattggtagaaggtgtgttttacatacataacatgggaattgtgcaccgagatctgaagccaagaaatatttttcttcatggccctgatcagcaagtaaaaataggagactttggtctggcctgcacagacatcctacagaagaacacagactggaccaacagaaacgggaagagaacaccaacacatacgtccagagtgggtacttgtctgtacgcttcacccgaacagttggaaggatctgagtatgatgccaagtcagatatgtacagcttgggtgtggtcctgctagagctctttcagccgtttggaacagaaatggagcgagcagaagttctaacaggtttaagaactggtcagttgccggaatccctccgtaaaaggtgtccagtgcaagccaagtatatccagcacttaacgagaaggaactcatcgcagagaccatctgccattcagctgctgcagagtgaacttttccaaaattctggaaatgttaacctcaccctacagatgaagataatagagcaagaaaaagaaattgcagaactaaagaagcagctaaacctcctttctcaagacaaaggggtgagggatgacggaaaggatgggggcgtgggatgaaagtggacttaacttttaaggtagttaactggaatgtaaatttttaatctttattagggtatagttggtacaatgcttcgttgtatttagtaagcctttacaagacttgttaaagatgtcagagtgccccaagctgccgttccttcccttcctgccccacaagctccttttcctgaatttcctacctaaatattaaccatatgcctagtctctgaaactaaaaacttggacctcatcctcaattattttctcctttcaactctgttgaccctctgtctggtcttcctctagaaggttctaccgcagaaattgatgtgtgctccctgccctcgtcactgcccaagcccgggcctgcacatactcactggactgttccagttttgacagctgccagtcttcctgcccctttcacactgcagctgaagttcattacctgaaggacgcctcatcatttcattccttggctccaaaccttctgctgcctctaagataaaagctcaacttcttaacagtgtacagtgtgcaacttccaacctttttatctgttctctccaccttcagtttagcgtcattccaaaaccacacccttgcaaagctttgtactccgcaccccagatgatctccaggcagctcagatctctttcctgcctttgccctgcactgttccccggtacttcctcctttattgtagcactcagctccccagccaatctgtacatccctcagaggcagcgatctgatgaattggtttttgaatcccagaaagggtctgccatggagttggcagtcatcacggtagatggcgtatgattttgctgaattttaaataaaatgaaaaccataaatta

SEQ ID NO: 363488 - DNA, 4069 bp, Homo sapiens
tctctcgctcctcattcccccctccccaatcgctagtagaggctgtttgaatcggcgcagtgctgggctggccggcgggctgggctgcggcccgcgcgcggccggcgatgcaggggggcaactccggggtccgcaagcgcgaagaggagggcgacggggctggggctgtggctgcgccgccggccatcgactttcccgccgagggcccggaccccgaatatgacgaatctgatgttccagcagaaatccaggtgttaaaagaacccctacaacagccaaccttcccttttgcagttgcaaaccaactcttgctggtttctttgctggagcacttgagccacgtgcatgaaccaaacccacttcgttcaagacaggtgtttaagctactttgccagacgtttatcaaaatggggctgctgtcttctttcacttgtagtgacgagtttagctcattgagactacatcacaacagagctattactcacttaatgaggtctgctaaagagagagttcgtcaggatccttgtgaggatatttctcgtatccagaaaatcagatcaagggaagtagccttggaagcacaaacttcacgttacttaaatgaatttgaagaacttgccatcttaggaaaaggtggatacggaagagtatacaaggtcaggaataaattagatggtcagtattatgcaataaaaaaaatcctgattaagggtgcaactaaaacagtttgcatgaaggtcctacgggaagtgaaggtgctggcaggtcttcagcaccccaatattgttggctatcacaccgcgtggatagaacatgttcatgtgattcagccacgagcagacagagctgccattgagttgccatctctggaagtgctctccgaccaggaagaggacagagagcaatgtggtgttaaaaatgatgaaagtagcagctcatccattatctttgctgagcccaccccagaaaaagaaaaacgctttggagaatctgacactgaaaatcagaataacaagtcggtgaagtacaccaccaatttagtcataagagaatctggtgaacttgagtcgaccctggagctccaggaaaatggcttggctggtttgtctgccagttcaattgtggaacagcagctgccactcaggcgtaattcccacctagaggagagtttcacatccaccgaagaatcttccgaagaaaatgtcaactttttgggtcagacagaggcacagtaccacctgatgctgcacatccagatgcagctgtgtgagctctcgctgtgggattggatagtcgagagaaacaagcggggccgggagtatgtggacgagtctgcctgtccttatgttatggccaatgttgcaacaaaaatttttcaagaattggtagaaggtgtgttttacatacataacatgggaattgtgcaccgagatctgaagccaagaaatatttttcttcatggccctgatcagcaagtaaaaataggagactttggtctggcctgcacagacatcctacagaagaacacagactggaccaacagaaacgggaagagaacaccaacacatacgtccagagtgggtacttgtctgtacgcttcacccgaacagttggaaggatctgagtatgatgccaagtcagatatgtacagcttgggtgtggtcctgctagagctctttcagccgtttggaacagaaatggagcgagcagaagttctaacaggtttaagaactggtcagttgccggaatccctccgtaaaaggtgtccagtgcaagccaagtatatccagcacttaacgagaaggaactcatcgcagagaccatctgccattcagctgctgcagagtgaacttttccaaaattctggaaatgttaacctcaccctacagatgaagataatagagcaagaaaaagaaattgcagaactaaagaagcagctaaacctcctttctcaagacaaaggggtgagggatgacggaaaggatgggggcgtgggatgaaagtggacttaacttttaaggtagttaactggaatgtaaatttttaatctttattagggtatagttggtacaatgcttcgttgtatttagtaagcctttacaagacttgttaaagatgtcagagtgccccaagctgccgttccttcccttcctgccccacaagctccttttcctgaatttcctacctaaatattaaccatatgcctagtctctgaaactaaaaacttggacctcatcctcaattattttctcctttcaactctgttgaccctctgtctggtcttcctctagaaggttctaccgcagaaattgatgtgtgctccctgccctcgtcactgcccaagcccgggcctgcacatactcactggactgttccagttttgacagctgccagtcttcctgcccctttcacactgcagctgaagttcattacctgaaggacgcctcatcatttcattccttggctccaaaccttctgctgcctctaagataaaagctcaacttcttaacagtgtacagtgtgcaacttccaacctttttatctgttctctccaccttcagtttagcgtcattccaaaaccacacccttgcaaagctttgtactccgcaccccagatgatctccaggcagctcagatctctttcctgcctttgccctgcactgttccccggtacttcctcctttattgtagcactcagctccccagccaatctgtacatccctcagaggcagcgatctgatgaattggtttttgaatcccagaaagggtctgccatggagttggcagtcatcacggtagatggcgtatgattttgctgaattttaaataaaatgaaaaccataaattacatgatgcttttattgacacttgacaactggcctaaataaaaagactctgactctaatacaagtccccttactgataataggcatgaaagagcaccattcttaaaatctaaaccctttaaaatcagttacggcaattcacttaaggagcttgagggccgtgttaaaaggagccaggttttcacaagacctcatccacctctgcacattggctggcactgtcacactgcagcctccgatctgctggagtacagaccacagcaccacgtctgctacggtgagttcattcccagcgagccaagggctcttcccaagagcagagttcatggagcggaaaacagcggctttttctttactgcttccctcttttaactgaaaaatcgcaatatctacccagctatctataagggttgcgttgacagcattatgcttctggccaaacagagagaacaagaaacgtgcaatgttcccttcgccttcgatggggcacatcgtctggatgctgaatttcatctgcgtcttcggcacattcttccaaattaaagtgaatcccagctgatagtcttggcggggctgttttttattctgttctccaaagcacttgagaaggttttcaggcacgctcttgaccgaggagtgcgtgtgcaccgtggacaggaccctgaagtgctcacagagcagcctgtgcagcacaagcagggagaggggaggggaggccgggtttgcgttgatcacgatgtctttcagcgccccgtaatccttcccaagcactgaattcaagtccagcgcattggtggttaaagtcgtgggctcatccgcttggattatgttggttacatccaagtctgcatctggtgtttgaatcatcttggagaggccatcaactgcagctttcaactcatacagacgttttaaaatatcatcttggcgggactcaagagcttgcagagacaggttagactcttcctgtacgtggccagcgcccggcgctgggccgtagctcctgccgtgcacgttggggagccggtacatgcaggtgggaagctccacacggagaggcgcgccgcccccgtgatagggctttacctggtacatcggcatggcagaaccaaagcaaaagggggtagcgcgtgccaaaggccaacgctcagaaaccgtcagaggtcacgacggagaccggccacctcccttctgaccctgctgcgggcgttcgggaaaacgca

SEQ ID NO: 363489 - DNA, 2848 bp, Homo sapiens
tctctcgctcctcattcccccctccccaatcgctagtagaggctgtttgaatcggcgcagtgctgggctggccggcgggctgggctgcggcccgcgcgcggccggcgatgcaggggggcaactccggggtccgcaagcgcgaagaggagggcgacggggctggggctgtggctgcgccgccggccatcgactttcccgccgagggcccggaccccgaatatgacgaatctgatgttccagcagaaatccaggtgttaaaagaacccctacaacagccaaccttcccttttgcagttgcaaaccaactcttgctggtttctttgctggagcacttgagccacgtgcatgaaccaaacccacttcgttcaagacaggtgtttaagctactttgccagacgtttatcaaaatggggctgctgtcttctttcacttgtagtgacgagtttagctcattgagactacatcacaacagagctattactcacttaatgaggtctgctaaagagagagttcgtcaggatccttgtgaggatatttctcgtatccagaaaatcagatcaagggaagtagccttggaagcacaaacttcacgttacttaaatgaatttgaagaacttgccatcttaggaaaaggtggatacggaagagtatacaaggtcaggaataaattagatggtcagtattatgcaataaaaaaaatcctgattaagggtgcaactaaaacagtttgcatgaaggtcctacgggaagtgaaggtgctggcaggtcttcagcaccccaatattgttggctatcacaccgcgtggatagaacatgttcatgtgattcagccacgagcagacagagctgccattgagttgccatctctggaagtgctctccgaccaggaagaggacagagagcaatgtggtgttaaaaatgatgaaagtagcagctcatccattatctttgctgagcccaccccagaaaaagaaaaacgctttggagaatctgacactgaaaatcagaataacaagtcggtgaagtacaccaccaatttagtcataagagaatctggtgaacttgagtcgaccctggagctccaggaaaatggcttggctggtttgtctgccagttcaattgtggaacagcagctgccactcaggcgtaattcccacctagaggagagtttcacatccaccgaagaatcttccgaagaaaatgtcaactttttgggtcagacagaggcacagtaccacctgatgctgcacatccagatgcagctgtgtgagctctcgctgtgggattggatagtcgagagaaacaagcggggccgggagtatgtggacgagtctgcctgtccttatgttatggccaatgttgcaacaaaaatttttcaagaattggtagaaggtgtgttttacatacataacatgggaattgtgcaccgagatctgaagccaagaaatatttttcttcatggccctgatcagcaagtaaaaataggagactttggtctggcctgcacagacatcctacagaagaacacagactggaccaacagaaacgggaagagaacaccaacacatacgtccagagtgggtacttgtctgtacgcttcacccgaacagttggaaggatctgagtatgatgccaagtcagatatgtacagcttgggtgtggtcctgctagagctctttcagccgtttggaacagaaatggagcgagcagaagttctaacaggtttaagaactggtcagttgccggaatccctccgtaaaaggtgtccagtgcaagccaagtatatccagcacttaacgagaaggaactcatcgcagagaccatctgccattcagctgctgcagagtgaacttttccaaaattctggaaatgttaacctcaccctacagatgaagataatagagcaagaaaaagaaattgcagaactaaagaagcagctaaacctcctttctcaagacaaaggggtgagggatgacggaaaggatgggggcgtgggatgaaagtggacttaacttttaaggtagttaactggaatgtaaatttttaatctttattagggtatagttggtacaatgcttcgttgtatttagtaagcctttacaagacttgttaaagatgtcagagtgccccaagctgccgttccttcccttcctgccccacaagctccttttcctgaatttcctacctaaatattaaccatatgcctagtctctgaaactaaaaacttggacctcatcctcaattattttctcctttcaactctgttgaccctctgtctggtcttcctctagaaggttctaccgcagaaattgatgtgtgctccctgccctcgtcactgcccaagcccgggcctgcacatactcactggactgttccagttttgacagctgccagtcttcctgcccctttcacactgcagctgaagttcattacctgaaggacgcctcatcatttcattccttggctccaaaccttctgctgcctctaagataaaagctcaacttcttaacagtgtacagtgtgcaacttccaacctttttatctgttctctccaccttcagtttagcgtcattccaaaaccacacccttgcaaagctttgtactccgcaccccagatgatctccaggcagctcagatctctttcctgcctttgccctgcactgttccccggtacttcctcctttattgtagcactcagctccccagccaatctgtacatccctcagaggcagcgatctgatgaattggtttttgaatcccagaaagggtctgccatggagttggcagtcatcacggtagatggcgtatgattttgctgaattttaaataaaatgaaaaccataaatta

SEQ ID NO: 363490 - DNA, 4297 bp, Homo sapiens
ggttttccgtctggtgaggggttacttccgggtcggacggcgctagctgcagcatcggagtgtggcagtgctgggctggccggcgggctgggctgcggcccgcgcgcggccggcgatgcaggggggcaactccggggtccgcaagcgcgaagaggagggcgacggggctggggctgtggctgcgccgccggccatcgactttcccgccgagggcccggaccccgaatatgacgaatctgatgttccagcagaaatccaggtgttaaaagaacccctacaacagccaaccttcccttttgcagttgcaaaccaactcttgctggtttctttgctggagcacttgagccacgtgcatgaaccaaacccacttcgttcaagacaggtgtttaagctactttgccagacgtttatcaaaatggggctgctgtcttctttcacttgtagtgacgagtttagctcattgagactacatcacaacagagctattactcacttaatgaggtctgctaaagagagagttcgtcaggatccttgtgaggatatttctcgtatccagaaaatcagatcaagggaagtagccttggaagcacaaacttcacgttacttaaatgaatttgaagaacttgccatcttaggaaaaggtggatacggaagagtatacaaggtcaggaataaattagatggtcagtattatgcaataaaaaaaatcctgattaagggtgcaactaaaacagtttgcatgaaggtcctacgggaagtgaaggtgctggcaggtcttcagcaccccaatattgttggctatcacaccgcgtggatagaacatgttcatgtgattcagccacgagcagacagagctgccattgagttgccatctctggaagtgctctccgaccaggaagaggacagagagcaatgtggtgttaaaaatgatgaaagtagcagctcatccattatctttgctgagcccaccccagaaaaagaaaaacgctttggagaatctgacactgaaaatcagaataacaagtcggtgaagtacaccaccaatttagtcataagagaatctggtgaacttgagtcgaccctggagctccaggaaaatggcttggctggtttgtctgccagttcaattgtggaacagcagctgccactcaggcgtaattcccacctagaggagagtttcacatccaccgaagaatcttccgaagaaaatgtcaactttttgggtcagacagaggcacagtaccacctgatgctgcacatccagatgcagctgtgtgagctctcgctgtgggattggatagtcgagagaaacaagcggggccgggagtatgtggacgagtctgcctgtccttatgttatggccaatgttgcaacaaaaatttttcaagaattggtagaaggtgtgttttacatacataacatgggaattgtgcaccgagatctgaagccaagaaatatttttcttcatggccctgatcagcaagtaaaaataggagactttggtctggcctgcacagacatcctacagaagaacacagactggaccaacagaaacgggaagagtaagtttttggttttgttttgttttctttgcataagcaaaagacatggttgcacatgttagtatttaaagagaatcataaagatttaatagcaaaggtaagataaagatacaaagcaactgttgttctcttaggagctacactgcttcctcatagtaaatgttctttaatgttgacagcgctaactgcaatgtttaatatgtggcttttgaaatgataggaacaccaacacatacgtccagagtgggtacttgtctgtacgcttcacccgaacagttggaaggatctgagtatgatgccaagtcagatatgtacagcttgggtgtggtcctgctagagctctttcagccgtttggaacagaaatggagcgagcagaagttctaacaggtttaagaactggtcagttgccggaatccctccgtaaaaggtgtccagtgcaagccaagtatatccagcacttaacgagaaggaactcatcgcagagaccatctgccattcagctgctgcagagtgaacttttccaaaattctggaaatgttaacctcaccctacagatgaagataatagagcaagaaaaagaaattgcagaactaaagaagcagctaaacctcctttctcaagacaaaggggtgagggatgacggaaaggatgggggcgtgggatgaaagtggacttaacttttaaggtagttaactggaatgtaaatttttaatctttattagggtatagttggtacaatgcttcgttgtatttagtaagcctttacaagacttgttaaagatgtcagagtgccccaagctgccgttccttcccttcctgccccacaagctccttttcctgaatttcctacctaaatattaaccatatgcctagtctctgaaactaaaaacttggacctcatcctcaattattttctcctttcaactctgttgaccctctgtctggtcttcctctagaaggttctaccgcagaaattgatgtgtgctccctgccctcgtcactgcccaagcccgggcctgcacatactcactggactgttccagttttgacagctgccagtcttcctgcccctttcacactgcagctgaagttcattacctgaaggacgcctcatcatttcattccttggctccaaaccttctgctgcctctaagataaaagctcaacttcttaacagtgtacagtgtgcaacttccaacctttttatctgttctctccaccttcagtttagcgtcattccaaaaccacacccttgcaaagctttgtactccgcaccccagatgatctccaggcagctcagatctctttcctgcctttgccctgcactgttccccggtacttcctcctttattgtagcactcagctccccagccaatctgtacatccctcagaggcagcgatctgatgaattggtttttgaatcccagaaagggtctgccatggagttggcagtcatcacggtagatggcgtatgattttgctgaattttaaataaaatgaaaaccataaattacatgatgcttttattgacacttgacaactggcctaaataaaaagactctgactctaatacaagtccccttactgataataggcatgaaagagcaccattcttaaaatctaaaccctttaaaatcagttacggcaattcacttaaggagcttgagggccgtgttaaaaggagccaggttttcacaagacctcatccacctctgcacattggctggcactgtcacactgcagcctccgatctgctggagtacagaccacagcaccacgtctgctacggtgagttcattcccagcgagccaagggctcttcccaagagcagagttcatggagcggaaaacagcggctttttctttactgcttccctcttttaactgaaaaatcgcaatatctacccagctatctataagggttgcgttgacagcattatgcttctggccaaacagagagaacaagaaacgtgcaatgttcccttcgccttcgatggggcacatcgtctggatgctgaatttcatctgcgtcttcggcacattcttccaaattaaagtgaatcccagctgatagtcttggcggggctgttttttattctgttctccaaagcacttgagaaggttttcaggcacgctcttgaccgaggagtgcgtgtgcaccgtggacaggaccctgaagtgctcacagagcagcctgtgcagcacaagcagggagaggggaggggaggccgggtttgcgttgatcacgatgtctttcagcgccccgtaatccttcccaagcactgaattcaagtccagcgcattggtggttaaagtcgtgggctcatccgcttggattatgttggttacatccaagtctgcatctggtgtttgaatcatcttggagaggccatcaactgcagctttcaactcatacagacgttttaaaatatcatcttggcgggactcaagagcttgcagagacaggttagactcttcctgtacgtggccagcgcccggcgctgggccgtagctcctgccgtgcacgttggggagccggtacatgcaggtgggaagctccacacggagaggcgcgccgcccccgtgatagggctttacctggtacatcggcatggcagaaccaaagcaaaagggggtagcgcgtgccaaaggccaacgctcagaaaccgtcagaggtcacgacggagaccggccacctcccttctgaccctgctgcgggcgttcgggaaaacgca

SEQ ID NO: 363491 - DNA, 4113 bp, Homo sapiens
gacgtatatgagctccggtcctgtttgttatttccatcccgggagtagtgttgtcaagtgttagatgattgggggcgtggctgagatgtaagcacgatgcgcaggtgggtcgatagcatgtgtgcgcctagatccgggggtcctgtgatgcagcagaagagtgaagtgtgacgggtgcttgctacttgtggacgtgcggtcactgtacgtgtccagtctgaacgtttctccgcttccgacgtggcctggatgcacctcagagtatgacgaatctgatgttccagcagaaatccaggtgttaaaagaacccctacaacagccaaccttcccttttgcagttgcaaaccaactcttgctggtttctttgctggagcacttgagccacgtgcatgaaccaaacccacttcgttcaagacaggtgtttaagctactttgccagacgtttatcaaaatggggctgctgtcttctttcacttgtagtgacgagtttagctcattgagactacatcacaacagagctattactcacttaatgaggtctgctaaagagagagttcgtcaggatccttgtgaggatatttctcgtatccagaaaatcagatcaagggaagtagccttggaagcacaaacttcacgttacttaaatgaatttgaagaacttgccatcttaggaaaaggtggatacggaagagtatacaaggtcaggaataaattagatggtcagtattatgcaataaaaaaaatcctgattaagggtgcaactaaaacagtttgcatgaaggtcctacgggaagtgaaggtgctggcaggtcttcagcaccccaatattgttggctatcacaccgcgtggatagaacatgttcatgtgattcagccacgagcagacagagctgccattgagttgccatctctggaagtgctctccgaccaggaagaggacagagagcaatgtggtgttaaaaatgatgaaagtagcagctcatccattatctttgctgagcccaccccagaaaaagaaaaacgctttggagaatctgacactgaaaatcagaataacaagtcggtgaagtacaccaccaatttagtcataagagaatctggtgaacttgagtcgaccctggagctccaggaaaatggcttggctggtttgtctgccagttcaattgtggaacagcagctgccactcaggcgtaattcccacctagaggagagtttcacatccaccgaagaatcttccgaagaaaatgtcaactttttgggtcagacagaggcacagtaccacctgatgctgcacatccagatgcagctgtgtgagctctcgctgtgggattggatagtcgagagaaacaagcggggccgggagtatgtggacgagtctgcctgtccttatgttatggccaatgttgcaacaaaaatttttcaagaattggtagaaggtgtgttttacatacataacatgggaattgtgcaccgagatctgaagccaagaaatatttttcttcatggccctgatcagcaagtaaaaataggagactttggtctggcctgcacagacatcctacagaagaacacagactggaccaacagaaacgggaagagaacaccaacacatacgtccagagtgggtacttgtctgtacgcttcacccgaacagttggaaggatctgagtatgatgccaagtcagatatgtacagcttgggtgtggtcctgctagagctctttcagccgtttggaacagaaatggagcgagcagaagttctaacaggtttaagaactggtcagttgccggaatccctccgtaaaaggtgtccagtgcaagccaagtatatccagcacttaacgagaaggaactcatcgcagagaccatctgccattcagctgctgcagagtgaacttttccaaaattctggaaatgttaacctcaccctacagatgaagataatagagcaagaaaaagaaattgcagaactaaagaagcagctaaacctcctttctcaagacaaaggggtgagggatgacggaaaggatgggggcgtgggatgaaagtggacttaacttttaaggtagttaactggaatgtaaatttttaatctttattagggtatagttggtacaatgcttcgttgtatttagtaagcctttacaagacttgttaaagatgtcagagtgccccaagctgccgttccttcccttcctgccccacaagctccttttcctgaatttcctacctaaatattaaccatatgcctagtctctgaaactaaaaacttggacctcatcctcaattattttctcctttcaactctgttgaccctctgtctggtcttcctctagaaggttctaccgcagaaattgatgtgtgctccctgccctcgtcactgcccaagcccgggcctgcacatactcactggactgttccagttttgacagctgccagtcttcctgcccctttcacactgcagctgaagttcattacctgaaggacgcctcatcatttcattccttggctccaaaccttctgctgcctctaagataaaagctcaacttcttaacagtgtacagtgtgcaacttccaacctttttatctgttctctccaccttcagtttagcgtcattccaaaaccacacccttgcaaagctttgtactccgcaccccagatgatctccaggcagctcagatctctttcctgcctttgccctgcactgttccccggtacttcctcctttattgtagcactcagctccccagccaatctgtacatccctcagaggcagcgatctgatgaattggtttttgaatcccagaaagggtctgccatggagttggcagtcatcacggtagatggcgtatgattttgctgaattttaaataaaatgaaaaccataaattacatgatgcttttattgacacttgacaactggcctaaataaaaagactctgactctaatacaagtccccttactgataataggcatgaaagagcaccattcttaaaatctaaaccctttaaaatcagttacggcaattcacttaaggagcttgagggccgtgttaaaaggagccaggttttcacaagacctcatccacctctgcacattggctggcactgtcacactgcagcctccgatctgctggagtacagaccacagcaccacgtctgctacggtgagttcattcccagcgagccaagggctcttcccaagagcagagttcatggagcggaaaacagcggctttttctttactgcttccctcttttaactgaaaaatcgcaatatctacccagctatctataagggttgcgttgacagcattatgcttctggccaaacagagagaacaagaaacgtgcaatgttcccttcgccttcgatggggcacatcgtctggatgctgaatttcatctgcgtcttcggcacattcttccaaattaaagtgaatcccagctgatagtcttggcggggctgttttttattctgttctccaaagcacttgagaaggttttcaggcacgctcttgaccgaggagtgcgtgtgcaccgtggacaggaccctgaagtgctcacagagcagcctgtgcagcacaagcagggagaggggaggggaggccgggtttgcgttgatcacgatgtctttcagcgccccgtaatccttcccaagcactgaattcaagtccagcgcattggtggttaaagtcgtgggctcatccgcttggattatgttggttacatccaagtctgcatctggtgtttgaatcatcttggagaggccatcaactgcagctttcaactcatacagacgttttaaaatatcatcttggcgggactcaagagcttgcagagacaggttagactcttcctgtacgtggccagcgcccggcgctgggccgtagctcctgccgtgcacgttggggagccggtacatgcaggtgggaagctccacacggagaggcgcgccgcccccgtgatagggctttacctggtacatcggcatggcagaaccaaagcaaaagggggtagcgcgtgccaaaggccaacgctcagaaaccgtcagaggtcacgacggagaccggccacctcccttctgaccctgctgcgggcgttcgggaaaacgca

SEQ ID NO: 363492 - DNA, 4164 bp, Homo sapiens
tctctcgctcctcattcccccctccccaatcgctagtagaggctgtttgaatcggcgcagtgctgggctggccggcgggctgggctgcggcccgcgcgcggccggcgatgcaggggggcaactccggggtccgcaagcgcgaagaggagggcgacggggctggggctgtggctgcgccgccggccatcgactttcccgccgagggcccggaccccgaatatgacgagatgtggtcttgctgtgtttcccaggctggtctcgaacgcctggcctcaagcgattctcccgcctcggccttccaaaatgctgggattatagataatctgatgttccagcagaaatccaggtgttaaaagaacccctacaacagccaaccttcccttttgcagttgcaaaccaactcttgctggtttctttgctggagcacttgagccacgtgcatgaaccaaacccacttcgttcaagacaggtgtttaagctactttgccagacgtttatcaaaatggggctgctgtcttctttcacttgtagtgacgagtttagctcattgagactacatcacaacagagctattactcacttaatgaggtctgctaaagagagagttcgtcaggatccttgtgaggatatttctcgtatccagaaaatcagatcaagggaagtagccttggaagcacaaacttcacgttacttaaatgaatttgaagaacttgccatcttaggaaaaggtggatacggaagagtatacaaggtcaggaataaattagatggtcagtattatgcaataaaaaaaatcctgattaagggtgcaactaaaacagtttgcatgaaggtcctacgggaagtgaaggtgctggcaggtcttcagcaccccaatattgttggctatcacaccgcgtggatagaacatgttcatgtgattcagccacgagcagacagagctgccattgagttgccatctctggaagtgctctccgaccaggaagaggacagagagcaatgtggtgttaaaaatgatgaaagtagcagctcatccattatctttgctgagcccaccccagaaaaagaaaaacgctttggagaatctgacactgaaaatcagaataacaagtcggtgaagtacaccaccaatttagtcataagagaatctggtgaacttgagtcgaccctggagctccaggaaaatggcttggctggtttgtctgccagttcaattgtggaacagcagctgccactcaggcgtaattcccacctagaggagagtttcacatccaccgaagaatcttccgaagaaaatgtcaactttttgggtcagacagaggcacagtaccacctgatgctgcacatccagatgcagctgtgtgagctctcgctgtgggattggatagtcgagagaaacaagcggggccgggagtatgtggacgagtctgcctgtccttatgttatggccaatgttgcaacaaaaatttttcaagaattggtagaaggtgtgttttacatacataacatgggaattgtgcaccgagatctgaagccaagaaatatttttcttcatggccctgatcagcaagtaaaaataggagactttggtctggcctgcacagacatcctacagaagaacacagactggaccaacagaaacgggaagagaacaccaacacatacgtccagagtgggtacttgtctgtacgcttcacccgaacagttggaaggatctgagtatgatgccaagtcagatatgtacagcttgggtgtggtcctgctagagctctttcagccgtttggaacagaaatggagcgagcagaagttctaacaggtttaagaactggtcagttgccggaatccctccgtaaaaggtgtccagtgcaagccaagtatatccagcacttaacgagaaggaactcatcgcagagaccatctgccattcagctgctgcagagtgaacttttccaaaattctggaaatgttaacctcaccctacagatgaagataatagagcaagaaaaagaaattgcagaactaaagaagcagctaaacctcctttctcaagacaaaggggtgagggatgacggaaaggatgggggcgtgggatgaaagtggacttaacttttaaggtagttaactggaatgtaaatttttaatctttattagggtatagttggtacaatgcttcgttgtatttagtaagcctttacaagacttgttaaagatgtcagagtgccccaagctgccgttccttcccttcctgccccacaagctccttttcctgaatttcctacctaaatattaaccatatgcctagtctctgaaactaaaaacttggacctcatcctcaattattttctcctttcaactctgttgaccctctgtctggtcttcctctagaaggttctaccgcagaaattgatgtgtgctccctgccctcgtcactgcccaagcccgggcctgcacatactcactggactgttccagttttgacagctgccagtcttcctgcccctttcacactgcagctgaagttcattacctgaaggacgcctcatcatttcattccttggctccaaaccttctgctgcctctaagataaaagctcaacttcttaacagtgtacagtgtgcaacttccaacctttttatctgttctctccaccttcagtttagcgtcattccaaaaccacacccttgcaaagctttgtactccgcaccccagatgatctccaggcagctcagatctctttcctgcctttgccctgcactgttccccggtacttcctcctttattgtagcactcagctccccagccaatctgtacatccctcagaggcagcgatctgatgaattggtttttgaatcccagaaagggtctgccatggagttggcagtcatcacggtagatggcgtatgattttgctgaattttaaataaaatgaaaaccataaattacatgatgcttttattgacacttgacaactggcctaaataaaaagactctgactctaatacaagtccccttactgataataggcatgaaagagcaccattcttaaaatctaaaccctttaaaatcagttacggcaattcacttaaggagcttgagggccgtgttaaaaggagccaggttttcacaagacctcatccacctctgcacattggctggcactgtcacactgcagcctccgatctgctggagtacagaccacagcaccacgtctgctacggtgagttcattcccagcgagccaagggctcttcccaagagcagagttcatggagcggaaaacagcggctttttctttactgcttccctcttttaactgaaaaatcgcaatatctacccagctatctataagggttgcgttgacagcattatgcttctggccaaacagagagaacaagaaacgtgcaatgttcccttcgccttcgatggggcacatcgtctggatgctgaatttcatctgcgtcttcggcacattcttccaaattaaagtgaatcccagctgatagtcttggcggggctgttttttattctgttctccaaagcacttgagaaggttttcaggcacgctcttgaccgaggagtgcgtgtgcaccgtggacaggaccctgaagtgctcacagagcagcctgtgcagcacaagcagggagaggggaggggaggccgggtttgcgttgatcacgatgtctttcagcgccccgtaatccttcccaagcactgaattcaagtccagcgcattggtggttaaagtcgtgggctcatccgcttggattatgttggttacatccaagtctgcatctggtgtttgaatcatcttggagaggccatcaactgcagctttcaactcatacagacgttttaaaatatcatcttggcgggactcaagagcttgcagagacaggttagactcttcctgtacgtggccagcgcccggcgctgggccgtagctcctgccgtgcacgttggggagccggtacatgcaggtgggaagctccacacggagaggcgcgccgcccccgtgatagggctttacctggtacatcggcatggcagaaccaaagcaaaagggggtagcgcgtgccaaaggccaacgctcagaaaccgtcagaggtcacgacggagaccggccacctcccttctgaccctgctgcgggcgttcgggaaaacgca

SEQ ID NO: 363493 - DNA, 3935 bp, Homo sapiens
tctctcgctcctcattcccccctccccaatcgctagtagaggctgtttgaatcggcgcagtgctgggctggccggcgggctgggctgcggcccgcgcgcggccggcgatgcaggggggcaactccggggtccgcaagcgcgaagaggagggcgacggggctggggctgtggctgcgccgccggccatcgactttcccgccgagggcccggaccccgaatatgacgaatctgatgttccagcagaaatccaggtgttaaaagaacccctacaacagccaaccttcccttttgcagttgcaaaccaactcttgctggtttctttgctggagcacttgagccacgtgcatgaaccaaacccacttcgttcaagacaggtgtttaagcgatccttgtgaggatatttctcgtatccagaaaatcagatcaagggaagtagccttggaagcacaaacttcacgttacttaaatgaatttgaagaacttgccatcttaggaaaaggtggatacggaagagtatacaaggtcaggaataaattagatggtcagtattatgcaataaaaaaaatcctgattaagggtgcaactaaaacagtttgcatgaaggtcctacgggaagtgaaggtgctggcaggtcttcagcaccccaatattgttggctatcacaccgcgtggatagaacatgttcatgtgattcagccacgagcagacagagctgccattgagttgccatctctggaagtgctctccgaccaggaagaggacagagagcaatgtggtgttaaaaatgatgaaagtagcagctcatccattatctttgctgagcccaccccagaaaaagaaaaacgctttggagaatctgacactgaaaatcagaataacaagtcggtgaagtacaccaccaatttagtcataagagaatctggtgaacttgagtcgaccctggagctccaggaaaatggcttggctggtttgtctgccagttcaattgtggaacagcagctgccactcaggcgtaattcccacctagaggagagtttcacatccaccgaagaatcttccgaagaaaatgtcaactttttgggtcagacagaggcacagtaccacctgatgctgcacatccagatgcagctgtgtgagctctcgctgtgggattggatagtcgagagaaacaagcggggccgggagtatgtggacgagtctgcctgtccttatgttatggccaatgttgcaacaaaaatttttcaagaattggtagaaggtgtgttttacatacataacatgggaattgtgcaccgagatctgaagccaagaaatatttttcttcatggccctgatcagcaagtaaaaataggagactttggtctggcctgcacagacatcctacagaagaacacagactggaccaacagaaacgggaagagaacaccaacacatacgtccagagtgggtacttgtctgtacgcttcacccgaacagttggaaggatctgagtatgatgccaagtcagatatgtacagcttgggtgtggtcctgctagagctctttcagccgtttggaacagaaatggagcgagcagaagttctaacaggtttaagaactggtcagttgccggaatccctccgtaaaaggtgtccagtgcaagccaagtatatccagcacttaacgagaaggaactcatcgcagagaccatctgccattcagctgctgcagagtgaacttttccaaaattctggaaatgttaacctcaccctacagatgaagataatagagcaagaaaaagaaattgcagaactaaagaagcagctaaacctcctttctcaagacaaaggggtgagggatgacggaaaggatgggggcgtgggatgaaagtggacttaacttttaaggtagttaactggaatgtaaatttttaatctttattagggtatagttggtacaatgcttcgttgtatttagtaagcctttacaagacttgttaaagatgtcagagtgccccaagctgccgttccttcccttcctgccccacaagctccttttcctgaatttcctacctaaatattaaccatatgcctagtctctgaaactaaaaacttggacctcatcctcaattattttctcctttcaactctgttgaccctctgtctggtcttcctctagaaggttctaccgcagaaattgatgtgtgctccctgccctcgtcactgcccaagcccgggcctgcacatactcactggactgttccagttttgacagctgccagtcttcctgcccctttcacactgcagctgaagttcattacctgaaggacgcctcatcatttcattccttggctccaaaccttctgctgcctctaagataaaagctcaacttcttaacagtgtacagtgtgcaacttccaacctttttatctgttctctccaccttcagtttagcgtcattccaaaaccacacccttgcaaagctttgtactccgcaccccagatgatctccaggcagctcagatctctttcctgcctttgccctgcactgttccccggtacttcctcctttattgtagcactcagctccccagccaatctgtacatccctcagaggcagcgatctgatgaattggtttttgaatcccagaaagggtctgccatggagttggcagtcatcacggtagatggcgtatgattttgctgaattttaaataaaatgaaaaccataaattacatgatgcttttattgacacttgacaactggcctaaataaaaagactctgactctaatacaagtccccttactgataataggcatgaaagagcaccattcttaaaatctaaaccctttaaaatcagttacggcaattcacttaaggagcttgagggccgtgttaaaaggagccaggttttcacaagacctcatccacctctgcacattggctggcactgtcacactgcagcctccgatctgctggagtacagaccacagcaccacgtctgctacggtgagttcattcccagcgagccaagggctcttcccaagagcagagttcatggagcggaaaacagcggctttttctttactgcttccctcttttaactgaaaaatcgcaatatctacccagctatctataagggttgcgttgacagcattatgcttctggccaaacagagagaacaagaaacgtgcaatgttcccttcgccttcgatggggcacatcgtctggatgctgaatttcatctgcgtcttcggcacattcttccaaattaaagtgaatcccagctgatagtcttggcggggctgttttttattctgttctccaaagcacttgagaaggttttcaggcacgctcttgaccgaggagtgcgtgtgcaccgtggacaggaccctgaagtgctcacagagcagcctgtgcagcacaagcagggagaggggaggggaggccgggtttgcgttgatcacgatgtctttcagcgccccgtaatccttcccaagcactgaattcaagtccagcgcattggtggttaaagtcgtgggctcatccgcttggattatgttggttacatccaagtctgcatctggtgtttgaatcatcttggagaggccatcaactgcagctttcaactcatacagacgttttaaaatatcatcttggcgggactcaagagcttgcagagacaggttagactcttcctgtacgtggccagcgcccggcgctgggccgtagctcctgccgtgcacgttggggagccggtacatgcaggtgggaagctccacacggagaggcgcgccgcccccgtgatagggctttacctggtacatcggcatggcagaaccaaagcaaaagggggtagcgcgtgccaaaggccaacgctcagaaaccgtcagaggtcacgacggagaccggccacctcccttctgaccctgctgcgggcgttcgggaaaacgca

SEQ ID NO: 363494 - DNA, 2905 bp, Homo sapiens
tctctcgctcctcattcccccctccccaatcgctagtagaggctgtttgaatcggcgcagtgctgggctggccggcgggctgggctgcggcccgcgcgcggccggcgatgcaggggggcaactccggggtccgcaagcgcgaagaggagggcgacggggctggggctgtggctgcgccgccggccatcgactttcccgccgagggcccggaccccgaatatgacgaatctgatgttccagcagaaatccaggtgttaaaagaacccctacaacagccaaccttcccttttgcagttgcaaaccaactcttgctggtttctttgctggagcacttgagccacgtgcatgaaccaaacccacttcgttcaagacaggtgtttaagctactttgccagacgtttatcaaaatggggctgctgtcttctttcacttgtagtgacgagtttagctcattgagactacatcacaacagagctattactcacttaatgaggtctgctaaagagagagttcgtcaggatccttgtgaggatatttctcgtatccagaaaatcagatcaagggaagtagccttggaagcacaaacttcacgttacttaaatgaatttgaagaacttgccatcttaggaaaaggtggatacggaagagtatacaaggtcaggaataaattagatggtcagtattatgcaataaaaaaaatcctgattaagggtgcaactaaaacagtttgcatgaaggtcctacgggaagtgaaggtgctggcaggtcttcagcaccccaatattgttggctatcacaccgcgtggatagaacatgttcatgtgattcagccacgagcagacagagctgccattgagttgccatctctggaagtgctctccgaccaggaagaggacagagagcaatgtggtgttaaaaatgatgaaagtagcagctcatccattatctttgctgagcccaccccagaaaaagaaaaacgctttggagaatctgacactgaaaatcagaataacaagtcggtgaagtacaccaccaatttagtcataagagaatctggtgaacttgagtcgaccctggagctccaggaaaatggcttggctggtttgtctgccagttcaattgtggaacagcagctgccactcaggcgtaattcccacctagaggagagtttcacatccaccgaagaatcttccgaagaaaatgtcaactttttgggtcagacagaggcacagtaccacctgatgctgcacatccagatgcagctgtgtgagctctcgctgtgggattggatagtcgagagaaacaagcggggccgggagtatgtggacgagtctgcctgtccttatgttatggccaatgttgcaacaaaaatttttcaagaattggtagaaggtgtgttttacatacataacatgggaattgtgcaccgagatctgaagccaagaaatatttttcttcatggccctgatcagcaagtaaaaataggagactttggtctggcctgcacagacatcctacagaagaacacagactggaccaacagaaacgggaagagaacaccaacacatacgtccagagtgggtacttgtctgtacgcttcacccgaacagttggaaggatctgagtatgatgccaagtcagatatgtacagcttgggtgtggtcctgctagagctctttcagccgtttggaacagaaatggagcgagcagaagttctaacaggtttaagaactggtcagttgccggaatccctccgtaaaaggtgtccagtgcaagccaagtatatccagcacttaacgagaaggaactcatcgcagagaccatctgccattcagctgctgcagagtgaacttttccaaaattctggaaatgttaacctcaccctacagatgaagataatagagcaagaaaaagaaattgcagaactaaagaagcagctaaacctcctttctcaagacaaaggggtgagggatgacggaaaggatgggggcgtgggatgaaagtggacttaacttttaaggtagttaactggaatgtaaatttttaatctttattagggtatagttggtacaatgcttcgttgtatttagtaagcctttacaagacttgttaaagatgtcagagtgccccaagctgccgttccttcccttcctgccccacaagctccttttcctgaatttcctacctaaatattaaccatatgcctagtctctgaaactaaaaacttggacctcatcctcaattattttctcctttcaactctgttgaccctctgtctggtcttcctctagaaggttctaccgcagaaattgatgtgtgctccctgccctcgtcactgcccaagcccgggcctgcacatactcactggactgttccagttttgacagctgccagtcttcctgcccctttcacactgcagctgaagttcattacctgaaggacgcctcatcatttcattccttggctccaaaccttctgctgcctctaagataaaagctcaacttcttaacagtgtacagtgtgcaacttccaacctttttatctgttctctccaccttcagtttagcgtcattccaaaaccacacccttgcaaagctttgtactccgcaccccagatgatctccaggcagctcagatctctttcctgcctttgccctgcactgttccccggtacttcctcctttattgtagcactcagctccccagccaatctgtacatccctcagaggcagcgatctgatgaattggtttttgaatcccagaaagggtctgccatggagttggcagtcatcacggtagatggcgtatgattttgctgaattttaaataaaatgaaaaccataaattacatgatgcttttattgacacttgacaactggcctaaataaaaagactctgactctaa

SEQ ID NO: 363495 - DNA, 4017 bp, Homo sapiens
tctctcgctcctcattcccccctccccaatcgctagtagaggctgtttgaatcggcgcagtgctgggctggccggcgggctgggctgcggcccgcgcgcggccggcgatgcaggggggcaactccggggtccgcaagcgcgaagaggagggcgacggggctggggctgtggctgcgccgccggccatcgactttcccgccgagggcccggaccccgaatatgacgaatctgatgttccagcagaaatccaggtgttaaaagaacccctacaacagccaaccttcccttttgcagttgcaaaccaactcttgctggtttctttgctggagcacttgagccacgtgcatgaaccaaacccacttcgttcaagacaggtgtttaagctactttgccagacgtttatcaaaatggggctgctgtcttctttcacttgtagtgacgagtttagctcattgagactacatcacaacagagctattactcacttaatgaggtctgctaaagagagagttcgtcaggatccttgtgaggatatttctcgtatccagaaaatcagatcaagggaagtagccttggaagcacaaacttcacgttacttaaatgaatttgaagaacttgccatcttaggaaaaggtggatacggaagagtatacaaggtcaggaataaattagatggtcagtattatgcaataaaaaaaatcctgattaagggtgcaactaaaacagtttgcatgaaggtcctacgggaagtgaaggtgctggcaggtcttcagcaccccaatattgttggctatcacaccgcgtggatagaacatgttcatgtgattcagccacgagcagacagagctgccattgagttgccatctctggaagtgctctccgaccaggaagaggacagagagcaatgtggtgttaaaaatgatgaaagtagcagctcatccattatctttgctgagcccaccccagaaaaagaaaaacgctttggagaatctgacactgaaaatcagaataacaagtcggtgaagtacaccaccaatttagtcataagagaatctggtgaacttgagtcgaccctggagctccaggaaaatggcttggctggtttgtctgccagttcaattgtggaacagcagctgccactcaggcgtaattcccacctagaggagagtttcacatccaccgaagaatcttccgaagaaaatgtcaactttttgggtcagacagaggcacagtaccacctgatgctgcacatccagatgcagctgtgtgagctctcgctgtgggattggatagtcgagagaaacaagcggggccgggagtatgtggacgagtctgcctgtccttatgttatggccaatgttgcaacaaaaatttttcaagaattggtagaaggtgtgttttacatacataacatgggaattgtgcaccgagatctgaagccaagaaatatttttcttcatggccctgatcagcaagtaaaaataggagactttggtctggcctgcacagacatcctacagaagaacacagactggaccaacagaaacgggaagagaacaccaacacatacgtccagagtgggtacttgtctgtacgcttcacccgaacagttggaaggatctgagtatgatgccaagtcagatatgtacagcttgggtgtggtcctgctagagctctttcagccgtttggaacagaaatggagcgagcagaagttctaacaggtttaagaactggtcagttgccggaatccctccgtaaaaggtgtccagtgcaagccaagtatatccagcacttaacgagaaggaactcatcgcagagaccatctgccattcagctgctgcagagtgaacttttccaaaattctggaaatgttaacctcaccctacagatgaagataatagagcaagaaaggtgagggatgacggaaaggatgggggcgtgggatgaaagtggacttaacttttaaggtagttaactggaatgtaaatttttaatctttattagggtatagttggtacaatgcttcgttgtatttagtaagcctttacaagacttgttaaagatgtcagagtgccccaagctgccgttccttcccttcctgccccacaagctccttttcctgaatttcctacctaaatattaaccatatgcctagtctctgaaactaaaaacttggacctcatcctcaattattttctcctttcaactctgttgaccctctgtctggtcttcctctagaaggttctaccgcagaaattgatgtgtgctccctgccctcgtcactgcccaagcccgggcctgcacatactcactggactgttccagttttgacagctgccagtcttcctgcccctttcacactgcagctgaagttcattacctgaaggacgcctcatcatttcattccttggctccaaaccttctgctgcctctaagataaaagctcaacttcttaacagtgtacagtgtgcaacttccaacctttttatctgttctctccaccttcagtttagcgtcattccaaaaccacacccttgcaaagctttgtactccgcaccccagatgatctccaggcagctcagatctctttcctgcctttgccctgcactgttccccggtacttcctcctttattgtagcactcagctccccagccaatctgtacatccctcagaggcagcgatctgatgaattggtttttgaatcccagaaagggtctgccatggagttggcagtcatcacggtagatggcgtatgattttgctgaattttaaataaaatgaaaaccataaattacatgatgcttttattgacacttgacaactggcctaaataaaaagactctgactctaatacaagtccccttactgataataggcatgaaagagcaccattcttaaaatctaaaccctttaaaatcagttacggcaattcacttaaggagcttgagggccgtgttaaaaggagccaggttttcacaagacctcatccacctctgcacattggctggcactgtcacactgcagcctccgatctgctggagtacagaccacagcaccacgtctgctacggtgagttcattcccagcgagccaagggctcttcccaagagcagagttcatggagcggaaaacagcggctttttctttactgcttccctcttttaactgaaaaatcgcaatatctacccagctatctataagggttgcgttgacagcattatgcttctggccaaacagagagaacaagaaacgtgcaatgttcccttcgccttcgatggggcacatcgtctggatgctgaatttcatctgcgtcttcggcacattcttccaaattaaagtgaatcccagctgatagtcttggcggggctgttttttattctgttctccaaagcacttgagaaggttttcaggcacgctcttgaccgaggagtgcgtgtgcaccgtggacaggaccctgaagtgctcacagagcagcctgtgcagcacaagcagggagaggggaggggaggccgggtttgcgttgatcacgatgtctttcagcgccccgtaatccttcccaagcactgaattcaagtccagcgcattggtggttaaagtcgtgggctcatccgcttggattatgttggttacatccaagtctgcatctggtgtttgaatcatcttggagaggccatcaactgcagctttcaactcatacagacgttttaaaatatcatcttggcgggactcaagagcttgcagagacaggttagactcttcctgtacgtggccagcgcccggcgctgggccgtagctcctgccgtgcacgttggggagccggtacatgcaggtgggaagctccacacggagaggcgcgccgcccccgtgatagggctttacctggtacatcggcatggcagaaccaaagcaaaagggggtagcgcgtgccaaaggccaacgctcagaaaccgtcagaggtcacgacggagaccggccacctcccttctgaccctgctgcgggcgttcgggaaaacgca

SEQ ID NO: 363496 - DNA, 4007 bp, Homo sapiens
tctctcgctcctcattcccccctccccaatcgctagtagaggctgtttgaatcggcgcagtgctgggctggccggcgggctgggctgcggcccgcgcgcggccggcgatgcaggggggcaactccggggtccgcaagcgcgaagaggagggcgacggggctggggctgtggctgcgccgccggccatcgactttcccgccgagggcccggaccccgaatatgacgaatctgatgttccagcagaaatccaggtgttaaaagaacccctacaacagccaaccttcccttttgcagttgcaaaccaactcttgctggtttctttgctggagcacttgagccacgtgcatgaaccaaacccacttcgttcaagacaggtgtttaagctactttgccagacgtttatcaaaatggggctgctgtcttctttcacttgtagtgacgagtttagctcattgagactacatcacaacagagctattactcacttaatgaggtctgctaaagagagagttcgtcaggatccttgtgaggatatttctcgtatccagaaaatcagatcaagggaagtagccttggaagcacaaacttcacgttacttaaatgaatttgaagaacttgccatcttaggaaaaggtggatacggaagagtatacaaggtcaggaataaattagatggtcagtattatgcaataaaaaaaatcctgattaagggtgcaactaaaacagtttgcatgaaggtcctacgggaagtgaaggtgctggcaggtcttcagcaccccaatattgttggctatcacaccgcgtggatagaacatgttcatgtgattcagccacgagcagacagagctgccattgagttgccatctctggaagtgctctccgaccaggaagaggacagagagcaatgtggtgttaaaaatgatgaaagtagcagctcatccattatctttgctgagcccaccccagaaaaagaaaaacgctttggagaatctgacactgaaaatcagaataacaagtcggtgaagtacaccaccaatttagtcataagagaatctggtgaacttgagtcgaccctggagctccaggaaaatggcttggctggtttgtctgccagttcaattgtggaacagcagctgccactcaggcgtaattcccacctagaggagagtttcacatccaccgaagaatcttccgaagaaaatgtcaactttttgggtcagacagaggcacagtaccacctgatgctgcacatccagatgcagctgtgtgagctctcgctgtgggattggatagtcgagagaaacaagcggggccgggagtatgtggacgagtctgcctgtccttatgttatggccaatgttgcaacaaaaatttttcaagaattggtagaaggtgtgttttacatacataacatgggaattgtgcaccgagatctgaagccaagaaatatttttcttcatggccctgatcagcaagtaaaaataggagactttggtctggcctgcacagacatcctacagaagaacacagactggaccaacagaaacgggaagagaacaccaacacatacgtccagagtgggtacttgtctgtacgcttcacccgaacagttggaaggatctgagtatgatgccaagtcagatatgtacagcttgggtgtggtcctgctagagctctttcagccgtttggaacagaaatggagcgagcagaagttctaacaggtttaagaactggtcagttgccggaatccctccgtaaaaggtgtccagtgcaagccaagtatatccagcacttaacgagaaggaactcatcgcagagaccatctgccattcagctgctgcagagtgaacttttccaaaattctggaaatgttaacctcaccctacagatgaagataatagagcaagaaaaagaaattgcagaactaaagaagcagctaaacctcctttctcaagacaaaggggtgagggatgacggaaaggatgggggcgtgggatgaaagtggacttaacttttaaggtagttaactggaatgtaaatttttaatctttattagggtatagttggtacaatgcttcgttgtatttagtaagcctttacaagacttgttaaagatgtcagagtgccccaagctgccgttccttcccttcctgccccacaagctccttttcctgaatttcctacctaaatattaaccatatgcctagtctctgaaactaaaaacttggacctcatcctcaattattttctcctttcaactctgttgaccctctgtctggtcttcctctagaaggttcttcactggactgttccagttttgacagctgccagtcttcctgcccctttcacactgcagctgaagttcattacctgaaggacgcctcatcatttcattccttggctccaaaccttctgctgcctctaagataaaagctcaacttcttaacagtgtacagtgtgcaacttccaacctttttatctgttctctccaccttcagtttagcgtcattccaaaaccacacccttgcaaagctttgtactccgcaccccagatgatctccaggcagctcagatctctttcctgcctttgccctgcactgttccccggtacttcctcctttattgtagcactcagctccccagccaatctgtacatccctcagaggcagcgatctgatgaattggtttttgaatcccagaaagggtctgccatggagttggcagtcatcacggtagatggcgtatgattttgctgaattttaaataaaatgaaaaccataaattacatgatgcttttattgacacttgacaactggcctaaataaaaagactctgactctaatacaagtccccttactgataataggcatgaaagagcaccattcttaaaatctaaaccctttaaaatcagttacggcaattcacttaaggagcttgagggccgtgttaaaaggagccaggttttcacaagacctcatccacctctgcacattggctggcactgtcacactgcagcctccgatctgctggagtacagaccacagcaccacgtctgctacggtgagttcattcccagcgagccaagggctcttcccaagagcagagttcatggagcggaaaacagcggctttttctttactgcttccctcttttaactgaaaaatcgcaatatctacccagctatctataagggttgcgttgacagcattatgcttctggccaaacagagagaacaagaaacgtgcaatgttcccttcgccttcgatggggcacatcgtctggatgctgaatttcatctgcgtcttcggcacattcttccaaattaaagtgaatcccagctgatagtcttggcggggctgttttttattctgttctccaaagcacttgagaaggttttcaggcacgctcttgaccgaggagtgcgtgtgcaccgtggacaggaccctgaagtgctcacagagcagcctgtgcagcacaagcagggagaggggaggggaggccgggtttgcgttgatcacgatgtctttcagcgccccgtaatccttcccaagcactgaattcaagtccagcgcattggtggttaaagtcgtgggctcatccgcttggattatgttggttacatccaagtctgcatctggtgtttgaatcatcttggagaggccatcaactgcagctttcaactcatacagacgttttaaaatatcatcttggcgggactcaagagcttgcagagacaggttagactcttcctgtacgtggccagcgcccggcgctgggccgtagctcctgccgtgcacgttggggagccggtacatgcaggtgggaagctccacacggagaggcgcgccgcccccgtgatagggctttacctggtacatcggcatggcagaaccaaagcaaaagggggtagcgcgtgccaaaggccaacgctcagaaaccgtcagaggtcacgacggagaccggccacctcccttctgaccctgctgcgggcgttcgggaaaacgca

SEQ ID NO: 363497 - DNA, 3185 bp, Homo sapiens
tctctcgctcctcattcccccctccccaatcgctagtagaggctgtttgaatcggcgcagtgctgggctggccggcgggctgggctgcggcccgcgcgcggccggcgatgcaggggggcaactccggggtccgcaagcgcgaagaggagggcgacggggctggggctgtggctgcgccgccggccatcgactttcccgccgagggcccggaccccgaatatgacgaatctgatgttccagcagaaatccaggtgttaaaagaacccctacaacagccaaccttcccttttgcagttgcaaaccaactcttgctggtttctttgctggagcacttgagccacgtgcatgaaccaaacccacttcgttcaagacaggtgtttaagctactttgccagacgtttatcaaaatggggctgctgtcttctttcacttgtagtgacgagtttagctcattgagactacatcacaacagagctattactcacttaatgaggtctgctaaagagagagttcgtcaggatccttgtgaggatatttctcgtatccagaaaatcagatcaagggaagtagccttggaagcacaaacttcacgttacttaaatgaatttgaagaacttgccatcttaggaaaaggtggatacggaagagtatacaaggtcaggaataaattagatggtcagtattatgcaataaaaaaaatcctgattaagggtgcaactaaaacagtttgcatgaaggtcctacgggaagtgaaggtgctggcaggtcttcagcaccccaatattgttggctatcacaccgcgtggatagaacatgttcatgtgattcagccacgagcagacagagctgccattgagttgccatctctggaagtgctctccgaccaggaagaggacagagagcaatgtggtgttaaaaatgatgaaagtagcagctcatccattatctttgctgagcccaccccagaaaaagaaaaacgctttggagaatctgacactgaaaatcagaataacaagtcggtgaagtacaccaccaatttagtcataagagaatctggtgaacttgagtcgaccctggagctccaggaaaatggcttggctggtttgtctgccagttcaattgtggaacagcagctgccactcaggcgtaattcccacctagaggagagtttcacatccaccgaagaatcttccgaagaaaatgtcaactttttgggtcagacagaggcacagtaccacctgatgctgcacatccagatgcagctgtgtgagctctcgctgtgggattggatagtcgagagaaacaagcggggccgggagtatgtggacgagtctgcctgtccttatgttatggccaatgttgcaacaaaaatttttcaagaattggtagaaggtgtgttttacatacataacatgggaattgtgcaccgagatctgaagccaagaaatatttttcttcatggccctgatcagcaagtaaaaataggagactttggtctggcctgcacagacatcctacagaagaacacagactggaccaacagaaacgggaagagaacaccaacacatacgtccagagtgggtacttgtctgtacgcttcacccgaacagttggaaggatctgagtatgatgccaagtcagatatgtacagcttgggtgtggtcctgctagagctctttcagccgtttggaacagaaatggagcgagcagaagttctaacaggtttaagaactggtcagttgccggaatccctccgtaaaaggtgtccagtgcaagccaagtatatccagcacttaacgagaaggaactcatcgcagagaccatctgccattcagctgctgcagagtgaacttttccaaaattctggaaatgttaacctcaccctacagatgaagataatagagcaagaaaaagaaattgcagaactaaagaagcagctaaacctcctttctcaagacaaaggggtgagggatgacggaaaggatgggggcgtgggatgaaagtggacttaacttttaaggtagttaactggaatgtaaatttttaatctttattagggtatagttggtacaatgcttcgttgtatttagtaagcctttacaagacttgttaaagatgtcagagtgccccaagctgccgttccttcccttcctgccccacaagctccttttcctgaatttcctacctaaatattaaccatatgcctagtctctgaaactaaaaacttggacctcatcctcaattattttctcctttcaactctgttgaccctctgtctggtcttcctctagaaggttctaccgcagaaattgatgtgtgctccctgccctcgtcactgcccaagcccgggcctgcacatactcactggactgttccagttttgacagctgccagtcttcctgcccctttcacactgcagctgaagttcattacctgaaggacgcctcatcatttcattccttggctccaaaccttctgctgcctctaagataaaagctcaacttcttaacagtgtacagtgtgcaacttccaacctttttatctgttctctccaccttcagtttagcgtcattccaaaaccacacccttgcaaagctttgtactccgcaccccagatgatctccaggcagctcagatctctttcctgcctttgccctgcactgttccccggtacttcctcctttattgtagcactcagctccccagccaatctgtacatccctcagaggcagcgatctgatgaattggtttttgaatcccagaaagggtctgccatggagttggcagtcatcacggtagatggcgtatgattttgctgaattttaaataaaatgaaaaccataaattacatgatgcttttattgacacttgacaactggcctaaataaaaagactctgactctaaaaaaaaaaaaaaaaaaaaaaaaaaaaaaaaacaaacaaaaacacacaaaacagcaaacaccagaggggggggggcccataaaaaaattccccggaggggcgcccagattgacgctgacccacgcttcggttgccacaaggggggccccacatgaggaggaccgctcatacaaagccggaagcgagccgggccgcgcttacaacacgccggcgtggggggccaagacgcggccgcgcggaccatcggcgagaagaaacgccacagtcgcgcggggcgcaac

SEQ ID NO: 363498 - DNA, 4068 bp, Homo sapiens
ggttttccgtctggtgaggggttacttccgggtcggacggcgctagctgcagcatcggagtgtggcagtgctgggctggccggcgggctgggctgcggcccgcgcgcggccggcgatgcaggggggcaactccggggtccgcaagcgcgaagaggagggcgacggggctggggctgtggctgcgccgccggccatcgactttcccgccgagggcccggaccccgaatatgacgaatctgatgttccagcagaaatccaggtgttaaaagaacccctacaacagccaaccttcccttttgcagttgcaaaccaactcttgctggtttctttgctggagcacttgagccacgtgcatgaaccaaacccacttcgttcaagacaggtgtttaagctactttgccagacgtttatcaaaatggggctgctgtcttctttcacttgtagtgacgagtttagctcattgagactacatcacaacagagctattactcacttaatgaggtctgctaaagagagagttcgtcaggatccttgtgaggatatttctcgtatccagaaaatcagatcaagggaagtagccttggaagcacaaacttcacgttacttaaatgaatttgaagaacttgccatcttaggaaaaggtggatacggaagagtatacaaggttgtcttccacgtacttgttttgacctactaccctataattgtgttttcagatattgttttcattattcttttatttatttatttttttgagatggagtctcgctctgtcgccaggctggagtgcgcggcgcaatctcagctcactgcaacctctgactccctggttcaagcgattcttctgcctcagcctcccgagtagctgggattacaggcatgtgctactacacccagctaatttttgtatttttaatagagacggggtttcaccgtgttggccaggatggtcttgatctcctgacctcgtgatccacccacctcggctctcccaaagtgctgggattacaggcatgagccactgcacccggccagatgttgagatttttaaaactcctggatgattctgatgtgtaggcaaatttgggaactattcctcaaatatttaacttttgaggggctgcttgctcctgagttccaaacacttaaaaacatttacaagatattactatttgttttaagaaagccaaggagttgacttgttttgtttgttgatagccaagaaatatttttcttcatggccctgatcagcaagtaaaaataggagactttggtctggcctgcacagacatcctacagaagaacacagactggaccaacagaaacgggaagagtaagtttttggttttgttttgttttctttgcataagcaaaagacatggttgcacatgttagtatttaaagagaatcataaagatttaatagcaaaggtaagataaagatacaaagcaactgttgttctcttaggagctacactgcttcctcatagtaaatgttctttaatgttgacagcgctaactgcaatgtttaatatgtggcttttgaaatgataggaacaccaacacatacgtccagagtgggtacttgtctgtacgcttcacccgaacagttggaaggatctgagtatgatgccaagtcagatatgtacagcttgggtgtggtcctgctagagctctttcagccgtttggaacagaaatggagcgagcagaagttctaacaggtttaagaactggtcagttgccggaatccctccgtaaaaggtgtccagtgcaagccaagtatatccagcacttaacgagaaggaactcatcgcagagaccatctgccattcagctgctgcagagtgaacttttccaaaattctggaaatgttaacctcaccctacagatgaagataatagagcaagaaaaagaaattgcagaactaaagaagcagctaaacctcctttctcaagacaaaggggtgagggatgacggaaaggatgggggcgtgggatgaaagtggacttaacttttaaggtagttaactggaatgtaaatttttaatctttattagggtatagttggtacaatgcttcgttgtatttagtaagcctttacaagacttgttaaagatgtcagagtgccccaagctgccgttccttcccttcctgccccacaagctccttttcctgaatttcctacctaaatattaaccatatgcctagtctctgaaactaaaaacttggacctcatcctcaattattttctcctttcaactctgttgaccctctgtctggtcttcctctagaaggttctaccgcagaaattgatgtgtgctccctgccctcgtcactgcccaagcccgggcctgcacatactcactggactgttccagttttgacagctgccagtcttcctgcccctttcacactgcagctgaagttcattacctgaaggacgcctcatcatttcattccttggctccaaaccttctgctgcctctaagataaaagctcaacttcttaacagtgtacagtgtgcaacttccaacctttttatctgttctctccaccttcagtttagcgtcattccaaaaccacacccttgcaaagctttgtactccgcaccccagatgatctccaggcagctcagatctctttcctgcctttgccctgcactgttccccggtacttcctcctttattgtagcactcagctccccagccaatctgtacatccctcagaggcagcgatctgatgaattggtttttgaatcccagaaagggtctgccatggagttggcagtcatcacggtagatggcgtatgattttgctgaattttaaataaaatgaaaaccataaattacatgatgcttttattgacacttgacaactggcctaaataaaaagactctgactctaatacaagtccccttactgataataggcatgaaagagcaccattcttaaaatctaaaccctttaaaatcagttacggcaattcacttaaggagcttgagggccgtgttaaaaggagccaggttttcacaagacctcatccacctctgcacattggctggcactgtcacactgcagcctccgatctgctggagtacagaccacagcaccacgtctgctacggtgagttcattcccagcgagccaagggctcttcccaagagcagagttcatggagcggaaaacagcggctttttctttactgcttccctcttttaactgaaaaatcgcaatatctacccagctatctataagggttgcgttgacagcattatgcttctggccaaacagagagaacaagaaacgtgcaatgttcccttcgccttcgatggggcacatcgtctggatgctgaatttcatctgcgtcttcggcacattcttccaaattaaagtgaatcccagctgatagtcttggcggggctgttttttattctgttctccaaagcacttgagaaggttttcaggcacgctcttgaccgaggagtgcgtgtgcaccgtggacaggaccctgaagtgctcacagagcagcctgtgcagcacaagcagggagaggggaggggaggccgggtttgcgttgatcacgatgtctttcagcgccccgtaatccttcccaagcactgaattcaagtccagcgcattggtggttaaagtcgtgggctcatccgcttggattatgttggttacatccaagtctgcatctggtgtttgaatcatcttggagaggccatcaactgcagctttcaactcatacagacgttttaaaatatcatcttggcgggactcaagagcttgcagagacaggttagactcttcctgtacgtggccagcgcccggcgctgggccgtagctcctgccgtgcacgttggggagccggtacatgcaggtgggaagctccacacggagaggcgcgccgcccccgtgatagggctttacctggtacatcggcatggcagaaccaaagcaaaagggggtagcgcgtgccaaaggccaacgctcagaaaccgtcagaggtcacgacggagaccggccacctcccttctgaccctgctgcgggcgttcgggaaaacgca

SEQ ID NO: 363499 - DNA, 2900 bp, Homo sapiens
tctctcgctcctcattcccccctccccaatcgctagtagaggctgtttgaatcggcgcagtgctgggctggccggcgggctgggctgcggcccgcgcgcggccggcgatgcaggggggcaactccggggtccgcaagcgcgaagaggagggcgacggggctggggctgtggctgcgccgccggccatcgactttcccgccgagggcccggaccccgaatatgacgaatctgatgttccagcagaaatccaggtgttaaaagaacccctacaacagccaaccttcccttttgcagttgcaaaccaactcttgctggtttctttgctggagcacttgagccacgtgcatgaaccaaacccacttcgttcaagacaggtgtttaagctactttgccagacgtttatcaaaatggggctgctgtcttctttcacttgtagtgacgagtttagctcattgagactacatcacaacagagctattactcacttaatgaggtctgctaaagagagagttcgtcaggatccttgtgaggatatttctcgtatccagaaaatcagatcaagggaagtagccttggaagcacaaacttcacgttacttaaatgaatttgaagaacttgccatcttaggaaaaggtggatacggaagagtatacaaggtcaggaataaattagatggtcagtattatgcaataaaaaaaatcctgattaagggtgcaactaaaacagtttgcatgaaggtcctacgggaagtgaaggtgctggcaggtcttcagcaccccaatattgttggctatcacaccgcgtggatagaacatgttcatgtgattcagccacgagcagacagagctgccattgagttgccatctctggaagtgctctccgaccaggaagaggacagagagcaatgtggtgttaaaaatgatgaaagtagcagctcatccattatctttgctgagcccaccccagaaaaagaaaaacgctttggagaatctgacactgaaaatcagaataacaagtcggtgaagtacaccaccaatttagtcataagagaatctggtgaacttgagtcgaccctggagctccaggaaaatggcttggctggtttgtctgccagttcaattgtggaacagcagctgccactcaggcgtaattcccacctagaggagagtttcacatccaccgaagaatcttccgaagaaaatgtcaactttttgggtcagacagaggcacagtaccacctgatgctgcacatccagatgcagctgtgtgagctctcgctgtgggattggatagtcgagagaaacaagcggggccgggagtatgtggacgagtctgcctgtccttatgttatggccaatgttgcaacaaaaatttttcaagaattggtagaaggtgtgttttacatacataacatgggaattgtgcaccgagatctgaagccaagaaatatttttcttcatggccctgatcagcaagtaaaaataggagactttggtctggcctgcacagacatcctacagaagaacacagactggaccaacagaaacgggaagagaacaccaacacatacgtccagagtgggtacttgtctgtacgcttcacccgaacagttggaaggatctgagtatgatgccaagtcagatatgtacagcttgggtgtggtcctgctagagctctttcagccgtttggaacagaaatggagcgagcagaagttctaacaggtttaagaactggtcagttgccggaatccctccgtaaaaggtgtccagtgcaagccaagtatatccagcacttaacgagaaggaactcatcgcagagaccatctgccattcagctgctgcagagtgaacttttccaaaattctggaaatgttaacctcaccctacagatgaagataatagagcaagaaaaagaaattgcagaactaaagaagcagctaaacctcctttctcaagacaaaggggtgagggatgacggaaaggatgggggcgtgggatgaaagtggacttaacttttaaggtagttaactggaatgtaaatttttaatctttattagggtatagttggtacaatgcttcgttgtatttagtaagcctttacaagacttgttaaagatgtcagagtgccccaagctgccgttccttcccttcctgccccacaagctccttttcctgaatttcctacctaaatattaaccatatgcctagtctctgaaactaaaaacttggacctcatcctcaattattttctcctttcaactctgttgaccctctgtctggtcttcctctagaaggttctaccgcagaaattgatgtgtgctccctgccctcgtcactgcccaagcccgggcctgcacatactcactggactgttccagttttgacagctgccagtcttcctgcccctttcacactgcagctgaagttcattacctgaaggacgcctcatcatttcattccttggctccaaaccttctgctgcctctaagataaaagctcaacttcttaacagtgtacagtgtgcaacttccaacctttttatctgttctctccaccttcagtttagcgtcattccaaaaccacacccttgcaaagctttgtactccgcaccccagatgatctccaggcagctcagatctctttcctgcctttgccctgcactgttccccggtacttcctcctttattgtagcactcagctccccagccaatctgtacatccctcagaggcagcgatctgatgaattggtttttgaatcccagaaagggtctgccatggagttggcagtcatcacggtagatggcgtatgattttgctgaattttaaataaaatgaaaaccataaattaattaatcgacactgcctaatatacctggttttttttcggtttgttttttttg

SEQ ID NO: 363500 - DNA, 2850 bp, Homo sapiens
tctctcgctcctcattcccccctccccaatcgctagtagaggctgtttgaatcggcgcagtgctgggctggccggcgggctgggctgcggcccgcgcgcggccggcgatgcaggggggcaactccggggtccgcaagcgcgaagaggagggcgacggggctggggctgtggctgcgccgccggccatcgactttcccgccgagggcccggaccccgaatatgacgaatctgatgttccagcagaaatccaggtgttaaaagaacccctacaacagccaaccttcccttttgcagttgcaaaccaactcttgctggtttctttgctggagcacttgagccacgtgcatgaaccaaacccacttcgttcaagacaggtgtttaagctactttgccagacgtttatcaaaatggggctgctgtcttctttcacttgtagtgacgagtttagctcattgagactacatcacaacagagctattactcacttaatgaggtctgctaaagagagagttcgtcaggatccttgtgaggatatttctcgtatccagaaaatcagatcaagggaagtagccttggaagcacaaacttcacgttacttaaatgaatttgaagaacttgccatcttaggaaaaggtggatacggaagagtatacaaggtcaggaataaattagatggtcagtattatgcaataaaaaaaatcctgattaagggtgcaactaaaacagtttgcatgaaggtcctacgggaagtgaaggtgctggcaggtcttcagcaccccaatattgttggctatcacaccgcgtggatagaacatgttcatgtgattcagccacgagcagacagagctgccattgagttgccatctctggaagtgctctccgaccaggaagaggacagagagcaatgtggtgttaaaaatgatgaaagtagcagctcatccattatctttgctgagcccaccccagaaaaagaaaaacgctttggagaatctgacactgaaaatcagaataacaagtcggtgaagtacaccaccaatttagtcataagagaatctggtgaacttgagtcgaccctggagctccaggaaaatggcttggctggtttgtctgccagttcaattgtggaacagcagctgccactcaggcgtaattcccacctagaggagagtttcacatccaccgaagaatcttccgaagaaaatgtcaactttttgggtcagacagaggcacagtaccacctgatgctgcacatccagatgcagctgtgtgagctctcgctgtgggattggatagtcgagagaaacaagcggggccgggagtatgtggacgagtctgcctgtccttatgttatggccaatgttgcaacaaaaatttttcaagaattggtagaaggtgtgttttacatacataacatgggaattgtgcaccgagatctgaagccaagaaatatttttcttcatggccctgatcagcaagtaaaaataggagactttggtctggcctgcacagacatcctacagaagaacacagactggaccaacagaaacgggaagagaacaccaacacatacgtccagagtgggtacttgtctgtacgcttcacccgaacagttggaaggatctgagtatgatgccaagtcagatatgtacagcttgggtgtggtcctgctagagctctttcagccgtttggaacagaaatggagcgagcagaagttctaacaggtttaagaactggtcagttgccggaatccctccgtaaaaggtgtccagtgcaagccaagtatatccagcacttaacgagaaggaactcatcgcagagaccatctgccattcagctgctgcagagtgaacttttccaaaattctggaaatgttaacctcaccctacagatgaagataatagagcaagaaaaagaaattgcagaactaaagaagcagctaaacctcctttctcaagacaaaggggtgagggatgacggaaaggatgggggcgtgggatgaaagtggacttaacttttaaggtagttaactggaatgtaaatttttaatctttattagggtatagttggtacaatgcttcgttgtatttagtaagcctttacaagacttgttaaagatgtcagagtgccccaagctgccgttccttcccttcctgccccacaagctccttttcctgaatttcctacctaaatattaaccatatgcctagtctctgaaactaaaaacttggacctcatcctcaattattttctcctttcaactctgttgaccctctgtctggtcttcctctagaaggttctaccgcagaaattgatgtgtgctccctgccctcgtcactgcccaagcccgggcctgcacatactcactggactgttccagttttgacagctgccagtcttcctgcccctttcacactgcagctgaagttcattacctgaaggacgcctcatcatttcattccttggctccaaaccttctgctgcctctaagataaaagctcaacttcttaacagtgtacagtgtgcaacttccaacctttttatctgttctctccaccttcagtttagcgtcattccaaaaccacacccttgcaaagctttgtactccgcaccccagatgatctccaggcagctcagatctctttcctgcctttgccctgcactgttccccggtacttcctcctttattgtagcactcagctccccagccaatctgtacatccctcagaggcagcgatctgatgaattggtttttgaatcccagaaatgagatgaaatgagatgttggaaggagaaatgagatgttggaaggagaaatgagatgttggaaggagaaatgagatgttggaagg

SEQ ID NO: 363501 - DNA, 2797 bp, Homo sapiens
tctctcgctcctcattcccccctccccaatcgctagtagaggctgtttgaatcggcgcagtgctgggctggccggcgggctgggctgcggcccgcgcgcggccggcgatgcaggggggcaactccggggtccgcaagcgcgaagaggagggcgacggggctggggctgtggctgcgccgccggccatcgactttcccgccgagggcccggaccccgaatatgacgaatctgatgttccagcagaaatccaggtgttaaaagaacccctacaacagccaaccttcccttttgcagttgcaaaccaactcttgctggtttctttgctggagcacttgagccacgtgcatgaaccaaacccacttcgttcaagacaggtgtttaagctactttgccagacgtttatcaaaatggggctgctgtcttctttcacttgtagtgacgagtttagctcattgagactacatcacaacagagctattactcacttaatgaggtctgctaaagagagagttcgtcaggatccttgtgaggatatttctcgtatccagaaaatcagatcaagggaagtagccttggaagcacaaacttcacgttacttaaatgaatttgaagaacttgccatcttaggaaaaggtggatacggaagagtatacaaggtcaggaataaattagatggtcagtattatgcaataaaaaaaatcctgattaagggtgcaactaaaacagtttgcatgaaggtcctacgggaagtgaaggtgctggcaggtcttcagcaccccaatattgttggctatcacaccgcgtggatagaacatgttcatgtgattcagccacgagcagacagagctgccattgagttgccatctctggaagtgctctccgaccaggaagaggacagagagcaatgtggtgttaaaaatgatgaaagtagcagctcatccattatctttgctgagcccaccccagaaaaagaaaaacgctttggagaatctgacactgaaaatcagaataacaagtcggtgaagtacaccaccaatttagtcataagagaatctggtgaacttgagtcgaccctggagctccaggaaaatggcttggctggtttgtctgccagttcaattgtggaacagcagctgccactcaggcgtaattcccacctagaggagagtttcacatccaccgaagaatcttccgaagaaaatgtcaactttttgggtcagacagaggcacagtaccacctgatgctgcacatccagatgcagctgtgtgagctctcgctgtgggattggatagtcgagagaaacaagcggggccgggagtatgtggacgagtctgcctgtccttatgttatggccaatgttgcaacaaaaatttttcaagaattggtagaaggtgtgttttacatacataacatgggaattgtgcaccgagatctgaagccaagaaatatttttcttcatggccctgatcagcaagtaaaaataggagactttggtctggcctgcacagacatcctacagaagaacacagactggaccaacagaaacgggaagagaacaccaacacatacgtccagagtgggtacttgtctgtacgcttcacccgaacagttggaaggatctgagtatgatgccaagtcagatatgtacagcttgggtgtggtcctgctagagctctttcagccgtttggaacagaaatggagcgagcagaagttctaacaggtttaagaactggtcagttgccggaatccctccgtaaaaggtgtccagtgcaagccaagtatatccagcacttaacgagaaggaactcatcgcagagaccatctgccattcagctgctgcagagtgaacttttccaaaattctggaaatgttaacctcaccctacagatgaagataatagagcaagaaaaagaaattgcagaactaaagaagcagctaaacctcctttctcaagacaaaggggtgagggatgacggaaaggatgggggcgtgggatgaaagtggacttaacttttaaggtagttaactggaatgtaaatttttaatctttattagggtatagttggtacaatgcttcgttgtatttagtaagcctttacaagacttgttaaagatgtcagagtgccccaagctgccgttccttcccttcctgccccacaagctccttttcctgaatttcctacctaaatattaaccatatgcctagtctctgaaactaaaaacttggacctcatcctcaattattttctcctttcaactctgttgaccctctgtctggtcttcctctagaaggttctaccgcagaaattgatgtgtgctccctgccctcgtcactgcccaagcccgggcctgcacatactcactggactgttccagttttgacagctgccagtcttcctgcccctttcacactgcagctgaagttcattacctgaaggacgcctcatcatttcattccttggctccaaaccttctgctgcctctaagataaaagctcaacttcttaacagtgtacagtgtgcaacttccaacctttttatctgttctctccaccttcagtttagcgtcattccaaaaccacacccttgcaaagctttgtactccgcaccccagatgatctccaggcagcggcacgaatttcaggcatgctgaggccggatccccttttgggcaggcccgcatggagctcaaggatctgagagggtagacaaagcgacgggagacaggaggtggggtaaaaaacaagggcttcgcgccatagtcgaatatacggggggctgtcatatatttatgta

SEQ ID NO: 363502 - DNA, 2373 bp, Homo sapiens
  misc_feature (22)..(22): n is a, c, g, or t
  misc_feature (24)..(24): n is a, c, g, or t
gcaggtgactctagaggatctntncggagagagaactggtcagttgccggaatccctccgtaaaaggtgtccagtgcaagccaagtatatccagcacttaacgagaaggaactcatcgcagagaccatctgccattcagctgctgcagagtgaacttttccaaaattctggaaatgttaacctcaccctacagatgaagataatagagcaagaaaaagaaattgcagaactaaagaagcagctaaacctcctttctcaagacaaaggggtgagggatgacggaaaggatgggggcgtgggatgaaagtggacttaacttttaaggtagttaactggaatgtaaatttttaatctttattagggtatagttggtacaatgcttcgttgtatttagtaagcctttacaagacttgttaaagatgtcagagtgccccaagctgccgttccttcccttcctgccccacaagctccttttcctgaatttcctacctaaatattaaccatatgcctagtctctgaaactaaaaacttggacctcatcctcaattattttctcctttcaactctgttgaccctctgtctggtcttcctctagaaggttctaccgcagaaattgatgtgtgctccctgccctcgtcactgcccaagcccgggcctgcacatactcactggactgttccagttttgacagctgccagtcttcctgcccctttcacactgcagctgaagttcattacctgaaggacgcctcatcatttcattccttggctccaaaccttctgctgcctctaagataaaagctcaacttcttaacagtgtacagtgtgcaacttccaacctttttatctgttctctccaccttcagtttagcgtcattccaaaaccacacccttgcaaagctttgtactccgcaccccagatgatctccaggcagctcagatctctttcctgcctttgccctgcactgttccccggtacttcctcctttattgtagcactcagctccccagccaatctgtacatccctcagaggcagcgatctgatgaattggtttttgaatcccagaaagggtctgccatggagttggcagtcatcacggtagatggcgtatgattttgctgaattttaaataaaatgaaaaccataaattacatgatgcttttattgacacttgacaactggcctaaataaaaagactctgactctaatacaagtccccttactgataataggcatgaaagagcaccattcttaaaatctaaaccctttaaaatcagttacggcaattcacttaaggagcttgagggccgtgttaaaaggagccaggttttcacaagacctcatccacctctgcacattggctggcactgtcacactgcagcctccgatctgctggagtacagaccacagcaccacgtctgctacggtgagttcattcccagcgagccaagggctcttcccaagagcagagttcatggagcggaaaacagcggctttttctttactgcttccctcttttaactgaaaaatcgcaatatctacccagctatctataagggttgcgttgacagcattatgcttctggccaaacagagagaacaagaaacgtgcaatgttcccttcgccttcgatggggcacatcgtctggatgctgaatttcatctgcgtcttcggcacattcttccaaattaaagtgaatcccagctgatagtcttggcggggctgttttttattctgttctccaaagcacttgagaaggttttcaggcacgctcttgaccgaggagtgcgtgtgcaccgtggacaggaccctgaagtgctcacagagcagcctgtgcagcacaagcagggagaggggaggggaggccgggtttgcgttgatcacgatgtctttcagcgccccgtaatccttcccaagcactgaattcaagtccagcgcattggtggttaaagtcgtgggctcatccgcttggattatgttggttacatccaagtctgcatctggtgtttgaatcatcttggagaggccatcaactgcagctttcaactcatacagacgttttaaaatatcatcttggcgggactcaagagcttgcagagacaggttagactcttcctgtacgtggccagcgcccggcgctgggccgtagctcctgccgtgcacgttggggagccggtacatgcaggtgggaagctccacacggagaggcgcgccgcccccgtgatagggctttacctggtacatcggcatggcagaaccaaagcaaaagggggtagcgcgtgccaaaggccaacgctcagaaaccgtcagaggtcacgacggagaccggccacctcccttctgaccctgctgcgggcgttcgggaaaacgca

SEQ ID NO: 363503 - DNA, 1819 bp, Homo sapiens
ggacgtgtgtgagtacggaatcaaaggaagcgctgtatctggtcatttcacgagcaggacacagataccattgcggtccttacacacgtttcatcagcatctccagtagttcatgttcacgtcctccatctccgtttggttgctgttgcacattggagtgtgaactgcaaaaatccccaaaaatcccagatcgacagcatatcttgtgcaggccctccaaaccttctgctgcctctaagataaaagctcaacttcttaacagtgtacagtgtgcaacttccaacctttttatctgttctctccaccttcagtttagcgtcattccaaaaccacacccttgcaaagctttgtactccgcaccccagatgatctccaggcagctcagatctctttcctgcctttgccctgcactgttccccggtacttcctcctttattgtagcactcagctccccagccaatctgtacatccctcagaggcagcgatctgatgaattggtttttgaatcccagaaagggtctgccatggagttggcagtcatcacggtagatggcgtatgattttgctgaattttaaataaaatgaaaaccataaattacatgatgcttttattgacacttgacaactggcctaaataaaaagactctgactctaatacaagtccccttactgataataggcatgaaagagcaccattcttaaaatctaaaccctttaaaatcagttacggcaattcacttaaggagcttgagggccgtgttaaaaggagccaggttttcacaagacctcatccacctctgcacattggctggcactgtcacactgcagcctccgatctgctggagtacagaccacagcaccacgtctgctacggtgagttcattcccagcgagccaagggctcttcccaagagcagagttcatggagcggaaaacagcggctttttctttactgcttccctcttttaactgaaaaatcgcaatatctacccagctatctataagggttgcgttgacagcattatgcttctggccaaacagagagaacaagaaacgtgcaatgttcccttcgccttcgatggggcacatcgtctggatgctgaatttcatctgcgtcttcggcacattcttccaaattaaagtgaatcccagctgatagtcttggcggggctgttttttattctgttctccaaagcacttgagaaggttttcaggcacgctcttgaccgaggagtgcgtgtgcaccgtggacaggaccctgaagtgctcacagagcagcctgtgcagcacaagcagggagaggggaggggaggccgggtttgcgttgatcacgatgtctttcagcgccccgtaatccttcccaagcactgaattcaagtccagcgcattggtggttaaagtcgtgggctcatccgcttggattatgttggttacatccaagtctgcatctggtgtttgaatcatcttggagaggccatcaactgcagctttcaactcatacagacgttttaaaatatcatcttggcgggactcaagagcttgcagagacaggttagactcttcctgtacgtggccagcgcccggcgctgggccgtagctcctgccgtgcacgttggggagccggtacatgcaggtgggaagctccacacggagaggcgcgccgcccccgtgatagggctttacctggtacatcggcatggcagaaccaaagcaaaagggggtagcgcgtgccaaaggccaacgctcagaaaccgtcagaggtcacgacggagaccggccacctcccttctgaccctgctgcgggcgttcgggaaaacgca

SEQ ID NO: 363504 - DNA, 1716 bp, Homo sapiens
gatcgaggtgtaatttcattcttctgcatatgggtattcagttttcccagtaccatttattgaagaaactgtcttttcttcagtgtatgttcttggcacctttgtcgaaaatgagttcactgtaggtgtgtggatttctttctgagttctctattctgttccattcatctatgtgtctgttttgatgctggtagcttgctgttttggttacgatggctctgtagcataatttgaagtcaggttatgtgattcctccagttttcttctttttgcttaggtcagatctctttcctgcctttgccctgcactgttccccggtacttcctcctttattgtagcactcagctccccagccaatctgtacatccctcagaggcagcgatctgatgaattggtttttgaatcccagaaagggtctgccatggagttggcagtcatcacggtagatggcgtatgattttgctgaattttaaataaaatgaaaaccataaattacatgatgcttttattgacacttgacaactggcctaaataaaaagactctgactctaatacaagtccccttactgataataggcatgaaagagcaccattcttaaaatctaaaccctttaaaatcagttacggcaattcacttaaggagcttgagggccgtgttaaaaggagccaggttttcacaagacctcatccacctctgcacattggctggcactgtcacactgcagcctccgatctgctggagtacagaccacagcaccacgtctgctacggtgagttcattcccagcgagccaagggctcttcccaagagcagagttcatggagcggaaaacagcggctttttctttactgcttccctcttttaactgaaaaatcgcaatatctacccagctatctataagggttgcgttgacagcattatgcttctggccaaacagagagaacaagaaacgtgcaatgttcccttcgccttcgatggggcacatcgtctggatgctgaatttcatctgcgtcttcggcacattcttccaaattaaagtgaatcccagctgatagtcttggcggggctgttttttattctgttctccaaagcacttgagaaggttttcaggcacgctcttgaccgaggagtgcgtgtgcaccgtggacaggaccctgaagtgctcacagagcagcctgtgcagcacaagcagggagaggggaggggaggccgggtttgcgttgatcacgatgtctttcagcgccccgtaatccttcccaagcactgaattcaagtccagcgcattggtggttaaagtcgtgggctcatccgcttggattatgttggttacatccaagtctgcatctggtgtttgaatcatcttggagaggccatcaactgcagctttcaactcatacagacgttttaaaatatcatcttggcgggactcaagagcttgcagagacaggttagactcttcctgtacgtggccagcgcccggcgctgggccgtagctcctgccgtgcacgttggggagccggtacatgcaggtgggaagctccacacggagaggcgcgccgcccccgtgatagggctttacctggtacatcggcatggcagaaccaaagcaaaagggggtagcgcgtgccaaaggccaacgctcagaaaccgtcagaggtcacgacggagaccggccacctcccttctgaccctgctgcgggcgttcgggaaaacgca

SEQ ID NO: 363505 - DNA, 1343 bp, Homo sapiens
ggttttccgtctggtgaggggttacttccgggtcggacggcgctagctgcagcatcggagtgtggcagtgctgggctggccggcgggctgggctgcggcccgcgcgcggccggcgatgcaggggggcaactccggggtccgcaagcgcgaagaggagggcgacggggctggggctgtggctgcgccgccggccatcgactttcccgccgagggcccggaccccgaatatgacgaatctgatgttccagcagaaatccaggtgttaaaagaacccctacaacagccaaccttcccttttgcagttgcaaaccaactcttgctggtttctttgctggagcacttgagccacgtgcatgaaccaaacccacttcgttcaagacaggtgtttaagctactttgccagacgtttatcaaaatggggctgctgtcttctttcacttgtagtgacgagtttagctcattgagactacatcacaacagagctattactcacttaatgaggtctgctaaagagagagttcgtcaggatccttgtgaggatatttctcgtatccagaaaatcagatcaagggaagtagccttggaagcacaaacttcacgttacttaaatgaatttgaagaacttgccatcttaggaaaaggtggatacggaagagtatacaaggtcaggaataaattagatggtcagtattatgcaataaaaaaaatcctgattaagggtgcaactaaaacagtttgcatgaaggtcctacgggaagtgaaggtgctggcaggtcttcagcaccccaatattgttggctatcacaccgcgtggatagaacatgttcatgtgattcagccacgagcagacagagctgccattgagttgccatctctggaagtgctctccgaccaggaagaggacagagagcaatgtggtgttaaaaatgatgaaagtagcagctcatccattatctttgctgagcccaccccagaaaaagaaaaacgctttggagaatctgacactgaaaatcagaataacaagtcggtgaagtacaccaccaatttagtcataagagaatctggtgaacttgagtcgaccctggagctccaggaaaatggcttggctggtttgtctgccagttcaattgtggaacagcagctgccactcaggcgtaattcccacctagaggagagtttcacatccaccgaagaatcttccgaagaaaatgtcaactttttgggtcagacagaggtagattactttcccagaccctcctaatttggccagtattggtgactgtgcaggtgtgtggccttctctcgccctctctcagctctggcgcttctgccctgcgttcagt

SEQ ID NO: 363506 - DNA, 1704 bp, Homo sapiens
tctctcgctcctcattcccccctccccaatcgctagtagaggctgtttgaatcggcgcagtgctgggctggccggcgggctgggctgcggcccgcgcgcggccggcgatgcaggggggcaactccggggtccgcaagcgcgaagaggagggcgacggggctggggctgtggctgcgccgccggccatcgactttcccgccgagggcccggaccccgaatatgacgaatctgatgttccagcagaaatccaggtgttaaaagaacccctacaacagccaaccttcccttttgcagttgcaaaccaactcttgctggtttctttgctggagcacttgagccacgtgcatgaaccaaacccacttcgttcaagacaggtgtttaagctactttgccagacgtttatcaaaatggggctgctgtcttctttcacttgtagtgacgagtttagctcattgagactacatcacaacagagctattactcacttaatgaggtctgctaaagagagagttcgtcaggatccttgtgaggatatttctcgtatccagaaaatcagatcaagggaagtagccttggaagcacaaacttcacgttacttaaatgaatttgaagaacttgccatcttaggaaaaggtggatacggaagagtatacaaggtcaggaataaattagatggtcagtattatgcaataaaaaaaatcctgattaagggtgcaactaaaacagtttgcatgaaggtcctacgggaagtgaaggtgctggcaggtcttcagcaccccaatattgttggctatcacaccgcgtggatagaacatgttcatgtgattcagccacgagcagacagagctgccattgagttgccatctctggaagtgctctccgaccaggaagaggacagagagcaatgtggtgttaaaaatgatgaaagtagcagctcatccattatctttgctgagcccaccccagaaaaagaaaaacgctttggagaatctgacactgaaaatcagaataacaagtcggtgaagtacaccaccaatttagtcataagagaatctggtgaacttgagtcgaccctggagctccaggaaaatggcttggctggtttgtctgccagttcaattgtggaacagcagctgccactcaggcgtaattcccacctagaggagagtttcacatccaccgaagaatcttccgaagaaaatgtcaactttttgggtcagacagaggcacagtaccacctgatgctgcacatccagatgcagctgtgtgagctctcgctgtgggattggatagtcgagagaaacaagcggggccgggagtatgtggacgagtctgcctgtcttatgtacatggccacatgtcgcaaacaacaacatcttcaccgactggtacgaaggtgtgttacatacactaacatgacaaattgggccaccgagaatctgacgccactgaaatatccactcccaggcccctgcccagcaagtacaaaataggcgactacggctcgggcctgaacagaaatccctacagaagcacccgaacggaccagcagacaccggggcagacaaccaccacaactagctccgaggggacacatgcagacgccaaaccgcaaagagcaagcacggaaaagaaccaccaaaaagaacaagctgtgccgcaaacccacacgtcgacgaaacgcaccaagtccacgtcaacgga

SEQ ID NO: 363507 - DNA, 1461 bp, Homo sapiens
accccccgcggggatacgctctggacctggaaccggtgcccggacccttggatggtccgaacccgggtcccccggtttttatttgggggaaccaaccacggtcatggccgtgtcccttggaccccgtatgcccagttccccttaccatatgggcccccgcccccaaacggaggggtttgaaaccttttttaagggccagccgcccccaaaatttttttttttttttttttttttttttggcatgatgcttttattgacacttgacaactggcctaaataaaaagactctgactctaatacaagtccccttactgataataggcatgaaagagcaccattcttaaaatctaaaccctttaaaatcagttacggcaattcacttaaggagcttgagggccgtgttaaaaggagccaggttttcacaagacctcatccacctctgcacattggctggcactgtcacactgcagcctccgatctgctggagtacagaccacagcaccacgtctgctacggtgagttcattcccagcgagccaagggctcttcccaagagcagagttcatggagcggaaaacagcggctttttctttactgcttccctcttttaactgaaaaatcgcaatatctacccagctatctataagggttgcgttgacagcattatgcttctggccaaacagagagaacaagaaacgtgcaatgttcccttcgccttcgatggggcacatcgtctggatgctgaatttcatctgcgtcttcggcacattcttccaaattaaagtgaatcccagctgatagtcttggcggggctgttttttattctgttctccaaagcacttgagaaggttttcaggcacgctcttgaccgaggagtgcgtgtgcaccgtggacaggaccctgaagtgctcacagagcagcctgtgcagcacaagcagggagaggggaggggaggccgggtttgcgttgatcacgatgtctttcagcgccccgtaatccttcccaagcactgaattcaagtccagcgcattggtggttaaagtcgtgggctcatccgcttggattatgttggttacatccaagtctgcatctggtgtttgaatcatcttggagaggccatcaactgcagctttcaactcatacagacgttttaaaatatcatcttggcgggactcaagagcttgcagagacaggttagactcttcctgtacgtggccagcgcccggcgctgggccgtagctcctgccgtgcacgttggggagccggtacatgcaggtgggaagctccacacggagaggcgcgccgcccccgtgatagggctttacctggtacatcggcatggcagaaccaaagcaaaagggggtagcgcgtgccaaaggccaacgctcagaaaccgtcagaggtcacgacggagaccggccacctcccttctgaccctgctgcgggcgttcgggaaaacgca

SEQ ID NO: 363508 - DNA, 1495 bp, Homo sapiens
ctcactcctcccctcccccctccctccctccccctcccccccctcccccccccccccccccccccaccccccccccccccccccccccccccccccccctcctcccccccccccccccccccccccccccccccccccccccccctccccccctcccaccccccccccccacccccacccccaacctgactgtaataaggctacgatgccctgcgtttaatattcagtcacgcaggggcaggcggaaaacagcggctttttctttactgcttccctcttttaactgaaaaatcgcaatatctacccagctatctataagggttgcgttgacagcattatgcttctggccaaacagagagaacaagaaacgtgcaatgttcccttcgccttcgatggggcacatcgtctggatgctgaatttcatctgcgtcttcggcactgaaaagaaaaaacacgccaggtagcatcaccagagcagccctgagggaagtactcgcacagtggggaaggggacagtcaccaaacaccacagactgatgacatgggaaagggtgttttcaagaagaacatcacattttcagtctgtctctaagatgcttactactgaaaagggtttaagtgcaaactatgttaaaaaagtaaccaaagagtcattcctggtatttgattatgacacttctgaagctagaagggacctcagaccacctgctccaatccctgctgcctaaggttttgggggctgagggctggaaacccaggagctgcatctcccaggctcttggcctcataatcgccttctgtgagactgagggcaattaagatatgaatgacatgaactcgcttctctccatatcaacataaaccagaagaggcatacatctgtgggatagtcaatacataacatcctatctttatatggccatatgagaagataacttcagtgtccctatgatggtaagttcttgaatgtgagggcaagatggctgtgatagccatgactccccgctttgcctggttggacagaacccccttccccaaatgctcacagtcccccccttgagctgtgtctcactcagagaccctaaattttgcagacgaacaagggcatctttgcgttgcttcatctctgctcctcctctagaactatcccacaggctttctagacttagaatatctgacctgatgcaaatcgctatgtggccagtatgccacagaatgtcctaaacccttgctgcctcttatcaaaaccatgttgcacatctcatcatatagtacagctaacccttgaacagtgggggggttagggacactgacccccgactgctgtgcagtcgaaaatccacataaaacttctgactccttcaaaacttaagcactaatagcctactattcatgggaagccttacccatcacagttgattaacacgttttgtatggtctgtatattatatgctatgttcttacaataaacttgagaaaatgttaagaaaataaa

SEQ ID NO: 363509 - DNA, 984 bp, Homo sapiens
  misc_feature (960)..(960): n is a, c, g, or t
tctctcgctcctcattcccccctccccaatcgctagtagaggctgtttgaatcggcgcagtgctgggctggccggcgggctgggctgcggcccgcgcgcggccggcgatgcaggggggcaactccggggtccgcaagcgcgaagaggagggcgacggggctggggctgtggctgcgccgccggccatcgactttcccgccgagggcccggaccccgaatatgacgaatctgatgttccagcagaaatccaggtgttaaaagaacccctacaacagccaaccttcccttttgcagttgcaaaccaactcttgctggtttctttgctggagcacttgagccacgtgcatgaaccaaacccacttcgttcaagacaggtgtttaagcagtgtgtcctgcccagagctcttggaccagcattatactgtggacatgacagaaactgagcactctatccagcacccagtcaccaagactgccacgcggcgcatcgtccatgcaggcctacagcccaatcctggtgaccccagtgctgggcaccactccttggccctgtgccctgaattggcaccttacgcaaccatcctggcctccatcgtggacagcaaaccaaacggtgtccgccagcggcccattgccttcgacaatgccactcactattacctctacaaccgcctcatggacttcctcaccagccgcgaaattgtcaatcgtcagatccatgacattgtacagagctgccagcctggtgaggtggtcattcgtgacaccctctaccgccttggggttgctcagatcaagacagagacagaggaggagggtgaggaagaggaggtggccgcagtggcagaataagccaggctgttgtacagggactacaccatctctcaagccatagtaaggcccttgcctgaggcagagctatccaggggacctgcagaagtggtctcctgtggggagggnctctgactgctgggactgaccaaa

SEQ ID NO: 363510 - DNA, 388 bp, Homo sapiens
gcttcacccgaacagttggaaggatctgagtatgatgccaaggtagtatttgttgctttctgccctttcattcaacttattctgcagtcttaaataacaatacagggttgggtgcagtggctcacgcctgtaatcccagcactttgggaggccgaggtgggtggatcaccggaggtcaggagttcaagaccagcctggtcaacatggtgaaacctggtctctactaaaaatacaaaaattatctgggtgcgatggcacatgcctgtagtcccagctactctggaggctgaggcatgagaatcatttgaatctgggaggcagaggttgcagtgagccgaggttgcaccattgcactccatcctggatgacaagagcaaaactccatctc

SEQ ID NO: 363511 - DNA, 395 bp, Homo sapiens
ttctggttgacaaagtccatcaactgttgggtgctggtttgtgatggtttctttgccagctgaggaagccttcctgcttatttctaggttttagaccattctgcagcattgactttgttgaaaatctagattgttcttaagtgtcagatgttaatgtatttagaatgacattaatatttagatgcccatgtaatgagtaaaaaaattagagaaataaaactatttttttttacttcaaggtccttatgttatggccaatgttgcaacaaaaatttttcaagaattggtagaaggtgtgttttacatacataacatgggaattgtgcaccgagatctgaaggtaagtgggggcgatgaaatcattgaaagcagtgggagctttgtatcagggacga

SEQ ID NO: 363512 - DNA, 4438 bp, Homo sapiens
ggttttccgtctggtgaggggttacttccgggtcggacggcgctagctgcagcatcggagtgtggcagtgctgggctggccggcgggctgggctgcggcccgcgcgcggccggcgatgcaggggggcaactccggggtccgcaagcgcgaagaggagggcgacggggctggggctgtggctgcgccgccggccatcgactttcccgccgagggcccggaccccgaatatgacgaatctgatgttccagcagaaatccaggtgttaaaagaacccctacaacagccaaccttcccttttgcagttgcaaaccaactcttgctggtttctttgctggagcacttgagccacgtgcatgaaccaaacccacttcgttcaagacaggtgtttaagctactttgccagacgtttatcaaaatggggctgctgtcttctttcacttgtagtgacgagtttagctcattgagactacatcacaacagagctattactcacttaatgaggtctgctaaagagagagttcgtcaggatccttgtgaggatatttctcgtatccagaaaatcagatcaagggaagtagccttggaagcacaaacttcacgttacttaaatgaatttgaagaacttgccatcttaggaaaaggtggatacggaagagtatacaaggtcaggaataaattagatggtcagtattatgcaataaaaaaaatcctgattaagggtgcaactaaaacagtttgcatgaaggtcctacgggaagtgaaggtgctggcaggtcttcagcaccccaatattgttggctatcacaccgcgtggatagaacatgttcatgtgattcagccacgagcagacagagctgccattgagttgccatctctggaagtgctctccgaccaggaagaggacagagagcaatgtggtgttaaaaatgatgaaagtagcagctcatccattatctttgctgagcccaccccagaaaaagaaaaacgctttggagaatctgacactgaaaatcagaataacaagtcggtgaagtacaccaccaatttagtcataagagaatctggtgaacttgagtcgaccctggagctccaggaaaatggcttggctggtttgtctgccagttcaattgtggaacagcagctgccactcaggcgtaattcccacctagaggagagtttcacatccaccgaagaatcttccgaagaaaatgtcaactttttgggtcagacagaggcacagtaccacctgatgctgcacatccagatgcagctgtgtgagctctcgctgtgggattggatagtcgagagaaacaagcggggccgggagtatgtggacgagtctgcctgtccttatgttatggccaatgttgcaacaaaaatttttcaagaattggtagaaggtgtgttttacatacataacatgggaattgtgcaccgagatctgaagccaagaaatatttttcttcatggccctgatcagcaagtaaaaataggagactttggtctggcctgcacagacatcctacagaagaacacagactggaccaacagaaacgggaagagaacaccaacacatacgtccagagtgggtacttgtctgtacgcttcacccgaacagttggaaggatctgagtatgatgccaagtcagatatgtacagcttgggtgtggtcctgctagagctctttcagccgtttggaacagaaatggagcgagcagaagttctaacaggtttaagaactggtcagttgccggaatccctccgtaaaaggtgtccagtgcaagccaagtatatccagcacttaacgagaaggaactcatcgcagagaccatctgccattcagctgctgcagagtgaacttttccaaaattctggaaatgttaacctcaccctacagatgaagataatagagcaagaaaaagaaattgcagaactaaagaagcagctaaacctcctttctcaagacaaaggggtgagggatgacggaaaggatgggggcgtgggatgaaagtggacttaacttttaaggtagttaactggaatgtaaatttttaatctttattagggtatagttggtacaatgcttcgttgtatttagtaagcctttacaagacttgttaaagatgtcagagtgccccaagctgccgttccttcccttcctgccccacaagctccttttcctgaatttcctacctaaatattaaccatatgcctagtctctgaaactaaaaacttggacctcatcctcaattattttctcctttcaactctgttgaccctctgtctggtcttcctctagaaggttctaccgcagaaattgatgtgtgctccctgccctcgtcactgcccaagcccgggcctgcacatactcactggactgttccagttttgacagctgccagtcttcctgcccctttcacactgcagctgaagttcattacctgaaggacgcctcatcatttcattccttggctccaaaccttctgctgcctctaagataaaagctcaacttcttaacagtgtacagtgtgcaacttccaacctttttatctgttctctccaccttcagtttagcgtcattccaaaaccacacccttgcaaagctttgtactccgcaccccagatgatctccaggcagctcagatctctttcctgcctttgccctgcactgttccccggtacttcctcctttattgtagcactcagctccccagccaatctgtacatccctcagaggcagcgatctgatgaattggtttttgaatcccagaaagggtctgccatggagttggcagtcatcacggtagatggcgtatgattttgctgaattttaaataaaatgaaaaccataaattacatgatgcttttattgacacttgacaactggcctaaataaaaagactctgactctaatacaagtccccttactgataataggcatgaaagagcaccattcttaaaatctaaaccctttaaaatcagttacggcaattcacttaaggagcttgagggccgtgttaaaaggagccaggttttcacaagacctcatccacctctgcacattggctggcactgtcacactgcagcctccgatctgctggagtacagaccacagcaccacgtctgctacggtgagttcattcccagcgagccaagggctcttcccaagagcagagttcatggagcggaaaacagcggctttttctttactgcttccctcttttaactgaaaaatcgcaatatctacccagctatctataagggttgcgttgacagcattatgcttctggccaaacagagagaacaagaaacgtgcaatgttcccttcgccttcgatggggcacatcgtctggatgctgaatttcatctgcgtcttcggcactgaaaagaaaaaacacgccaggtagcatcaccagagcagccctgagggaagtactcgcacagtggggaaggggacagtcaccaaacaccacagactgatgacatgggaaagggtgttttcaagaagaacatcacattttcagtctgtctctaagatgcttactactgaaaagggtttaagtgcaaactatgttaaaaaagtaaccaaagagtcattcctggtatttgattatgacacttctgaagctagaagggacctcagaccacctgctccaatccctgctgcctaaggttttgggggctgagggctggaaacccaggagctgcatctcccaggctcttggcctcataatcgccttctgtgagactgagggcaattaagatatgaatgacatgaactcgcttctctccatatcaacataaaccagaagaggcatacatctgtgggatagtcaatacataacatcctatctttatatggccatatgagaagataacttcagtgtccctatgatggtaagttcttgaatgtgagggcaagatggctgtgatagccatgactccccgctttgcctggttggacagaacccccttccccaaatgctcacagtcccccccttgagctgtgtctcactcagagaccctaaattttgcagacgaacaagggcatctttgcgttgcttcatctctgctcctcctctagaactatcccacaggctttctagacttagaatatctgacctgatgcaaatcgctatgtggccagtatgccacagaatgtcctaaacccttgctgcctcttatcaaaaccatgttgcacatctcatcatatagtacagctaacccttgaacagtgggggggttagggacactgacccccgactgctgtgcagtcgaaaatccacataaaacttctgactccttcaaaacttaagcactaatagcctactattcatgggaagccttacccatcacagttgattaacacgttttgtatggtctgtatattatatgctatgttcttacaataaacttgagaaaatgttaagaaaataaa

SEQ ID NO: 363513 - DNA, 2913 bp, Homo sapiens
ggttttccgtctggtgaggggttacttccgggtcggacggcgctagctgcagcatcggagtgtggcagtgctgggctggccggcgggctgggctgcggcccgcgcgcggccggcgatgcaggggggcaactccggggtccgcaagcgcgaagaggagggcgacggggctggggctgtggctgcgccgccggccatcgactttcccgccgagggcccggaccccgaatatgacgaatctgatgttccagcagaaatccaggtgttaaaagaacccctacaacagccaaccttcccttttgcagttgcaaaccaactcttgctggtttctttgctggagcacttgagccacgtgcatgaaccaaacccacttcgttcaagacaggtgtttaagctactttgccagacgtttatcaaaatggggctgctgtcttctttcacttgtagtgacgagtttagctcattgagactacatcacaacagagctattactcacttaatgaggtctgctaaagagagagttcgtcaggatccttgtgaggatatttctcgtatccagaaaatcagatcaagggaagtagccttggaagcacaaacttcacgttacttaaatgaatttgaagaacttgccatcttaggaaaaggtggatacggaagagtatacaaggtcaggaataaattagatggtcagtattatgcaataaaaaaaatcctgattaagggtgcaactaaaacagtttgcatgaaggtcctacgggaagtgaaggtgctggcaggtcttcagcaccccaatattgttggctatcacaccgcgtggatagaacatgttcatgtgattcagccacgagcagacagagctgccattgagttgccatctctggaagtgctctccgaccaggaagaggacagagagcaatgtggtgttaaaaatgatgaaagtagcagctcatccattatctttgctgagcccaccccagaaaaagaaaaacgctttggagaatctgacactgaaaatcagaataacaagtcggtgaagtacaccaccaatttagtcataagagaatctggtgaacttgagtcgaccctggagctccaggaaaatggcttggctggtttgtctgccagttcaattgtggaacagcagctgccactcaggcgtaattcccacctagaggagagtttcacatccaccgaagaatcttccgaagaaaatgtcaactttttgggtcagacagaggcacagtaccacctgatgctgcacatccagatgcagctgtgtgagctctcgctgtgggattggatagtcgagagaaacaagcggggccgggagtatgtggacgagtctgcctgtccttatgttatggccaatgttgcaacaaaaatttttcaagaattggtagaaggtgtgttttacatacataacatgggaattgtgcaccgagatctgaagccaagaaatatttttcttcatggccctgatcagcaagtaaaaataggagactttggtctggcctgcacagacatcctacagaagaacacagactggaccaacagaaacgggaagagaacaccaacacatacgtccagagtgggtacttgtctgtacgcttcacccgaacagttggaaggatctgagtatgatgccaagtcagatatgtacagcttgggtgtggtcctgctagagctctttcagccgtttggaacagaaatggagcgagcagaagttctaacaggtttaagaactggtcagttgccggaatccctccgtaaaaggtgtccagtgcaagccaagtatatccagcacttaacgagaaggaactcatcgcagagaccatctgccattcagctgctgcagagtgaacttttccaaaattctggaaatgttaacctcaccctacagatgaagataatagagcaagaaaaagaaattgcagaactaaagaagcagctaaacctcctttctcaagacaaaggggtgagggatgacggaaaggatgggggcgtgggatgaaagtggacttaacttttaaggtagttaactggaatgtaaatttttaatctttattagggtatagttggtacaatgcttcgttgtatttagtaagcctttacaagacttgttaaagatgtcagagtgccccaagctgccgttccttcccttcctgccccacaagctccttttcctgaatttcctacctaaatattaaccatatgcctagtctctgaaactaaaaacttggacctcatcctcaattattttctcctttcaactctgttgaccctctgtctggtcttcctctagaaggttctaccgcagaaattgatgtgtgctccctgccctcgtcactgcccaagcccgggcctgcacatactcactggactgttccagttttgacagctgccagtcttcctgcccctttcacactgcagctgaagttcattacctgaaggacgcctcatcatttcattccttggctccaaaccttctgctgcctctaagataaaagctcaacttcttaacagtgtacagtgtgcaacttccaacctttttatctgttctctccaccttcagtttagcgtcattccaaaaccacacccttgcaaagctttgtactccgcaccccagatgatctccaggcagctcagatctctttcctgcctttgccctgcactgttccccggtacttcctcctttattgtagcactcagctccccagccaatctgtacatccctcagaggcagcgatctgatgaattggtttttgaatcccagaaagggtctgccatggagttggcagtcatcacggtagatggcgtatgattttgctgaattttaaataaaatgaaaaccataaattacatgatgcttttattgacacttgacaactggcctaaataaaaagactctgactctaa

SEQ ID NO: 363514 - DNA, 3949 bp, Homo sapiens
tctctcgctcctcattcccccctccccaatcgctagtagaggctgtttgaatcggcgcagtgctgggctggccggcgggctgggctgcggcccgcgcgcggccggcgatgcaggggggcaactccggggtccgcaagcgcgaagaggagggcgacggggctggggctgtggctgcgccgccggccatcgactttcccgccgagggcccggaccccgaatatgacgaatctgatgttccagcagaaatccaggtgttaaaagaacccctacaacagccaaccttcccttttgcagttgcaaaccaactcttgctggtttctttgctggagcacttgagccacgtgcatgaaccaaacccacttcgttcaagacaggtgtttaagctactttgccagacgtttatcaaaatggggctgctgtcttctttcacttgtagtgacgagtttagctcattgagactacatcacaacagagctattactcacttaatgaggtctgctaaagagagagttcgtcaggatccttgtgaggatatttctcgtatccagaaaatcagatcaagggaagtagccttggaagcacaaacttcacgttacttaaatgaatttgaagaacttgccatcttaggaaaaggtggatacggaagagtatacaaggtcaggaataaattagatggtcagtattatgcaataaaaaaaatcctgattaagggtgcaactaaaacagtttgcatgaaggtcctacgggaagtgaaggtgctggcaggtcttcagcaccccaatattgttggctatcacaccgcgtggatagaacatgttcatgtgattcagccacgagcagacagagctgccattgagttgccatctctggaagtgctctccgaccaggaagaggacagagagcaatgtggtgttaaaaatgatgaaagtagcagctcatccattatctttgctgagcccaccccagaaaaagaaaaacgctttggagaatctgacactgaaaatcagaataacaagtcggtgaagtacaccaccaatttagtcataagagaatctggtgaacttgagtcgaccctggagctccaggaaaatggcttggctggtttgtctgccagttcaattgtggaacagcagctgccactcaggcgtaattcccacctagaggagagtttcacatccaccgaagaatcttccgaagaaaatgtcaactttttgggtcagacagaggcacagtaccacctgatgctgcacatccagatgcagctgtgtgagctctcgctgtgggattggatagtcgagagaaacaagcggggccgggagtatgtggacgagtctgcctgtccttatgttatggccaatgttgcaacaaaaatttttcaagaattggtagaaggtgtgttttacatacataacatgggaattgtgcaccgagatctgaagccaagaaatatttttcttcatggccctgatcagcaagtaaaaataggagactttggtctggcctgcacagacatcctacagaagaacacagactggaccaacagaaacgggaagagaacaccaacacatacgtccagagtgggtacttgtctgtacgcttcacccgaacagttggaaggatctgagtatgatgccaagtcagatatgtacagcttgggtgtggtcctgctagagctctttcagccgtttggaacagaaatggagcgagcagaagttctaacaggtttaagaactggtcagttgccggaatccctccgtaaaaggtgtccagtgcaagccaagtatatccagcacttaacgagaaggaactcatcgcagagaccatctgccattcagctgctgcagagtgaacttttccaaaattctggaaatgttaacctcaccctacagatgaagataatagagcaagaaaaagaaattgcagaactaaagaagcagctaaacctcctttctcaagacaaaggggtgagggatgacggaaaggatgggggcgtgggatgaaagtggacttaacttttaaggtagttaactggaatgtaaatttttaatctttattagggtatagttggtacaatgcttcgttgtatttagtaagcctttacaagacttgttaaagatgtcagagtgccccaagctgccgttccttcccttcctgccccacaagctccttttcctgaatttcctacctaaatattaaccatatgcctagtctctgaaactaaaaacttggacctcatcctcaattattttctcctttcaactctgttgaccctctgtctggtcttcctctagaaggttctaccgcagaaattgatgtgtgctccctgccctcgtcactgcccaagcccgggcctgcacatactcactggactgttccagttttgacagctgccagtcttcctgcccctttcacactgcagctgaagttcattacctgaaggacgcctcatcatttcattccttggctccaaaccttctgctgcctctaagataaaagctcaacttcttaacagtgtacagtgtgcaacttccaacctttttatctgttctctccaccttcagtttagcgtcattccaaaaccacacccttgcaaagctttgtactccgcaccccagatgatctccaggcagctcagatctctttcctgcctttgccctgcactgttccccggtacttcctcctttattgtagcactcagctccccagccaatctgtacatccctcagaggcagcgatctgatgaattggtttttgaatcccagaaagggtctgccatggagttggcagtcatcacggtagatggcgtatgattttgctgaattttaaataaaatgaaaaccataaattacatgatgcttttattgacacttgacaactggcctaaataaaaagactctgactctaatacaagtccccttactgataataggcatgaaagagcaccattcttaaaatctaaaccctttaaaatcagttacggcaattcacttaaggagcttgagggccgtgttaaaaggagccaggttttcacaagacctcatccacctctgcacattggctggcactgtcacactgcagcctccgatctgctggagtacagaccacagcaccacgtctgctacggtgagttcattcccagcgagccaagggctcttcccaagagcagagttcatggagcggaaaacagcggctttttctttactgcttccctcttttaactgaaaaatcgcaatatctacccagctatctataagggttgcgttgacagcattatgcttctggccaaacagagagaacaagaaacgtgcaatgttcccttcgccttcgatggggcacatcgtctggatgctgaatttcatctgcgtcttcggcacattcttccaaattaaagtgaatcccagctgatagtcttggcggggctgttttttattctgttctccaaagcacttgagaaggttttcaggcacgctcttgaccgaggagtgcgtgtgcaccgtggacaggaccctgaagtgctcacagagcagcctgtgcagcacaagcagggagaggggaggggaggccgggtttgcgttgatcacgatgtctttcagcgccccgtaatccttcccaagcactgaattcaagtccagcgcattggtggttaaagtcgtgggctcatccgcttggattatgttggttacatccaagtctgcatctggtgtttgaatcatcttggagaggccatcaactgcagctttcaactcatacagacgttttaaaatatcatcttggcgggactcaagagcttgcagagacaggttagactcttcctggtacatcggcatggcagaaccaaagcaaaagggggtagcgcgtgccaaaggccaacgctcagaaaccgtcagaggtcacgacggagaccggccacctcccttctgaccctgctgcgggcgttcgggaaaacgca

SEQ ID NO: 363515 - DNA, 4430 bp, Homo sapiens
tctctcgctcctcattcccccctccccaatcgctagtagaggctgtttgaatcggcgcagtgctgggctggccggcgggctgggctgcggcccgcgcgcggccggcgatgcaggggggcaactccggggtccgcaagcgcgaagaggagggcgacggggctggggctgtggctgcgccgccggccatcgactttcccgccgagggcccggaccccgaatatgacgaatctgatgttccagcagaaatccaggtgttaaaagaacccctacaacagccaaccttcccttttgcagttgcaaaccaactcttgctggtttctttgctggagcacttgagccacgtgcatgaaccaaacccacttcgttcaagacaggtgtttaagctactttgccagacgtttatcaaaatggggctgctgtcttctttcacttgtagtgacgagtttagctcattgagactacatcacaacagagctattactcacttaatgaggtctgctaaagagagagttcgtcaggatccttgtgaggatatttctcgtatccagaaaatcagatcaagggaagtagccttggaagcacaaacttcacgttacttaaatgaatttgaagaacttgccatcttaggaaaaggtggatacggaagagtatacaaggtcaggaataaattagatggtcagtattatgcaataaaaaaaatcctgattaagggtgcaactaaaacagtttgcatgaaggtcctacgggaagtgaaggtgctggcaggtcttcagcaccccaatattgttggctatcacaccgcgtggatagaacatgttcatgtgattcagccacgagcagacagagctgccattgagttgccatctctggaagtgctctccgaccaggaagaggacagagagcaatgtggtgttaaaaatgatgaaagtagcagctcatccattatctttgctgagcccaccccagaaaaagaaaaacgctttggagaatctgacactgaaaatcagaataacaagtcggtgaagtacaccaccaatttagtcataagagaatctggtgaacttgagtcgaccctggagctccaggaaaatggcttggctggtttgtctgccagttcaattgtggaacagcagctgccactcaggcgtaattcccacctagaggagagtttcacatccaccgaagaatcttccgaagaaaatgtcaactttttgggtcagacagaggcacagtaccacctgatgctgcacatccagatgcagctgtgtgagctctcgctgtgggattggatagtcgagagaaacaagcggggccgggagtatgtggacgagtctgcctgtccttatgttatggccaatgttgcaacaaaaatttttcaagaattggtagaaggtgtgttttacatacataacatgggaattgtgcaccgagatctgaagccaagaaatatttttcttcatggccctgatcagcaagtaaaaataggagactttggtctggcctgcacagacatcctacagaagaacacagactggaccaacagaaacgggaagagaacaccaacacatacgtccagagtgggtacttgtctgtacgcttcacccgaacagttggaaggatctgagtatgatgccaagtcagatatgtacagcttgggtgtggtcctgctagagctctttcagccgtttggaacagaaatggagcgagcagaagttctaacaggtttaagaactggtcagttgccggaatccctccgtaaaaggtgtccagtgcaagccaagtatatccagcacttaacgagaaggaactcatcgcagagaccatctgccattcagctgctgcagagtgaacttttccaaaattctggaaatgttaacctcaccctacagatgaagataatagagcaagaaaaagaaattgcagaactaaagaagcagctaaacctcctttctcaagacaaaggggtgagggatgacggaaaggatgggggcgtgggatgaaagtggacttaacttttaaggtagttaactggaatgtaaatttttaatctttattagggtatagttggtacaatgcttcgttgtatttagtaagcctttacaagacttgttaaagatgtcagagtgccccaagctgccgttccttcccttcctgccccacaagctccttttcctgaatttcctacctaaatattaaccatatgcctagtctctgaaactaaaaacttggacctcatcctcaattattttctcctttcaactctgttgaccctctgtctggtcttcctctagaaggttctaccgcagaaattgatgtgtgctccctgccctcgtcactgcccaagcccgggcctgcacatactcactggactgttccagttttgacagctgccagtcttcctgcccctttcacactgcagctgaagttcattacctgaaggacgcctcatcatttcattccttggctccaaaccttctgctgcctctaagataaaagctcaacttcttaacagtgtacagtgtgcaacttccaacctttttatctgttctctccaccttcagtttagcgtcattccaaaaccacacccttgcaaagctttgtactccgcaccccagatgatctccaggcagctcagatctctttcctgcctttgccctgcactgttccccggtacttcctcctttattgtagcactcagctccccagccaatctgtacatccctcagaggcagcgatctgatgaattggtttttgaatcccagaaagggtctgccatggagttggcagtcatcacggtagatggcgtatgattttgctgaattttaaataaaatgaaaaccataaattacatgatgcttttattgacacttgacaactggcctaaataaaaagactctgactctaatacaagtccccttactgataataggcatgaaagagcaccattcttaaaatctaaaccctttaaaatcagttacggcaattcacttaaggagcttgagggccgtgttaaaaggagccaggttttcacaagacctcatccacctctgcacattggctggcactgtcacactgcagcctccgatctgctggagtacagaccacagcaccacgtctgctacggtgagttcattcccagcgagccaagggctcttcccaagagcagagttcatggagcggaaaacagcggctttttctttactgcttccctcttttaactgaaaaatcgcaatatctacccagctatctataagggttgcgttgacagcattatgcttctggccaaacagagagaacaagaaacgtgcaatgttcccttcgccttcgatggggcacatcgtctggatgctgaatttcatctgcgtcttcggcactgaaaagaaaaaacacgccaggtagcatcaccagagcagccctgagggaagtactcgcacagtggggaaggggacagtcaccaaacaccacagactgatgacatgggaaagggtgttttcaagaagaacatcacattttcagtctgtctctaagatgcttactactgaaaagggtttaagtgcaaactatgttaaaaaagtaaccaaagagtcattcctggtatttgattatgacacttctgaagctagaagggacctcagaccacctgctccaatccctgctgcctaaggttttgggggctgagggctggaaacccaggagctgcatctcccaggctcttggcctcataatcgccttctgtgagactgagggcaattaagatatgaatgacatgaactcgcttctctccatatcaacataaaccagaagaggcatacatctgtgggatagtcaatacataacatcctatctttatatggccatatgagaagataacttcagtgtccctatgatggtaagttcttgaatgtgagggcaagatggctgtgatagccatgactccccgctttgcctggttggacagaacccccttccccaaatgctcacagtcccccccttgagctgtgtctcactcagagaccctaaattttgcagacgaacaagggcatctttgcgttgcttcatctctgctcctcctctagaactatcccacaggctttctagacttagaatatctgacctgatgcaaatcgctatgtggccagtatgccacagaatgtcctaaacccttgctgcctcttatcaaaaccatgttgcacatctcatcatatagtacagctaacccttgaacagtgggggggttagggacactgacccccgactgctgtgcagtcgaaaatccacataaaacttctgactccttcaaaacttaagcactaatagcctactattcatgggaagccttacccatcacagttgattaacacgttttgtatggtctgtatattatatgctatgttcttacaataaacttgagaaaatgttaagaaaataaa

SEQ ID NO: 363516 - DNA, 3944 bp, Homo sapiens
  misc_feature (28)..(28): n is a, c, g, or t
tgtgagagtctagaggatcccgcccacncggtaggtggggctgtggctgcgccgccggccatcgactttcccgccgagggcccggaccccgaatatgacgaatctgatgttccagcagaaatccaggtgttaaaagaacccctacaacagccaaccttcccttttgcagttgcaaaccaactcttgctggtttctttgctggagcacttgagccacgtgcatgaaccaaacccacttcgttcaagacaggtgtttaagctactttgccagacgtttatcaaaatggggctgctgtcttctttcacttgtagtgacgagtttagctcattgagactacatcacaacagagctattactcacttaatgaggtctgctaaagagagagttcgtcaggatccttgtgaggatatttctcgtatccagaaaatcagatcaagggaagtagccttggaagcacaaacttcacgttacttaaatgaatttgaagaacttgccatcttaggaaaaggtggatacggaagagtatacaaggtcaggaataaattagatggtcagtattatgcaataaaaaaaatcctgattaagggtgcaactaaaacagtttgcatgaaggtcctacgggaagtgaaggtgctggcaggtcttcagcaccccaatattgttggctatcacaccgcgtggatagaacatgttcatgtgattcagccacgagcagacagagctgccattgagttgccatctctggaagtgctctccgaccaggaagaggacagagagcaatgtggtgttaaaaatgatgaaagtagcagctcatccattatctttgctgagcccaccccagaaaaagaaaaacgctttggagaatctgacactgaaaatcagaataacaagtcggtgaagtacaccaccaatttagtcataagagaatctggtgaacttgagtcgaccctggagctccaggaaaatggcttggctggtttgtctgccagttcaattgtggaacagcagctgccactcaggcgtaattcccacctagaggagagtttcacatccaccgaagaatcttccgaagaaaatgtcaactttttgggtcagacagaggcacagtaccacctgatgctgcacatccagatgcagctgtgtgagctctcgctgtgggattggatagtcgagagaaacaagcggggccgggagtatgtggacgagtctgcctgtccttatgttatggccaatgttgcaacaaaaatttttcaagaattggtagaaggtgtgttttacatacataacatgggaattgtgcaccgagatctgaagccaagaaatatttttcttcatggccctgatcagcaagtaaaaataggagactttggtctggcctgcacagacatcctacagaagaacacagactggaccaacagaaacgggaagagaacaccaacacatacgtccagagtgggtacttgtctgtacgcttcacccgaacagttggaaggatctgagtatgatgccaagtcagatatgtacagcttgggtgtggtcctgctagagctctttcagccgtttggaacagaaatggagcgagcagaagttctaacaggtttaagaactggtcagttgccggaatccctccgtaaaaggtgtccagtgcaagccaagtatatccagcacttaacgagaaggaactcatcgcagagaccatctgccattcagctgctgcagagtgaacttttccaaaattctggaaatgttaacctcaccctacagatgaagataatagagcaagaaaaagaaattgcagaactaaagaagcagctaaacctcctttctcaagacaaaggggtgagggatgacggaaaggatgggggcgtgggatgaaagtggacttaacttttaaggtagttaactggaatgtaaatttttaatctttattagggtatagttggtacaatgcttcgttgtatttagtaagcctttacaagacttgttaaagatgtcagagtgccccaagctgccgttccttcccttcctgccccacaagctccttttcctgaatttcctacctaaatattaaccatatgcctagtctctgaaactaaaaacttggacctcatcctcaattattttctcctttcaactctgttgaccctctgtctggtcttcctctagaaggttctaccgcagaaattgatgtgtgctccctgccctcgtcactgcccaagcccgggcctgcacatactcactggactgttccagttttgacagctgccagtcttcctgcccctttcacactgcagctgaagttcattacctgaaggacgcctcatcatttcattccttggctccaaaccttctgctgcctctaagataaaagctcaacttcttaacagtgtacagtgtgcaacttccaacctttttatctgttctctccaccttcagtttagcgtcattccaaaaccacacccttgcaaagctttgtactccgcaccccagatgatctccaggcagctcagatctctttcctgcctttgccctgcactgttccccggtacttcctcctttattgtagcactcagctccccagccaatctgtacatccctcagaggcagcgatctgatgaattggtttttgaatcccagaaagggtctgccatggagttggcagtcatcacggtagatggcgtatgattttgctgaattttaaataaaatgaaaaccataaattacatgatgcttttattgacacttgacaactggcctaaataaaaagactctgactctaatacaagtccccttactgataataggcatgaaagagcaccattcttaaaatctaaaccctttaaaatcagttacggcaattcacttaaggagcttgagggccgtgttaaaaggagccaggttttcacaagacctcatccacctctgcacattggctggcactgtcacactgcagcctccgatctgctggagtacagaccacagcaccacgtctgctacggtgagttcattcccagcgagccaagggctcttcccaagagcagagttcatggagcggaaaacagcggctttttctttactgcttccctcttttaactgaaaaatcgcaatatctacccagctatctataagggttgcgttgacagcattatgcttctggccaaacagagagaacaagaaacgtgcaatgttcccttcgccttcgatggggcacatcgtctggatgctgaatttcatctgcgtcttcggcacattcttccaaattaaagtgaatcccagctgatagtcttggcggggctgttttttattctgttctccaaagcacttgagaaggttttcaggcacgctcttgaccgaggagtgcgtgtgcaccgtggacaggaccctgaagtgctcacagagcagcctgtgcagcacaagcagggagaggggaggggaggccgggtttgcgttgatcacgatgtctttcagcgccccgtaatccttcccaagcactgaattcaagtccagcgcattggtggttaaagtcgtgggctcatccgcttggattatgttggttacatccaagtctgcatctggtgtttgaatcatcttggagaggccatcaactgcagctttcaactcatacagacgttttaaaatatcatcttggcgggactcaagagcttgcagagacaggttagactcttcctgtacgtggccagcgcccggcgctgggccgtagctcctgccgtgcacgttggggagccggtacatgcaggtgggaagctccacacggagaggcgcgccgcccccgtgatagggctttacctggtacatcggcatggcagaaccaaagcaaaagggggtagcgcgtgccaaaggccaacgctcagaaaccgtcagaggtcacgacggagaccggccacctcccttctgaccctgctgcgggcgttcgggaaaacgca

SEQ ID NO: 363517 - DNA, 3773 bp, Homo sapiens
gctggaacgctggagccccgttgatgaaccaaaacccaatatcgcttcaccaacaaggtgtctacagtctagctatcgcgcaagagcgtactttgccagacgtttatcaaaatggggctgctgtcttctttcacttgtagtgacgagtttagctcattgagactacatcacaacagagctattactcacttaatgaggtctgctaaagagagagttcgtcaggatccttgtgaggatatttctcgtatccagaaaatcagatcaagggaagtagccttggaagcacaaacttcacgttacttaaatgaatttgaagaacttgccatcttaggaaaaggtggatacggaagagtatacaaggtcaggaataaattagatggtcagtattatgcaataaaaaaaatcctgattaagggtgcaactaaaacagtttgcatgaaggtcctacgggaagtgaaggtgctggcaggtcttcagcaccccaatattgttggctatcacaccgcgtggatagaacatgttcatgtgattcagccacgagcagacagagctgccattgagttgccatctctggaagtgctctccgaccaggaagaggacagagagcaatgtggtgttaaaaatgatgaaagtagcagctcatccattatctttgctgagcccaccccagaaaaagaaaaacgctttggagaatctgacactgaaaatcagaataacaagtcggtgaagtacaccaccaatttagtcataagagaatctggtgaacttgagtcgaccctggagctccaggaaaatggcttggctggtttgtctgccagttcaattgtggaacagcagctgccactcaggcgtaattcccacctagaggagagtttcacatccaccgaagaatcttccgaagaaaatgtcaactttttgggtcagacagaggcacagtaccacctgatgctgcacatccagatgcagctgtgtgagctctcgctgtgggattggatagtcgagagaaacaagcggggccgggagtatgtggacgagtctgcctgtccttatgttatggccaatgttgcaacaaaaatttttcaagaattggtagaaggtgtgttttacatacataacatgggaattgtgcaccgagatctgaagccaagaaatatttttcttcatggccctgatcagcaagtaaaaataggagactttggtctggcctgcacagacatcctacagaagaacacagactggaccaacagaaacgggaagagaacaccaacacatacgtccagagtgggtacttgtctgtacgcttcacccgaacagttggaaggatctgagtatgatgccaagtcagatatgtacagcttgggtgtggtcctgctagagctctttcagccgtttggaacagaaatggagcgagcagaagttctaacaggtttaagaactggtcagttgccggaatccctccgtaaaaggtgtccagtgcaagccaagtatatccagcacttaacgagaaggaactcatcgcagagaccatctgccattcagctgctgcagagtgaacttttccaaaattctggaaatgttaacctcaccctacagatgaagataatagagcaagaaaaagaaattgcagaactaaagaagcagctaaacctcctttctcaagacaaaggggtgagggatgacggaaaggatgggggcgtgggatgaaagtggacttaacttttaaggtagttaactggaatgtaaatttttaatctttattagggtatagttggtacaatgcttcgttgtatttagtaagcctttacaagacttgttaaagatgtcagagtgccccaagctgccgttccttcccttcctgccccacaagctccttttcctgaatttcctacctaaatattaaccatatgcctagtctctgaaactaaaaacttggacctcatcctcaattattttctcctttcaactctgttgaccctctgtctggtcttcctctagaaggttctaccgcagaaattgatgtgtgctccctgccctcgtcactgcccaagcccgggcctgcacatactcactggactgttccagttttgacagctgccagtcttcctgcccctttcacactgcagctgaagttcattacctgaaggacgcctcatcatttcattccttggctccaaaccttctgctgcctctaagataaaagctcaacttcttaacagtgtacagtgtgcaacttccaacctttttatctgttctctccaccttcagtttagcgtcattccaaaaccacacccttgcaaagctttgtactccgcaccccagatgatctccaggcagctcagatctctttcctgcctttgccctgcactgttccccggtacttcctcctttattgtagcactcagctccccagccaatctgtacatccctcagaggcagcgatctgatgaattggtttttgaatcccagaaagggtctgccatggagttggcagtcatcacggtagatggcgtatgattttgctgaattttaaataaaatgaaaaccataaattacatgatgcttttattgacacttgacaactggcctaaataaaaagactctgactctaatacaagtccccttactgataataggcatgaaagagcaccattcttaaaatctaaaccctttaaaatcagttacggcaattcacttaaggagcttgagggccgtgttaaaaggagccaggttttcacaagacctcatccacctctgcacattggctggcactgtcacactgcagcctccgatctgctggagtacagaccacagcaccacgtctgctacggtgagttcattcccagcgagccaagggctcttcccaagagcagagttcatggagcggaaaacagcggctttttctttactgcttccctcttttaactgaaaaatcgcaatatctacccagctatctataagggttgcgttgacagcattatgcttctggccaaacagagagaacaagaaacgtgcaatgttcccttcgccttcgatggggcacatcgtctggatgctgaatttcatctgcgtcttcggcacattcttccaaattaaagtgaatcccagctgatagtcttggcggggctgttttttattctgttctccaaagcacttgagaaggttttcaggcacgctcttgaccgaggagtgcgtgtgcaccgtggacaggaccctgaagtgctcacagagcagcctgtgcagcacaagcagggagaggggaggggaggccgggtttgcgttgatcacgatgtctttcagcgccccgtaatccttcccaagcactgaattcaagtccagcgcattggtggttaaagtcgtgggctcatccgcttggattatgttggttacatccaagtctgcatctggtgtttgaatcatcttggagaggccatcaactgcagctttcaactcatacagacgttttaaaatatcatcttggcgggactcaagagcttgcagagacaggttagactcttcctgtacgtggccagcgcccggcgctgggccgtagctcctgccgtgcacgttggggagccggtacatgcaggtgggaagctccacacggagaggcgcgccgcccccgtgatagggctttacctggtacatcggcatggcagaaccaaagcaaaagggggtagcgcgtgccaaaggccaacgctcagaaaccgtcagaggtcacgacggagaccggccacctcccttctgaccctgctgcgggcgttcgggaaaacgca

SEQ ID NO: 363518 - DNA, 4034 bp, Homo sapiens
tctctcgctcctcattcccccctccccaatcgctagtagaggctgtttgaatcggcgcagtgctgggctggccggcgggctgggctgcggcccgcgcgcggccggcgatgcaggggggcaactccggggtccgcaagcgcgaagaggagggcgacggggctggggctgtggctgcgccgccggccatcgactttcccgccgagggcccggaccccgaatatgacgaatctgatgttccagcagaaatccaggtgttaaaagaacccctacaacagccaaccttcccttttgcagttgcaaaccaactcttgctggtttctttgctggagcacttgagccacgtgcatgaaccaaacccacttcgttcaagacaggtgtttaagctactttgccagacgtttatcaaaatggggctgctgtcttctttcacttgtagtgacgagtttagctcattgagactacatcacaacagagctattactcacttaatgaggtctgctaaagagagagttcgtcaggatccttgtgaggatatttctcgtatccagaaaatcaggttacttaaatgaatttgaagaacttgccatcttaggaaaaggtggatacggaagagtatacaaggtcaggaataaattagatggtcagtattatgcaataaaaaaaatcctgattaagggtgcaactaaaacagtttgcatgaaggtcctacgggaagtgaaggtgctggcaggtcttcagcaccccaatattgttggctatcacaccgcgtggatagaacatgttcatgtgattcagccacgagcagacagagctgccattgagttgccatctctggaagtgctctccgaccaggaagaggacagagagcaatgtggtgttaaaaatgatgaaagtagcagctcatccattatctttgctgagcccaccccagaaaaagaaaaacgctttggagaatctgacactgaaaatcagaataacaagtcggtgaagtacaccaccaatttagtcataagagaatctggtgaacttgagtcgaccctggagctccaggaaaatggcttggctggtttgtctgccagttcaattgtggaacagcagctgccactcaggcgtaattcccacctagaggagagtttcacatccaccgaagaatcttccgaagaaaatgtcaactttttgggtcagacagaggcacagtaccacctgatgctgcacatccagatgcagctgtgtgagctctcgctgtgggattggatagtcgagagaaacaagcggggccgggagtatgtggacgagtctgcctgtccttatgttatggccaatgttgcaacaaaaatttttcaagaattggtagaaggtgtgttttacatacataacatgggaattgtgcaccgagatctgaagccaagaaatatttttcttcatggccctgatcagcaagtaaaaataggagactttggtctggcctgcacagacatcctacagaagaacacagactggaccaacagaaacgggaagagaacaccaacacatacgtccagagtgggtacttgtctgtacgcttcacccgaacagttggaaggatctgagtatgatgccaagtcagatatgtacagcttgggtgtggtcctgctagagctctttcagccgtttggaacagaaatggagcgagcagaagttctaacaggtttaagaactggtcagttgccggaatccctccgtaaaaggtgtccagtgcaagccaagtatatccagcacttaacgagaaggaactcatcgcagagaccatctgccattcagctgctgcagagtgaacttttccaaaattctggaaatgttaacctcaccctacagatgaagataatagagcaagaaaaagaaattgcagaactaaagaagcagctaaacctcctttctcaagacaaaggggtgagggatgacggaaaggatgggggcgtgggatgaaagtggacttaacttttaaggtagttaactggaatgtaaatttttaatctttattagggtatagttggtacaatgcttcgttgtatttagtaagcctttacaagacttgttaaagatgtcagagtgccccaagctgccgttccttcccttcctgccccacaagctccttttcctgaatttcctacctaaatattaaccatatgcctagtctctgaaactaaaaacttggacctcatcctcaattattttctcctttcaactctgttgaccctctgtctggtcttcctctagaaggttctaccgcagaaattgatgtgtgctccctgccctcgtcactgcccaagcccgggcctgcacatactcactggactgttccagttttgacagctgccagtcttcctgcccctttcacactgcagctgaagttcattacctgaaggacgcctcatcatttcattccttggctccaaaccttctgctgcctctaagataaaagctcaacttcttaacagtgtacagtgtgcaacttccaacctttttatctgttctctccaccttcagtttagcgtcattccaaaaccacacccttgcaaagctttgtactccgcaccccagatgatctccaggcagctcagatctctttcctgcctttgccctgcactgttccccggtacttcctcctttattgtagcactcagctccccagccaatctgtacatccctcagaggcagcgatctgatgaattggtttttgaatcccagaaagggtctgccatggagttggcagtcatcacggtagatggcgtatgattttgctgaattttaaataaaatgaaaaccataaattacatgatgcttttattgacacttgacaactggcctaaataaaaagactctgactctaatacaagtccccttactgataataggcatgaaagagcaccattcttaaaatctaaaccctttaaaatcagttacggcaattcacttaaggagcttgagggccgtgttaaaaggagccaggttttcacaagacctcatccacctctgcacattggctggcactgtcacactgcagcctccgatctgctggagtacagaccacagcaccacgtctgctacggtgagttcattcccagcgagccaagggctcttcccaagagcagagttcatggagcggaaaacagcggctttttctttactgcttccctcttttaactgaaaaatcgcaatatctacccagctatctataagggttgcgttgacagcattatgcttctggccaaacagagagaacaagaaacgtgcaatgttcccttcgccttcgatggggcacatcgtctggatgctgaatttcatctgcgtcttcggcacattcttccaaattaaagtgaatcccagctgatagtcttggcggggctgttttttattctgttctccaaagcacttgagaaggttttcaggcacgctcttgaccgaggagtgcgtgtgcaccgtggacaggaccctgaagtgctcacagagcagcctgtgcagcacaagcagggagaggggaggggaggccgggtttgcgttgatcacgatgtctttcagcgccccgtaatccttcccaagcactgaattcaagtccagcgcattggtggttaaagtcgtgggctcatccgcttggattatgttggttacatccaagtctgcatctggtgtttgaatcatcttggagaggccatcaactgcagctttcaactcatacagacgttttaaaatatcatcttggcgggactcaagagcttgcagagacaggttagactcttcctgtacgtggccagcgcccggcgctgggccgtagctcctgccgtgcacgttggggagccggtacatgcaggtgggaagctccacacggagaggcgcgccgcccccgtgatagggctttacctggtacatcggcatggcagaaccaaagcaaaagggggtagcgcgtgccaaaggccaacgctcagaaaccgtcagaggtcacgacggagaccggccacctcccttctgaccctgctgcgggcgttcgggaaaacgca

SEQ ID NO: 363519 - DNA, 3874 bp, Homo sapiens
tctctcgctcctcattcccccctccccaatcgctagtagaggctgtttgaatcggcgcagtgctgggctggccggcgggctgggctgcggcccgcgcgcggccggcgatgcaggggggcaactccggggtccgcaagcgcgaagaggagggcgacggggctggggctgtggctgcgccgccggccatcgactttcccgccgagggcccggaccccgaatatgacgaatctgatgttccagcagaaatccaggtgttaaaagaacccctacaacagccaaccttcccttttgcagttgcaaaccaactcttgctggtttctttgctggagcacttgagccacgtgcatgaaccaaacccacttcgttcaagacaggtgtttaagctactttgccagacgtttatcaaaatggggctgctgtcttctttcacttgtagtgacgagtttagctcattgagactacatcacaacagagctattactcacttaatgaggtctgctaaagagagagttcgtcaggatccttgtgaggatatttctcgtatccagaaaatcagatcaagggaagtagccttggaagcacaaacttcacgttacttaaatgaatttgaagaacttgccatcttaggaaaaggtggatacggaagagtatacaaggtcaggaataaattagatggtcagtattatgcaataaaaaaaatcctgattaagggtgcaactaaaacagtttgcatgaaggtcctacgggaagtgaaggtgctggcaggtcttcagcaccccaatattgttggctatcacaccgcgtggatagaacatgttcatgtgattcagccacgagcagacagagctgccattgagttgccatctctggaagtgctctccgaccaggaagaggacagagagcaatgtggtgttaaaaatgatgaaagtagcagctcatccattatctttgctgagcccaccccagaaaaagaaaaacgctttggagaatctgacactgaaaatcagaataacaagtcggtgaagtacaccaccaatttagtcataagagaatctggtgaacttgagtcgaccctggagctccaggaaaatggcttggctggtttgtctgccagttcaattgtggaacagcagctgccactcaggcgtaattcccacctagaggagagtttcacatccaccgaagaatcttccgaagaaaatgtcaactttttgggtcagacagaggcacagtaccacctgatgctgcacatccagatgcagctgtgtgagctctcgctgtgggattggatagtcgagagaaacaagcggggccgggagtatgtggacgagtctgcctgtccttatgttatggccaatgttgcaacaaaaatttttcaagaattggtagaaggtgtgttttacatacataacatgggaattgtgcaccgagatctgaagccaagaaatatttttcttcatggccctgatcagcaagtaaaaataggagactttggtctggcctgcacagacatcctacagaagaacacagactggaccaacagaaacgggaagagaacaccaacacatacgtccagagtgggtacttgtctgtacgcttcacccgaacagttggaaggatctgagtatgatgccaagtcagatatgtacagcttgggtgtggtcctgctagagctctttcagccgtttggaacagaaatggagcgagcagaagttctaacaggtttaagaactggtcagttgccggaatccctccgtaaaaggtgtccagtgcaagccaagtatatccagcacttaacgagaaggaactcatcgcagagaccatctgccattcagctgctgcagagtgaacttttccaaaattctggaaatgttaacctcaccctacagatgaagataatagagcaagaaaaagaaattgcagaactaaagaagcagctaaacctcctttctcaagacaaaggggtgagggatgacggaaaggatgggggcgtgggatgaaagtggacttaacttttaaggtagttaactggaatgtaaatttttaatctttattagggtatagttggtacaatgcttcgttgtatttagtaagcctttacaagacttgttaaagatgtcagagtgccccaagctgccgttccttcccttcctgccccacaagctccttttcctgaatttcctacctaaatattaaccatatgcctagtctctgaaactaaaaacttggacctcatcctcaattattttctcctttcaactctgttgaccctctgtctggtcttcctctagaaggttctaccgcagaaattgatgtgtgctccctgccctcgtcactgcccaagcccgggcctgcacatactcactggactgttccagttttgacagctgccagtcttcctgcccctttcacactgcagctgaagttcattacctgaaggacgcctcatcatttcattccttggctccaaaccttctgctgcctctaagataaaagctcaacttcttaacagtgtacagtgtgcaacttccaacctttttatctgttctctccaccttcagtttagcgtcattccaaaaccacacccttgcaaagctttgtactccgcaccccagatgatctccaggcagctcagatctctttcctgcctttgccctgcactgttccccggtacttcctcctttattgtagcactcagctccccagccaatctgtacatccctcagaggcagcgatctgatgaattggtttttgaatcccagaaagggtctgccatggagttggcagtcatcacggtagatggcgtatgattttgctgaattttaaataaaatgaaaaccataaattaaaaaaaaaaaaaagactcgagactagtttttattcatttttaactgccccgcaaccccactccaactccttctccaccacccattctcccaatggtctttagaaatagatttcatctgatattctgcagaaatatcaatgagacttggtatgggactggggcagaaaacactacataggcctccaaggcaaaaccagtcccagtttctttaatgggaagaagctggaattcctggtgctcaattcttagtgaccccaatcctatacccaaatctatgatattctgggacctcagtgattttggtcccctcccacttctctagttcgtcatcctcccttcccatatccttcaaaagaaccacactagggtctccacctacttatacaatgcggatgcccaactgtttttaaggaagccagaacgatcccatggaccatggggtgagtgtcctccaagaccccctgagctcagccctctgcctggagggctccagacctttctgagccctgcttggaggcgagcattttcactgctaggacaagctcagctgaagtggacacccccaccccaaatttcagttcttacgtgattttaaccattcaacatgctgttgggttttaattctctaattattattattattgttattattttttaggaccagttgtagtgaattgctactgaaagctatcccaggtgatacagagctctttgtaaaccgcagtcacacattagggttagtattaaactttgtttagatgtaccataattaacttggctagttgattgtttgaagtctatggaagaaatagttttatgcaaaattttaaaaaatgccagtctggtcagggaagtagggggtttcaatgctgttgggaaccaggaaggtgggacagccggcaggtagggacattgtgtacctcagttgtgtcacatgtgagcaacccaggttgaccttgtgatgtgaattgatctgatcagactgtattaaaaatgttagtacattactctaaaaaaaaaaagctt

SEQ ID NO: 363520 - DNA, 3848 bp, Homo sapiens
ggttttccgtctggtgaggggttacttccgggtcggacggcgctagctgcagcatcggagtgtggcagtgctgggctggccggcgggctgggctgcggcccgcgcgcggccggcgatgcaggggggcaactccggggtccgcaagcgcgaagaggagggcgacggggctggggctgtggctgcgccgccggccatcgactttcccgccgagggcccggaccccgaatatgacgaatctgatgttccagcagaaatccaggtgttaaaagaacccctacaacagccaaccttcccttttgcagttgcaaaccaactcttgctggtttctttgctggagcacttgagccacgtgcatgaaccaaacccacttcgttcaagacaggtgtttaagctactttgccagacgtttatcaaaatggggctgctgtcttctttcacttgtagtgacgagtttagctcattgagactacatcacaacagagctattactcacttaatgaggtctgctaaagagagagttcgtcaggatccttgtgaggatatttctcgtatccagaaaatcagatcaagggaagtagccttggaagcacaaacttcacgttacttaaatgaatttgaagaacttgccatcttaggaaaaggtggatacggaagagtatacaaggttgtcttccacgtacttgttttgacctactaccctataattgtgttttcagatattgttttcattattcttttatttatttatttttttgagatggagtctcgctctgtcgccaggctggagtgcgcggcgcaatctcagctcactgcaacctctgactccctggttcaagcgattcttctgcctcagcctcccgagtagctgggattacaggcatgtgctactacacccagctaatttttgtatttttaatagagacggggtttcaccgtgttggccaggatggtcttgatctcctgacctcgtgatccacccacctcggctctcccaaagtgctgggattacaggcatgagccactgcacccggccagatgttgagatttttaaaactcctggatgattctgatgtgtaggcaaatttgggaactattcctcaaatatttaacttttgaggggctgcttgctcctgagttccaaacacttaaaaacatttacaagatattactatttgttttaagaaagccaaggagttgacttgttttgtttgttgatagccaagaaatatttttcttcatggccctgatcagcaagtaaaaataggagactttggtctggcctgcacagacatcctacagaagaacacagactggaccaacagaaacgggaagagaacaccaacacatacgtccagagtgggtacttgtctgtacgcttcacccgaacagttggaaggatctgagtatgatgccaagtcagatatgtacagcttgggtgtggtcctgctagagctctttcagccgtttggaacagaaatggagcgagcagaagttctaacaggtttaagaactggtcagttgccggaatccctccgtaaaaggtgtccagtgcaagccaagtatatccagcacttaacgagaaggaactcatcgcagagaccatctgccattcagctgctgcagagtgaacttttccaaaattctggaaatgttaacctcaccctacagatgaagataatagagcaagaaaaagaaattgcagaactaaagaagcagctaaacctcctttctcaagacaaaggggtgagggatgacggaaaggatgggggcgtgggatgaaagtggacttaacttttaaggtagttaactggaatgtaaatttttaatctttattagggtatagttggtacaatgcttcgttgtatttagtaagcctttacaagacttgttaaagatgtcagagtgccccaagctgccgttccttcccttcctgccccacaagctccttttcctgaatttcctacctaaatattaaccatatgcctagtctctgaaactaaaaacttggacctcatcctcaattattttctcctttcaactctgttgaccctctgtctggtcttcctctagaaggttctaccgcagaaattgatgtgtgctccctgccctcgtcactgcccaagcccgggcctgcacatactcactggactgttccagttttgacagctgccagtcttcctgcccctttcacactgcagctgaagttcattacctgaaggacgcctcatcatttcattccttggctccaaaccttctgctgcctctaagataaaagctcaacttcttaacagtgtacagtgtgcaacttccaacctttttatctgttctctccaccttcagtttagcgtcattccaaaaccacacccttgcaaagctttgtactccgcaccccagatgatctccaggcagctcagatctctttcctgcctttgccctgcactgttccccggtacttcctcctttattgtagcactcagctccccagccaatctgtacatccctcagaggcagcgatctgatgaattggtttttgaatcccagaaagggtctgccatggagttggcagtcatcacggtagatggcgtatgattttgctgaattttaaataaaatgaaaaccataaattacatgatgcttttattgacacttgacaactggcctaaataaaaagactctgactctaatacaagtccccttactgataataggcatgaaagagcaccattcttaaaatctaaaccctttaaaatcagttacggcaattcacttaaggagcttgagggccgtgttaaaaggagccaggttttcacaagacctcatccacctctgcacattggctggcactgtcacactgcagcctccgatctgctggagtacagaccacagcaccacgtctgctacggtgagttcattcccagcgagccaagggctcttcccaagagcagagttcatggagcggaaaacagcggctttttctttactgcttccctcttttaactgaaaaatcgcaatatctacccagctatctataagggttgcgttgacagcattatgcttctggccaaacagagagaacaagaaacgtgcaatgttcccttcgccttcgatggggcacatcgtctggatgctgaatttcatctgcgtcttcggcacattcttccaaattaaagtgaatcccagctgatagtcttggcggggctgttttttattctgttctccaaagcacttgagaaggttttcaggcacgctcttgaccgaggagtgcgtgtgcaccgtggacaggaccctgaagtgctcacagagcagcctgtgcagcacaagcagggagaggggaggggaggccgggtttgcgttgatcacgatgtctttcagcgccccgtaatccttcccaagcactgaattcaagtccagcgcattggtggttaaagtcgtgggctcatccgcttggattatgttggttacatccaagtctgcatctggtgtttgaatcatcttggagaggccatcaactgcagctttcaactcatacagacgttttaaaatatcatcttggcgggactcaagagcttgcagagacaggttagactcttcctgtacgtggccagcgcccggcgctgggccgtagctcctgccgtgcacgttggggagccggtacatgcaggtgggaagctccacacggagaggcgcgccgcccccgtgatagggctttacctggtacatcggcatggcagaaccaaagcaaaagggggtagcgcgtgccaaaggccaacgctcagaaaccgtcagaggtcacgacggagaccggccacctcccttctgaccctgctgcgggcgttcgggaaaacgca

SEQ ID NO: 363521 - DNA, 3471 bp, Homo sapiens
tctctcgctcctcattcccccctccccaatcgctagtagaggctgtttgaatcggcgcagtgctgggctggccggcgggctgggctgcggcccgcgcgcggccggcgatgcaggggggcaactccggggtccgcaagcgcgaagaggagggcgacggggctggggctgtggctgcgccgccggccatcgactttcccgccgagggcccggaccccgaatatgacgaatctgatgttccagcagaaatccaggtgttaaaagaacccctacaacagccaaccttcccttttgcagttgcaaaccaactcttgctggtttctttgctggagcacttgagccacgtgcatgaaccaaacccacttcgttcaagacaggtgtttaagctactttgccagacgtttatcaaaatggggctgctgtcttctttcacttgtagtgacgagtttagctcattgagactacatcacaacagagctattactcacttaatgaggtctgctaaagagagagttcgtcaggatccttgtgaggatatttctcgtatccagaaaatcaggttacttaaatgaatttgaagaacttgccatcttaggaaaaggtggatacggaagagtatacaaggtcaggaataaattagatggtcagtattatgcaataaaaaaaatcctgattaagggtgcaactaaaacagtttgcatgaaggtcctacgggaagtgaaggtgctggcaggtcttcagcaccccaatattgttggctatcacaccgcgtggaatttttcaagaattggtagaaggtgtgttttacatacataacatgggaattgtgcaccgagatctgaagccaagaaatatttttcttcatggccctgatcagcaagtaaaaataggagactttggtctggcctgcacagacatcctacagaagaacacagactggaccaacagaaacgggaagagaacaccaacacatacgtccagagtgggtacttgtctgtacgcttcacccgaacagttggaaggatctgagtatgatgccaagtcagatatgtacagcttgggtgtggtcctgctagagctctttcagccgtttggaacagaaatggagcgagcagaagttctaacaggtttaagaactggtcagttgccggaatccctccgtaaaaggtgtccagtgcaagccaagtatatccagcacttaacgagaaggaactcatcgcagagaccatctgccattcagctgctgcagagtgaacttttccaaaattctggaaatgttaacctcaccctacagatgaagataatagagcaagaaaaagaaattgcagaactaaagaagcagctaaacctcctttctcaagacaaaggggtgagggatgacggaaaggatgggggcgtgggatgaaagtggacttaacttttaaggtagttaactggaatgtaaatttttaatctttattagggtatagttggtacaatgcttcgttgtatttagtaagcctttacaagacttgttaaagatgtcagagtgccccaagctgccgttccttcccttcctgccccacaagctccttttcctgaatttcctacctaaatattaaccatatgcctagtctctgaaactaaaaacttggacctcatcctcaattattttctcctttcaactctgttgaccctctgtctggtcttcctctagaaggttctaccgcagaaattgatgtgtgctccctgccctcgtcactgcccaagcccgggcctgcacatactcactggactgttccagttttgacagctgccagtcttcctgcccctttcacactgcagctgaagttcattacctgaaggacgcctcatcatttcattccttggctccaaaccttctgctgcctctaagataaaagctcaacttcttaacagtgtacagtgtgcaacttccaacctttttatctgttctctccaccttcagtttagcgtcattccaaaaccacacccttgcaaagctttgtactccgcaccccagatgatctccaggcagctcagatctctttcctgcctttgccctgcactgttccccggtacttcctcctttattgtagcactcagctccccagccaatctgtacatccctcagaggcagcgatctgatgaattggtttttgaatcccagaaagggtctgccatggagttggcagtcatcacggtagatggcgtatgattttgctgaattttaaataaaatgaaaaccataaattacatgatgcttttattgacacttgacaactggcctaaataaaaagactctgactctaatacaagtccccttactgataataggcatgaaagagcaccattcttaaaatctaaaccctttaaaatcagttacggcaattcacttaaggagcttgagggccgtgttaaaaggagccaggttttcacaagacctcatccacctctgcacattggctggcactgtcacactgcagcctccgatctgctggagtacagaccacagcaccacgtctgctacggtgagttcattcccagcgagccaagggctcttcccaagagcagagttcatggagcggaaaacagcggctttttctttactgcttccctcttttaactgaaaaatcgcaatatctacccagctatctataagggttgcgttgacagcattatgcttctggccaaacagagagaacaagaaacgtgcaatgttcccttcgccttcgatggggcacatcgtctggatgctgaatttcatctgcgtcttcggcacattcttccaaattaaagtgaatcccagctgatagtcttggcggggctgttttttattctgttctccaaagcacttgagaaggttttcaggcacgctcttgaccgaggagtgcgtgtgcaccgtggacaggaccctgaagtgctcacagagcagcctgtgcagcacaagcagggagaggggaggggaggccgggtttgcgttgatcacgatgtctttcagcgccccgtaatccttcccaagcactgaattcaagtccagcgcattggtggttaaagtcgtgggctcatccgcttggattatgttggttacatccaagtctgcatctggtgtttgaatcatcttggagaggccatcaactgcagctttcaactcatacagacgttttaaaatatcatcttggcgggactcaagagcttgcagagacaggttagactcttcctgtacgtggccagcgcccggcgctgggccgtagctcctgccgtgcacgttggggagccggtacatgcaggtgggaagctccacacggagaggcgcgccgcccccgtgatagggctttacctggtacatcggcatggcagaaccaaagcaaaagggggtagcgcgtgccaaaggccaacgctcagaaaccgtcagaggtcacgacggagaccggccacctcccttctgaccctgctgcgggcgttcgggaaaacgca

SEQ ID NO: 363522 - DNA, 2888 bp, Homo sapiens
tctctcgctcctcattcccccctccccaatcgctagtagaggctgtttgaatcggcgcagtgctgggctggccggcgggctgggctgcggcccgcgcgcggccggcgatgcaggggggcaactccggggtccgcaagcgcgaagaggagggcgacggggctggggctgtggctgcgccgccggccatcgactttcccgccgagggcccggaccccgaatatgacgaatctgatgttccagcagaaatccaggtgttaaaagaacccctacaacagccaaccttcccttttgcagttgcaaaccaactcttgctggtttctttgctggagcacttgagccacgtgcatgaaccaaacccacttcgttcaagacaggtgtttaagctactttgccagacgtttatcaaaatggggctgctgtcttctttcacttgtagtgacgagtttagctcattgagactacatcacaacagagctattactcacttaatgaggtctgctaaagagagagttcgtcaggatccttgtgaggatatttctcgtatccagaaaatcagatcaagggaagtagccttggaagcacaaacttcacgttacttaaatgaatttgaagaacttgccatcttaggaaaaggtggatacggaagagtatacaaggtcaggaataaattagatggtcagtattatgcaataaaaaaaatcctgattaagggtgcaactaaaacagtttgcatgaaggtcctacgggaagtgaaggtgctggcaggtcttcagcaccccaatattgttggctatcacaccgcgtggatagaacatgttcatgtgattcagccacgagcagacagagctgccattgagttgccatctctggaagtgctctccgaccaggaagaggacagagagcaatgtggtgttaaaaatgatgaaagtagcagctcatccattatctttgctgagcccaccccagaaaaagaaaaacgctttggagaatctgacactgaaaatcagaataacaagtcggtgaagtacaccaccaatttagtcataagagaatctggtgaacttgagtcgaccctggagctccaggaaaatggcttggctggtttgtctgccagttcaattgtggaacagcagctgccactcaggcgtaattcccacctagaggagagtttcacatccaccgaagaatcttccgaagaaaatgtcaactttttgggtcagacagaggcacagtaccacctgatgctgcacatccagatgcagctgtgtgagctctcgctgtgggattggatagtcgagagaaacaagcggggccgggagtatgtggacgagtctgcctgtccttatgttatggccaatgttgcaacaaaaatttttcaagaattggtagaaggtgtgttttacatacataacatgggaattgtgcaccgagatctgaagccaagaaatatttttcttcatggccctgatcagcaagtaaaaataggagactttggtctggcctgcacagacatcctacagaagaacacagactggaccaacagaaacgggaagagaacaccaacacatacgtccagagtgggtacttgtctgtacgcttcacccgaacagttggaaggatctgagtatgatgccaagtcagatatgtacagcttgggtgtggtcctgctagagctctttcagccgtttggaacagaaatggagcgagcagaagttctaacaggtttaagaactggtcagttgccggaatccctccgtaaaaggtgtccagtgcaagccaagtatatccagcacttaacgagaaggaactcatcgcagagaccatctgccattcagctgctgcagagtgaacttttccaaaattctggaaatgttaacctcaccctacagatgaagataatagagcaagaaaaagaaattgcagaactaaagaagcagctaaacctcctttctcaagacaaaggggtgagggatgacggaaaggatgggggcgtgggatgaaagtggacttaacttttaaggtagttaactggaatgtaaatttttaatctttattagggtatagttggtacaatgcttcgttgtatttagtaagcctttacaagacttgttaaagatgtcagagtgccccaagctgccgttccttcccttcctgccccacaagctccttttcctgaatttcctacctaaatattaaccatatgcctagtctctgaaactaaaaacttggacctcatcctcaattattttctcctttcaactctgttgaccctctgtctggtcttcctctagaaggttctaccgcagaaattgatgtgtgctccctgccctcgtcactgcccaagcccgggcctgcacatactcactggactgttccagttttgacagctgccagtcttcctgcccctttcacactgcagctgaagttcattacctgaaggacgcctcatcatttcattccttggctccaaaccttctgctgcctctaagataaaagctcaacttcttaacagtgtacagtgtgcaacttccaacctttttatctgttctctccaccttcagtttagcgtcattccaaaaccacacccttgcaaagctttgtactccgcaccccagatgatctccaggcagctcagatctctttcctgcctttgccctgcactgttccccggtacttcctcctttattgtagcactcagctccccagccaatctgtacatccctcagaggcagcgatctgatgaattggtttttgaatcccagaaagggtctgccatggagttggcagtcatcacggtagatggcgtatgattttgctgaattttaaataaaatgaaaaccataaattaaaaaaaaaaagtcgacgcggccgcgaatttagtagtagta

SEQ ID NO: 363523 - DNA, 2957 bp, Homo sapiens
tgcgctctgctggacccccgctccttgctggtactgcagctcctccagcccagccccttgccaagaaaaaagtcgtaaagcggagagcagatactaccacccctacacctacagccatcttggctcctgggtctccagctagccctcctgggagtcttgagcctaaggcagcacggcttccccctatgcgtagagagagtggtcgccccatcaagcccccacgcaaagacttgcctgactctcagcaacaacaccagagctctaagaaaggaaagctttcagaacagttaaaacattgcaatggcattttgaaggagttactctctaagaagcatgctgcctatgcttggcctttctataaaccagtggacgcttctgcacttggcctgcatgactaccatgacatcattaagcaccccatggaccaacagaaacgggaagagaacaccaacacatacgtccagagtgggtacttgtctgtacgcttcacccgaacagttggaaggatctgagtatgatgccaagtcagatatgtacagcttgggtgtggtcctgctagagctctttcagccgtttggaacagaaatggagcgagcagaagttctaacaggtttaagaactggtcagttgccggaatccctccgtaaaaggtgtccagtgcaagccaagtatatccagcacttaacgagaaggaactcatcgcagagaccatctgccattcagctgctgcagagtgaacttttccaaaattctggaaatgttaacctcaccctacagatgaagataatagagcaagaaaaagaaattgcagaactaaagaagcagctaaacctcctttctcaagacaaaggggtgagggatgacggaaaggatgggggcgtgggatgaaagtggacttaacttttaaggtagttaactggaatgtaaatttttaatctttattagggtatagttggtacaatgcttcgttgtatttagtaagcctttacaagacttgttaaagatgtcagagtgccccaagctgccgttccttcccttcctgccccacaagctccttttcctgaatttcctacctaaatattaaccatatgcctagtctctgaaactaaaaacttggacctcatcctcaattattttctcctttcaactctgttgaccctctgtctggtcttcctctagaaggttctaccgcagaaattgatgtgtgctccctgccctcgtcactgcccaagcccgggcctgcacatactcactggactgttccagttttgacagctgccagtcttcctgcccctttcacactgcagctgaagttcattacctgaaggacgcctcatcatttcattccttggctccaaaccttctgctgcctctaagataaaagctcaacttcttaacagtgtacagtgtgcaacttccaacctttttatctgttctctccaccttcagtttagcgtcattccaaaaccacacccttgcaaagctttgtactccgcaccccagatgatctccaggcagctcagatctctttcctgcctttgccctgcactgttccccggtacttcctcctttattgtagcactcagctccccagccaatctgtacatccctcagaggcagcgatctgatgaattggtttttgaatcccagaaagggtctgccatggagttggcagtcatcacggtagatggcgtatgattttgctgaattttaaataaaatgaaaaccataaattacatgatgcttttattgacacttgacaactggcctaaataaaaagactctgactctaatacaagtccccttactgataataggcatgaaagagcaccattcttaaaatctaaaccctttaaaatcagttacggcaattcacttaaggagcttgagggccgtgttaaaaggagccaggttttcacaagacctcatccacctctgcacattggctggcactgtcacactgcagcctccgatctgctggagtacagaccacagcaccacgtctgctacggtgagttcattcccagcgagccaagggctcttcccaagagcagagttcatggagcggaaaacagcggctttttctttactgcttccctcttttaactgaaaaatcgcaatatctacccagctatctataagggttgcgttgacagcattatgcttctggccaaacagagagaacaagaaacgtgcaatgttcccttcgccttcgatggggcacatcgtctggatgctgaatttcatctgcgtcttcggcacattcttccaaattaaagtgaatcccagctgatagtcttggcggggctgttttttattctgttctccaaagcacttgagaaggttttcaggcacgctcttgaccgaggagtgcgtgtgcaccgtggacaggaccctgaagtgctcacagagcagcctgtgcagcacaagcagggagaggggaggggaggccgggtttgcgttgatcacgatgtctttcagcgccccgtaatccttcccaagcactgaattcaagtccagcgcattggtggttaaagtcgtgggctcatccgcttggattatgttggttacatccaagtctgcatctggtgtttgaatcatcttggagaggccatcaactgcagctttcaactcatacagacgttttaaaatatcatcttggcgggactcaagagcttgcagagacaggttagactcttcctgtacgtggccagcgcccggcgctgggccgtagctcctgccgtgcacgttggggagccggtacatgcaggtgggaagctccacacggagaggcgcgccgcccccgtgatagggctttacctggtacatcggcatggcagaaccaaagcaaaagggggtagcgcgtgccaaaggccaacgctcagaaaccgtcagaggtcacgacggagaccggccacctcccttctgaccctgctgcgggcgttcgggaaaacgca

SEQ ID NO: 363524 - DNA, 2538 bp, Homo sapiens
ggaaggatctgagtatgatgccaactgttcgggtgaagcgtacagacaagtacccactctggacgcttcacccgaacagttggaaggatctgagtatgatgccaagtcagatatgtacagcttgggtgtggtcctgctagagctctttcagccgtttggaacagaaatggagcgagcagaagttctaacaggtttaagaactggtcagttgccggaatccctccgtaaaaggtgtccagtgcaagccaagtatatccagcacttaacgagaaggaactcatcgcagagaccatctgccattcagctgctgcagagtgaacttttccaaaattctggaaatgttaacctcaccctacagatgaagataatagagcaagaaaaagaaattgcagaactaaagaagcagctaaacctcctttctcaagacaaaggggtgagggatgacggaaaggatgggggcgtgggatgaaagtggacttaacttttaaggtagttaactggaatgtaaatttttaatctttattagggtatagttggtacaatgcttcgttgtatttagtaagcctttacaagacttgttaaagatgtcagagtgccccaagctgccgttccttcccttcctgccccacaagctccttttcctgaatttcctacctaaatattaaccatatgcctagtctctgaaactaaaaacttggacctcatcctcaattattttctcctttcaactctgttgaccctctgtctggtcttcctctagaaggttctaccgcagaaattgatgtgtgctccctgccctcgtcactgcccaagcccgggcctgcacatactcactggactgttccagttttgacagctgccagtcttcctgcccctttcacactgcagctgaagttcattacctgaaggacgcctcatcatttcattccttggctccaaaccttctgctgcctctaagataaaagctcaacttcttaacagtgtacagtgtgcaacttccaacctttttatctgttctctccaccttcagtttagcgtcattccaaaaccacacccttgcaaagctttgtactccgcaccccagatgatctccaggcagctcagatctctttcctgcctttgccctgcactgttccccggtacttcctcctttattgtagcactcagctccccagccaatctgtacatccctcagaggcagcgatctgatgaattggtttttgaatcccagaaagggtctgccatggagttggcagtcatcacggtagatggcgtatgattttgctgaattttaaataaaatgaaaaccataaattacatgatgcttttattgacacttgacaactggcctaaataaaaagactctgactctaatacaagtccccttactgataataggcatgaaagagcaccattcttaaaatctaaaccctttaaaatcagttacggcaattcacttaaggagcttgagggccgtgttaaaaggagccaggttttcacaagacctcatccacctctgcacattggctggcactgtcacactgcagcctccgatctgctggagtacagaccacagcaccacgtctgctacggtgagttcattcccagcgagccaagggctcttcccaagagcagagttcatggagcggaaaacagcggctttttctttactgcttccctcttttaactgaaaaatcgcaatatctacccagctatctataagggttgcgttgacagcattatgcttctggccaaacagagagaacaagaaacgtgcaatgttcccttcgccttcgatggggcacatcgtctggatgctgaatttcatctgcgtcttcggcacattcttccaaattaaagtgaatcccagctgatagtcttggcggggctgttttttattctgttctccaaagcacttgagaaggttttcaggcacgctcttgaccgaggagtgcgtgtgcaccgtggacaggaccctgaagtgctcacagagcagcctgtgcagcacaagcagggagaggggaggggaggccgggtttgcgttgatcacgatgtctttcagcgccccgtaatccttcccaagcactgaattcaagtccagcgcattggtggttaaagtcgtgggctcatccgcttggattatgttggttacatccaagtctgcatctggtgtttgaatcatcttggagaggccatcaactgcagctttcaactcatacagacgttttaaaatatcatcttggcgggactcaagagcttgcagagacaggttagactcttcctgtacgtggccagcgcccggcgctgggccgtagctcctgccgtgcacgttggggagccggtacatgcaggtgggaagctccacacggagaggcgcgccgcccccgtgatagggctttacctggtacatcggcatggcagaaccaaagcaaaagggggtagcgcgtgccaaaggccaacgctcagaaaccgtcagaggtcacgacggagaccggccacctcccttctgaccctgctgcgggcgttcgggaaaacgca

SEQ ID NO: 363525 - DNA, 2786 bp, Homo sapiens
tctctcgctcctcattcccccctccccaatcgctagtagaggctgtttgaatcggcgcagtgctgggctggccggcgggctgggctgcggcccgcgcgcggccggcgatgcaggggggcaactccggggtccgcaagcgcgaagaggagggcgacggggctggggctgtggctgcgccgccggccatcgactttcccgccgagggcccggaccccgaatatgacgaatctgatgttccagcagaaatccaggtgttaaaagaacccctacaacagccaaccttcccttttgcagttgcaaaccaactcttgctggtttctttgctggagcacttgagccacgtgcatgaaccaaacccacttcgttcaagacaggtgtttaagctactttgccagacgtttatcaaaatggggctgctgtcttctttcacttgtagtgacgagtttagctcattgagactacatcacaacagagctattactcacttaatgaggtctgctaaagagagagttcgtcaggatccttgtgaggatatttctcgtatccagaaaatcagatcaagggaagtagccttggaagcacaaacttcacgttacttaaatgaatttgaagaacttgccatcttaggaaaaggtggatacggaagagtatacaaggtcaggaataaattagatggtcagtattatgcaataaaaaaaatcctgattaagggtgcaactaaaacagtttgcatgaaggtcctacgggaagtgaaggtgctggcaggtcttcagcaccccaatattgttggctatcacaccgcgtggatagaacatgttcatgtgattcagccacgagcagacagagctgccattgagttgccatctctggaagtgctctccgaccaggaagaggacagagagcaatgtggtgttaaaaatgatgaaagtagcagctcatccattatctttgctgagcccaccccagaaaaagaaaaacgctttggagaatctgacactgaaaatcagaataacaagtcggtgaagtacaccaccaatttagtcataagagaatctggtgaacttgagtcgaccctggagctccaggaaaatggcttggctggtttgtctgccagttcaattgtggaacagcagctgccactcaggcgtaattcccacctagaggagagtttcacatccaccgaagaatcttccgaagaaaatgtcaactttttgggtcagacagaggcacagtaccacctgatgctgcacatccagatgcagctgtgtgagctctcgctgtgggattggatagtcgagagaaacaagcggggccgggagtatgtggacgagtctgcctgtccttatgttatggccaatgttgcaacaaaaatttttcaagaattggtagaaggtgtgttttacatacataacatgggaattgtgcaccgagatctgaagccaagaaatatttttcttcatggccctgatcagcaagtaaaaataggagactttggtctggcctgcacagacatcctacagaagaacacagactggaccaacagaaacgggaagagaacaccaacacatacgtccagagtgggtacttgtctgtacgcttcacccgaacagttggaaggatctgagtatgatgccaagtcagatatgtacagcttgggtgtggtcctgctagagctctttcagccgtttggaacagaaatggagcgagcagaagttctaacaggtttaagaactggtcagttgccggaatccctccgtaaaaggtgtccagtgcaagccaagtatatccagcacttaacgagaaggaactcatcgcagagaccatctgccattcagctgctgcagagtgaacttttccaaaattctggaaatgttaacctcaccctacagatgaagataatagagcaagaaaaagaaattgcagaactaaagaagcagctaaacctcctttctcaagacaaaggggtgagggatgacggaaaggatgggggcgtgggatgaaagtggacttaacttttaaggtagttaactggaatgtaaatttttaatctttattagggtatagttggtacaatgcttcgttgtatttagtaagcctttacaagacttgttaaagatgtcagagtgccccaagctgccgttccttcccttcctgccccacaagctccttttcctgaatttcctacctaaatattaaccatatgcctagtctctgaaactaaaaacttggacctcatcctcaattattttctcctttcaactctgttgaccctctgtctggtcttcctctagaaggttcttcactggactgttccagttttgacagctgccagtcttcctgcccctttcacactgcagctgaagttcattacctgaaggacgcctcatcatttcattccttggctccaaaccttctgctgcctctaagataaaagctcaacttcttaacagtgtacagtgtgcaacttccaacctttttatctgttctctccaccttcagtttagcgtcattccaaaaccacacccttgcaaagctttgtactccgcaccccagatgatctccaggcagctcagatctctttcctgcctttgccctgcactgttccccggtacttcctcctttattgtagcactcagctccccagccaatctgtacatccctcagaggcagcgatctgatgaattggtttttgaatcccagaaagggtctgccatggagttggcagtcatcacggtagatggcgtatgattttgctgaattttaaataaaatgaaaaccataaatta

SEQ ID NO: 363526 - DNA, 3137 bp, Homo sapiens
  misc_feature (2344)..(2344): n is a, c, g, or t
tctctcgctcctcattcccccctccccaatcgctagtagaggctgtttgaatcggcgcagtgctgggctggccggcgggctgggctgcggcccgcgcgcggccggcgatgcaggggggcaactccggggtccgcaagcgcgaagaggagggcgacggggctggggctgtggctgcgccgccggccatcgactttcccgccgagggcccggaccccgaatatgacgaatctgatgttccagcagaaatccaggtgttaaaagaacccctacaacagccaaccttcccttttgcagttgcaaaccaactcttgctggtttctttgctggagcacttgagccacgtgcatgaaccaaacccacttcgttcaagacaggtgtttaagctactttgccagacgtttatcaaaatggggctgctgtcttctttcacttgtagtgacgagtttagctcattgagactacatcacaacagagctattactcacttaatgaggtctgctaaagagagagttcgtcaggatccttgtgaggatatttctcgtatccagaaaatcagatcaagggaagtagccttggaagcacaaacttcacgttacttaaatgaatttgaagaacttgccatcttaggaaaaggtggatacggaagagtatacaaggtcaggaataaattagatggtcagtattatgcaataaaaaaaatcctgattaagggtgcaactaaaacagtttgcatgaaggtcctacgggaagtgaaggtgctggcaggtcttcagcaccccaatattgttggctatcacaccgcgtggatagaacatgttcatgtgattcagccacgagcagacagagctgccattgagttgccatctctggaagtgctctccgaccaggaagaggacagagagcaatgtggtgttaaaaatgatgaaagtagcagctcatccattatctttgctgagcccaccccagaaaaagaaaaacgctttggagaatctgacactgaaaatcagaataacaagtcggtgaagtacaccaccaatttagtcataagagaatctggtgaacttgagtcgaccctggagctccaggaaaatggcttggctggtttgtctgccagttcaattgtggaacagcagctgccactcaggcgtaattcccacctagaggagagtttcacatccaccgaagaatcttccgaagaaaatgtcaactttttgggtcagacagaggcacagtaccacctgatgctgcacatccagatgcagctgtgtgagctctcgctgtgggattggatagtcgagagaaacaagcggggccgggagtatgtggacgagtctgcctgtccgttcatgttcatggcccaccatgttgccaacaacacacatttttccaagcacattggtcagcacaggtgtgttctaccatcacagtcaaccatgggcaattgtgcaccgcagcatctgcaagcccaagcaacatcattatgtctatccatggcgccctgcatccagaccaagatacacacacatcaagcgcagcacctataggatcttggccctagccacccagccacccatccctcacagcacagccaccgacacaggcacctaggacaccaacaccagacacacacctgcggcccagcagcacacgacaccaacaacacaatcaacagatacacacagcacgccatggagacgaataccatcatgacatcatggagtcaccggcacctatacacaacgcacgggagacacacaggaggtgatgggaaagcggcaatccactggacagatacttgcacatgccacaacactgatacagcaggacaataccatggattagcaaagaccatattgacgagaaatggattgagaatccaccttggaccaataaggcacggacaactccaataaagacaacgaaacacggagaacgtgggagaacaaccacaggaacaaacatggggcacgacacaggcaaggcagcgaacggaacaacgcgattatcacgattcaaaaaccaacaggcaggatacgactacaagaagaacaaaacatagatgagtaatcaacaagcaatagtcgcacccacggggacaacaagtaccccaaatccccgacagaaagagcaaaacgcgggctggattccacaacagaaaggaagaaaccgaaccccaacaagaataccatagcgttaaccacaacgagacacaaccactaacaaccacggacagggaccacggaggacaacacgtacacaagacacagggccaaagacaagcaaaccgcaacatacatatggaggcacaatcacacagacgcgctggccaggccaccagcaacancggcaccaccacatagcaaacccgacaacgaacaattaccatagaagcaagaactcggaacacacacccgaaccaaacccacggtagcgaaagcacacggccacaagcagcagacacaccacgacagccaaagagaaaaaacaacacaccagatcggcaagcaaacactacaaccagaacacagcaccagaacaaacaccccaacaccacatacatcaacacggaccgacacaggagaactataacaagcaaactggaacagcaaccacagcaacagcgaaggcagatgaccaccaacaacaacaagaacacaataaaaacaccaaacaagaagacactaaacacgcacaaagcgtacacaacacacacacgacgacaccaactacgagagcaccagacaagaagaacaaaagaaccaagacgacggacagcaacggaaagcggatatctacgacaaagggagaaccacacagatgacaggacgagccaccgaaagacagacgggtgacgcgcacgaacggcgcgccgaacaccgcgcgacgcacgaccaagacgccagacacatagagtgacacgaagagcataagcagaaccagacagacaggcgaacacgcgaaacactaaacagtaacaaccaagtagaaagcacggcatcctacagcaggacacaaacacacaggaacgagcaggatcaatagcagagtaaaggaagagcgatggacagcacaccgggagcgacacgacacacgaatagatgatgagacccccccttgacaaagctagacgcagcaga

SEQ ID NO: 363527 - DNA, 851 bp, Homo sapiens
  misc_feature (8)..(8): n is a, c, g, or t
  misc_feature (15)..(15): n is a, c, g, or t
  misc_feature (28)..(28): n is a, c, g, or t
  misc_feature (40)..(40): n is a, c, g, or t
  misc_feature (76)..(76): n is a, c, g, or t
tggtgggnggccctnccagtagatgtgncccaccgatggngaagggaacattgcacgtttcttgttctctctgttnggccagaagcataatgctgtcaacgcaacccttatagatagctgggtagatattgcgatttttcagttaaaagagggaagcagtaaagaaaaagccgctgttttccgctccatgaactcgcttctctccatatcaacataaaccagaagaggcatacatctgtgggatagtcaatacataacatcctatctttatatggccatatgagaagataacttcagtgtccctatgatggtaagttcttgaatgtgagggcaagatggctgtgatagccatgactccccgctttgcctggttggacagaacccccttccccaaatgctcacagtcccccccttgagctgtgtctcactcagagaccctaaattttgcagacgaacaagggcatctttgcgttgcttcatctctgctcctcctctagaactatcccacaggctttctagacttagaatatctgacctgatgcaaatcgctatgtggccagtatgccacagaatgtcctaaacccttgctgcctcttatcaaaaccatgttgcacatctcatcatatagtacagctaacccttgaacagtgggggggttagggacactgacccccgactgctgtgcagtcgaaaatccacataaaacttctgactccttcaaaacttaagcactaatagcctactattcatgggaagccttacccatcacagttgattaacacgttttgtatggtctgtatattatatgctatgttcttacaataaacttgagaaaatgttaagaaaataaa

SEQ ID NO: 363528 - DNA, 442 bp, Homo sapiens
gtggaagttgagaaagtagactagcaagcttcacataagagatcagacttgagctaggtgttgagaaggataaatgtgatttatgagttgaagagggataaaagaatatcctagaagataagagacagaatgaacctaggcacagtggtggatcaaagggtttatgtgaaccttgaagaaatcagcttgatgggagtgaggtacgtaataaatggataggagtgggagcagattaagaaagacctcaagagccaagcagagacttaaaataccctggaaattagaaaacagccattggaaaagttttgacaagttttagcattctgtcgcactcatcttatacatgaggactgatatttctgggtctttctggttactgtgttagatttaggagatttttggttcatggttgactatcacctgcttttggttttcagatttg

SEQ ID NO: 363529 - DNA, 1236 bp, Homo sapiens
tggttttcaaacagatacatgtaaaattaactagtccttatgggacttaagcatcaggacttagtttcctgattcctatgtagttagccttatattataaaccaaaagacaatgaaatactaactacttttttttgccaattaatctctagggtgttttcaaaggaccgtatatcagcttcattccaaatgtgtttcatttcacctgtgactcctttaaactatatttttatctaagtcttaggaaactgtatatttcagtgacaaagatcatcaatatgacttaagaatttttttatgttaccatatttaactgatgattacgtattttgaattaccttgtttttacagcatgtatggaaatatatcaaagaatttataattaaaagtatttaaaacctctcaagttagaagtatagtatataatatagtaattatatggatcacttcatgattgtgcattattgtatatattggacatatttcacttaaaagagaaatgtaatgcatgagaagtagaatccaatgtgttaggaatcttcattcctgaatttttacacggtgctgaataggtactgaaagtaaaaattttagtaactaaatctgccaggtgcaatcacatgtgcttgtagttccaggtattctggattcaaaggcgggaggatcacttggtcccaggagtttgagcctgcagtgcactgtgattgcatctgtgaccagccactgcactccaacctgggcacatagttgagaccttatctctttaaaaaaaagcagggaaggggatgattaaatcttctttgataaattgattttgagaatatttcattgaaaaactagataatttgtggagatacattgtcagttgtatacagactaattaactacattggtgattcactccatggaccattttcttcagatatgtttggaattattatctattcctacacttattgcactaatgactcaccttagaaggaaaagaaaaattttaatttacttaaaaaaaattttttttgattgaatagataattgtgtatatttgtggttaattattattttacactccagacctatttctacacctgtagggaagaaacttaatcactgatatcgtcagcctgtcagataccactgatatcttcagtctagttttaagaaaaactaggactaagaagaagtatataatcaagttcaagctaatcatggccatttttaaattacttggtctttt

SEQ ID NO: 363530 - DNA, 458 bp, Homo sapiens
agcttgctgcgttggtgggacctcagctgtcacaggctacctttctatgacgcctcctcaccttaagtagactctgaacagattttaaaagccattcattcaacacattttttaaatgaataaactttttttctgtgtagttttcagtttacagaaacattggtgggaaagtacagagaattcccagatcccgtccccaccatctcccctgtcattcacacgttgcctccgtgtggtgtggtctgtttgttccgatcgatggaacgactctgatacatgattaactagaggccttggttcacatcattagggctcactctttgtggcgcacatcctgtgggtcttgacaaatgtgtcatgatacgtgtctgacattgctgaagtcaccttttcttaaagcttaacattttgggagtattctgaactatgtttggcccagcctgctgcccgatttttat

SEQ ID NO: 363531 - DNA, 470 bp, Homo sapiens
  misc_feature (23)..(23): n is a, c, g, or t
  misc_feature (29)..(29): n is a, c, g, or t
atgctggagccctgagcctgagntcaagnattcaagcccagcctgagcctccaaaccctctctgcctcctcaccttaagtagactctgaacagattttaaaagccattcattcaacacattttttaaatgaataaactttttttctgtgtagttttcagtttacagaaacattggtgggaaagtacagagaattcccagatcccgtccccaccatctcccctgtcattcacacgttgcctccgtgtggtgtggtctgtttgttccgatcgatggaacgactctgatacatgattaactagaggccttggttcacatcattagggctcactctttgtggcgcacatcctgtgggtcttgacaaatgtgtcatgatacgtgtctgacattgctgaagtcaccttttcttaaagcttaacattttgggagtattctgaactatgtttggcccagcctgctgcccgatttttat

SEQ ID NO: 363532 - DNA, 966 bp, Homo sapiens
ctagcttttatggaatttcaattaattacgtttatcaaaactacgcatcatgcccatttgtgggtattggatgaaaagataaatctttccagaaggggcaggggagggagaggcaattctggttggggaagttgggagaaaagaaaatcagtatctcctagtcttcgcccagtttggctcgtttggggtactcctcgaccccgcgttaccaggcccgtgaatcccactcccaccagagaattagcgcgggcggacgagcaaagtgaaacttagtagcccggaacttcgcgtgccgggttcccgcagcaacacgtaccgggaagcgtttgggcgctgcaccgcgctgcgccgtgcccgtgagtccggcgcgcagaggaggaggagaaagctgaccgcttaggcccgggtagtggtcgtcgtggttttccttgtagttcgtggtctgagaccaggcctcaagtggaaacggcgtcaccatgatcgcacggcggaacccagaacccttacggtttctgccggatgaggcccggagcctgcccccgcccaagctgaccgacccgcggctcctctacatcggcttcttgggctactgctccggcctgattgataacctgatccggcggaggccgatcgcgacggctggtttgcatcgccagcttctatatattacggcctttttttttgctggatattatcttgtaaaacgtgaagactacctgtatgctgtgagggaccgtgaaatgtttggatatatgaaattacatccagaggattttcctgaagaagataagaaaacatatggtgaaatttttgaaaaattccatccaatacgttgaagtcttcaaaatgcttgctccagtttcactgatacctgctgtttctgaatttgatggaacatgtttcttatgacagttgaagcttatgctaatctgtatgttgacaccttgtaattaaaatacgtaccat

SEQ ID NO: 363533 - DNA, 490 bp, Homo sapiens
accttagccggctctgacttggaaacaacccttgcgctgccggatgaggcccggagcctgcccccgcccaagctgaccgacccgcggctcctctacatcggcttcttgggctactgctccggcctgattgataacctgatccggcggaggccgatcgcgacggctggtttgcatcgccagcttctatatattacggcctttttttttgctggatattatcttgtaaaacgtgaagactacctgtatgctgtgagggaccgtgaaatgtttggatatatgaaattacatccagaggattttcctgaagaagataagaaaacatatggtgaaatttttgaaaaattccatccaatacgttgaagtcttcaaaatgcttgctccagtttcactgatacctgctgtttctgaatttgatggaacatgtttcttatgacagttgaagcttatgctaatctgtatgttgacaccttgtaattaaaatacgtaccat

SEQ ID NO: 363534 - DNA, 812 bp, Homo sapiens
ctagcttttatggaatttcaattaattacgtttatcaaaactacgcatcatgcccatttgtgggtattggatgaaaagataaatctttccagaaggggcaggggagggagaggcaattctggttggggaagttgggagaaaagaaaatcagtatctcctagtcttcgcccagtttggctcgtttggggtactcctcgaccccgcgttaccaggcccgtgaatcccactcccaccagagaattagcgcgggcggacgagcaaagtgaaacttagtagcccggaacttcgcgtgccgggttcccgcagcaacacgtaccgggaagcgtttgggcgctgcaccgcgctgcgccgtgcccgtgagtccggcgcgcagaggaggaggagaaagctgaccgcttaggcccgggtagtggtcgtcgtggttttccttgtagttcgtggtctgagaccaggcctcaagtggaaacggcgtcaccatgatcgcacgggtttgcatcgccagcttctatatattacggcctttttttttgctggatattatcttgtaaaacgtgaagactacctgtatgctgtgagggaccgtgaaatgtttggatatatgaaattacatccagaggattttcctgaagaagataagaaaacatatggtgaaatttttgaaaaattccatccaatacgttgaagtcttcaaaatgcttgctccagtttcactgatacctgctgtttctgaatttgatggaacatgtttcttatgacagttgaagcttatgctaatctgtatgttgacaccttgtaattaaaatacgtaccat

SEQ ID NO: 363535 - DNA, 2194 bp, Homo sapiens
tgagctcggtccaactcagggcgagctgctactcagggcgagctgcagctcagtgggcgctgcaccgcgctgcgccgtgcccgtgagtccggcgcgcagaggaggaggagaaagctgaccgcttaggcccgggtagtggtcgtcgtggttttccttgtagttcgtggtctgagaccaggcctcaagtggaaacggcgtcaccatgatcgcacggcggaacccagaacccttacggtttctgccggatgaggcccggagcctgcccccgcccaagctgaccgacccgcggctcctctacatcggcttcttgggctactgctccggcctgattgataacctgatccggcggaggccgatcgcgacggctggtttgcatcgccagcttctatatattacggcctttttttttgctggatattatcttgtaaaacgtgaagactacctgtatgctgtgagggaccgtgaaatgtttggatatatgaaattacatccagaggattttcctgaagaagataagaaaacatatggtgaaatttttgaaaaattccatccaatacgttgaagtcttcaaaatgcttgctccagtttcactgatacctgctgtttctgaatttgatggaacatgtttcttatgacagttgaagcttatgctaatctgtatgttgacaccttgtaattaaaatacgtaccatgagtactctgactctttattgttgtaagaaaaatagttcatcatcagagaatggtcagtttccattcacccatctgaaagattttaagatgaggttgaattctagtttagagttagcagactacccaaatctggcccactgccaataaagtctcattggaacacagccatgctcatttgtttacatgttgtttatggcgactgccatgctgcaagagcagaattgagtagttgtgatagagacctatggcctgcaaagcctaattaatatgtagccctttcagaaaaggtttgcctgcccctgtcctagtgcaaagtgaatttagagtgagccagattatggaggattctgtgactcttgccaaataattttgacttcatcctgtaggtattaagtcattaaggcgttttaaatcatacagtcaggtttgtatttctgagctgtctataatgaatgatatagaaggtggtttcgaaggaggagactccagacaaggaaaacagaaatcttatgttgccaagttgtctttgctcttaggtgggttatcctggagaaaatggactcaggagctaatactgtctacagtggagcttggtgcaattagaagcaaaagactgtacctaactggaatgaggttactttttatggcttatcaaatgcttgtcctggcccgatgcagtggctcatgcctgtaatcccagcactttgagaggctgaggcagggcagattgcatgagcccaggagttcgagaccaacttgggcaacatggtgaaacactgtctctgcataaaatacaaaaattagctgggcgtggtggcacgttcctgcaatcccagctactcataaggctgaggtgggaggatctattgagccctggaattcgaggatgcaattaattgtggttgtgtcacagttcactgcagcctgggtgacactccagcctgggtgacaaaggagaccccgtcaaaaaaaaaagtacttgtcccaaaagtttttgtttcctagcttagaatttataatcagattaggttttggagataaagtatatgtggtattttttttttttttttgagacagtcttgctctgtcatcaggctggagtgcagtggcgcaatttcggctcactgcaacctccacctcctgggttcaagcaattctcctgcctcagcctcccgagtagctgggactgcaggtgcatgccacgacgcccagctgatttttgtgtttttagtagagacggggtttcaccatgttggccaagatggtctcaatctcttgaccttgtgatccacctgccttggccttccaaagtgttggaattacaggcgtgagccaccgcgcctggtctatatgtgatttcaaattaggtggccttataaatataagcagatggtttctgggcaaaatcaaatgatttctgtctctattttcttgagtaccaattgtaaaaactgaaattaggttgaggaaagtgctttagaaataataaagatgtacaaat

SEQ ID NO: 363536 - DNA, 2011 bp, Homo sapiens
ctagcttttatggaatttcaattaattacgtttatcaaaactacgcatcatgcccatttgtgggtattggatgaaaagataaatctttccagaaggggcaggggagggagaggcaattctggttggggaagttgggagaaaagaaaatcagtatctcctagtcttcgcccagtttggctcgtttggggtactcctcgaccccgcgttaccaggcccgtgaatcccactcccaccagagaattagcgcgggcggacgagcaaagtgaaacttagtagcccggaacttcgcgtgccgggttcccgcagcaacacgtaccgggaagcgtttgggcgctgcaccgcgctgcgccgtgcccgtgagtccggcgcgcagaggaggaggagaaagctgaccgcttaggcccgggtagtggtcgtcgtggttttccttgtagttcgtggtctgagaccaggcctcaagtggaaacggcgtcaccatgatcgcacggcggaacccagaacccttacggtttctgccggatgaggcccggagcctgcccccgcccaagctgaccgacccgcggctcctctacatcggcttcttgggctactgctccggcctgattgataacctgatccggcggaggccgatcgcgacggctggtttgcatcgccagcttctatatattacggcctttttttttgctggatattatcttgtaaaacgtgaagactacctgtatgctgtgagggaccgtgaaatgtttggatatatgaaattacatccagaggattttcctgaagaagataagaaaacatatggtgaaatttttgaaaaattccatccaatacgttgaagtcttcaaaatgcttgctccagtttcactgatacctgctgtttctgaatttgatggaacatgtttcttatgacagttgaagcttatgctaatctgtatgttgacaccttgtaattaaaatacgtaccatgagtactctgactctttattgttgtaagaaaaatagttcatcatcagagaatggtcagtttccattcacccatctgaaagattttaagatgaggttgaattctagtttagagttagcagactacccaaatctggcccactgccaataaagtctcattggaacacagccatgctcatttgtttacatgttgtttatggcgactgccatgctgcaagagcagaattgagtagttgtgatagagacctatggcctgcaaagcctaattaatatgtagccctttcagaaaaggtttgcctgcccctgtcctagtgcaaagtgaatttagagtgagccagattatggaggattctgtgactcttgccaaataattttgacttcatcctgtaggtattaagtcattaaggcgttttaaatcatacagtcaggtttgtatttctgagctgtctataatgaatgatatagaaggtggtttcgaaggaggagactccagacaaggaaaacagaaatcttatgttgccaagttgtctttgctcttaggtgggttatcctggagaaaatggactcaggagctaatactgtctacagtggagcttggtgcaattagaagcaaaagactgtacctaactggaatgaggttactttttatggcttatcaaatgcttgtcctggcccgatgcagtggctcatgcctgtaatccccagctgatttttgtgtttttagtagagacggggtttcaccatgttggccaagatggtctcaatctcttgaccttgtgatccacctgccttggccttccaaagtgttggaattacaggcgtgagccaccgcgcctggtctatatgtgatttcaaattaggtggccttataaatataagcagatggtttctgggcaaaatcaaatgatttctgtctctattttcttgagtaccaattgtaaaaactgaaattaggttgaggaaagtgctttagaaataataaagatgtacaaatacaaggctttggattttttattagttctgcaataaataataggtttatagttca

SEQ ID NO: 363537 - DNA, 1906 bp, Homo sapiens
ctagcttttatggaatttcaattaattacgtttatcaaaactacgcatcatgcccatttgtgggtattggatgaaaagataaatctttccagaaggggcaggggagggagaggcaattctggttggggaagttgggagaaaagaaaatcagtatctcctagtcttcgcccagtttggctcgtttggggtactcctcgaccccgcgttaccaggcccgtgaatcccactcccaccagagaattagcgcgggcggacgagcaaagtgaaacttagtagcccggaacttcgcgtgccgggttcccgcagcaacacgtaccgggaagcgtttgggcgctgcaccgcgctgcgccgtgcccgtgagtccggcgcgcagaggaggaggagaaagctgaccgcttaggcccgggtagtggtcgtcgtggttttccttgtagttcgtggtctgagaccaggcctcaagtggaaacggcgtcaccatgatcgcacggcggaacccagaacccttacggtttctgccggatgaggcccggagcctgcccccgcccaagctgaccgacccgcggctcctctacatcggcttcttgggctactgctccggcctgattgataacctgatccggcggaggccgatcgcgacggctggtttgcatcgccagcttctatatattacggcctttttttttgctggatattatcttgtaaaacgtgaagactacctgtatgctgtgagggaccgtgaaatgtttggatatatgaaattacatccagaggattttcctgaagaagataagaaaacatatggtgaaatttttgaaaaattccatccaatacgttgaagtcttcaaaatgcttgctccagtttcactgatacctgctgtttctgaatttgatggaacatgtttcttatgacagttgaagcttatgctaatctgtatgttgacaccttgtaattaaaatacgtaccatgagtactctgactctttattgttgtaagaaaaatagttcatcatcagagaatggtcagtttccattcacccatctgaaagattttaagatgaggttgaattctagtttagagttagcagactacccaaatctggcccactgccaataaagtctcattggaacacagccatgctcatttgtttacatgttgtttatggcgactgccatgctgcaagagcagaattgagtagttgtgatagagacctatggcctgcaaagcctaattaatatgtagccctttcagaaaaggtttgcctgcccctgtcctagtgcaaagtgaatttagagtgagccagattatggaggattctgtgactcttgccaaataattttgacttcatcctgtaggtattaagtcattaaggcgttttaaatcatacagtcaggtttgtatttctgagctgtctataatgaatgatatagaaggtggtttcgaaggaggagactccagacaaggaaaacagaaatcttatgttgccaagttgtctttgctcttaggtgggttatcctggagaaaatggactcaggagctaatactgtctacagtggagcttggtgcaattagaagcaaaagactgtacctaactggaatgaggttactttttatggcttatcaaatgcttgtccttgtgatccacctgccttggccttccaaagtgttggaattacaggcgtgagccaccgcgcctggtctatatgtgatttcaaattaggtggccttataaatataagcagatggtttctgggcaaaatcaaatgatttctgtctctattttcttgagtaccaattgtaaaaactgaaattaggttgaggaaagtgctttagaaataataaagatgtacaaatacaaggctttggattttttattagttctgcaataaataataggtttatagttca

SEQ ID NO: 363538 - DNA, 1003 bp, Homo sapiens
ctagcttttatggaatttcaattaattacgtttatcaaaactacgcatcatgcccatttgtgggtattggatgaaaagataaatctttccagaaggggcaggggagggagaggcaattctggttggggaagttgggagaaaagaaaatcagtatctcctagtcttcgcccagtttggctcgtttggggtactcctcgaccccgcgttaccaggcccgtgaatcccactcccaccagagaattagcgcgggcggacgagcaaagtgaaacttagtagcccggaacttcgcgtgccgggttcccgcagcaacacgtaccgggaagcgtttgggcgctgcaccgcgctgcgccgtgcccgtgagtccggcgcgcagaggaggaggagaaagctgaccgcttaggcccgggtagtggtcgtcgtggttttccttgtagttcgtggtctgagaccaggcctcaagtggaaacggcgtcaccatgatcgcacggcggaacccagaacccttacggtttctgccggatgaggcccggagcctgcccccgcccaagctgaccgacccgcggctcctctacatcggcttcttgggctactgctccggcctgattgataacctgatccggcggaggccgatcgcgacggctggtttgcatcgccagcttctatatattacggcctttttttttgctggatattatcttgtaaaacgtgaagactacctgtatgctgtgagggaccgtgaaatgtttggatatatgaaattacatccagaggattttcctgaagaagataagaaaacatatggtgaaatttttgaaaaattccatccaatacgttgaagtcttcaaaatgcttgctccagtttcactgatacctgctgtttctgaatttgatggaacatgtttcttatgacagttgaagcttatgctaatctgtatgttgacaccttgtaattaaaatacgtaccataaaaaaaaaatttcattatctaatgcggcccaattcc

SEQ ID NO: 363539 - DNA, 2101 bp, Homo sapiens
gatcacgttgacgaaggtggtcttgcccgagtactgaagcccgaccagcgtgagctccatctcctccttccagaatagggccttgaaccagtcagcattaaccacggattgagataagcaccggaacccagaacccttacggtttctgccggatgaggcccggagcctgcccccgcccaagctgaccgacccgcggctcctctacatcggcttcttgggctactgctccggcctgattgataacctgatccggcggaggccgatcgcgacggctggtttgcatcgccagcttctatatattacggcctttttttttgctggatattatcttgtaaaacgtgaagactacctgtatgctgtgagggaccgtgaaatgtttggatatatgaaattacatccagaggattttcctgaagaagataagaaaacatatggtgaaatttttgaaaaattccatccaatacgttgaagtcttcaaaatgcttgctccagtttcactgatacctgctgtttctgaatttgatggaacatgtttcttatgacagttgaagcttatgctaatctgtatgttgacaccttgtaattaaaatacgtaccatgagtactctgactctttattgttgtaagaaaaatagttcatcatcagagaatggtcagtttccattcacccatctgaaagattttaagatgaggttgaattctagtttagagttagcagactacccaaatctggcccactgccaataaagtctcattggaacacagccatgctcatttgtttacatgttgtttatggcgactgccatgctgcaagagcagaattgagtagttgtgatagagacctatggcctgcaaagcctaattaatatgtagccctttcagaaaaggtttgcctgcccctgtcctagtgcaaagtgaatttagagtgagccagattatggaggattctgtgactcttgccaaataattttgacttcatcctgtaggtattaagtcattaaggcgttttaaatcatacagtcaggtttgtatttctgagctgtctataatgaatgatatagaaggtggtttcgaaggaggagactccagacaaggaaaacagaaatcttatgttgccaagttgtctttgctcttaggtgggttatcctggagaaaatggactcaggagctaatactgtctacagtggagcttggtgcaattagaagcaaaagactgtacctaactggaatgaggttactttttatggcttatcaaatgcttgtcctggcccgatgcagtggctcatgcctgtaatcccagcactttgagaggctgaggcagggcagattgcatgagcccaggagttcgagaccaacttgggcaacatggtgaaacactgtctctgcataaaatacaaaaattagctgggcgtggtggcacgttcctgcaatcccagctactcataaggctgaggtgggaggatctattgagccctggaattcgaggatgcaattaattgtggttgtgtcacagttcactgcagcctgggtgacactccagcctgggtgacaaaggagaccccgtcaaaaaaaaaagtacttgtcccaaaagtttttgtttcctagcttagaatttataatcagattaggttttggagataaagtatatgtggtattttttttttttttttgagacagtcttgctctgtcatcaggctggagtgcagtggcgcaatttcggctcactgcaacctccacctcctgggttcaagcaattctcctgcctcagcctcccgagtagctgggactgcaggtgcatgccacgacgcccagctgatttttgtgtttttagtagagacggggtttcaccatgttggccaagatggtctcaatctcttgaccttgtgatccacctgccttggccttccaaagtgttggaattacaggcgtgagccaccgcgcctggtctatatgtgatttcaaattaggtggccttataaatataagcagatggtttctgggcaaaatcaaatgatttctgtctctattttcttgagtaccaattgtaaaaactgaaattaggttgaggaaagtgctttagaaataataaagatgtacaaat

SEQ ID NO: 363540 - DNA, 1870 bp, Homo sapiens
tgacccaccataacctaaccatcatctacaaaaaaatcaaatcagtttgcatcgccagcttctatatattacggcctttttttttgctggatattatcttgtaaaacgtgaagactacctgtatgctgtgagggaccgtgaaatgtttggatatatgaaattacatccagaggattttcctgaagaagataagaaaacatatggtgaaatttttgaaaaattccatccaatacgttgaagtcttcaaaatgcttgctccagtttcactgatacctgctgtttctgaatttgatggaacatgtttcttatgacagttgaagcttatgctaatctgtatgttgacaccttgtaattaaaatacgtaccatgagtactctgactctttattgttgtaagaaaaatagttcatcatcagagaatggtcagtttccattcacccatctgaaagattttaagatgaggttgaattctagtttagagttagcagactacccaaatctggcccactgccaataaagtctcattggaacacagccatgctcatttgtttacatgttgtttatggcgactgccatgctgcaagagcagaattgagtagttgtgatagagacctatggcctgcaaagcctaattaatatgtagccctttcagaaaaggtttgcctgcccctgtcctagtgcaaagtgaatttagagtgagccagattatggaggattctgtgactcttgccaaataattttgacttcatcctgtaggtattaagtcattaaggcgttttaaatcatacagtcaggtttgtatttctgagctgtctataatgaatgatatagaaggtggtttcgaaggaggagactccagacaaggaaaacagaaatcttatgttgccaagttgtctttgctcttaggtgggttatcctggagaaaatggactcaggagctaatactgtctacagtggagcttggtgcaattagaagcaaaagactgtacctaactggaatgaggttactttttatggcttatcaaatgcttgtcctggcccgatgcagtggctcatgcctgtaatcccagcactttgagaggctgaggcagggcagattgcatgagcccaggagttcgagaccaacttgggcaacatggtgaaacactgtctctgcataaaatacaaaaattagctgggcgtggtggcacgttcctgcaatcccagctactcataaggctgaggtgggaggatctattgagccctggaattcgaggatgcaattaattgtggttgtgtcacagttcactgcagcctgggtgacactccagcctgggtgacaaaggagaccccgtcaaaaaaaaaagtacttgtcccaaaagtttttgtttcctagcttagaatttataatcagattaggttttggagataaagtatatgtggtattttttttttttttttgagacagtcttgctctgtcatcaggctggagtgcagtggcgcaatttcggctcactgcaacctccacctcctgggttcaagcaattctcctgcctcagcctcccgagtagctgggactgcaggtgcatgccacgacgcccagctgatttttgtgtttttagtagagacggggtttcaccatgttggccaagatggtctcaatctcttgaccttgtgatccacctgccttggccttccaaagtgttggaattacaggcgtgagccaccgcgcctggtctatatgtgatttcaaattaggtggccttataaatataagcagatggtttctgggcaaaatcaaatgatttctgtctctattttcttgagtaccaattgtaaaaactgaaattaggttgaggaaagtgctttagaaataataaagatgtacaaat

SEQ ID NO: 363541 - DNA, 1864 bp, Homo sapiens
catatcgacgtattatatgaaattaaaaaaaaacttcggtttgcatcgccagcttctatatattacggcctttttttttgctggatattatcttgtaaaacgtgaagactacctgtatgctgtgagggaccgtgaaatgtttggatatatgaaattacatccagaggattttcctgaagaagataagaaaacatatggtgaaatttttgaaaaattccatccaatacgttgaagtcttcaaaatgcttgctccagtttcactgatacctgctgtttctgaatttgatggaacatgtttcttatgacagttgaagcttatgctaatctgtatgttgacaccttgtaattaaaatacgtaccatgagtactctgactctttattgttgtaagaaaaatagttcatcatcagagaatggtcagtttccattcacccatctgaaagattttaagatgaggttgaattctagtttagagttagcagactacccaaatctggcccactgccaataaagtctcattggaacacagccatgctcatttgtttacatgttgtttatggcgactgccatgctgcaagagcagaattgagtagttgtgatagagacctatggcctgcaaagcctaattaatatgtagccctttcagaaaaggtttgcctgcccctgtcctagtgcaaagtgaatttagagtgagccagattatggaggattctgtgactcttgccaaataattttgacttcatcctgtaggtattaagtcattaaggcgttttaaatcatacagtcaggtttgtatttctgagctgtctataatgaatgatatagaaggtggtttcgaaggaggagactccagacaaggaaaacagaaatcttatgttgccaagttgtctttgctcttaggtgggttatcctggagaaaatggactcaggagctaatactgtctacagtggagcttggtgcaattagaagcaaaagactgtacctaactggaatgaggttactttttatggcttatcaaatgcttgtcctggcccgatgcagtggctcatgcctgtaatcccagcactttgagaggctgaggcagggcagattgcatgagcccaggagttcgagaccaacttgggcaacatggtgaaacactgtctctgcataaaatacaaaaattagctgggcgtggtggcacgttcctgcaatcccagctactcataaggctgaggtgggaggatctattgagccctggaattcgaggatgcaattaattgtggttgtgtcacagttcactgcagcctgggtgacactccagcctgggtgacaaaggagaccccgtcaaaaaaaaaagtacttgtcccaaaagtttttgtttcctagcttagaatttataatcagattaggttttggagataaagtatatgtggtattttttttttttttttgagacagtcttgctctgtcatcaggctggagtgcagtggcgcaatttcggctcactgcaacctccacctcctgggttcaagcaattctcctgcctcagcctcccgagtagctgggactgcaggtgcatgccacgacgcccagctgatttttgtgtttttagtagagacggggtttcaccatgttggccaagatggtctcaatctcttgaccttgtgatccacctgccttggccttccaaagtgttggaattacaggcgtgagccaccgcgcctggtctatatgtgatttcaaattaggtggccttataaatataagcagatggtttctgggcaaaatcaaatgatttctgtctctattttcttgagtaccaattgtaaaaactgaaattaggttgaggaaagtgctttagaaataataaagatgtacaaat

SEQ ID NO: 363542 - DNA, 2420 bp, Homo sapiens
ctagcttttatggaatttcaattaattacgtttatcaaaactacgcatcatgcccatttgtgggtattggatgaaaagataaatctttccagaaggggcaggggagggagaggcaattctggttggggaagttgggagaaaagaaaatcagtatctcctagtcttcgcccagtttggctcgtttggggtactcctcgaccccgcgttaccaggcccgtgaatcccactcccaccagagaattagcgcgggcggacgagcaaagtgaaacttagtagcccggaacttcgcgtgccgggttcccgcagcaacacgtaccgggaagcgtttgggcgctgcaccgcgctgcgccgtgcccgtgagtccggcgcgcagaggaggaggagaaagctgaccgcttaggcccgggtagtggtcgtcgtggttttccttgtagttcgtggtctgagaccaggcctcaagtggaaacggcgtcaccatgatcgcacggcggaacccagaacccttacggtttctgccggatgaggcccggagcctgcccccgcccaagctgaccgacccgcggctcctctacatcggcttcttgggctactgctccggcctgattgataacctgatccggcggaggccgatcgcgacggctggtttgcatcgccagcttctatatattacggcctttttttttgctggatattatcttgtaaaaatgaaattacatccagaggattttcctgaagaagataagaaaacatatggtgaaatttttgaaaaattccatccaatacgttgaagtcttcaaaatgcttgctccagtttcactgatacctgctgtttctgaatttgatggaacatgtttcttatgacagttgaagcttatgctaatctgtatgttgacaccttgtaattaaaatacgtaccatgagtactctgactctttattgttgtaagaaaaatagttcatcatcagagaatggtcagtttccattcacccatctgaaagattttaagatgaggttgaattctagtttagagttagcagactacccaaatctggcccactgccaataaagtctcattggaacacagccatgctcatttgtttacatgttgtttatggcgactgccatgctgcaagagcagaattgagtagttgtgatagagacctatggcctgcaaagcctaattaatatgtagccctttcagaaaaggtttgcctgcccctgtcctagtgcaaagtgaatttagagtgagccagattatggaggattctgtgactcttgccaaataattttgacttcatcctgtaggtattaagtcattaaggcgttttaaatcatacagtcaggtttgtatttctgagctgtctataatgaatgatatagaaggtggtttcgaaggaggagactccagacaaggaaaacagaaatcttatgttgccaagttgtctttgctcttaggtgggttatcctggagaaaatggactcaggagctaatactgtctacagtggagcttggtgcaattagaagcaaaagactgtacctaactggaatgaggttactttttatggcttatcaaatgcttgtcctggcccgatgcagtggctcatgcctgtaatcccagcactttgagaggctgaggcagggcagattgcatgagcccaggagttcgagaccaacttgggcaacatggtgaaacactgtctctgcataaaatacaaaaattagctgggcgtggtggcacgttcctgcaatcccagctactcataaggctgaggtgggaggatctattgagccctggaattcgaggatgcaattaattgtggttgtgtcacagttcactgcagcctgggtgacactccagcctgggtgacaaaggagaccccgtcaaaaaaaaaagtacttgtcccaaaagtttttgtttcctagcttagaatttataatcagattaggttttggagataaagtatatgtggtattttttttttttttttgagacagtcttgctctgtcatcaggctggagtgcagtggcgcaatttcggctcactgcaacctccacctcctgggttcaagcaattctcctgcctcagcctcccgagtagctgggactgcaggtgcatgccacgacgcccagctgatttttgtgtttttagtagagacggggtttcaccatgttggccaagatggtctcaatctcttgaccttgtgatccacctgccttggccttccaaagtgttggaattacaggcgtgagccaccgcgcctggtctatatgtgatttcaaattaggtggccttataaatataagcagatggtttctgggcaaaatcaaatgatttctgtctctattttcttgagtaccaattgtaaaaactgaaattaggttgaggaaagtgctttagaaataataaagatgtacaaat

SEQ ID NO: 363543 - DNA, 1011 bp, Homo sapiens
ctagcttttatggaatttcaattaattacgtttatcaaaactacgcatcatgcccatttgtgggtattggatgaaaagataaatctttccagaaggggcaggggagggagaggcaattctggttggggaagttgggagaaaagaaaatcagtatctcctagtcttcgcccagtttggctcgtttggggtactcctcgaccccgcgttaccaggcccgtgaatcccactcccaccagagaattagcgcgggcggacgagcaaagtgaaacttagtagcccggaacttcgcgtgccgggttcccgcagcaacacgtaccgggaagcgtttgggcgctgcaccgcgctgcgccgtgcccgtgagtccggcgcgcagaggaggaggagaaagctgaccgcttaggcccgggtagtggtcgtcgtggttttccttgtagttcgtggtctgagaccaggcctcaagtggaaacggcgtcaccatgatcgcacggcggaacccagaacccttacggtttctgccggatgaggcccggagcctgcccccgcccaagctgaccgacccgcggctcctctacatcggcttcttgggctactgctccggcctgattgataacctgatccggcggaggccgatcgcgacggctggtttgcatcgccagcttctatatattacggcctttttttttgctggatattatcttgtaaaacgtgaagactacctgtatgctgtgagggaccgtgaaatgtttggatatatgaaattacatccagaggattttcctgaagaagatgtctactgttgtggagctgaacgtcgggggtgagttccacaccaccaccctgggtaccctgaggaagtttccgggctcaaagctggcagagatgttctctagcttagccaaggcctccacggacgcggagggccgcttcttcatcgaccgccccagcacctatttcagacccatcctggactacctgcgcactgggcaagtgcccacacagcacatccctgaa

SEQ ID NO: 363544 - DNA, 822 bp, Homo sapiens
ctagcttttatggaatttcaattaattacgtttatcaaaactacgcatcatgcccatttgtgggtattggatgaaaagataaatctttccagaaggggcaggggagggagaggcaattctggttggggaagttgggagaaaagaaaatcagtatctcctagtcttcgcccagtttggctcgtttggggtactcctcgaccccgcgttaccaggcccgtgaatcccactcccaccagagaattagcgcgggcggacgagcaaagtgaaacttagtagcccggaacttcgcgtgccgggttcccgcagcaacacgtaccgggaagcgtttgggcgctgcaccgcgctgcgccgtgcccgtgagtccggcgcgcagaggaggaggagaaagctgaccgcttaggcccgggtagtggtcgtcgtggttttccttgtagttcgtggtctgagaccaggcctcaagtggaaacggcgtcaccatgatcgcacggcggaacccagaacccttacggtttctgccggatgaggcccggagcctgcccccgcccaagctgaccgacccgcggctcctctacatcggcttcttgggctactgctccggcctgattgataacctgatccggcggaggccgatcgcgacggctgataagaaaacatatggtgaaatttttgaaaaattccatccaatacgttgaagtcttcaaaatgcttgctccagtttcactgatacctgctgtttctgaatttgatggaacatgtttcttatgacagttgaagcttatgctaatctgtatgttgacaccttgtaattaaaatacgtaccat

SEQ ID NO: 363545 - DNA, 904 bp, Homo sapiens
ctagcttttatggaatttcaattaattacgtttatcaaaactacgcatcatgcccatttgtgggtattggatgaaaagataaatctttccagaaggggcaggggagggagaggcaattctggttggggaagttgggagaaaagaaaatcagtatctcctagtcttcgcccagtttggctcgtttggggtactcctcgaccccgcgttaccaggcccgtgaatcccactcccaccagagaattagcgcgggcggacgagcaaagtgaaacttagtagcccggaacttcgcgtgccgggttcccgcagcaacacgtaccgggaagcgtttgggcgctgcaccgcgctgcgccgtgcccgtgagtccggcgcgcagaggaggaggagaaagctgaccgcttaggcccgggtagtggtcgtcgtggttttccttgtagttcgtggtctgagaccaggcctcaagtggaaacggcgtcaccatgatcgcacggcggaacccagaacccttacggtttctgccggatgaggcccggagcctgcccccgcccaagctgaccgacccgcggctcctctacatcggcttcttgggctactgctccggcctgattgataacctgatccggcggaggccgatcgcgacggctgcgtgaagactacctgtatgctgtgagggaccgtgaaatgtttggatatatgaaattacatccagaggattttcctgaagaagataagaaaacatatggtgaaatttttgaaaaattccatccaatacgttgaagtcttcaaaatgcttgctccagtttcactgatacctgctgtttctgaatttgatggaacatgtttcttatgacagttgaagcttatgctaatctgtatgttgacaccttgtaattaaaatacgtaccat

SEQ ID NO: 363546 - DNA, 1272 bp, Homo sapiens
  misc_feature (1043)..(1043): n is a, c, g, or t
ctagcttttatggaatttcaattaattacgtttatcaaaactacgcatcatgcccatttgtgggtattggatgaaaagataaatctttccagaaggggcaggggagggagaggcaattctggttggggaagttgggagaaaagaaaatcagtatctcctagtcttcgcccagtttggctcgtttggggtactcctcgaccccgcgttaccaggcccgtgaatcccactcccaccagagaattagcgcgggcggacgagcaaagtgaaacttagtagcccggaacttcgcgtgccgggttcccgcagcaacacgtaccgggaagcgtttgggcgctgcaccgcgctgcgccgtgcccgtgagtccggcgcgcagaggaggaggagaaagctgaccgcttaggcccgggtagtggtcgtcgtggttttccttgtagttcgtggtctgagaccaggcctcaagtggaaacggcgtcaccatgatcgcacggcggaacccagaacccttacggtttctgccggatgaggcccggagcctgcccccgcccaagctgaccgacccgcggctcctctacatcggcttcttgggctactgctccggcctgattgataacctgatccggcggaggccgatcgcgacggctgataagaaaacatatggtgaaatttttgaaaaattccatccaatacgttgaagtcttcaaaatgcttgctccagtttcactgatacctgctgtttctgaatttgatggaacatgtttcttatgacagttgaagcttatgctaatctgtatgttgacaccttgtaattaaaatacgtaccataaaaaaaaaaaaaaaaaaaaaaaaaaaaaaaaaaaaaaaaaaaaaaaaaaaaaaaaaaaaaaaaaaaaaaaaaaaaaaaaaaaaaaaaaaaaaaaaaaaaaaaaaaaaaaaaaaaaaaaaaaaaaaagagaggagagagagagagagaaaaaggaagagaaacacacaaaagggggagaaaaagggggagggagaggcaggcagactacgcagagaaaagnaaggaggagcccaacagaggaggcacacccattagaagagaaaaaaggaagggagcaccacactcaacaaaaaagaggtagacagggagaaaacagcagcgagcagcgacagagagaaccacaagggaataaaggcggagacaaaaaggaggggagtggagaaacaaaatggggggagcaaaacaaaacataacagaacggacacggaccgccaaggggcgaagacgac

SEQ ID NO: 363547 - DNA, 1187 bp, Homo sapiens
  misc_feature (958)..(958): n is a, c, g, or t
ctagcttttatggaatttcaattaattacgtttatcaaaactacgcatcatgcccatttgtgggtattggatgaaaagataaatctttccagaaggggcaggggagggagaggcaattctggttggggaagttgggagaaaagaaaatcagtatctcctagtcttcgcccagtttggctcgtttggggtactcctcgaccccgcgttaccaggcccgtgaatcccactcccaccagagaattagcgcgggcggacgagcaaagtgaaacttagtagcccggaacttcgcgtgccgggttcccgcagcaacacgtaccgggaagcgtttgggcgctgcaccgcgctgcgccgtgcccgtgagtccggcgcgcagaggaggaggagaaagctgaccgcttaggcccgggtagtggtcgtcgtggttttccttgtagttcgtggtctgagaccaggcctcaagtggaaacggcgtcaccatgatcgcacgggtttgcatcgccagcttctatatattacggcctttttttttgctggatattatcttgtaaaacgtgaagactacctgtatgctgtgagggaccgtgaaatgtttggatatatgaaattacatccagaggattttcctgaagaagataagaaaacatatggtgaaatttttgaaaaattccatccaatacgttgaagtcttcaaaatgcttgctccagtttcactgatacctgctgtttctgaatttgatggaacatgtttcttatgacagttgaagcttatgctaatctgtatgttgacaccttgtaattaaaatacgtaccataaaaaaaaaaaaaaaaaaaaaaaaaaaaaaaaaaaaaaaaaaaaaaaaaaaagagaggagagagagagagagaaaaaggaagagaaacacacaaaagggggagaaaaagggggagggagaggcaggcagactacgcagagaaaagnaaggaggagcccaacagaggaggcacacccattagaagagaaaaaaggaagggagcaccacactcaacaaaaaagaggtagacagggagaaaacagcagcgagcagcgacagagagaaccacaagggaataaaggcggagacaaaaaggaggggagtggagaaacaaaatggggggagcaaaacaaaacataacagaacggacacggaccgccaaggggcgaagacgac

SEQ ID NO: 363548 - DNA, 2468 bp, Homo sapiens
ctagcttttatggaatttcaattaattacgtttatcaaaactacgcatcatgcccatttgtgggtattggatgaaaagataaatctttccagaaggggcaggggagggagaggcaattctggttggggaagttgggagaaaagaaaatcagtatctcctagtcttcgcccagtttggctcgtttggggtactcctcgaccccgcgttaccaggcccgtgaatcccactcccaccagagaattagcgcgggcggacgagcaaagtgaaacttagtagcccggaacttcgcgtgccgggttcccgcagcaacacgtaccgggaagcgtttgggcgctgcaccgcgctgcgccgtgcccgtgagtccggcgcgcagaggaggaggagaaagctgaccgcttaggcccgggtagtggtcgtcgtggttttccttgtagttcgtggtctgagaccaggcctcaagtggaaacggcgtcaccatgatcgcacggcggaacccagaacccttacggtttctgccggatgaggcccggagcctgcccccgcccaagctgaccgacccgcggctcctctacatcggcttcttgggctactgctccggcctgattgataacctgatccggcggaggccgatcgcgacggctggtttgcatcgccagcttctatatattacggcctttttttttgctggatattatcttgtaaaacgtgaagactacctgtatgctgtgagggaccgtgaaatgtttggatatatgaaattacatccagaggattttcctgaagaagataagaaaacatatggtgaaatttttgaaaaattccatccaatacgttgaagtcttcaaaatgcttgctccagtttcactgatacctgctgtttctgaatttgatggaacatgtttcttatgacagttgaagcttatgctaatctgtatgttgacaccttgtaattaaaatacgtaccatgagtactctgactctttattgttgtaagaaaaatagttcatcatcagagaatggtcagtttccattcacccatctgaaagattttaagatgaggttgaattctagtttagagttagcagactacccaaatctggcccactgccaataaagtctcattggaacacagccatgctcatttgtttacatgttgtttatggcgactgccatgctgcaagagcagaattgagtagttgtgatagagacctatggcctgcaaagcctaattaatatgtagccctttcagaaaaggtttgcctgcccctgtcctagtgcaaagtgaatttagagtgagccagattatggaggattctgtgactcttgccaaataattttgacttcatcctgtaggtattaagtcattaaggcgttttaaatcatacagtcaggtttgtatttctgagctgtctataatgaatgatatagaaggtggtttcgaaggaggagactccagacaaggaaaacagaaatcttatgttgccaagttgtctttgctcttaggtgggttatcctggagaaaatggactcaggagctaatactgtctacagtggagcttggtgcaattagaagcaaaagactgtacctaactggaatgaggttactttttatggcttatcaaatgcttgtcctggcccgatgcagtggctcatgcctgtaatcccagcactttgagaggctgaggcagggcagattgcatgagcccaggagttcgagaccaacttgggcaacatggtgaaacactgtctctgcataaaatacaaaaattagctgggcgtggtggcacgttcctgcaatcccagctactcataaggctgaggtgggaggatctattgagccctggaattcgaggatgcaattaattgtggttgtgtcacagttcactgcagcctgggtgacactccagcctgggtgacaaaggagaccccgtcaaaaaaaaaagtacttgtcccaaaagtttttgtttcctagcttagaatttataatcagattaggttttggagataaagtatatgtggtattttttttttttttttgagacagtcttgctctgtcatcaggctggagtgcagtggcgcaatttcggctcactgcaacctccacctcctgggttcaagcaattctcctgcctcagcctcccgagtagctgggactgcaggtgcatgccacgacgcccagctgatttttgtgtttttagtagagacggggtttcaccatgttggccaagatggtctcaatctcttgaccttgtgatccacctgccttggccttccaaagtgttggaattacaggcgtgagccaccgcgcctggtctatatgtgatttcaaattaggtggccttataaatataagcagatggtttctgggcaaaatcaaatgatttctgtctctattttcttgagtaccaattgtaaaaactgaaattaggttgaggaaagtgctttagaaataataaagatgtacaaat

SEQ ID NO: 363549 - DNA, 2522 bp, Homo sapiens
ctagcttttatggaatttcaattaattacgtttatcaaaactacgcatcatgcccatttgtgggtattggatgaaaagataaatctttccagaaggggcaggggagggagaggcaattctggttggggaagttgggagaaaagaaaatcagtatctcctagtcttcgcccagtttggctcgtttggggtactcctcgaccccgcgttaccaggcccgtgaatcccactcccaccagagaattagcgcgggcggacgagcaaagtgaaacttagtagcccggaacttcgcgtgccgggttcccgcagcaacacgtaccgggaagcgtttgggcgctgcaccgcgctgcgccgtgcccgtgagtccggcgcgcagaggaggaggagaaagctgaccgcttaggcccgggtagtggtcgtcgtggttttccttgtagttcgtggtctgagaccaggcctcaagtggaaacggcgtcaccatgatcgcacggcggaacccagaacccttacggtttctgccggatgaggcccggagcctgcccccgcccaagctgaccgacccgcggctcctctacatcggcttcttgggctactgctccggcctgattgataacctgatccggcggaggccgatcgcgacggctggtttgcatcgccagcttctatatattacggcctttttttttgctggatattatcttgtaaaacgtgaagactacctgtatgctgtgagggaccgtgaaatgtttggatatatgaaattacatccagaggattttcctgaagaagataagaaaacatatggtgaaatttttgaaaaattccatccaatacgttgaagtcttcaaaatgcttgctccagtttcactgatacctgctgtttctgaatttgatggaacatgtttcttatgacagttgaagcttatgctaatctgtatgttgacaccttgtaattaaaatacgtaccatgagtactctgactctttattgttgtaagaaaaatagttcatcatcagagaatggtcagtttccattcacccatctgaaagattttaagatgaggttgaattctagtttagagttagcagactacccaaatctggcccactgccaataaagtctcattggaacacagccatgctcatttgtttacatgttgtttatggcgactgccatgctgcaagagcagaattgagtagttgtgatagagacctatggcctgcaaagcctaattaatatgtagccctttcagaaaaggtttgcctgcccctgtcctagtgcaaagtgaatttagagtgagccagattatggaggattctgtgactcttgccaaataattttgacttcatcctgtaggtattaagtcattaaggcgttttaaatcatacagtcaggtttgtatttctgagctgtctataatgaatgatatagaaggtggtttcgaaggaggagactccagacaaggaaaacagaaatcttatgttgccaagttgtctttgctcttaggtgggttatcctggagaaaatggactcaggagctaatactgtctacagtggagcttggtgcaattagaagcaaaagactgtacctaactggaatgaggttactttttatggcttatcaaatgcttgtcctggcccgatgcagtggctcatgcctgtaatcccagcactttgagaggctgaggcagggcagattgcatgagcccaggagttcgagaccaacttgggcaacatggtgaaacactgtctctgcataaaatacaaaaattagctgggcgtggtggcacgttcctgcaatcccagctactcataaggctgaggtgggaggatctattgagccctggaattcgaggatgcaattaattgtggttgtgtcacagttcactgcagcctgggtgacactccagcctgggtgacaaaggagaccccgtcaaaaaaaaaagtacttgtcccaaaagtttttgtttcctagcttagaatttataatcagattaggttttggagataaagtatatgtggtattttttttttttttttgagacagtcttgctctgtcatcaggctggagtgcagtggcgcaatttcggctcactgcaacctccacctcctgggttcaagcaattctcctgcctcagcctcccgagtagctgggactgcaggtgcatgccacgacgcccagctgatttttgtgtttttagtagagacggggtttcaccatgttggccaagatggtctcaatctcttgaccttgtgatccacctgccttggccttccaaagtgttggaattacaggcgtgagccaccgcgcctggtctatatgtgatttcaaattaggtggccttataaatataagcagatggtttctgggcaaaatcaaatgatttctgtctctattttcttgagtaccaattgtaaaaactgaaattaggttgaggaaagtgctttagaaataataaagatgtacaaatacaaggctttggattttttattagttctgcaataaataataggtttatagttca

SEQ ID NO: 363550 - DNA, 1957 bp, Homo sapiens
ctagcttttatggaatttcaattaattacgtttatcaaaactacgcatcatgcccatttgtgggtattggatgaaaagataaatctttccagaaggggcaggggagggagaggcaattctggttggggaagttgggagaaaagaaaatcagtatctcctagtcttcgcccagtttggctcgtttggggtactcctcgaccccgcgttaccaggcccgtgaatcccactcccaccagagaattagcgcgggcggacgagcaaagtgaaacttagtagcccggaacttcgcgtgccgggttcccgcagcaacacgtaccgggaagcgtttgggcgctgcaccgcgctgcgccgtgcccgtgagtccggcgcgcagaggaggaggagaaagctgaccgcttaggcccgggtagtggtcgtcgtggttttccttgtagttcgtggtctgagaccaggcctcaagtggaaacggcgtcaccatgatcgcacggcggaacccagaacccttacggtttctgccggatgaggcccggagcctgcccccgcccaagctgaccgacccgcggctcctctacatcggcttcttgggctactgctccggcctgattgataacctgatccggcggaggccgatcgcgacggctggtttgcatcgccagcttctatatattacggcctttttttttgctggatattatcttgtaaaacgtgaagactacctgtatgctgtgagggaccgtgaaatgtttggatatatgaaattacatccagaggattttcctgaagaagataagaaaacatatggtgaaatttttgaaaaattccatccaatacgttgaagtcttcaaaatgcttgctccagtttcactgatacctgctgtttctgaatttgatggaacatgtttcttatgacagttgaagcttatgctaatctgtatgttgacaccttgtaattaaaatacgtaccatgagtactctgactctttattgttgtaagaaaaatagttcatcatcagagaatggtcagtttccattcacccatctgaaagattttaagatgaggttgaattctagtttagagttagcagactacccaaatctggcccactgccaataaagtctcattggaacacagccatgctcatttgtttacatgttgtttatggcgactgccatgctgcaagagcagaattgagtagttgtgatagagacctatggcctgcaaagcctaattaatatgtagccctttcagaaaaggtttgcctgcccctgtcctagtgcaaagtgaatttagagtgagccagattatggaggattctgtgactcttgccaaataattttgacttcatcctgtaggtattaagtcattaaggcgttttaaatcatacagtcaggtttgtatttctgagctgtctataatgaatgatatagaaggtggtttcgaaggaggagactccagacaaggaaaacagaaatcttatgttgccaagttgtctttgctcttaggtgggttatcctggagaaaatggactcaggagctaatactgtctacagtggagcttggtgcaattagaagcaaaagactgtacctaactggaatgaggttactttttatggcttatcaaatgcttgtcctggcccgatgcagtggctcatgcctgtaatccccagctgatttttgtgtttttagtagagacggggtttcaccatgttggccaagatggtctcaatctcttgaccttgtgatccacctgccttggccttccaaagtgttggaattacaggcgtgagccaccgcgcctggtctatatgtgatttcaaattaggtggccttataaatataagcagatggtttctgggcaaaatcaaatgatttctgtctctattttcttgagtaccaattgtaaaaactgaaattaggttgaggaaagtgctttagaaataataaagatgtacaaat

SEQ ID NO: 363551 - DNA, 1000 bp, Homo sapiens
ctagcttttatggaatttcaattaattacgtttatcaaaactacgcatcatgcccatttgtgggtattggatgaaaagataaatctttccagaaggggcaggggagggagaggcaattctggttggggaagttgggagaaaagaaaatcagtatctcctagtcttcgcccagtttggctcgtttggggtactcctcgaccccgcgttaccaggcccgtgaatcccactcccaccagagaattagcgcgggcggacgagcaaagtgaaacttagtagcccggaacttcgcgtgccgggttcccgcagcaacacgtaccgggaagcgtttgggcgctgcaccgcgctgcgccgtgcccgtgagtccggcgcgcagaggaggaggagaaagctgaccgcttaggcccgggtagtggtcgtcgtggttttccttgtagttcgtggtctgagaccaggcctcaagtggaaacggcgtcaccatgatcgcacggcggaacccagaacccttacggtttctgccggatgaggcccggagcctgcccccgcccaagctgaccgacccgcggctcctctacatcggcttcttgggctactgctccggcctgattgataacctgatccggcggaggccgatcgcgacggctggtttgcatcgccagcttctatatattacggcctttttttttgctggatattatcttgtaaaacgtgaagactacctgtatgctgtgagggaccgtgaaatgtttggatatatgaaattacatccagaggattttcctgaagaagataagaaaacatatggtgaaatttttgaaaaattccatccaatacgttgaagtcttcaaaatgcttgctccagtttcactgatacctgctgtttctgaatttgatggaacatgtttcttatgacagttgaagcttatgctaatctgtatgttgacaccccgaatggcccgctgaatggcgcactgcatgccactcagaatgaccccccagcatg

SEQ ID NO: 363552 - DNA, 1323 bp, Homo sapiens
ctagcttttatggaatttcaattaattacgtttatcaaaactacgcatcatgcccatttgtgggtattggatgaaaagataaatctttccagaaggggcaggggagggagaggcaattctggttggggaagttgggagaaaagaaaatcagtatctcctagtcttcgcccagtttggctcgtttggggtactcctcgaccccgcgttaccaggcccgtgaatcccactcccaccagagaattagcgcgggcggacgagcaaagtgaaacttagtagcccggaacttcgcgtgccgggttcccgcagcaacacgtaccgggaagcgtttgggcgctgcaccgcgctgcgccgtgcccgtgagtccggcgcgcagaggaggaggagaaagctgaccgcttaggcccgggtagtggtcgtcgtggttttccttgtagttcgtggtctgagaccaggcctcaagtggaaacggcgtcaccatgatcgcacggcggaacccagaacccttacggtttctgccggatgaggcccggagcctgcccccgcccaagctgaccgacccgcggctcctctacatcggcttcttgggctactgctccggcctgattgataacctgatccggcggaggccgatcgcgacggctggtttgcatcgccagcttctatatattacggcctttttttttgctggatattatcttgtaaaacgtgaagactacctgtatgctgtgagggaccgtgaaatgtttggatatatgaaattacatccagaggattttcctgaagaagataagaaaacatatggtgaaattttatatatacaaaaactaccacctacctcccctcaccaaaaagcccataaaaattaccaaaacaaaacacaaacccacacacagccccaacacaaaacccacgacacacaatcacttccaccgccgccgaccaccaccggtccacacaactgcggccctgcccacaccgccgcctcctccaccaccatcccctgcgccccaacagcgcgcgacaaatcgcaccgcacccccccacatggcggcgcccctgtccatcacacctccatgtatctcggatactatacttaaccgaattccactaatgcgccagtcaccagtcgatttccatccgtcatcgtcgacactaatcataccacccactcactccacacaacacccatatctactccatctctcatttctactgatctcactcaatctcatatctcaactcgttctcctagctattgcttgtctcaaatccaccccaccccccatccacctcctccacaactaactcagccagactatcccc

SEQ ID NO: 363553 - DNA, 377 bp, Homo sapiens
atcaaaaggtggtattttcatttgggtttctcaaatgcacatttcatagctgaggtcagtgggccatagctaaagggggtttctgttgcagaaacctgacccgggcagcacctggcctttgcccagaggctgattgagtgtaggtgagccttgctgtctgtccctcatgggggtcatgtggcctctagctccttttggtacaataatggtattatcgtgatatttaaatgcactctccaggagcgcctgattcctgcaagggcataagcatggtctctaaaatgttattaaaaatataataccaccatatgctcaggctttctcattccgtgatcttctaaaaacaaaaacatgcaacataaacacaccagatgcag

SEQ ID NO: 363554 - DNA, 585 bp, Homo sapiens
tgacctcaagtgatctacccgcctcagcatccctaagtgctgggattacagggatgaaccaccacgcccagcctatattttaaagctttataacatgaactttttaaaaagaataataccttgcatttgtataatttaaaatgaatttttatatgttcattaaaactcatcagtagcatacctttcttggtaacaccttgttaaaaatgttataatatttggggtgttaactgtaataaaactgaatttcttaaaaacagaaacaagaatttagactttttcctgaatggtcccatatttccaagtggcctagattattaaaagtaattgatttggaataatagtaattattatgggtcatatagtatgttaaacactcttctcagattatctcatttaaccatcatcaataactctataagatagaggctatcttttttttttcaacagacaaaaaaacaagtgaggaaggtagattagcaaaagttacagtaaaaaaatataaaataagttgactgtttctgagcaaaaattttgagtttcagattttaaaaaaacctagagcaaaaactcatattagtagag

SEQ ID NO: 363555 - DNA, 1818 bp, Homo sapiens
gccggcggtcgcgccagcgggatccgcctggctcagctgacagctcccgagaacggaagaggcggcgcgccggttgagcagggcgtttctaggcctggtcggctggcggcggtccttatgtcgtcagaagatcgagaagctcaggaggatgaattgctggccctggcaagtatttacgatggagatgaatttagaaaagcagagtctgtccaaggtggagaaaccaggatctatttggatttgccacagaatttcaagatatttgtgagcggcaattcaaatgagtgtctccagaatagtggctttgaatacaccatttgctttctgcctccacttgtgctgaactttgaactgccaccagattatccatcctcttccccaccttcattcacacttagtggcaaatggctgtcaccaactcagctatctgctctatgcaagcacttagacaacctatgggaagaacaccgtggcagcgtggtcctgtttgcctggatgcaatttcttaaggaagagaccctagcatacttgaatattgtctctccttttgagctcaagattggttctcagaaaaaagtgcagagaaggacagctcaagcttctcccaacacagagctagattttggaggagctgctggatctgatgtagaccaagaggaaattgtggatgagagagcagtgcaggatgtggaatcactgtcaaatctgatccaggaaatcttggactttgatcaagctcagcagataaaatgctttaatagtaaattgttcctgtgcagtatctgtttctgtgagaagctgggtagtgaatgcatgtacttcttggagtgcaggcatgtgtactgcaaagcctgtctgaaggactactttgaaatccagatcagagatggccaggttcaatgcctcaactgcccagaaccaaagtgcccttcggtggccactcctggtcaggtcaaagagttagtggaagcagagttatttgcccgttatgaccgccttctcctccagtcctccttggacctgatggcagatgtggtgtactgcccccggccgtgctgccagctgcctgtgatgcaggaacctggctgcaccatgggtatctgctccagctgcaattttgccttctgtactttgtgcaggttgacctaccatggggtctccccatgtaaggtgactgcagagaaattaatggacttacgaaatgaatacctgcaagcggatgaggctaataaaagacttttggatcaaaggtatggtaagagagtgattcagaaggcactggaagagatggaaagtaaggagtggctagagaagaactcaaagagctgcccatgttgtggaactcccatagagaaattagacggatgtaacaagatgacatgtactggctgtatgcaatatttctgttggatttgcatgggttctctctctagagcaaacccttacaaacatttcaatgaccctggttcaccatgttttaaccggctgttttatgctgtggatgttgacgacgatatttgggaagatgaggtagaagactagttaactactgctcaagatatggaagtggattgtttttccctaatcttccgtcaagtacacaaagtaactttgcgggatatttagggtactattcattcactcttcctgcgtagaagatatggaagaacgaggtttatattttcatgtggtactactgaagaaggtgcattgatacatttttaaatgtaagttgagaaaaatttataagccaaaggttcagaaaattaaactacagaatattaaatattataatgtgcccaaagctctgaatagtta

SEQ ID NO: 363556 - DNA, 716 bp, Homo sapiens
gccggcggtcgcgccagcgggatccgcctggctcagctgacagctcccgagaacggaagaggcggcgcgccggttgagcagggcgtttctaggcctggtcggctggcggcgatggcaggattttcataatatatgtagtatgagttccacatcttggcctcttacccagcttcagcagtctcagctccaccagttagagaataaatgggatttgcatgaactccactctgagctgaaatacagactgcggtgttaatatccttttcttctgattgttattaacaggtccttatgtcgtcagaagatcgagaagctcaggaggatgaattgctggccctggcaagtatttacgatggagatgaatttagaaaagcagagtctgtccaaggtggagaaaccaggatctatttggatttgccacagaatttcaagatatttgtgagcgagaaattaatggacttacgaaatgaatacctgcaagcggatgaggctaataaaagacttttggatcaaaggtatggtaagagagtgattcagaaggcactggaagagatggaaagtaaggagtggctagagaagaactcaaagagctgcccatgttgtggaactcccatagagtggatttgcatgggttctctctctagagcaaacccttacaaacatttcaatgaccctggttcaccatgttttaaccggtatgtatacacagaattcct

SEQ ID NO: 363557 - DNA, 434 bp, Homo sapiens
gccggcggtcgcgccagcgggatccgcctggctcagctgacagctcccgagaacggaagaggcggcgcgccggttgagcagggcgtttctaggcctggtcggctggcggcgatggcaggattttcataatatatgtagtatgagttccacatcttggcctcttacccagcttcagcagtctcagctccaccagttagagaataaatgggatttgcatgaactccactctgagctgaaatacagactgcggtgttaatatccttttcttctgattgttattaacaggtccttatgtcgtcagaagatcgagaagctcaggaggatgaattgctggccctggcaagtatttacgatggagatgaatttagaaaagaatttcaagatatttgtgagcggcaattctgagtgtctccagaatagtggctttgtacacc

SEQ ID NO: 363558 - DNA, 357 bp, Homo sapiens
tgtattggtggtgctggctagagtgctcagtttctgtattggtggccctggcaagtatttacgatggagatgaatttagaaaagcagagtctgtccaaggtggagaaaccaggatctatttggatttgccacagaatttcaagatatttgtgagcggcaattcaaatgagtgtctccagaatagtggctttgaatacaccatttgctttctgcctccacttgtgctgaactttgaactgccaccagattatccatcctcttccccaccttcattcacacttagtggcaaatggctgtcaccaactcagctatctgctatatgcaagcaccaccaatacaggcagcaccaccaataca

SEQ ID NO: 363559 - DNA, 3245 bp, Homo sapiens
  misc_feature (3127)..(3127): n is a, c, g, or t
  misc_feature (3132)..(3132): n is a, c, g, or t
  misc_feature (3150)..(3150): n is a, c, g, or t
gccggcggtcgcgccagcgggatccgcctggctcagctgacagctcccgagaacggaagaggcggcgcgccggttgagcagggcgtttctaggcctggtcggctggcggcgatggcaggattttcataatatatgtagtatgagttccacatcttggcctcttacccagcttcagcagtctcagctccaccagttagagaataaatgggatttgcatgaactccactctgagctgaaatacagactgcggtgttaatatccttttcttctgattgttattaacaggtccttatgtcgtcagaagatcgagaagctcaggaggatgaattgctggccctggcaagtatttacgatggagatgaatttagaaaagcagagtctgtccaaggtggagaaaccaggatctatttggatttgccacagaatttcaagatatttgtgagcggcaattcaaatgagtgtctccagaatagtggctttgaatacaccatttgctttctgcctccacttgtgctgaactttgaactgccaccagattatccatcctcttccccaccttcattcacacttagtggcaaatggctgtcaccaactcagctatctgctctatgcaagcacttagacaacctatgggaagaacaccgtggcagcgtggtcctgtttgcctggatgcaatttcttaaggaagagaccctagcatacttgaatattgtctctccttttgagctcaagattggttctcagaaaaaagtgcagagaaggacagctcaagcttctcccaacacagagctagattttggaggagctgctggatctgatgtagaccaagaggaaattgtggatgagagagcagtgcaggatgtggaatcactgtcaaatctgatccaggaaatcttggactttgatcaagctcagcagataaaatgctttaatagtaaattgttcctgtgcagtatctgtttctgtgagaagctgggtagtgaatgcatgtacttcttggagtgcaggcatgtgtactgcaaagcctgtctgaaggactactttgaaatccagatcagagatggccaggttcaatgcctcaactgcccagaaccaaagtgcccttcggtggccactcctggtcaggtcaaagagttagtggaagcagagttatttgcccgttatgaccgccttctcctccagtcctccttggacctgatggcagatgtggtgtactgcccccggccgtgctgccagctgcctgtgatgcaggaacctggctgcaccatgggtatctgctccagctgcaattttgccttctgtactttgtgcaggttgacctaccatggggtctccccatgtaaggtgactgcagagaaattaatggacttacgaaatgaatacctgcaagcggatgaggctaataaaagacttttggatcaaaggtatggtaagagagtgattcagaaggcactggaagagatggaaagtaaggagtggctagagaagaactcaaagagctgcccatgttgtggaactcccatagagaaattagacggatgtaacaagatgacatgtactggctgtatgcaatatttctgttggatttgcatgggttctctctctagagcaaacccttacaaacatttcaatgaccctggttcaccatgttttaaccggctgttttatgctgtggatgttgacgacgatatttgggaagatgaggtagaagactagttaactactgctcaagatatggaagtggattgtttttccctaatcttccgtcaagtacacaaagtaactttgcgggatatttagggtactattcattcactcttcctgcgtagaagatatggaagaacgaggtttatattttcatgtggtactactgaagaaggtgcattgatacatttttaaatgtaagttgagaaaaatttataagccaaaggttcagaaaattaaactacagaatattaaatattataatgtgcccaaagctctgaatagttaaaaattaaatatttattttcttccccaagctttaggtaaggagaagaggggtcaagagttaaacttagagaccctttgtctctgagaagcatccttctaagacattctgttggagttccctcagtactattccttacaactggagtgggtagaagccttatgaaaattatactgagaacctgatctcgtttactccatgttaatcacattcctaccaacctaaatttctgccaagtcagttctctttggaggaagcccattactccgtaactgactggatggtccagtgtcattttgatctgcttttcagaatggaaatttataatataaatatatgttttaataccacaaacactgtggggcacttgatatttattagtggtgtatatggtccactggtttcaggccaaatctagaatttagtgatactggctcagaagaatttaagttctattcagccttcctgggtgttagaacctagattcaaaatggcttgtctttgctactttgttccacattctctctctttacctttgccctaccttctgtttgtaaggatgattttaatattaattccaggaacacatgtttttatttcctctgctggaataggagaaagcttaatatattcccaagctgaatgttcttgaattatatctgcatttaccactgtatatgcatatagtgacagtataacctgtctatactacagtagttccagtcctaactttctgaattatttttaaagatcttctctaacaagctatgggaatttggcttcatactctttctttgcaacagcagtgttctgggtgataattttgaattgatacctgttcctttttctgggttttgttggctttttgaaaaattgtctttccttatcattggtgggaggcttggtagcaaagtaacattttttggaaaagaggacagaaaaattgaactacagcttgagaacgtattctttttttcctactttgttattgcaaattgaggaatcacttttaactgttttaggtgtgtgtgtccagagtgagcaaggattatgtttttggattgtcaaagaggatgcttagtcttaaaataaaaataaatttaaaaatcatcttataattagaaaaaaaaaaaaaanttggnggccgggccagaaatttnaaaaccttggggggcccagaagaaaaggaagtttcggacacgcgaagggggtcccaaaaaaccgggcgggggaacaaagagggtgtttcagagca

SEQ ID NO: 363560 - DNA, 3181 bp, Homo sapiens
gccggcggtcgcgccagcgggatccgcctggctcagctgacagctcccgagaacggaagaggcggcgcgccggttgagcagggcgtttctaggcctggtcggctggcggcggtgagtgggccccaggcaagggcggagggcggaactttggggttcggcactgccgggcggccggaagatggcaggattttcataatatatgtagtatgagttccacatcttggcctcttacccagcttcagcagtctcagctccaccagttagagaataaatgggatttgcatgaactccactctgagctgaaatacagactgcggtgttaatatccttttcttctgattgttattaacaggtccttatgtcgtcagaagatcgagaagctcaggaggatgaattgctggccctggcaagtatttacgatggagatgaatttagaaaagcagagtctgtccaaggtggagaaaccaggatctatttggatttgccacagaatttcaagatatttgtgagcggcaattcaaatgagtgtctccagaatagtggctttgaatacaccatttgctttctgcctccacttgtgctgaactttgaactgccaccagattatccatcctcttccccaccttcattcacacttagtggcaaatggctgtcaccaactcagctatctgctctatgcaagcacttagacaacctatgggaagaacaccgtggcagcgtggtcctgtttgcctggatgcaatttcttaaggaagagaccctagcatacttgaatattgtctctccttttgagctcaagattggttctcagaaaaaagtgcagagaaggacagctcaagcttctcccaacacagagctagattttggaggagctgctggatctgatgtagaccaagaggaaattgtggatgagagagcagtgcaggatgtggaatcactgtcaaatctgatccaggaaatcttggactttgatcaagctcagcagataaaatgctttaatagtaaattgttcctgtgcagtatctgtttctgtgagaagctgggtagtgaatgcatgtacttcttggagtgcaggcatgtgtactgcaaagcctgtctgaaggactactttgaaatccagatcagagatggccaggttcaatgcctcaactgcccagaaccaaagtgcccttcggtggccactcctggtcaggtcaaagagttagtggaagcagagttatttgcccgttatgaccgccttctcctccagtcctccttggacctgatggcagatgtggtgtactgcccccggccgtgctgccagctgcctgtgatgcaggaacctggctgcaccatgggtatctgctccagctgcaattttgccttctgtactttgtgcaggttgacctaccatggggtctccccatgtaaggtgactgcagagaaattaatggacttacgaaatgaatacctgcaagcggatgaggctaataaaagacttttggatcaaaggtatggtaagagagtgattcagaaggcactggaagagatggaaagtaaggagtggctagagaagaactcaaagagctgcccatgttgtggaactcccatagagaaattagacggatgtaacaagatgacatgtactggctgtatgcaatatttctgttggatttgcatgggttctctctctagagcaaacccttacaaacatttcaatgaccctggttcaccatgttttaaccggctgttttatgctgtggatgttgacgacgatatttgggaagatgaggtagaagactagttaactactgctcaagatatggaagtggattgtttttccctaatcttccgtcaagtacacaaagtaactttgcgggatatttagggtactattcattcactcttcctgcgtagaagatatggaagaacgaggtttatattttcatgtggtactactgaagaaggtgcattgatacatttttaaatgtaagttgagaaaaatttataagccaaaggttcagaaaattaaactacagaatattaaatattataatgtgcccaaagctctgaatagttaaaaattaaatatttattttcttccccaagctttaggtaaggagaagaggggtcaagagttaaacttagagaccctttgtctctgagaagcatccttctaagacattctgttggagttccctcagtactattccttacaactggagtgggtagaagccttatgaaaattatactgagaacctgatctcgtttactccatgttaatcacattcctaccaacctaaatttctgccaagtcagttctctttggaggaagcccattactccgtaactgactggatggtccagtgtcattttgatctgcttttcagaatggaaatttataatataaatatatgttttaataccacaaacactgtggggcacttgatatttattagtggtgtatatggtccactggtttcaggccaaatctagaatttagtgatactggctcagaagaatttaagttctattcagccttcctgggtgttagaacctagattcaaaatggcttgtctttgctactttgttccacattctctctctttacctttgccctaccttctgtttgtaaggatgattttaatattaattccaggaacacatgtttttatttcctctgctggaataggagaaagcttaatatattcccaagctgaatgttcttgaattatatctgcatttaccactgtatatgcatatagtgacagtataacctgtctatactacagtagttccagtcctaactttctgaattatttttaaagatcttctctaacaagctatgggaatttggcttcatactctttctttgcaacagcagtgttctgggtgataattttgaattgatacctgttcctttttctgggttttgttggctttttgaaaaattgtctttccttatcattggtgggaggcttggtagcaaagtaacattttttggaaaagaggacagaaaaattgaactacagcttgagaacgtattctttttttcctactttgttattgcaaattgaggaatcacttttaactgttttaggtgtgtgtgtccagagtgagcaaggattatgtttttggattgtcaaagaggatgcttagtcttaaaataaaaataaatttaaaaatcatcttataattagaa

SEQ ID NO: 363561 - DNA, 2843 bp, Homo sapiens
tgcatgggcttcctcacttttttcctcacgaagaggtctctggtctcccctctctgagcactctgaggtccttatgtcgtcagaagatcgagaagctcaggaggatgaattgctggccctggcaagtatttacgatggagatgaatttagaaaagcagagtctgtccaaggtggagaaaccaggatctatttggatttgccacagaatttcaagatatttgtgagcggcaattcaaatgagtgtctccagaatagtggctttgaatacaccatttgctttctgcctccacttgtgctgaactttgaactgccaccagattatccatcctcttccccaccttcattcacacttagtggcaaatggctgtcaccaactcagctatctgctctatgcaagcacttagacaacctatgggaagaacaccgtggcagcgtggtcctgtttgcctggatgcaatttcttaaggaagagaccctagcatacttgaatattgtctctccttttgagctcaagattggttctcagaaaaaagtgcagagaaggacagctcaagcttctcccaacacagagctagattttggaggagctgctggatctgatgtagaccaagaggaaattgtggatgagagagcagtgcaggatgtggaatcactgtcaaatctgatccaggaaatcttggactttgatcaagctcagcagataaaatgctttaatagtaaattgttcctgtgcagtatctgtttctgtgagaagctgggtagtgaatgcatgtacttcttggagtgcaggcatgtgtactgcaaagcctgtctgaaggactactttgaaatccagatcagagatggccaggttcaatgcctcaactgcccagaaccaaagtgcccttcggtggccactcctggtcaggtcaaagagttagtggaagcagagttatttgcccgttatgaccgccttctcctccagtcctccttggacctgatggcagatgtggtgtactgcccccggccgtgctgccagctgcctgtgatgcaggaacctggctgcaccatgggtatctgctccagctgcaattttgccttctgtactttgtgcaggttgacctaccatggggtctccccatgtaaggtgactgcagagaaattaatggacttacgaaatgaatacctgcaagcggatgaggctaataaaagacttttggatcaaaggtatggtaagagagtgattcagaaggcactggaagagatggaaagtaaggagtggctagagaagaactcaaagagctgcccatgttgtggaactcccatagagaaattagacggatgtaacaagatgacatgtactggctgtatgcaatatttctgttggatttgcatgggttctctctctagagcaaacccttacaaacatttcaatgaccctggttcaccatgttttaaccggctgttttatgctgtggatgttgacgacgatatttgggaagatgaggtagaagactagttaactactgctcaagatatggaagtggattgtttttccctaatcttccgtcaagtacacaaagtaactttgcgggatatttagggtactattcattcactcttcctgcgtagaagatatggaagaacgaggtttatattttcatgtggtactactgaagaaggtgcattgatacatttttaaatgtaagttgagaaaaatttataagccaaaggttcagaaaattaaactacagaatattaaatattataatgtgcccaaagctctgaatagttaaaaattaaatatttattttcttccccaagctttaggtaaggagaagaggggtcaagagttaaacttagagaccctttgtctctgagaagcatccttctaagacattctgttggagttccctcagtactattccttacaactggagtgggtagaagccttatgcaacctaaatttctgccaagtcagttctctttggaggaagcccattactccgtaactgactggatggtccagtgtcattttgatctgcttttcagaatggaaatttataatataaatatatgttttaataccacaaacactgtggggcacttgatatttattagtggtgtatatggtccactggtttcaggccaaatctagaatttagtgatactggctcagaagaatttaagttctattcagccttcctgggtgttagaacctagattcaaaatggcttgtctttgctactttgttccacattctctctctttacctttgccctaccttctgtttgtaaggatgattttaatattaattccaggaacacatgtttttatttcctctgctggaataggagaaagcttaatatattcccaagctgaatgttcttgaattatatctgcatttaccactgtatatgcatatagtgacagtataacctgtctatactacagtagttccagtcctaactttctgaattatttttaaagatcttctctaacaagctatgggaatttggcttcatactctttctttgcaacagcagtgttctgggtgataattttgaattgatacctgttcctttttctgggttttgttggctttttgaaaaattgtctttccttatcattggtgggaggcttggtagcaaagtaacattttttggaaaagaggacagaaaaattgaactacagcttgagaacgtattctttttttcctactttgttattgcaaattgaggaatcacttttaactgttttaggtgtgtgtgtccagagtgagcaaggattatgtttttggattgtcaaagaggatgcttagtcttaaaataaaaataaatttaaaaatcatcttataattagaa

SEQ ID NO: 363562 - DNA, 3070 bp, Homo sapiens
tgcatgggcttcctcacttttttcctcacgaagaggtctctggtctcccctctctgagcactctgagatggcaggattttcataatatatgtagtatgagttccacatcttggcctcttacccagcttcagcagtctcagctccaccagttagagaataaatgggatttgcatgaactccactctgagctgaaatacagactgcggtgttaatatccttttcttctgattgttattaacaggtccttatgtcgtcagaagatcgagaagctcaggaggatgaattgctggccctggcaagtatttacgatggagatgaatttagaaaagcagagtctgtccaaggtggagaaaccaggatctatttggatttgccacagaatttcaagatatttgtgagcggcaattcaaatgagtgtctccagaatagtggctttgaatacaccatttgctttctgcctccacttgtgctgaactttgaactgccaccagattatccatcctcttccccaccttcattcacacttagtggcaaatggctgtcaccaactcagctatctgctctatgcaagcacttagacaacctatgggaagaacaccgtggcagcgtggtcctgtttgcctggatgcaatttcttaaggaagagaccctagcatacttgaatattgtctctccttttgagctcaagattggttctcagaaaaaagtgcagagaaggacagctcaagcttctcccaacacagagctagattttggaggagctgctggatctgatgtagaccaagaggaaattgtggatgagagagcagtgcaggatgtggaatcactgtcaaatctgatccaggaaatcttggactttgatcaagctcagcagataaaatgctttaatagtaaattgttcctgtgcagtatctgtttctgtgagaagctgggtagtgaatgcatgtacttcttggagtgcaggcatgtgtactgcaaagcctgtctgaaggactactttgaaatccagatcagagatggccaggttcaatgcctcaactgcccagaaccaaagtgcccttcggtggccactcctggtcaggtcaaagagttagtggaagcagagttatttgcccgttatgaccgccttctcctccagtcctccttggacctgatggcagatgtggtgtactgcccccggccgtgctgccagctgcctgtgatgcaggaacctggctgcaccatgggtatctgctccagctgcaattttgccttctgtactttgtgcaggttgacctaccatggggtctccccatgtaaggtgactgcagagaaattaatggacttacgaaatgaatacctgcaagcggatgaggctaataaaagacttttggatcaaaggtatggtaagagagtgattcagaaggcactggaagagatggaaagtaaggagtggctagagaagaactcaaagagctgcccatgttgtggaactcccatagagaaattagacggatgtaacaagatgacatgtactggctgtatgcaatatttctgttggatttgcatgggttctctctctagagcaaacccttacaaacatttcaatgaccctggttcaccatgttttaaccggctgttttatgctgtggatgttgacgacgatatttgggaagatgaggtagaagactagttaactactgctcaagatatggaagtggattgtttttccctaatcttccgtcaagtacacaaagtaactttgcgggatatttagggtactattcattcactcttcctgcgtagaagatatggaagaacgaggtttatattttcatgtggtactactgaagaaggtgcattgatacatttttaaatgtaagttgagaaaaatttataagccaaaggttcagaaaattaaactacagaatattaaatattataatgtgcccaaagctctgaatagttaaaaattaaatatttattttcttccccaagctttaggtaaggagaagaggggtcaagagttaaacttagagaccctttgtctctgagaagcatccttctaagacattctgttggagttccctcagtactattccttacaactggagtgggtagaagccttatgaaaattatactgagaacctgatctcgtttactccatgttaatcacattcctaccaacctaaatttctgccaagtcagttctctttggaggaagcccattactccgtaactgactggatggtccagtgtcattttgatctgcttttcagaatggaaatttataatataaatatatgttttaataccacaaacactgtggggcacttgatatttattagtggtgtatatggtccactggtttcaggccaaatctagaatttagtgatactggctcagaagaatttaagttctattcagccttcctgggtgttagaacctagattcaaaatggcttgtctttgctactttgttccacattctctctctttacctttgccctaccttctgtttgtaaggatgattttaatattaattccaggaacacatgtttttatttcctctgctggaataggagaaagcttaatatattcccaagctgaatgttcttgaattatatctgcatttaccactgtatatgcatatagtgacagtataacctgtctatactacagtagttccagtcctaactttctgaattatttttaaagatcttctctaacaagctatgggaatttggcttcatactctttctttgcaacagcagtgttctgggtgataattttgaattgatacctgttcctttttctgggttttgttggctttttgaaaaattgtctttccttatcattggtgggaggcttggtagcaaagtaacattttttggaaaagaggacagaaaaattgaactacagcttgagaacgtattctttttttcctactttgttattgcaaattgaggaatcacttttaactgttttaggtgtgtgtgtccagagtgagcaaggattatgtttttggattgtcaaagaggatgcttagtcttaaaataaaaataaatttaaaaatcatcttataattagaa

SEQ ID NO: 363563 - DNA, 3425 bp, Homo sapiens
tggggatagctctctgggcgcgcgaggcagagaaggggaccgggctgggactgtacactgggcctcagtccctcaaatccgggaccgggcgtccgcagctcggctggccgggactcccttcgggacgctgaggaggaaggggaaggtgtgggccctgctccttcgggacgccccaggctggccagcagctcacacatccgcattgcgccctctgatcccagcgttggggcggatagctagcgttgggcctgcccctgttttggggcagtcgcccaaacgacgccgcacgcctagtggcgagctgaacccagactaggacacccgaagaccaaatggatagagtgagaaggaaatgggggttagcaacctgaattgaggtactggattccaagtgacagcttcacaagctgaaatcttgtaggatggcaggattttcataatatatgtagtatgagttccacatcttggcctcttacccagcttcagcagtctcagctccaccagttagagaataaatgggatttgcatgaactccactctgagctgaaatacagactgcggtgttaatatccttttcttctgattgttattaacaggtccttatgtcgtcagaagatcgagaagctcaggaggatgaattgctggccctggcaagtatttacgatggagatgaatttagaaaagcagagtctgtccaaggtggagaaaccaggatctatttggatttgccacagaatttcaagatatttgtgagcggcaattcaaatgagtgtctccagaatagtggctttgaatacaccatttgctttctgcctccacttgtgctgaactttgaactgccaccagattatccatcctcttccccaccttcattcacacttagtggcaaatggctgtcaccaactcagctatctgctctatgcaagcacttagacaacctatgggaagaacaccgtggcagcgtggtcctgtttgcctggatgcaatttcttaaggaagagaccctagcatacttgaatattgtctctccttttgagctcaagattggttctcagaaaaaagtgcagagaaggacagctcaagcttctcccaacacagagctagattttggaggagctgctggatctgatgtagaccaagaggaaattgtggatgagagagcagtgcaggatgtggaatcactgtcaaatctgatccaggaaatcttggactttgatcaagctcagcagataaaatgctttaatagtaaattgttcctgtgcagtatctgtttctgtgagaagctgggtagtgaatgcatgtacttcttggagtgcaggcatgtgtactgcaaagcctgtctgaaggactactttgaaatccagatcagagatggccaggttcaatgcctcaactgcccagaaccaaagtgcccttcggtggccactcctggtcaggtcaaagagttagtggaagcagagttatttgcccgttatgaccgccttctcctccagtcctccttggacctgatggcagatgtggtgtactgcccccggccgtgctgccagctgcctgtgatgcaggaacctggctgcaccatgggtatctgctccagctgcaattttgccttctgtactttgtgcaggttgacctaccatggggtctccccatgtaaggtgactgcagagaaattaatggacttacgaaatgaatacctgcaagcggatgaggctaataaaagacttttggatcaaaggtatggtaagagagtgattcagaaggcactggaagagatggaaagtaaggagtggctagagaagaactcaaagagctgcccatgttgtggaactcccatagagaaattagacggatgtaacaagatgacatgtactggctgtatgcaatatttctgttggatttgcatgggttctctctctagagcaaacccttacaaacatttcaatgaccctggttcaccatgttttaaccggctgttttatgctgtggatgttgacgacgatatttgggaagatgaggtagaagactagttaactactgctcaagatatggaagtggattgtttttccctaatcttccgtcaagtacacaaagtaactttgcgggatatttagggtactattcattcactcttcctgcgtagaagatatggaagaacgaggtttatattttcatgtggtactactgaagaaggtgcattgatacatttttaaatgtaagttgagaaaaatttataagccaaaggttcagaaaattaaactacagaatattaaatattataatgtgcccaaagctctgaatagttaaaaattaaatatttattttcttccccaagctttaggtaaggagaagaggggtcaagagttaaacttagagaccctttgtctctgagaagcatccttctaagacattctgttggagttccctcagtactattccttacaactggagtgggtagaagccttatgaaaattatactgagaacctgatctcgtttactccatgttaatcacattcctaccaacctaaatttctgccaagtcagttctctttggaggaagcccattactccgtaactgactggatggtccagtgtcattttgatctgcttttcagaatggaaatttataatataaatatatgttttaataccacaaacactgtggggcacttgatatttattagtggtgtatatggtccactggtttcaggccaaatctagaatttagtgatactggctcagaagaatttaagttctattcagccttcctgggtgttagaacctagattcaaaatggcttgtctttgctactttgttccacattctctctctttacctttgccctaccttctgtttgtaaggatgattttaatattaattccaggaacacatgtttttatttcctctgctggaataggagaaagcttaatatattcccaagctgaatgttcttgaattatatctgcatttaccactgtatatgcatatagtgacagtataacctgtctatactacagtagttccagtcctaactttctgaattatttttaaagatcttctctaacaagctatgggaatttggcttcatactctttctttgcaacagcagtgttctgggtgataattttgaattgatacctgttcctttttctgggttttgttggctttttgaaaaattgtctttccttatcattggtgggaggcttggtagcaaagtaacattttttggaaaagaggacagaaaaattgaactacagcttgagaacgtattctttttttcctactttgttattgcaaattgaggaatcacttttaactgttttaggtgtgtgtgtccagagtgagcaaggattatgtttttggattgtcaaagaggatgcttagtcttaaaataaaaataaatttaaaaatcatcttataattagaa

SEQ ID NO: 363564 - DNA, 3107 bp, Homo sapiens
cgctgaggaggatgaggccggggctccggggacaggccagatgggaagctgctgtccacgcagcaaggcggctgctgagggaaagggagcctctgcatcaccaaatggcaggattttcataatatatgtagtatgagttccacatcttggcctcttacccagcttcagcagtctcagctccaccagttagagaataaatgggatttgcatgaactccactctgagctgaaatacagactgcggtgttaatatccttttcttctgattgttattaacaggtccttatgtcgtcagaagatcgagaagctcaggaggatgaattgctggccctggcaagtatttacgatggagatgaatttagaaaagcagagtctgtccaaggtggagaaaccaggatctatttggatttgccacagaatttcaagatatttgtgagcggcaattcaaatgagtgtctccagaatagtggctttgaatacaccatttgctttctgcctccacttgtgctgaactttgaactgccaccagattatccatcctcttccccaccttcattcacacttagtggcaaatggctgtcaccaactcagctatctgctctatgcaagcacttagacaacctatgggaagaacaccgtggcagcgtggtcctgtttgcctggatgcaatttcttaaggaagagaccctagcatacttgaatattgtctctccttttgagctcaagattggttctcagaaaaaagtgcagagaaggacagctcaagcttctcccaacacagagctagattttggaggagctgctggatctgatgtagaccaagaggaaattgtggatgagagagcagtgcaggatgtggaatcactgtcaaatctgatccaggaaatcttggactttgatcaagctcagcagataaaatgctttaatagtaaattgttcctgtgcagtatctgtttctgtgagaagctgggtagtgaatgcatgtacttcttggagtgcaggcatgtgtactgcaaagcctgtctgaaggactactttgaaatccagatcagagatggccaggttcaatgcctcaactgcccagaaccaaagtgcccttcggtggccactcctggtcaggtcaaagagttagtggaagcagagttatttgcccgttatgaccgccttctcctccagtcctccttggacctgatggcagatgtggtgtactgcccccggccgtgctgccagctgcctgtgatgcaggaacctggctgcaccatgggtatctgctccagctgcaattttgccttctgtactttgtgcaggttgacctaccatggggtctccccatgtaaggtgactgcagagaaattaatggacttacgaaatgaatacctgcaagcggatgaggctaataaaagacttttggatcaaaggtatggtaagagagtgattcagaaggcactggaagagatggaaagtaaggagtggctagagaagaactcaaagagctgcccatgttgtggaactcccatagagaaattagacggatgtaacaagatgacatgtactggctgtatgcaatatttctgttggatttgcatgggttctctctctagagcaaacccttacaaacatttcaatgaccctggttcaccatgttttaaccggctgttttatgctgtggatgttgacgacgatatttgggaagatgaggtagaagactagttaactactgctcaagatatggaagtggattgtttttccctaatcttccgtcaagtacacaaagtaactttgcgggatatttagggtactattcattcactcttcctgcgtagaagatatggaagaacgaggtttatattttcatgtggtactactgaagaaggtgcattgatacatttttaaatgtaagttgagaaaaatttataagccaaaggttcagaaaattaaactacagaatattaaatattataatgtgcccaaagctctgaatagttaaaaattaaatatttattttcttccccaagctttaggtaaggagaagaggggtcaagagttaaacttagagaccctttgtctctgagaagcatccttctaagacattctgttggagttccctcagtactattccttacaactggagtgggtagaagccttatgaaaattatactgagaacctgatctcgtttactccatgttaatcacattcctaccaacctaaatttctgccaagtcagttctctttggaggaagcccattactccgtaactgactggatggtccagtgtcattttgatctgcttttcagaatggaaatttataatataaatatatgttttaataccacaaacactgtggggcacttgatatttattagtggtgtatatggtccactggtttcaggccaaatctagaatttagtgatactggctcagaagaatttaagttctattcagccttcctgggtgttagaacctagattcaaaatggcttgtctttgctactttgttccacattctctctctttacctttgccctaccttctgtttgtaaggatgattttaatattaattccaggaacacatgtttttatttcctctgctggaataggagaaagcttaatatattcccaagctgaatgttcttgaattatatctgcatttaccactgtatatgcatatagtgacagtataacctgtctatactacagtagttccagtcctaactttctgaattatttttaaagatcttctctaacaagctatgggaatttggcttcatactctttctttgcaacagcagtgttctgggtgataattttgaattgatacctgttcctttttctgggttttgttggctttttgaaaaattgtctttccttatcattggtgggaggcttggtagcaaagtaacattttttggaaaagaggacagaaaaattgaactacagcttgagaacgtattctttttttcctactttgttattgcaaattgaggaatcacttttaactgttttaggtgtgtgtgtccagagtgagcaaggattatgtttttggattgtcaaagaggatgcttagtcttaaaataaaaataaatttaaaaatcatcttataattagaa

SEQ ID NO: 363565 - DNA, 2940 bp, Homo sapiens
gccggcggtcgcgccagcgggatccgcctggctcagctgacagctcccgagaacggaagaggcggcgcgccggttgagcagggcgtttctaggcctggtcggctggcggcggtccttatgtcgtcagaagatcgagaagctcaggaggatgaattgctggccctggcaagtatttacgatggagatgaatttagaaaagcagagtctgtccaaggtggagaaaccaggatctatttggatttgccacagaatttcaagatatttgtgagcggcaattcaaatgagtgtctccagaatagtggctttgaatacaccatttgctttctgcctccacttgtgctgaactttgaactgccaccagattatccatcctcttccccaccttcattcacacttagtggcaaatggctgtcaccaactcagctatctgctctatgcaagcacttagacaacctatgggaagaacaccgtggcagcgtggtcctgtttgcctggatgcaatttcttaaggaagagaccctagcatacttgaatattgtctctccttttgagctcaagattggttctcagaaaaaagtgcagagaaggacagctcaagcttctcccaacacagagctagattttggaggagctgctggatctgatgtagaccaagaggaaattgtggatgagagagcagtgcaggatgtggaatcactgtcaaatctgatccaggaaatcttggactttgatcaagctcagcagataaaatgctttaatagtaaattgttcctgtgcagtatctgtttctgtgagaagctgggtagtgaatgcatgtacttcttggagtgcaggcatgtgtactgcaaagcctgtctgaaggactactttgaaatccagatcagagatggccaggttcaatgcctcaactgcccagaaccaaagtgcccttcggtggccactcctggtcaggtcaaagagttagtggaagcagagttatttgcccgttatgaccgccttctcctccagtcctccttggacctgatggcagatgtggtgtactgcccccggccgtgctgccagctgcctgtgatgcaggaacctggctgcaccatgggtatctgctccagctgcaattttgccttctgtactttgtgcaggttgacctaccatggggtctccccatgtaaggtgactgcagagaaattaatggacttacgaaatgaatacctgcaagcggatgaggctaataaaagacttttggatcaaaggtatggtaagagagtgattcagaaggcactggaagagatggaaagtaaggagtggctagagaagaactcaaagagctgcccatgttgtggaactcccatagagaaattagacggatgtaacaagatgacatgtactggctgtatgcaatatttctgttggatttgcatgggttctctctctagagcaaacccttacaaacatttcaatgaccctggttcaccatgttttaaccggctgttttatgctgtggatgttgacgacgatatttgggaagatgaggtagaagactagttaactactgctcaagatatggaagtggattgtttttccctaatcttccgtcaagtacacaaagtaactttgcgggatatttagggtactattcattcactcttcctgcgtagaagatatggaagaacgaggtttatattttcatgtggtactactgaagaaggtgcattgatacatttttaaatgtaagttgagaaaaatttataagccaaaggttcagaaaattaaactacagaatattaaatattataatgtgcccaaagctctgaatagttaaaaattaaatatttattttcttccccaagctttaggtaaggagaagaggggtcaagagttaaacttagagaccctttgtctctgagaagcatccttctaagacattctgttggagttccctcagtactattccttacaactggagtgggtagaagccttatgaaaattatactgagaacctgatctcgtttactccatgttaatcacattcctaccaacctaaatttctgccaagtcagttctctttggaggaagcccattactccgtaactgactggatggtccagtgtcattttgatctgcttttcagaatggaaatttataatataaatatatgttttaataccacaaacactgtggggcacttgatatttattagtggtgtatatggtccactggtttcaggccaaatctagaatttagtgatactggctcagaagaatttaagttctattcagccttcctgggtgttagaacctagattcaaaatggcttgtctttgctactttgttccacattctctctctttacctttgccctaccttctgtttgtaaggatgattttaatattaattccaggaacacatgtttttatttcctctgctggaataggagaaagcttaatatattcccaagctgaatgttcttgaattatatctgcatttaccactgtatatgcatatagtgacagtataacctgtctatactacagtagttccagtcctaactttctgaattatttttaaagatcttctctaacaagctatgggaatttggcttcatactctttctttgcaacagcagtgttctgggtgataattttgaattgatacctgttcctttttctgggttttgttggctttttgaaaaattgtctttccttatcattggtgggaggcttggtagcaaagtaacattttttggaaaagaggacagaaaaattgaactacagcttgagaacgtattctttttttcctactttgttattgcaaattgaggaatcacttttaactgttttaggtgtgtgtgtccagagtgagcaaggattatgtttttggattgtcaaagaggatgcttagtcttaaaataaaaataaatttaaaaatcatcttataattagaa

SEQ ID NO: 363566 - DNA, 2933 bp, Homo sapiens
cgctgaggaggatgaggccggggctccggggacaggccagatgggaagctgctgtccacgcagcaaggcggctgctgagggaaagggagcctctgcatcaccaagtccttatgtcgtcagaagatcgagaagctcaggaggatgaattgctggccctggcaagtatttacgatggagatgaatttagaaaagcagagtctgtccaaggtggagaaaccaggatctatttggatttgccacagaatttcaagatatttgtgagcggcaattcaaatgagtgtctccagaatagtggctttgaatacaccatttgctttctgcctccacttgtgctgaactttgaactgccaccagattatccatcctcttccccaccttcattcacacttagtggcaaatggctgtcaccaactcagctatctgctctatgcaagcacttagacaacctatgggaagaacaccgtggcagcgtggtcctgtttgcctggatgcaatttcttaaggaagagaccctagcatacttgaatattgtctctccttttgagctcaagattggttctcagaaaaaagtgcagagaaggacagctcaagcttctcccaacacagagctagattttggaggagctgctggatctgatgtagaccaagaggaaattgtggatgagagagcagtgcaggatgtggaatcactgtcaaatctgatccaggaaatcttggactttgatcaagctcagcagataaaatgctttaatagtaaattgttcctgtgcagtatctgtttctgtgagaagctgggtagtgaatgcatgtacttcttggagtgcaggcatgtgtactgcaaagcctgtctgaaggactactttgaaatccagatcagagatggccaggttcaatgcctcaactgcccagaaccaaagtgcccttcggtggccactcctggtcaggtcaaagagttagtggaagcagagttatttgcccgttatgaccgccttctcctccagtcctccttggacctgatggcagatgtggtgtactgcccccggccgtgctgccagctgcctgtgatgcaggaacctggctgcaccatgggtatctgctccagctgcaattttgccttctgtactttgtgcaggttgacctaccatggggtctccccatgtaaggtgactgcagagaaattaatggacttacgaaatgaatacctgcaagcggatgaggctaataaaagacttttggatcaaaggtatggtaagagagtgattcagaaggcactggaagagatggaaagtaaggagtggctagagaagaactcaaagagctgcccatgttgtggaactcccatagagaaattagacggatgtaacaagatgacatgtactggctgtatgcaatatttctgttggatttgcatgggttctctctctagagcaaacccttacaaacatttcaatgaccctggttcaccatgttttaaccggctgttttatgctgtggatgttgacgacgatatttgggaagatgaggtagaagactagttaactactgctcaagatatggaagtggattgtttttccctaatcttccgtcaagtacacaaagtaactttgcgggatatttagggtactattcattcactcttcctgcgtagaagatatggaagaacgaggtttatattttcatgtggtactactgaagaaggtgcattgatacatttttaaatgtaagttgagaaaaatttataagccaaaggttcagaaaattaaactacagaatattaaatattataatgtgcccaaagctctgaatagttaaaaattaaatatttattttcttccccaagctttaggtaaggagaagaggggtcaagagttaaacttagagaccctttgtctctgagaagcatccttctaagacattctgttggagttccctcagtactattccttacaactggagtgggtagaagccttatgaaaattatactgagaacctgatctcgtttactccatgttaatcacattcctaccaacctaaatttctgccaagtcagttctctttggaggaagcccattactccgtaactgactggatggtccagtgtcattttgatctgcttttcagaatggaaatttataatataaatatatgttttaataccacaaacactgtggggcacttgatatttattagtggtgtatatggtccactggtttcaggccaaatctagaatttagtgatactggctcagaagaatttaagttctattcagccttcctgggtgttagaacctagattcaaaatggcttgtctttgctactttgttccacattctctctctttacctttgccctaccttctgtttgtaaggatgattttaatattaattccaggaacacatgtttttatttcctctgctggaataggagaaagcttaatatattcccaagctgaatgttcttgaattatatctgcatttaccactgtatatgcatatagtgacagtataacctgtctatactacagtagttccagtcctaactttctgaattatttttaaagatcttctctaacaagctatgggaatttggcttcatactctttctttgcaacagcagtgttctgggtgataattttgaattgatacctgttcctttttctgggttttgttggctttttgaaaaattgtctttccttatcattggtgggaggcttggtagcaaagtaacattttttggaaaagaggacagaaaaattgaactacagcttgagaacgtattctttttttcctactttgttattgcaaattgaggaatcacttttaactgttttaggtgtgtgtgtccagagtgagcaaggattatgtttttggattgtcaaagaggatgcttagtcttaaaataaaaataaatttaaaaatcatcttataattagaa

SEQ ID NO: 363567 - DNA, 1774 bp, Homo sapiens
tgcatgggcttcctcacttttttcctcacgaagaggtctctggtctcccctctctgagcactctgaggtccttatgtcgtcagaagatcgagaagctcaggaggatgaattgctggccctggcaagtatttacgatggagatgaatttagaaaagcagagtctgtccaaggtggagaaaccaggatctatttggatttgccacagaatttcaagatatttgtgagcggcaattcaaatgagtgtctccagaatagtggctttgaatacaccatttgctttctgcctccacttgtgctgaactttgaactgccaccagattatccatcctcttccccaccttcattcacacttagtggcaaatggctgtcaccaactcagctatctgctctatgcaagcacttagacaacctatgggaagaacaccgtggcagcgtggtcctgtttgcctggatgcaatttcttaaggaagagaccctagcatacttgaatattgtctctccttttgagctcaagattggttctcagaaaaaagtgcagagaaggacagctcaagcttctcccaacacagagctagattttggaggagctgctggatctgatgtagaccaagaggaaattgtggatgagagagcagtgcaggatgtggaatcactgtcaaatctgatccaggaaatcttggactttgatcaagctcagcagataaaatgctttaatagtaaattgttcctgtgcagtatctgtttctgtgagaagctgggtagtgaatgcatgtacttcttggagtgcaggcatgtgtactgcaaagcctgtctgaaggactactttgaaatccagatcagagatggccaggttcaatgcctcaactgcccagaaccaaagtgcccttcggtggccactcctggtcaggtcaaagagttagtggaagcagagttatttgcccgttatgaccgccttctcctccagtcctccttggacctgatggcagatgtggtgtactgcccccggccgtgctgccagctgcctgtgatgcaggaacctggctgcaccatgggtatctgctccagctgcaattttgccttctgtactttgtgcaggttgacctaccatggggtctccccatgtaaggtgactgcagagaaattaatggacttacgaaatgaatacctgcaagcggatgaggctaataaaagacttttggatcaaaggtatggtaagagagtgattcagaaggcactggaagagatggaaagtaaggagtggctagagaagaactcaaagagctgcccatgttgtggaactcccatagagaaattagacggatgtaacaagatgacatgtactggctgtatgcaatatttctgttggatttgcatgggttctctctctagagcaaacccttacaaacatttcaatgaccctggttcaccatgttttaaccggctgttttatgctgtggatgttgacgacgatatttgggaagatgaggtagaagactagttaactactgctcaagatatggaagtggattgtttttccctaatcttccgtcaagtacacaaagtaactttgcgggatatttagggtactattcattcactcttcctgcgtagaagatatggaagaacgaggtttatattttcatgtggtactactgaagaaggtgcattgatacatttttaaatgtaagttgagaaaaatttataagccaaaggttcagaaaattaaactacagaatattaaatattataatgtgcccaaagctctgaatagtta

SEQ ID NO: 363568 - DNA, 2434 bp, Homo sapiens
gccggcggtcgcgccagcgggatccgcctggctcagctgacagctcccgagaacggaagaggcggcgcgccggttgagcagggcgtttctaggcctggtcggctggcggcgatggcaggattttcataatatatgtagtatgagttccacatcttggcctcttacccagcttcagcagtctcagctccaccagttagagaataaatgggatttgcatgaactccactctgagctgaaatacagactgcggtgttaatatccttttcttctgattgttattaacaggtccttatgtcgtcagaagatcgagaagctcaggaggatgaattgctggccctggcaagtatttacgatggagatgaatttagaaaagcagagtctgtccaaggtggagaaaccaggatctatttggatttgccacagaatttcaagatatttgtgagcggtcaaagagttagtggaagcagagttatttgcccgttatgaccgccttctcctccagtcctccttggacctgatggcagatgtggtgtactgcccccggccgtgctgccagctgcctgtgatgcaggaacctggctgcaccatgggtatctgctccagctgcaattttgccttctgtactttgtgcaggttgacctaccatggggtctccccatgtaaggtgactgcagagaaattaatggacttacgaaatgaatacctgcaagcggatgaggctaataaaagacttttggatcaaaggtatggtaagagagtgattcagaaggcactggaagagatggaaagtaaggagtggctagagaagaactcaaagagctgcccatgttgtggaactcccatagagaaattagacggatgtaacaagatgacatgtactggctgtatgcaatatttctgttggatttgcatgggttctctctctagagcaaacccttacaaacatttcaatgaccctggttcaccatgttttaaccggctgttttatgctgtggatgttgacgacgatatttgggaagatgaggtagaagactagttaactactgctcaagatatggaagtggattgtttttccctaatcttccgtcaagtacacaaagtaactttgcgggatatttagggtactattcattcactcttcctgcgtagaagatatggaagaacgaggtttatattttcatgtggtactactgaagaaggtgcattgatacatttttaaatgtaagttgagaaaaatttataagccaaaggttcagaaaattaaactacagaatattaaatattataatgtgcccaaagctctgaatagttaaaaattaaatatttattttcttccccaagctttaggtaaggagaagaggggtcaagagttaaacttagagaccctttgtctctgagaagcatccttctaagacattctgttggagttccctcagtactattccttacaactggagtgggtagaagccttatgaaaattatactgagaacctgatctcgtttactccatgttaatcacattcctaccaacctaaatttctgccaagtcagttctctttggaggaagcccattactccgtaactgactggatggtccagtgtcattttgatctgcttttcagaatggaaatttataatataaatatatgttttaataccacaaacactgtggggcacttgatatttattagtggtgtatatggtccactggtttcaggccaaatctagaatttagtgatactggctcagaagaatttaagttctattcagccttcctgggtgttagaacctagattcaaaatggcttgtctttgctactttgttccacattctctctctttacctttgccctaccttctgtttgtaaggatgattttaatattaattccaggaacacatgtttttatttcctctgctggaataggagaaagcttaatatattcccaagctgaatgttcttgaattatatctgcatttaccactgtatatgcatatagtgacagtataacctgtctatactacagtagttccagtcctaactttctgaattatttttaaagatcttctctaacaagctatgggaatttggcttcatactctttctttgcaacagcagtgttctgggtgataattttgaattgatacctgttcctttttctgggttttgttggctttttgaaaaattgtctttccttatcattggtgggaggcttggtagcaaagtaacattttttggaaaagaggacagaaaaattgaactacagcttgagaacgtattctttttttcctactttgttattgcaaattgaggaatcacttttaactgttttaggtgtgtgtgtccagagtgagcaaggattatgtttttggattgtcaaagaggatgcttagtcttaaaataaaaataaatttaaaaatcatcttataattagaa

SEQ ID NO: 363569 - DNA, 2205 bp, Homo sapiens
gccggcggtcgcgccagcgggatccgcctggctcagctgacagctcccgagaacggaagaggcggcgcgccggttgagcagggcgtttctaggcctggtcggctggcggcgatggcaggattttcataatatatgtagtatgagttccacatcttggcctcttacccagcttcagcagtctcagctccaccagttagagaataaatgggatttgcatgaactccactctgagctgaaatacagactgcggtgttaatatccttttcttctgattgttattaacaggtccttatgtcgtcagaagatcgagaagctcaggaggatgaattgctggccctggcaagtatttacgatggagatgaatttagaaaagcagagtctgtccaaggtggagaaaccaggatctatttggatttgccacagaatttcaagatatttgtgagcgagaaattaatggacttacgaaatgaatacctgcaagcggatgaggctaataaaagacttttggatcaaaggtatggtaagagagtgattcagaaggcactggaagagatggaaagtaaggagtggctagagaagaactcaaagagctgcccatgttgtggaactcccatagagaaattagacggatgtaacaagatgacatgtactggctgtatgcaatatttctgttggatttgcatgggttctctctctagagcaaacccttacaaacatttcaatgaccctggttcaccatgttttaaccggctgttttatgctgtggatgttgacgacgatatttgggaagatgaggtagaagactagttaactactgctcaagatatggaagtggattgtttttccctaatcttccgtcaagtacacaaagtaactttgcgggatatttagggtactattcattcactcttcctgcgtagaagatatggaagaacgaggtttatattttcatgtggtactactgaagaaggtgcattgatacatttttaaatgtaagttgagaaaaatttataagccaaaggttcagaaaattaaactacagaatattaaatattataatgtgcccaaagctctgaatagttaaaaattaaatatttattttcttccccaagctttaggtaaggagaagaggggtcaagagttaaacttagagaccctttgtctctgagaagcatccttctaagacattctgttggagttccctcagtactattccttacaactggagtgggtagaagccttatgaaaattatactgagaacctgatctcgtttactccatgttaatcacattcctaccaacctaaatttctgccaagtcagttctctttggaggaagcccattactccgtaactgactggatggtccagtgtcattttgatctgcttttcagaatggaaatttataatataaatatatgttttaataccacaaacactgtggggcacttgatatttattagtggtgtatatggtccactggtttcaggccaaatctagaatttagtgatactggctcagaagaatttaagttctattcagccttcctgggtgttagaacctagattcaaaatggcttgtctttgctactttgttccacattctctctctttacctttgccctaccttctgtttgtaaggatgattttaatattaattccaggaacacatgtttttatttcctctgctggaataggagaaagcttaatatattcccaagctgaatgttcttgaattatatctgcatttaccactgtatatgcatatagtgacagtataacctgtctatactacagtagttccagtcctaactttctgaattatttttaaagatcttctctaacaagctatgggaatttggcttcatactctttctttgcaacagcagtgttctgggtgataattttgaattgatacctgttcctttttctgggttttgttggctttttgaaaaattgtctttccttatcattggtgggaggcttggtagcaaagtaacattttttggaaaagaggacagaaaaattgaactacagcttgagaacgtattctttttttcctactttgttattgcaaattgaggaatcacttttaactgttttaggtgtgtgtgtccagagtgagcaaggattatgtttttggattgtcaaagaggatgcttagtcttaaaataaaaataaatttaaaaatcatcttataattagaa

SEQ ID NO: 363570 - DNA, 2199 bp, Homo sapiens
gccggcggtcgcgccagcgggatccgcctggctcagctgacagctcccgagaacggaagaggcggcgcgccggttgagcagggcgtttctaggcctggtcggctggcggcggtgagtgggccccaggcaagggcggagggcggaactttggggttcggcactgccgggcggccggaagatggcaggattttcataatatatgtagtatgagttccacatcttggcctcttacccagcttcagcagtctcagctccaccagttagagaataaatgggatttgcatgaactccactctgagctgaaatacagactgcggtgttaatatccttttcttctgattgttattaacaggtccttatgtcgtcagaagatcgagaagctcaggaggatgaattgctggccctggcaagtatttacgatggagatgaatttagaaaaagaaattaatggacttacgaaatgaatacctgcaagcggatgaggctaataaaagacttttggatcaaaggtatggtaagagagtgattcagaaggcactggaagagatggaaagtaaggagtggctagagaagaactcaaagagctgcccatgttgtggaactcccatagagaaattagacggatgtaacaagatgacatgtactggctgtatgcaatatttctgttggatttgcatgggttctctctctagagcaaacccttacaaacatttcaatgaccctggttcaccatgttttaaccggctgttttatgctgtggatgttgacgacgatatttgggaagatgaggtagaagactagttaactactgctcaagatatggaagtggattgtttttccctaatcttccgtcaagtacacaaagtaactttgcgggatatttagggtactattcattcactcttcctgcgtagaagatatggaagaacgaggtttatattttcatgtggtactactgaagaaggtgcattgatacatttttaaatgtaagttgagaaaaatttataagccaaaggttcagaaaattaaactacagaatattaaatattataatgtgcccaaagctctgaatagttaaaaattaaatatttattttcttccccaagctttaggtaaggagaagaggggtcaagagttaaacttagagaccctttgtctctgagaagcatccttctaagacattctgttggagttccctcagtactattccttacaactggagtgggtagaagccttatgaaaattatactgagaacctgatctcgtttactccatgttaatcacattcctaccaacctaaatttctgccaagtcagttctctttggaggaagcccattactccgtaactgactggatggtccagtgtcattttgatctgcttttcagaatggaaatttataatataaatatatgttttaataccacaaacactgtggggcacttgatatttattagtggtgtatatggtccactggtttcaggccaaatctagaatttagtgatactggctcagaagaatttaagttctattcagccttcctgggtgttagaacctagattcaaaatggcttgtctttgctactttgttccacattctctctctttacctttgccctaccttctgtttgtaaggatgattttaatattaattccaggaacacatgtttttatttcctctgctggaataggagaaagcttaatatattcccaagctgaatgttcttgaattatatctgcatttaccactgtatatgcatatagtgacagtataacctgtctatactacagtagttccagtcctaactttctgaattatttttaaagatcttctctaacaagctatgggaatttggcttcatactctttctttgcaacagcagtgttctgggtgataattttgaattgatacctgttcctttttctgggttttgttggctttttgaaaaattgtctttccttatcattggtgggaggcttggtagcaaagtaacattttttggaaaagaggacagaaaaattgaactacagcttgagaacgtattctttttttcctactttgttattgcaaattgaggaatcacttttaactgttttaggtgtgtgtgtccagagtgagcaaggattatgtttttggattgtcaaagaggatgcttagtcttaaaataaaaataaatttaaaaatcatcttataattagaa

SEQ ID NO: 363571 - DNA, 1759 bp, Homo sapiens
gccggcggtcgcgccagcgggatccgcctggctcagctgacagctcccgagaacggaagaggcggcgcgccggttgagcagggcgtttctaggcctggtcggctggcggcgatggcaggattttcataatatatgtaagtgattcagaaggcactggaagagatggaaagtaaggagtggctagagaagaactcaaagagctgcccatgttgtggaactcccatagagaaattagacggatgtaacaagatgacatgtactggctgtatgcaatatttctgttggatttgcatgggttctctctctagagcaaacccttacaaacatttcaatgaccctggttcaccatgttttaaccggctgttttatgctgtggatgttgacgacgatatttgggaagatgaggtagaagactagttaactactgctcaagatatggaagtggattgtttttccctaatcttccgtcaagtacacaaagtaactttgcgggatatttagggtactattcattcactcttcctgcgtagaagatatggaagaacgaggtttatattttcatgtggtactactgaagaaggtgcattgatacatttttaaatgtaagttgagaaaaatttataagccaaaggttcagaaaattaaactacagaatattaaatattataatgtgcccaaagctctgaatagttaagttaaacttagagaccctttgtctctgagaagcatccttctaagacattctgttggagttccctcagtactattccttacaactggagtgggtagaagccttatgaaaattatactgagaacctgatctcgtttactccatgttaatcacattcctaccaacctaaatttctgccaagtcagttctctttggaggaagcccattactccgtaactgactggatggtccagtgtcattttgatctgcttttcagaatggaaatttataatataaatatatgttttaataccacaaacactgtggggcacttgatatttattagtggtgtatatggtccactggtttcaggccaaatctagaatttagtgatactggctcagaagaatttaagttctattcagccttcctgggtgttagaacctagattcaaaatggcttgtctttgctactttgttccacattctctctctttacctttgccctaccttctgtttgtaaggatgattttaatattaattccaggaacacatgtttttatttcctctgctggaataggagaaagcttaatatattcccaagctgaatgttcttgaattatatctgcatttaccactgtatatgcatatagtgacagtataacctgtctatactacagtagttccagtcctaactttctgaattatttttaaagatcttctctaacaagctatgggaatttggcttcatactctttctttgcaacagcagtgttctgggtgataattttgaattgatacctgttcctttttctgggttttgttggctttttgaaaaattgtctttccttatcattggtgggaggcttggtagcaaagtaacattttttggaaaagaggacagaaaaattgaactacagcttgagaacgtattctttttttcctactttgttattgcaaattgaggaatcacttttaactgttttaggtgtgtgtgtccagagtgagcaaggattatgtttttggattgtcaaagaggatgcttagtcttaaaataaaaataaatttaaaaatcatcttataattagaa

SEQ ID NO: 363572 - DNA, 663 bp, Homo sapiens
tatcaggcagcttccctccattaaccaggatctgatataagcccagattgcttacttaaaagcagcttgtaaatctgaacaaggactctgaggttgaattctgttagtgattgtttcagatgagttgactttttgataaaactgaaagaattaattttaaaacttggatagtatttttaaactattctttttctaaccattattctaggatacgaacagggctaggactcctaatggaagaaaaatagtttatttttagaactagatctctttgtcctacatgaggtatatggcagtactaaaagattaaagaacagaaaaaagtcttccatttcagtggctaaaatgtacagctatttctctaccttacggagtcttgctatttctcttcttctcgtggtacttcttgcttctgactttatgttctactctggctcatgttgccgaatagtttaagaagtgctccagtaagaatgtttgtactgttttgtatgtagcacagtgtatcacagcagtaaaaaatagtgttagaataagggcctaacttgcaagtggaaaagatttctagggaaaccaggagttggcagcagcatcatctttccaaactcaccaacatcttcatgtgttttctcctagctatctgctctatgcaagcacttagac

SEQ ID NO: 363573 - DNA, 433 bp, Homo sapiens
gaatcactgtcaaatctgatccaggaaatcttggactttgatcaagctcagcagataaaatgctttaatagtaaattgttcctgtgcagtatctgtttctgtgagaagctgggtagtgaatgcatgtacttcttggagtgcaggcatgtgtactgcaaagcctgtctgaaggactactttgaaatccagatcagagatggccaggttcaatgcctcaactgcccagaaccaaagtgcccttcggtggccactcctggtcaggtaactgtttaccctgctgatggttgcctcctaattctcttccataaatggagatatcatctcaggaacttccttgatagggctcatggggcagtccgaggccttggagccagcccacaagttgttttgctgtatccattaaaaatgctatggtcttagtctactgcttaag

SEQ ID NO: 363574 - DNA, 3114 bp, Homo sapiens
gccggcggtcgcgccagcgggatccgcctggctcagctgacagctcccgagaacggaagaggcggcgcgccggttgagcagggcgtttctaggcctggtcggctggcggcgatggcaggattttcataatatatgtagtatgagttccacatcttggcctcttacccagcttcagcagtctcagctccaccagttagagaataaatgggatttgcatgaactccactctgagctgaaatacagactgcggtgttaatatccttttcttctgattgttattaacaggtccttatgtcgtcagaagatcgagaagctcaggaggatgaattgctggccctggcaagtatttacgatggagatgaatttagaaaagcagagtctgtccaaggtggagaaaccaggatctatttggatttgccacagaatttcaagatatttgtgagcggcaattcaaatgagtgtctccagaatagtggctttgaatacaccatttgctttctgcctccacttgtgctgaactttgaactgccaccagattatccatcctcttccccaccttcattcacacttagtggcaaatggctgtcaccaactcagctatctgctctatgcaagcacttagacaacctatgggaagaacaccgtggcagcgtggtcctgtttgcctggatgcaatttcttaaggaagagaccctagcatacttgaatattgtctctccttttgagctcaagattggttctcagaaaaaagtgcagagaaggacagctcaagcttctcccaacacagagctagattttggaggagctgctggatctgatgtagaccaagaggaaattgtggatgagagagcagtgcaggatgtggaatcactgtcaaatctgatccaggaaatcttggactttgatcaagctcagcagataaaatgctttaatagtaaattgttcctgtgcagtatctgtttctgtgagaagctgggtagtgaatgcatgtacttcttggagtgcaggcatgtgtactgcaaagcctgtctgaaggactactttgaaatccagatcagagatggccaggttcaatgcctcaactgcccagaaccaaagtgcccttcggtggccactcctggtcaggtcaaagagttagtggaagcagagttatttgcccgttatgaccgccttctcctccagtcctccttggacctgatggcagatgtggtgtactgcccccggccgtgctgccagctgcctgtgatgcaggaacctggctgcaccatgggtatctgctccagctgcaattttgccttctgtactttgtgcaggttgacctaccatggggtctccccatgtaaggtgactgcagagaaattaatggacttacgaaatgaatacctgcaagcggatgaggctaataaaagacttttggatcaaaggtatggtaagagagtgattcagaaggcactggaagagatggaaagtaaggagtggctagagaagaactcaaagagctgcccatgttgtggaactcccatagagaaattagacggatgtaacaagatgacatgtactggctgtatgcaatatttctgttggatttgcatgggttctctctctagagcaaacccttacaaacatttcaatgaccctggttcaccatgttttaaccggctgttttatgctgtggatgttgacgacgatatttgggaagatgaggtagaagactagttaactactgctcaagatatggaagtggattgtttttccctaatcttccgtcaagtacacaaagtaactttgcgggatatttagggtactattcattcactcttcctgcgtagaagatatggaagaacgaggtttatattttcatgtggtactactgaagaaggtgcattgatacatttttaaatgtaagttgagaaaaatttataagccaaaggttcagaaaattaaactacagaatattaaatattataatgtgcccaaagctctgaatagttaaaaattaaatatttattttcttccccaagctttaggtaaggagaagaggggtcaagagttaaacttagagaccctttgtctctgagaagcatccttctaagacattctgttggagttccctcagtactattccttacaactggagtgggtagaagccttatgaaaattatactgagaacctgatctcgtttactccatgttaatcacattcctaccaacctaaatttctgccaagtcagttctctttggaggaagcccattactccgtaactgactggatggtccagtgtcattttgatctgcttttcagaatggaaatttataatataaatatatgttttaataccacaaacactgtggggcacttgatatttattagtggtgtatatggtccactggtttcaggccaaatctagaatttagtgatactggctcagaagaatttaagttctattcagccttcctgggtgttagaacctagattcaaaatggcttgtctttgctactttgttccacattctctctctttacctttgccctaccttctgtttgtaaggatgattttaatattaattccaggaacacatgtttttatttcctctgctggaataggagaaagcttaatatattcccaagctgaatgttcttgaattatatctgcatttaccactgtatatgcatatagtgacagtataacctgtctatactacagtagttccagtcctaactttctgaattatttttaaagatcttctctaacaagctatgggaatttggcttcatactctttctttgcaacagcagtgttctgggtgataattttgaattgatacctgttcctttttctgggttttgttggctttttgaaaaattgtctttccttatcattggtgggaggcttggtagcaaagtaacattttttggaaaagaggacagaaaaattgaactacagcttgagaacgtattctttttttcctactttgttattgcaaattgaggaatcacttttaactgttttaggtgtgtgtgtccagagtgagcaaggattatgtttttggattgtcaaagaggatgcttagtcttaaaataaaaataaatttaaaaatcatcttataattagaa

SEQ ID NO: 363575 - DNA, 983 bp, Homo sapiens
tggggatagctctctgggcgcgcgaggcagagaaggggaccgggctgggactgtacactgggcctcagtccctcaaatccgggaccgggcgtccgcagctcggctggccgggactcccttcgggacgctgaggaggaaggggaaggtgtgggccctgctccttcgggacgccccaggctggccagcagctcacacatccgcattgcgccctctgatcccagcgttggggcggatagctagcgttgggcctgcccctgttttggggcagtcgcccaaacgacgccgcacgcctagtggcgagctgaacccagactaggacacccgaagaccaaatggatagagtgagaaggaaatgggggttagcaacctgaattgaggtactggattccaagtgacagcttcacaagctgaaatcttgtaggatggcaggattttcataatatatgtagtatgagttccacatcttggcctcttacccagcttcagcagtctcagctccaccagttagagaataaatgggatttgcatgaactccactctgagctgaaatacagactgcggtgttaatatccttttcttctgattgttattaacaggtccttatgtcgtcagaagatcgagaagctcaggaggatgaattgctggccctggcaagtatttacgatggagatgaatttagaaaagcagagtctgtccaaggtggagaaaccaggatctatttggatttgccacagaatttcaagatatttgtgagcggcaattcaaatgagtgtctccagaatagtggctttgaatacaccatttgctttctgcctccacttgtgctgaactttgaactgccaccagattatccatcctcttccccaccttcattcacacttagtggcaaatggctgtcaccaactcagtcagcttttctgcttctatgccaagcactttaaaacaacccttatggggaaaaaccaaccgtgggcaaccggggg

SEQ ID NO: 363576 - DNA, 2896 bp, Homo sapiens
tgcatgggcttcctcacttttttcctcacgaagaggtctctggtctcccctctctgagcactctgaggtccttatgtcgtcagaagatcgagaagctcaggaggatgaattgctggccctggcaagtatttacgatggagatgaatttagaaaagcagagtctgtccaaggtggagaaaccaggatctatttggatttgccacagaatttcaagatatttgtgagcggcaattcaaatgagtgtctccagaatagtggctttgaatacaccatttgctttctgcctccacttgtgctgaactttgaactgccaccagattatccatcctcttccccaccttcattcacacttagtggcaaatggctgtcaccaactcagctatctgctctatgcaagcacttagacaacctatgggaagaacaccgtggcagcgtggtcctgtttgcctggatgcaatttcttaaggaagagaccctagcatacttgaatattgtctctccttttgagctcaagattggttctcagaaaaaagtgcagagaaggacagctcaagcttctcccaacacagagctagattttggaggagctgctggatctgatgtagaccaagaggaaattgtggatgagagagcagtgcaggatgtggaatcactgtcaaatctgatccaggaaatcttggactttgatcaagctcagcagataaaatgctttaatagtaaattgttcctgtgcagtatctgtttctgtgagaagctgggtagtgaatgcatgtacttcttggagtgcaggcatgtgtactgcaaagcctgtctgaaggactactttgaaatccagatcagagatggccaggttcaatgcctcaactgcccagaaccaaagtgcccttcggtggccactcctggtcaggtcaaagagttagtggaagcagagttatttgcccgttatgaccgccttctcctccagtcctccttggacctgatggcagatgtggtgtactgcccccggccgtgctgccagctgcctgtgatgcaggaacctggctgcaccatgggtatctgctccagctgcaattttgccttctgtactttgtgcaggttgacctaccatggggtctccccatgtaaggtgactgcagagaaattaatggacttacgaaatgaatacctgcaagcggatgaggctaataaaagacttttggatcaaaggtatggtaagagagtgattcagaaggcactggaagagatggaaagtaaggagtggctagagaagaactcaaagagctgcccatgttgtggaactcccatagagaaattagacggatgtaacaagatgacatgtactggctgtatgcaatatttctgttggatttgcatgggttctctctctagagcaaacccttacaaacatttcaatgaccctggttcaccatgttttaaccggctgttttatgctgtggatgttgacgacgatatttgggaagatgaggtagaagactagttaactactgctcaagatatggaagtggattgtttttccctaatcttccgtcaagtacacaaagtaactttgcgggatatttagggtactattcattcactcttcctgcgtagaagatatggaagaacgaggtttatattttcatgtggtactactgaagaaggtgcattgatacatttttaaatgtaagttgagaaaaatttataagccaaaggttcagaaaattaaactacagaatattaaatattataatgtgcccaaagctctgaatagttaaaaattaaatatttattttcttccccaagctttaggtaaggagaagaggggtcaagagttaaacttagagaccctttgtctctgagaagcatccttctaagacattctgttggagttccctcagtactattccttacaactggagtgggtagaagccttatgaaaattatactgagaacctgatctcgtttactccatgttaatcacattcctaccaacctaaatttctgccaagtcagttctctttggaggaagcccattactccgtaactgactggatggtccagtgtcattttgatctgcttttcagaatggaaatttataatataaatatatgttttaataccacaaacactgtggggcacttgatatttattagtggtgtatatggtccactggtttcaggccaaatctagaatttagtgatactggctcagaagaatttaagttctattcagccttcctgggtgttagaacctagattcaaaatggcttgtctttgctactttgttccacattctctctctttacctttgccctaccttctgtttgtaaggatgattttaatattaattccaggaacacatgtttttatttcctctgctggaataggagaaagcttaatatattcccaagctgaatgttcttgaattatatctgcatttaccactgtatatgcatatagtgacagtataacctgtctatactacagtagttccagtcctaactttctgaattatttttaaagatcttctctaacaagctatgggaatttggcttcatactctttctttgcaacagcagtgttctgggtgataattttgaattgatacctgttcctttttctgggttttgttggctttttgaaaaattgtctttccttatcattggtgggaggcttggtagcaaagtaacattttttggaaaagaggacagaaaaattgaactacagcttgagaacgtattctttttttcctactttgttattgcaaattgaggaatcacttttaactgttttaggtgtgtgtgtccagagtgagcaaggattatgtttttggattgtcaaagaggatgcttagtcttaaaataaaaataaatttaaaaatcatcttataattagaa

SEQ ID NO: 363577 - DNA, 3617 bp, Homo sapiens
gccggcggtcgcgccagcgggatccgcctggctcagctgacagctcccgagaacggaagaggcggcgcgccggttgagcagggcgtttctaggcctggtcggctggcggcgatggcaggattttcataatatatgtagtatgagttccacatcttggcctcttacccagcttcagcagtctcagctccaccagttagagaataaatgggatttgcatgaactccactctgagctgaaatacagactgcggtgttaatatccttttcttctgattgttattaacaggtccttatgtcgtcagaagatcgagaagctcaggaggatgaattgctggccctggcaagtatttacgatggagatgaatttagaaaagcagagtctgtccaaggtggagaaaccaggatctatttggatttgccacagaatttcaagatatttgtgagcggcaattcaaatgagtgtctccagaatagtggctttgaatacaccatttgctttctgcctccacttgtgctgaactttgaactgccaccagattatccatcctcttccccaccttcattcacacttagtggcaaatggctgtcaccaactcagctatctgctctatgcaagcacttagacaacctatgggaagaacaccgtggcagcgtggtcctgtttgcctggatgcaatttcttaaggaagagaccctagcatacttgaatattgtctctccttttgagctcaagattggttctcagaaaaaagtgcagagaaggacagctcaagcttctcccaacacagagctagattttggaggagctgctggatctgatgtagaccaagaggaaattgtggatgagagagcagtgcaggatgtggaatcactgtcaaatctgatccaggaaatcttggactttgatcaagctcagcagataaaatgctttaatagtaaattgttcctgtgcagtatctgtttctgtgagaagctgggtagtgaatgcatgtacttcttggagtgcaggcatgtgtactgcaaagcctgtctgaaggactactttgaaatccagatcagagatggccaggttcaatgcctcaactgcccagaaccaaagtgcccttcggtggccactcctggtcaggtcaaagagttagtggaagcagagttatttgcccgttatgaccgccttctcctccagtcctccttggacctgatggcagatgtggtgtactgcccccggccgtgctgccagctgcctgtgatgcaggaacctggctgcaccatgggtatctgctccagctgcaattttgccttctgtactttgtgcaggttgacctaccatggggtctccccatgtaaggtgactgcagagaaattaatggacttacgaaatgaatacctgcaagcggatgaggctaataaaagacttttggatcaaaggtatggtaagagagtgattcagaaggcactggaagagatggaaagtaaggagtggctagagaagaactcaaagagctgcccatgttgtggaactcccatagagaaattagacggatgtaacaagatgacatgtactggctgtatgcaatatttctgttggatttgcatgggttctctctctagagcaaacccttacaaacatttcaatgaccctggttcaccatgttttaaccggctgttttatgctgtggatgttgacgacgatatttgggaagatgaggtagaagactagttaactactgctcaagatatggaagtggattgtttttccctaatcttccgtcaagtacacaaagtaactttgcgggatatttagggtactattcattcactcttcctgcgtagaagatatggaagaacgaggtttatattttcatgtggtactactgaagaaggtgcattgatacatttttaaatgtaagttgagaaaaatttataagccaaaggttcagaaaattaaactacagaatattaaatattataatgtgcccaaagctctgaatagttaaaaattaaatatttattttcttccccaagctttaggtaaggagaagaggggtcaagagttaaacttagagaccctttgtctctgagaagcatccttctaagacattctgttggagttccctcagtactattccttacaactggagtgggtagaagccttatgaaaattatactgagaacctgatctcgtttactccatgttaatcacattcctaccaacctaaatttctgccaagtcagttctctttggaggaagcccattactccgtaactgactggatggtccagtgtcattttgatctgcttttcagaatggaaatttataatataaatatatgttttaataccacaaacactgtggggcacttgatatttattagtggtgtatatggtccactggtttcaggccaaatctagaatttagtgatactggctcagaagaatttaagttctattcagccttcctgggtgttagaacctagattcaaaatggcttgtctttgctactttgttccacattctctctctttacctttgccctaccttctgtttgtaaggatgattttaatattaattccaggaacacatgtttttatttcctctgctggaataggagaaagcttaatatattcccaagctgaatgttcttgaattatatctgcatttaccactgtatatgcatatagtgacagtataacctgtctatactacagtagttccagtcctaactttctgaattatttttaaagatcttctctaacaagctatgggaatttggcttcatactctttctttgcaacagcagtgttctgggtgataattttgaattgatacctgttcctttttctgggttttgttggctttttgaaaaattgtctttccttatcattggtgggaggcttggtagcaaagtaacattttttggaaaagaggacagaaaaattgaactacagcttgagaacgtattctttttttcctactttgttattgcaaattgaggaatcacttttaactgttttaggtgtgtgtgtccagagtgagcaaggattatgtttttggattgtcaaagaggatgcttagtcttaaaataaaaataaatttaaaaatcatcttataattagaacagagttgctgctatttgttctgtcaccaaggcaactaatcacattttaaaactgttcggcatataacatattcttaaagtaagaaaaaaaaggtcacagaatagcatctcttttacctgggcttgtgactgagcttaggttttagggcccatattttgtttaaaccagatagtttcatggtcttccattcaggacattttgtgtaaaaattgaggttaatttgctgggcacagtggctcacgcctgtaatcccagcactttgggaggcctaggcgggcggatcacgaggtcaggagttcgagaccatcatggctaacacggtgaaaccccgtctctactaaaaatacaaaaaattagctgggcatggtggcaggcgcctgtagtcccagctactcaggaggctgaggcaggagaatggcatgaacctgggaggtggagcttgcagtgagccgagatagcgccactgcactccagcctgagcgacagagcgagactccttctc

SEQ ID NO: 363578 - DNA, 2962 bp, Homo sapiens
gccggcggtcgcgccagcgggatccgcctggctcagctgacagctcccgagaacggaagaggcggcgcgccggttgagcagggcgtttctaggcctggtcggctggcggcgatggcaggattttcataatatatgtagtatgagttccacatcttggcctcttacccagcttcagcagtctcagctccaccagttagagaataaatgggatttgcatgaactccactctgagctgaaatacagactgcggtgttaatatccttttcttctgattgttattaacaggtccttatgtcgtcagaagatcgagaagctcaggaggatgaattgctggccctggcaagtatttacgatggagatgaatttagaaaagcagagtctgtccaaggtggagaaaccaggatctatttggatttgccacagaatttcaagatatttgtgagcgctatctgctctatgcaagcacttagacaacctatgggaagaacaccgtggcagcgtggtcctgtttgcctggatgcaatttcttaaggaagagaccctagcatacttgaatattgtctctccttttgagctcaagattggttctcagaaaaaagtgcagagaaggacagctcaagcttctcccaacacagagctagattttggaggagctgctggatctgatgtagaccaagaggaaattgtggatgagagagcagtgcaggatgtggaatcactgtcaaatctgatccaggaaatcttggactttgatcaagctcagcagataaaatgctttaatagtaaattgttcctgtgcagtatctgtttctgtgagaagctgggtagtgaatgcatgtacttcttggagtgcaggcatgtgtactgcaaagcctgtctgaaggactactttgaaatccagatcagagatggccaggttcaatgcctcaactgcccagaaccaaagtgcccttcggtggccactcctggtcaggtcaaagagttagtggaagcagagttatttgcccgttatgaccgccttctcctccagtcctccttggacctgatggcagatgtggtgtactgcccccggccgtgctgccagctgcctgtgatgcaggaacctggctgcaccatgggtatctgctccagctgcaattttgccttctgtactttgtgcaggttgacctaccatggggtctccccatgtaaggtgactgcagagaaattaatggacttacgaaatgaatacctgcaagcggatgaggctaataaaagacttttggatcaaaggtatggtaagagagtgattcagaaggcactggaagagatggaaagtaaggagtggctagagaagaactcaaagagctgcccatgttgtggaactcccatagagaaattagacggatgtaacaagatgacatgtactggctgtatgcaatatttctgttggatttgcatgggttctctctctagagcaaacccttacaaacatttcaatgaccctggttcaccatgttttaaccggctgttttatgctgtggatgttgacgacgatatttgggaagatgaggtagaagactagttaactactgctcaagatatggaagtggattgtttttccctaatcttccgtcaagtacacaaagtaactttgcgggatatttagggtactattcattcactcttcctgcgtagaagatatggaagaacgaggtttatattttcatgtggtactactgaagaaggtgcattgatacatttttaaatgtaagttgagaaaaatttataagccaaaggttcagaaaattaaactacagaatattaaatattataatgtgcccaaagctctgaatagttaaaaattaaatatttattttcttccccaagctttaggtaaggagaagaggggtcaagagttaaacttagagaccctttgtctctgagaagcatccttctaagacattctgttggagttccctcagtactattccttacaactggagtgggtagaagccttatgaaaattatactgagaacctgatctcgtttactccatgttaatcacattcctaccaacctaaatttctgccaagtcagttctctttggaggaagcccattactccgtaactgactggatggtccagtgtcattttgatctgcttttcagaatggaaatttataatataaatatatgttttaataccacaaacactgtggggcacttgatatttattagtggtgtatatggtccactggtttcaggccaaatctagaatttagtgatactggctcagaagaatttaagttctattcagccttcctgggtgttagaacctagattcaaaatggcttgtctttgctactttgttccacattctctctctttacctttgccctaccttctgtttgtaaggatgattttaatattaattccaggaacacatgtttttatttcctctgctggaataggagaaagcttaatatattcccaagctgaatgttcttgaattatatctgcatttaccactgtatatgcatatagtgacagtataacctgtctatactacagtagttccagtcctaactttctgaattatttttaaagatcttctctaacaagctatgggaatttggcttcatactctttctttgcaacagcagtgttctgggtgataattttgaattgatacctgttcctttttctgggttttgttggctttttgaaaaattgtctttccttatcattggtgggaggcttggtagcaaagtaacattttttggaaaagaggacagaaaaattgaactacagcttgagaacgtattctttttttcctactttgttattgcaaattgaggaatcacttttaactgttttaggtgtgtgtgtccagagtgagcaaggattatgtttttggattgtcaaagaggatgcttagtcttaaaataaaaataaatttaaaaatcatcttataattagaa

SEQ ID NO: 363579 - DNA, 2840 bp, Homo sapiens
tgcatgggcttcctcacttttttcctcacgaagaggtctctggtctcccctctctgagcactctgaggtccttatgtcgtcagaagatcgagaagctcaggaggatgaattgctggccctggcaagtatttacgatggagatgaatttagaaaagcagagtctgtccaaggtggagaaaccaggatctatttggatttgccacagaatttcaagatatttgtgagcggcaattcaaatgagtgtctccagaatagtggctttgaatacaccatttgctttctgcctccacttgtgctgaactttgaactgccaccagattatccatcctcttccccaccttcattcacacttagtggcaaatggctgtcaccaactcagctatctgctctatgcaagcacttagacaacctatgggaagaacaccgtggcagcgtggtcctgtttgcctggatgcaatttcttaaggaagagaccctagcatacttgaatattgtctctccttttgagctcaagattggttctcagaaaaaagtgcagagaaggacagctcaagcttctcccaacacagagctagattttggaggagctgctggatctgatgtagaccaagaggaaattgtggatgagagagcagtgcaggatgtggaatcactgtcaaatctgatccaggaaatcttggactttgatcaagctcagcagataaaatgctttaatagtaaattgttcctgtgcagtatctgtttctgtgagaagctgggtagtgaatgcatgtacttcttggagtgcaggcatgtgtactgcaaagcctgtctgaaggactactttgaaatccagatcagagatggccaggttcaatgcctcaactgcccagaaccaaagtgcccttcggtggccactcctggtcaggtcaaagagttagtggaagcagagttatttgcccgttatgaccgccttctcctccagtcctccttggacctgatggcagatgtggtgtactgcccccggccgtgctgccagctgcctgtgatgcaggaacctggctgcaccatgggtatctgctccagctgcaattttgccttctgtactttgtgcaggttgacctaccatggggtctccccatgtaaggtgactgcagagaaattaatggacttacgaaatgaatacctgcaagcggatgaggctaataaaagacttttggatcaaaggtatggtaagagagtgattcagaaggcactggaagagatggaaagtaaggagtggctagagaagaactcaaagagctgcccatgttgtggaactcccatagagaaattagacggatgtaacaagatgacatgtactggctgtatgcaatatttctgttggatttgcatgggttctctctctagagcaaacccttacaaacatttcaatgaccctggttcaccatgttttaaccggctgttttatgctgtggatgttgacgacgatatttgggaagatgaggtagaagactagttaactactgctcaagatatggaagtggattgtttttccctaatcttccgtcaagtacacaaagtaactttgcgggatatttagggtactattcattcactcttcctgcgtagaagatatggaagaacgaggtttatattttcatgtggtactactgaagaaggtgcattgatacatttttaaatgtaagttgagaaaaatttataagccaaaggttcagaaaattaaactacagaatattaaatattataatgtgcccaaagctctgaatagttaagttaaacttagagaccctttgtctctgagaagcatccttctaagacattctgttggagttccctcagtactattccttacaactggagtgggtagaagccttatgaaaattatactgagaacctgatctcgtttactccatgttaatcacattcctaccaacctaaatttctgccaagtcagttctctttggaggaagcccattactccgtaactgactggatggtccagtgtcattttgatctgcttttcagaatggaaatttataatataaatatatgttttaataccacaaacactgtggggcacttgatatttattagtggtgtatatggtccactggtttcaggccaaatctagaatttagtgatactggctcagaagaatttaagttctattcagccttcctgggtgttagaacctagattcaaaatggcttgtctttgctactttgttccacattctctctctttacctttgccctaccttctgtttgtaaggatgattttaatattaattccaggaacacatgtttttatttcctctgctggaataggagaaagcttaatatattcccaagctgaatgttcttgaattatatctgcatttaccactgtatatgcatatagtgacagtataacctgtctatactacagtagttccagtcctaactttctgaattatttttaaagatcttctctaacaagctatgggaatttggcttcatactctttctttgcaacagcagtgttctgggtgataattttgaattgatacctgttcctttttctgggttttgttggctttttgaaaaattgtctttccttatcattggtgggaggcttggtagcaaagtaacattttttggaaaagaggacagaaaaattgaactacagcttgagaacgtattctttttttcctactttgttattgcaaattgaggaatcacttttaactgttttaggtgtgtgtgtccagagtgagcaaggattatgtttttggattgtcaaagaggatgcttagtcttaaaataaaaataaatttaaaaatcatcttataattagaa

SEQ ID NO: 363580 - DNA, 2994 bp, Homo sapiens
gccggcggtcgcgccagcgggatccgcctggctcagctgacagctcccgagaacggaagaggcggcgcgccggttgagcagggcgtttctaggcctggtcggctggcggcgatggcaggattttcataatatatgtagtatgagttccacatcttggcctcttacccagcttcagcagtctcagctccaccagttagagaataaatgggatttgcatgaactccactctgagctgaaatacagactgcggtgttaatatccttttcttctgattgttattaacaggtccttatgtcgtcagaagatcgagaagctcaggaggatgaattgctggccctggcaagtatttacgatggagatgaatttagaaaagcagagtctgtccaaggtggagaaaccaggatctatttggatttgccacagaatttcaagatatttgtgagcggcaattcaaatgagtgtctccagaatagtggctttgaatacaccatttgctttctgcctccacttgtgctgaactttgaactgccaccagattatccatcctcttccccaccttcattcacacttagtggcaaatggctgtcaccaactcagctatctgctctatgcaagcacttagacaacctatgggaagaacaccgtggcagcgtggtcctgtttgcctggatgcaatttcttaaggaagagaccctagcatacttgaatattgtctctccttttgagctcaagattggttctcagaaaaaagtgcagagaaggacagctcaagcttctcccaacacagagctagattttggaggagctgctggatctgatgtagaccaagaggaaattgtggatgagagagcagtgcaggatgtggaatcactgtcaaatctgatccaggaaatcttggactttgatcaagctcagcagataaaatgctttaatagtaaattgttcctgtgcagtatctgtttctgtgagaagctgggtagtgaatgcatgtacttcttggagtgcaggcatgtgtactgcaaagcctgtctgaaggactactttgaaatccagatcagagatggccaggttcaatgcctcaactgcccagaaccaaagtgcccttcggtggccactcctggtcaggtcaaagagttagtggaagcagagttatttgcccgttatgaccgccttctcctccagtcctccttggacctgatggcagatgtggtgtactgcccccggccgtgctgccagctgcctgtgatgcaggaacctggctgcaccatgggtatctgctccagctgcaattttgccttctgtactttgtgcaggttgacctaccatggggtctccccatgtaaggtgactgcagagaaattaatggacttacgaaatgaatacctgcaagcggatgaggctaataaaagacttttggatcaaaggtatggtaagagagtgattcagaaggcactggaagagatggaaagtaaggagtggctagagaagaactcaaagagctgcccatgttgtggaactcccatagagaaattagacggatgtaacaagatgacatgtactggctgtatgcaatatttctgttggatttgcatgggttctctctctagagcaaacccttacaaacatttcaatgaccctggttcaccatgttttaaccggctgttttatgctgtggatgttgacgacgatatttgggaagatgaggtagaagactagttaactactgctcaagatatggaagtggattgtttttccctaatcttccgtcaagtacacaaagtaactttgcgggatatttagggtactattcattcactcttcctgcgtagaagatatggaagaacgaggtttatattttcatgtggtactactgaagaaggtgcattgatacatttttaaatctttaggtaaggagaagaggggtcaagagttaaacttagagaccctttgtctctgagaagcatccttctaagacattctgttggagttccctcagtactattccttacaactggagtgggtagaagccttatgaaaattatactgagaacctgatctcgtttactccatgttaatcacattcctaccaacctaaatttctgccaagtcagttctctttggaggaagcccattactccgtaactgactggatggtccagtgtcattttgatctgcttttcagaatggaaatttataatataaatatatgttttaataccacaaacactgtggggcacttgatatttattagtggtgtatatggtccactggtttcaggccaaatctagaatttagtgatactggctcagaagaatttaagttctattcagccttcctgggtgttagaacctagattcaaaatggcttgtctttgctactttgttccacattctctctctttacctttgccctaccttctgtttgtaaggatgattttaatattaattccaggaacacatgtttttatttcctctgctggaataggagaaagcttaatatattcccaagctgaatgttcttgaattatatctgcatttaccactgtatatgcatatagtgacagtataacctgtctatactacagtagttccagtcctaactttctgaattatttttaaagatcttctctaacaagctatgggaatttggcttcatactctttctttgcaacagcagtgttctgggtgataattttgaattgatacctgttcctttttctgggttttgttggctttttgaaaaattgtctttccttatcattggtgggaggcttggtagcaaagtaacattttttggaaaagaggacagaaaaattgaactacagcttgagaacgtattctttttttcctactttgttattgcaaattgaggaatcacttttaactgttttaggtgtgtgtgtccagagtgagcaaggattatgtttttggattgtcaaagaggatgcttagtcttaaaataaaaataaatttaaaaatcatcttataattagaa

SEQ ID NO: 363581 - DNA, 2586 bp, Homo sapiens
gccggcggtcgcgccagcgggatccgcctggctcagctgacagctcccgagaacggaagaggcggcgcgccggttgagcagggcgtttctaggcctggtcggctggcggcgatggcaggattttcataatatatgtagtatgagttccacatcttggcctcttacccagcttcagcagtctcagctccaccagttagagaataaatgggatttgcatgaactccactctgagctgaaatacagactgcggtgttaatatccttttcttctgattgttattaacaggtccttatgtcgtcagaagatcgagaagctcaggaggatgaattgctggccctggcaagtatttacgatggagatgaatttagaaaagcagagtctgtccaaggtggagaaaccaggatctatttggatttgccacagaatttcaagatatttgtgagcggcaattcaaatgagtgtctccagaatagtggctttgaatacaccatttgctttctgcctccacttgtgctgaactttgaactgccaccagattatccatcctcttccccaccttcattcacacttagtggcaaatggctgtcaccaactcaggtcaaagagttagtggaagcagagttatttgcccgttatgaccgccttctcctccagtcctccttggacctgatggcagatgtggtgtactgcccccggccgtgctgccagctgcctgtgatgcaggaacctggctgcaccatgggtatctgctccagctgcaattttgccttctgtactttgtgcaggttgacctaccatggggtctccccatgtaaggtgactgcagagaaattaatggacttacgaaatgaatacctgcaagcggatgaggctaataaaagacttttggatcaaaggtatggtaagagagtgattcagaaggcactggaagagatggaaagtaaggagtggctagagaagaactcaaagagctgcccatgttgtggaactcccatagagaaattagacggatgtaacaagatgacatgtactggctgtatgcaatatttctgttggatttgcatgggttctctctctagagcaaacccttacaaacatttcaatgaccctggttcaccatgttttaaccggctgttttatgctgtggatgttgacgacgatatttgggaagatgaggtagaagactagttaactactgctcaagatatggaagtggattgtttttccctaatcttccgtcaagtacacaaagtaactttgcgggatatttagggtactattcattcactcttcctgcgtagaagatatggaagaacgaggtttatattttcatgtggtactactgaagaaggtgcattgatacatttttaaatgtaagttgagaaaaatttataagccaaaggttcagaaaattaaactacagaatattaaatattataatgtgcccaaagctctgaatagttaaaaattaaatatttattttcttccccaagctttaggtaaggagaagaggggtcaagagttaaacttagagaccctttgtctctgagaagcatccttctaagacattctgttggagttccctcagtactattccttacaactggagtgggtagaagccttatgaaaattatactgagaacctgatctcgtttactccatgttaatcacattcctaccaacctaaatttctgccaagtcagttctctttggaggaagcccattactccgtaactgactggatggtccagtgtcattttgatctgcttttcagaatggaaatttataatataaatatatgttttaataccacaaacactgtggggcacttgatatttattagtggtgtatatggtccactggtttcaggccaaatctagaatttagtgatactggctcagaagaatttaagttctattcagccttcctgggtgttagaacctagattcaaaatggcttgtctttgctactttgttccacattctctctctttacctttgccctaccttctgtttgtaaggatgattttaatattaattccaggaacacatgtttttatttcctctgctggaataggagaaagcttaatatattcccaagctgaatgttcttgaattatatctgcatttaccactgtatatgcatatagtgacagtataacctgtctatactacagtagttccagtcctaactttctgaattatttttaaagatcttctctaacaagctatgggaatttggcttcatactctttctttgcaacagcagtgttctgggtgataattttgaattgatacctgttcctttttctgggttttgttggctttttgaaaaattgtctttccttatcattggtgggaggcttggtagcaaagtaacattttttggaaaagaggacagaaaaattgaactacagcttgagaacgtattctttttttcctactttgttattgcaaattgaggaatcacttttaactgttttaggtgtgtgtgtccagagtgagcaaggattatgtttttggattgtcaaagaggatgcttagtcttaaaataaaaataaatttaaaaatcatcttataattagaa

SEQ ID NO: 363582 - DNA, 2118 bp, Homo sapiens
agctgaagacctgttatgtagaggaaatacgaggggtggtgctagaagacagacatctgtggaatgattcacatcctctcaagttaggaggatggaggcctgcttcattaagaagctgggggtagggtggtcaaagagttagtggaagcagagttatttgcccgttatgaccgccttctcctccagtcctccttggacctgatggcagatgtggtgtactgcccccggccgtgctgccagctgcctgtgatgcaggaacctggctgcaccatgggtatctgctccagctgcaattttgccttctgtactttgtgcaggttgacctaccatggggtctccccatgtaaggtgactgcagagaaattaatggacttacgaaatgaatacctgcaagcggatgaggctaataaaagacttttggatcaaaggtatggtaagagagtgattcagaaggcactggaagagatggaaagtaaggagtggctagagaagaactcaaagagctgcccatgttgtggaactcccatagagaaattagacggatgtaacaagatgacatgtactggctgtatgcaatatttctgttggatttgcatgggttctctctctagagcaaacccttacaaacatttcaatgaccctggttcaccatgttttaaccggctgttttatgctgtggatgttgacgacgatatttgggaagatgaggtagaagactagttaactactgctcaagatatggaagtggattgtttttccctaatcttccgtcaagtacacaaagtaactttgcgggatatttagggtactattcattcactcttcctgcgtagaagatatggaagaacgaggtttatattttcatgtggtactactgaagaaggtgcattgatacatttttaaatgtaagttgagaaaaatttataagccaaaggttcagaaaattaaactacagaatattaaatattataatgtgcccaaagctctgaatagttaaaaattaaatatttattttcttccccaagctttaggtaaggagaagaggggtcaagagttaaacttagagaccctttgtctctgagaagcatccttctaagacattctgttggagttccctcagtactattccttacaactggagtgggtagaagccttatgaaaattatactgagaacctgatctcgtttactccatgttaatcacattcctaccaacctaaatttctgccaagtcagttctctttggaggaagcccattactccgtaactgactggatggtccagtgtcattttgatctgcttttcagaatggaaatttataatataaatatatgttttaataccacaaacactgtggggcacttgatatttattagtggtgtatatggtccactggtttcaggccaaatctagaatttagtgatactggctcagaagaatttaagttctattcagccttcctgggtgttagaacctagattcaaaatggcttgtctttgctactttgttccacattctctctctttacctttgccctaccttctgtttgtaaggatgattttaatattaattccaggaacacatgtttttatttcctctgctggaataggagaaagcttaatatattcccaagctgaatgttcttgaattatatctgcatttaccactgtatatgcatatagtgacagtataacctgtctatactacagtagttccagtcctaactttctgaattatttttaaagatcttctctaacaagctatgggaatttggcttcatactctttctttgcaacagcagtgttctgggtgataattttgaattgatacctgttcctttttctgggttttgttggctttttgaaaaattgtctttccttatcattggtgggaggcttggtagcaaagtaacattttttggaaaagaggacagaaaaattgaactacagcttgagaacgtattctttttttcctactttgttattgcaaattgaggaatcacttttaactgttttaggtgtgtgtgtccagagtgagcaaggattatgtttttggattgtcaaagaggatgcttagtcttaaaataaaaataaatttaaaaatcatcttataattagaa

SEQ ID NO: 363583 - DNA, 731 bp, Homo sapiens
gccggcggtcgcgccagcgggatccgcctggctcagctgacagctcccgagaacggaagaggcggcgcgccggttgagcagggcgtttctaggcctggtcggctggcggcggtgagtgggccccaggcaagggcggagggcggaactttggggttcggcactgccgggcggccggaagatggcaggattttcataatatatgtagtatgagttccacatcttggcctcttacccagcttcagcagtctcagctccaccagttagagaataaatgggatttgcatgaactccactctgagctgaaatacagactgcggtgttaatatccttttcttctgattgttattaacaggtccttatgtcgtcagaagatcgagaagctcaggaggatgaattgctggccctggcaagtatttacgatggagatgaatttagaaaagcagagtctgtccaaggtggagaaaccaggatctatttggatttgccacagaatttcaagatatttgtgagcggcaattcaaatgagtgtctccagaatagtggctttgaatacaccatttgctttctgcctccacttgtgctgaactttgaactgccaccagattatccatcctcttccccaccttcattcacacttagtggcaaatggctgtcaccaactcagctatctgctctatgcaagcacttagacactaggagaaccgtgacgtggctgttgctgatgcatctag

SEQ ID NO: 363584 - DNA, 5852 bp, Homo sapiens
accgagtctgcggggctggatgctgaccgcccggaccagcacctaggcgggcgggagctgtgcggcccagggttcgcgcgggccgggtagaggctcgagctgggacccccgagcgtgaaccccggagccggcggcgctggggccagaggggccgggagccccagggaggcggatctgggccccgagaaggacacccgcctggatttgccccgtaggcccggcccgggcccctcgggagcagaacagccttggtgaggtggacaggaggggacctcgcgagcagacgcgcgcgccagcgacagcagcccgccccggcctctcgggagccgtggggcagaggctgcggagccccaggagggtctatcagccacagtctctgcatgtttccaagagcagcagaaaatgaacacattgcaggggccagtgtcattcaaagatgtggctgtggatttcacccaggaggagtggcggcaactggaccctgatgagaagataacatacggggatgtgatgttggagaactacagccatctagtttccttggcttatgaggtggcaacatcttgtacttcggagattctgaagccgagcaacttgcccaagtccttcttcttttcccattaacaagatatgatatcaccaagccaaacgtcatcattaagttggagcagggagaggagctgtggataacgggaggtgaatttccatgtcaacatagtcctgggatcgtgggactttaccagatcggtttgtaataacacctcgaagacgctatccgatccatcagacccagtattcctgtccgggggtacttcccacagtgtgctggaatggttatcacaagaaggctgtgctgtcccctcgcaactccaggatggtgtgtagcccagtgactgtgaggatcgcccctcctgacagaagattttcacgttctgcgataccagagcagataatcagctcaacactgtcgtcaccatcaagtaatgccccagacccatgtgcaaaggagactgtactgagtgccctcaaagagaagaagaagaaaaggacagtggaggaagaagaccaaatattccttgatggccaggaaaataaaagaaggcgccatgatagcagtggcagtggacattcagcatttgagcccctggtggccagtggagtccccgcttcttttgtgcctaagcctgggtctctgaagagaggcctcaattctcagagctcagatgaccacttgaataagagatcccgaagctcttccatgagctccttgacaggcgcttacacaagtggcatccctagctccagccgcaatgccattaccagttacaacagctccactcgaggcatctcacagctctggaagagaaatggccccagttcatcacccttctctagcccagcctcatcccgctcccagacaccggagaggccagcaaagaaaataagagaagaagagctgtgtcatcattccagttcttcaactccattggcagcagacaaggagtcccagggagaaaaggctgcagatacaaccccaaggaagaaacaaaactcgaattctcagtctacacctggcagctctgggcagcgtaagcggaaagttcagctgctgccttctcggcgaggggaacagctgaccttgcctccacctccccagcttggctattcgatcactgccgaggacctagacttagagaagaaggcttcattacagtggttcaaccaggccttggaggacaagagtgatgctgcctcgaactctgtcactgagaccccacctaccactcagccttcatttacctttaccctgcctgctgctgcaactgcctccccacccacctccctcctggccccaagcaccaacccactgttagagagcttgaagaagatgcagactcccccgagcctgccaccctgcccagaatctgctggagcagcaaccactgaggccctctcacctccaaagacacccagcctcctacccccgctgggtttatcacagtcagggccgccagggctgctccccagcccctcctttgactccaaacccccgaccactttgctggggctgatccctgctccatccatggtaccagccactgacaccaaggcacctccaacccttcaagcagagacggctaccaaaccccaagccacatctgccccgtcccccgcccccaagcaaagcttcctgtttggaacacagaacacctcaccttccagccctgccgcccctgctgcatcttcagcatctcccatgttcaagcccattttcacggctccacccaagagtgagaaggaaggccccacaccgcctggcccttcagtcacagccacagcgccctccagctcctccctccccacgaccaccagcaccacagccccgaccttccagcctgtctttagcagcatggggccacctgcatctgtgcccttgcctgctcccttcttcaagcagacaactactcccgccactgctcccaccacaactgccccgctcttcactggcctggccagcgccacctctgctgtggctcccatcacctctgccagtccatccacagactctgcttcgaagcctgcgtttggctttggcataaacagtgtgagcagcagcagtgtgagtaccacgaccagcaccgccactgccgcctcacagcctttcctcttcggggcgccccaggcctctgctgccagcttcaccccggccatgggctccatattccagtttggcaaacctcctgccttgcccacaaccaccacagtcaccaccttcagccagtccctgcccactgccgtgccaacggccaccagcagcagcgctgccgactttagtggttttggcagcaccctcgccacctccgccccggccaccagcagccagcccactctgacgttcagtaacacgagcacccccacgttcaacattccctttggctcaagcgccaagtccccgctcccatcatatccgggagccaacccccagcccgcatttggggccgctgaggggcagccaccgggggccgccaagccagcccttacccccagctttggcagctctttcacttttggaaactctgcagccccggccccggctactgcacccacacctgcacctgcgtccacgatcaagatcgtgcctgcgcacgtgcctacgcccatccagcctacctttggcggtgccacgcactcggcgtttggattgaaagccacggcttccgccttcggcgctcccgccagctcacagcccgcctttggcggctccactgctgtcttctccttcggtgcagccaccagctccggctttggagccaccacccagaccgccagcagcgggagcagcagctcggtgtttggcagcacaacaccatcacccttcacgtttgggggttcggcagcccccgctggcagtgggagctttgggatcaacgtggccaccccaggctccagcgccaccaccggagctttcagctttggagcaggacagagtgggagcacagccacctccacccccttcacagggggcttaggtcagaacgccctgggcaccaccggccagagcacaccgtttgccttcaacgtgggcagcacaactgagagcaaacctgtgtttggaggcaccgccacccccacctttggtcagaacacccctgcgcctggagtgggcacatcgggcagcagcctctcctttggggcatcttcagcacccgcccaaggctttgttggtgttggaccgttcggatcggcggccccttcattttccattggtgcgggatccaagaccccaggggctcgacagcgactgcaggcccgaaggcagcacacccgcaaaaagtagcctttgtcccctgtccctgttccccccaccccttccctaaatctggaccttggcacgtgctagaaagagccttggacccttccagctgcgtaaagcaaacctaccccggatctctggcttcagccgccagggggcagtggcagccctggggccctttcccttctggaggaagcacaagcctcagggaaggggaagcaggatgcggagggccaaagcccgggacctctacttgaacagttccactggggaggctggagaactaaggacctgtacatagtgtccgctgccctgactcccgcttagcgcacccttaggcaggcgccccttccacctttccccgagagccgtcgtcgctggagggggcagggtccagcccgcctggatcggtggtgtgcacctgatgggatttgggaaatgggttatccctaaagctttatcttgcttggcttagctgtgagaagtggttctcttcctctggtcccttctggggactctgtttccccatttcttgctgctgtgtccctcaccggttccttgcaggattccctcctttttaaatgcccttgaatctagctttgccttggagaccccagtgggtgctgctcctgccgttttcttcctgccaagcctgaatcaatgtttcatctccaaccctctgccagtttggcccctcagagcttggtggctcaagactgttagcctggcagagccaggggtgaagggagaagctcttggagcaggcaggatgcccaccgctgcttcagctgcctcctcgcccagctaccctttggccccattgggccctcgtctgcctctccaggattgtatgtttcaagccttgtcctgtgttcctttgtctgacgctctgtgtattgctctttgaatcgagtttggaggaagagttgagttgtatgagtggcggcatgttggtagtgccggacttcctgtttcaagttttctggggcctcgctaattgaatgtggaaagtagcaccacttgacggctacaagtgccgactcctgaattttcccatggtgttctgacttcaagggctggcagccagggagaatgggcccaggggaagcaaagacctcttccctctgcggtttctgtcccacttaactgacctcactggaggctacgtcacccaaagtagatgttagaaaacctaaattaatgaaccatatttttaaaatcctatttttcccaaacagggccctctgcagcccatcctttccttccgtccttctgaaaccacataccccaggcccaagcgccttgctgtcacgcccaacctctttgggagaagtatgaatgcgtgtgtctaaattaaaagaaaaaaatatttaaacgttttttaacaaaaatttatttttgtatttaagctaaattgccttttaaattccttcaagcttggttcattgaggtggttaagtataaatgctattaactaggaattagctgtatagttaagttatgcctgtgcaaagaagaggctcaaatgctgtccccggcagctttcctgggggactagagctccttctggccatgttatatgaaatgtaattcttattttataaataatgtgatgtagatgtaaccggtgccccctccccgttgtgactgagggcgagtgttatacctggctgcgtgtgcagctgaggagggagtgaacctcaagcctaaatacctgttaggattggagggtctgggtgggcctgggcctagcaatcaatcaagcttctacctgtaccttatgtaaggtagaccctcctagtgtcagtacctgagcttgtttacctcagttccgcaggcaggacagccggtccgggaaccctgagtgagagtgagtgtggatgtgtacagtacacacactggacggcagcgggaggctgggactttccattacaaatagagacttcattcctgttgagtctagttggaatttttagtatgaatgtgagatttttctcctgcttgtgacattaagaataaaaaactgtgatctatcgta

SEQ ID NO: 363585 - DNA, 4323 bp, Homo sapiens
aagtgatccagctggcttggcctcccagagtgctgagattaccggcgttagcaccacgcccagccttcccgttttttctgattggcctgacttcttctttttctctttggtagcctccacctccccagcttggctattcgatcactgccgaggacctagacttagagaagaaggcttcattacagtggttcaaccaggccttggaggacaagagtgatgctgcctcgaactctgtcactgagaccccacctaccactcagccttcatttacctttaccctgcctgctgctgcaactgcctccccacccacctccctcctggccccaagcaccaacccactgttagagagcttgaagaagatgcagactcccccgagcctgccaccctgcccagaatctgctggagcagcaaccactgaggccctctcacctccaaagacacccagcctcctacccccgctgggtttatcacagtcagggccgccagggctgctccccagcccctcctttgactccaaacccccgaccactttgctggggctgatccctgctccatccatggtaccagccactgacaccaaggcacctccaacccttcaagcagagacggctaccaaaccccaagccacatctgccccgtcccccgcccccaagcaaagcttcctgtttggaacacagaacacctcaccttccagccctgccgcccctgctgcatcttcagcatctcccatgttcaagcccattttcacggctccacccaagagtgagaaggaaggccccacaccgcctggcccttcagtcacagccacagcgccctccagctcctccctccccacgaccaccagcaccacagccccgaccttccagcctgtctttagcagcatggggccacctgcatctgtgcccttgcctgctcccttcttcaagcagacaactactcccgccactgctcccaccacaactgccccgctcttcactggcctggccagcgccacctctgctgtggctcccatcacctctgccagtccatccacagactctgcttcgaagcctgcgtttggctttggcataaacagtgtgagcagcagcagtgtgagtaccacgaccagcaccgccactgccgcctcacagcctttcctcttcggggcgccccaggcctctgctgccagcttcaccccggccatgggctccatattccagtttggcaaacctcctgccttgcccacaaccaccacagtcaccaccttcagccagtccctgcccactgccgtgccaacggccaccagcagcagcgctgccgactttagtggttttggcagcaccctcgccacctccgccccggccaccagcagccagcccactctgacgttcagtaacacgagcacccccacgttcaacattccctttggctcaagcgccaagtccccgctcccatcatatccgggagccaacccccagcccgcatttggggccgctgaggggcagccaccgggggccgccaagccagcccttacccccagctttggcagctctttcacttttggaaactctgcagccccggccccggctactgcacccacacctgcacctgcgtccacgatcaagatcgtgcctgcgcacgtgcctacgcccatccagcctacctttggcggtgccacgcactcggcgtttggattgaaagccacggcttccgccttcggcgctcccgccagctcacagcccgcctttggcggctccactgctgtcttctccttcggtgcagccaccagctccggctttggagccaccacccagaccgccagcagcgggagcagcagctcggtgtttggcagcacaacaccatcacccttcacgtttgggggttcggcagcccccgctggcagtgggagctttgggatcaacgtggccaccccaggctccagcgccaccaccggagctttcagctttggagcaggacagagtgggagcacagccacctccacccccttcacagggggcttaggtcagaacgccctgggcaccaccggccagagcacaccgtttgccttcaacgtgggcagcacaactgagagcaaacctgtgtttggaggcaccgccacccccacctttggtcagaacacccctgcgcctggagtgggcacatcgggcagcagcctctcctttggggcatcttcagcacccgcccaaggctttgttggtgttggaccgttcggatcggcggccccttcattttccattggtgcgggatccaagaccccaggggctcgacagcgactgcaggcccgaaggcagcacacccgcaaaaagtagcctttgtcccctgtccctgttccccccaccccttccctaaatctggaccttggcacgtgctagaaagagccttggacccttccagctgcgtaaagcaaacctaccccggatctctggcttcagccgccagggggcagtggcagccctggggccctttcccttctggaggaagcacaagcctcagggaaggggaagcaggatgcggagggccaaagcccgggacctctacttgaacagttccactggggaggctggagaactaaggacctgtacatagtgtccgctgccctgactcccgcttagcgcacccttaggcaggcgccccttccacctttccccgagagccgtcgtcgctggagggggcagggtccagcccgcctggatcggtggtgtgcacctgatgggatttgggaaatgggttatccctaaagctttatcttgcttggcttagctgtgagaagtggttctcttcctctggtcccttctggggactctgtttccccatttcttgctgctgtgtccctcaccggttccttgcaggattccctcctttttaaatgcccttgaatctagctttgccttggagaccccagtgggtgctgctcctgccgttttcttcctgccaagcctgaatcaatgtttcatctccaaccctctgccagtttggcccctcagagcttggtggctcaagactgttagcctggcagagccaggggtgaagggagaagctcttggagcaggcaggatgcccaccgctgcttcagctgcctcctcgcccagctaccctttggccccattgggccctcgtctgcctctccaggattgtatgtttcaagccttgtcctgtgttcctttgtctgacgctctgtgtattgctctttgaatcgagtttggaggaagagttgagttgtatgagtggcggcatgttggtagtgccggacttcctgtttcaagttttctggggcctcgctaattgaatgtggaaagtagcaccacttgacggctacaagtgccgactcctgaattttcccatggtgttctgacttcaagggctggcagccagggagaatgggcccaggggaagcaaagacctcttccctctgcggtttctgtcccacttaactgacctcactggaggctacgtcacccaaagtagatgttagaaaacctaaattaatgaaccatatttttaaaatcctatttttcccaaacagggccctctgcagcccatcctttccttccgtccttctgaaaccacataccccaggcccaagcgccttgctgtcacgcccaacctctttgggagaagtatgaatgcgtgtgtctaaattaaaagaaaaaaatatttaaacgttttttaacaaaaatttatttttgtatttaagctaaattgccttttaaattccttcaagcttggttcattgaggtggttaagtataaatgctattaactaggaattagctgtatagttaagttatgcctgtgcaaagaagaggctcaaatgctgtccccggcagctttcctgggggactagagctccttctggccatgttatatgaaatgtaattcttattttataaataatgtgatgtagatgtaaccggtgccccctccccgttgtgactgagggcgagtgttatacctggctgcgtgtgcagctgaggagggagtgaacctcaagcctaaatacctgttaggattggagggtctgggtgggcctgggcctagcaatcaatcaagcttctacctgtaccttatgtaaggtagaccctcctagtgtcagtacctgagcttgtttacctcagttccgcaggcaggacagccggtccgggaaccctgagtgagagtgagtgtggatgtgtacagtacacacactggacggcagcgggaggctgggactttccattacaaatagagacttcattcctgttgagtctagttggaatttttagtatgaatgtgagatttttctcctgcttgtgacattaagaataaaaaactgtgatctatcgta

SEQ ID NO: 363586 - DNA, 1831 bp, Homo sapiens
  misc_feature (30)..(30): n is a, c, g, or t
cacgaagagtatgactagtcgagcctggcntttaatcggacgaggctactccaactccactggggaggctggagaactaaggacctgtacatagtgtccgctgccctgactcccgcttagcgcacccttaggcaggcgccccttccacctttccccgagagccgtcgtcgctggagggggcagggtccagcccgcctggatcggtggtgtgcacctgatgggatttgggaaatgggttatccctaaagctttatcttgcttggcttagctgtgagaagtggttctcttcctctggtcccttctggggactctgtttccccatttcttgctgctgtgtccctcaccggttccttgcaggattccctcctttttaaatgcccttgaatctagctttgccttggagaccccagtgggtgctgctcctgccgttttcttcctgccaagcctgaatcaatgtttcatctccaaccctctgccagtttggcccctcagagcttggtggctcaagactgttagcctggcagagccaggggtgaagggagaagctcttggagcaggcaggatgcccaccgctgcttcagctgcctcctcgcccagctaccctttggccccattgggccctcgtctgcctctccaggattgtatgtttcaagccttgtcctgtgttcctttgtctgacgctctgtgtattgctctttgaatcgagtttggaggaagagttgagttgtatgagtggcggcatgttggtagtgccggacttcctgtttcaagttttctggggcctcgctaattgaatgtggaaagtagcaccacttgacggctacaagtgccgactcctgaattttcccatggtgttctgacttcaagggctggcagccagggagaatgggcccaggggaagcaaagacctcttccctctgcggtttctgtcccacttaactgacctcactggaggctacgtcacccaaagtagatgttagaaaacctaaattaatgaaccatatttttaaaatcctatttttcccaaacagggccctctgcagcccatcctttccttccgtccttctgaaaccacataccccaggcccaagcgccttgctgtcacgcccaacctctttgggagaagtatgaatgcgtgtgtctaaattaaaagaaaaaaatatttaaacgttttttaacaaaaatttatttttgtatttaagctaaattgccttttaaattccttcaagcttggttcattgaggtggttaagtataaatgctattaactaggaattagctgtatagttaagttatgcctgtgcaaagaagaggctcaaatgctgtccccggcagctttcctgggggactagagctccttctggccatgttatatgaaatgtaattcttattttataaataatgtgatgtagatgtaaccggtgccccctccccgttgtgactgagggcgagtgttatacctggctgcgtgtgcagctgaggagggagtgaacctcaagcctaaatacctgttaggattggagggtctgggtgggcctgggcctagcaatcaatcaagcttctacctgtaccttatgtaaggtagaccctcctagtgtcagtacctgagcttgtttacctcagttccgcaggcaggacagccggtccgggaaccctgagtgagagtgagtgtggatgtgtacagtacacacactggacggcagcgggaggctgggactttccattacaaatagagacttcattcctgttgagtctagttggaatttttagtatgaatgtgagatttttctcctgcttgtgacattaagaataaaaaactgtgatctatcgta

SEQ ID NO: 363587 - DNA, 1097 bp, Homo sapiens
acttaactgacctcactggaggctacgtcacccaaagtagatgttagaaaacctaattgaatgtggaaagtagcaccacttgacggctacaagtgccgactcctgaattttcccatggtgttctgacttcaagggctggcagccagggagaatgggcccaggggaagcaaagacctcttccctctgcggtttctgtcccacttaactgacctcactggaggctacgtcacccaaagtagatgttagaaaacctaaattaatgaaccatatttttaaaatcctatttttcccaaacagggccctctgcagcccatcctttccttccgtccttctgaaaccacataccccaggcccaagcgccttgctgtcacgcccaacctctttgggagaagtatgaatgcgtgtgtctaaattaaaagaaaaaaatatttaaacgttttttaacaaaaatttatttttgtatttaagctaaattgccttttaaattccttcaagcttggttcattgaggtggttaagtataaatgctattaactaggaattagctgtatagttaagttatgcctgtgcaaagaagaggctcaaatgctgtccccggcagctttcctgggggactagagctccttctggccatgttatatgaaatgtaattcttattttataaataatgtgatgtagatgtaaccggtgccccctccccgttgtgactgagggcgagtgttatacctggctgcgtgtgcagctgaggagggagtgaacctcaagcctaaatacctgttaggattggagggtctgggtgggcctgggcctagcaatcaatcaagcttctacctgtaccttatgtaaggtagaccctcctagtgtcagtacctgagcttgtttacctcagttccgcaggcaggacagccggtccgggaaccctgagtgagagtgagtgtggatgtgtacagtacacacactggacggcagcgggaggctgggactttccattacaaatagagacttcattcctgttgagtctagttggaatttttagtatgaatgtgagatttttctcctgcttgtgacattaagaataaaaaactgtgatctatcgta

SEQ ID NO: 363588 - DNA, 835 bp, Homo sapiens
ttgagacagtgtctctcacccagtctggaatgcaacagcgtggtctcggctcactgcaacttccacctcccaggttcaaaggattctcgtgcctcagcctcctgagtagctgggactacaggcatgtgactctatgcctggctaattttttttgttatttttaagtagagacggggttttgccatgttggcccaggcaggcggatcacttgaggccagaatttgagaccagcctggccaacatggtgaaaccctgtatcactcttttagacccttctgagtgtttgcaggttgagtgttcacagggtgttagcctattgagctttcttttgcggttcttatgcaggtgatttctgcctttgcaggccggagccctcatgacttcagtgacctgcttctgcccctctaggtctatcagccacagtctctgcatgtttccaagagcagcagaaaatgaacacattgcaggggccagtgtcattcaaagatgtggctgtggatttcacccaggaggagtggcggcaactggaccctgatgagaagataacatacggggatgtgatgttggagaactacagccatctagtttccttggcttatgaggtggcaacatcttgtacttcggagattctgaagccgagcaacttgcccaagtccttcttcttttcccattaacaagatatgatatcaccaagccaaacgtcatcattaagttggagcagggagaggagctgtggataacgggaggtgaatttccatgtcaacatagtcctggtaagttagtagagtatcaaatgttaaaaaatgctcatcccagacctttgggagtgactaaa

SEQ ID NO: 363589 - DNA, 357 bp, Homo sapiens
aaaggttctaactttgataaggtaaaaaatggagcatttctgttatgcagcttatgaggtggcaacatcttgtacttcggagattctgaagccgagcaacttgcccaagtccttcttcttttcccattaacaagatatgatatcaccaagccaaacgtcatcattaagttggagcagggagaggagctgtggataacgggaggtgaatttccatgtcaacatagtcctggtaagttagtagagtatcaaatgttaaaaaatgctcatcccagacctttgggagtgactaaagagttgtttatatgtattcggtaccctcagtaacacctcccaacccccaaatatcactttccttcc

SEQ ID NO: 363590 - DNA, 5902 bp, Homo sapiens
ttgagacagtgtctctcacccagtctggaatgcaacagcgtggtctcggctcactgcaacttccacctcccaggttcaaaggattctcgtgcctcagcctcctgagtagctgggactacaggcatgtgactctatgcctggctaattttttttgttatttttaagtagagacggggttttgccatgttggcccaggcaggcggatcacttgaggccagaatttgagaccagcctggccaacatggtgaaaccctgtatcactcttttagacccttctgagtgtttgcaggttgagtgttcacagggtgttagcctattgagctttcttttgcggttcttatgcaggtgatttctgcctttgcaggccggagccctcatgacttcagtgacctgcttctgcccctctaggtctatcagccacagtctctgcatgtttccaagagcagcagaaaatgaacacattgcaggggccagtgtcattcaaagatgtggctgtggatttcacccaggaggagtggcggcaactggaccctgatgagaagataacatacggggatgtgatgttggagaactacagccatctagtttccttggcttatgaggtggcaacatcttgtacttcggagattctgaagccgagcaacttgcccaagtccttcttcttttcccattaacaagatatgatatcaccaagccaaacgtcatcattaagttggagcagggagaggagctgtggataacgggaggtgaatttccatgtcaacatagtcctgggatcgtgggactttaccagatcggtttgtaataacacctcgaagacgctatccgatccatcagacccagtattcctgtccgggggtacttcccacagtgtgctggaatggttatcacaagaaggctgtgctgtcccctcgcaactccaggatggtgtgtagcccagtgactgtgaggatcgcccctcctgacagaagattttcacgttctgcgataccagagcagataatcagctcaacactgtcgtcaccatcaagtaatgccccagacccatgtgcaaaggagactgtactgagtgccctcaaagagaagaagaagaaaaggacagtggaggaagaagaccaaatattccttgatggccaggaaaataaaagaaggcgccatgatagcagtggcagtggacattcagcatttgagcccctggtggccagtggagtccccgcttcttttgtgcctaagcctgggtctctgaagagaggcctcaattctcagagctcagatgaccacttgaataagagatcccgaagctcttccatgagctccttgacaggcgcttacacaagtggcatccctagctccagccgcaatgccattaccagttacaacagctccactcgaggcatctcacagctctggaagagaaatggccccagttcatcacccttctctagcccagcctcatcccgctcccagacaccggagaggccagcaaagaaaataagagaagaagagctgtgtcatcattccagttcttcaactccattggcagcagacaaggagtcccagggagaaaaggctgcagatacaaccccaaggaagaaacaaaactcgaattctcagtctacacctggcagctctgggcagcgtaagcggaaagttcagctgctgccttctcggcgaggggaacagctgaccttgcctccacctccccagcttggctattcgatcactgccgaggacctagacttagagaagaaggcttcattacagtggttcaaccaggccttggaggacaagagtgatgctgcctcgaactctgtcactgagaccccacctaccactcagccttcatttacctttaccctgcctgctgctgcaactgcctccccacccacctccctcctggccccaagcaccaacccactgttagagagcttgaagaagatgcagactcccccgagcctgccaccctgcccagaatctgctggagcagcaaccactgaggccctctcacctccaaagacacccagcctcctacccccgctgggtttatcacagtcagggccgccagggctgctccccagcccctcctttgactccaaacccccgaccactttgctggggctgatccctgctccatccatggtaccagccactgacaccaaggcacctccaacccttcaagcagagacggctaccaaaccccaagccacatctgccccgtcccccgcccccaagcaaagcttcctgtttggaacacagaacacctcaccttccagccctgccgcccctgctgcatcttcagcatctcccatgttcaagcccattttcacggctccacccaagagtgagaaggaaggccccacaccgcctggcccttcagtcacagccacagcgccctccagctcctccctccccacgaccaccagcaccacagccccgaccttccagcctgtctttagcagcatggggccacctgcatctgtgcccttgcctgctcccttcttcaagcagacaactactcccgccactgctcccaccacaactgccccgctcttcactggcctggccagcgccacctctgctgtggctcccatcacctctgccagtccatccacagactctgcttcgaagcctgcgtttggctttggcataaacagtgtgagcagcagcagtgtgagtaccacgaccagcaccgccactgccgcctcacagcctttcctcttcggggcgccccaggcctctgctgccagcttcaccccggccatgggctccatattccagtttggcaaacctcctgccttgcccacaaccaccacagtcaccaccttcagccagtccctgcccactgccgtgccaacggccaccagcagcagcgctgccgactttagtggttttggcagcaccctcgccacctccgccccggccaccagcagccagcccactctgacgttcagtaacacgagcacccccacgttcaacattccctttggctcaagcgccaagtccccgctcccatcatatccgggagccaacccccagcccgcatttggggccgctgaggggcagccaccgggggccgccaagccagcccttacccccagctttggcagctctttcacttttggaaactctgcagccccggccccggctactgcacccacacctgcacctgcgtccacgatcaagatcgtgcctgcgcacgtgcctacgcccatccagcctacctttggcggtgccacgcactcggcgtttggattgaaagccacggcttccgccttcggcgctcccgccagctcacagcccgcctttggcggctccactgctgtcttctccttcggtgcagccaccagctccggctttggagccaccacccagaccgccagcagcgggagcagcagctcggtgtttggcagcacaacaccatcacccttcacgtttgggggttcggcagcccccgctggcagtgggagctttgggatcaacgtggccaccccaggctccagcgccaccaccggagctttcagctttggagcaggacagagtgggagcacagccacctccacccccttcacagggggcttaggtcagaacgccctgggcaccaccggccagagcacaccgtttgccttcaacgtgggcagcacaactgagagcaaacctgtgtttggaggcaccgccacccccacctttggtcagaacacccctgcgcctggagtgggcacatcgggcagcagcctctcctttggggcatcttcagcacccgcccaaggctttgttggtgttggaccgttcggatcggcggccccttcattttccattggtgcgggatccaagaccccaggggctcgacagcgactgcaggcccgaaggcagcacacccgcaaaaagtagcctttgtcccctgtccctgttccccccaccccttccctaaatctggaccttggcacgtgctagaaagagccttggacccttccagctgcgtaaagcaaacctaccccggatctctggcttcagccgccagggggcagtggcagccctggggccctttcccttctggaggaagcacaagcctcagggaaggggaagcaggatgcggagggccaaagcccgggacctctacttgaacagttccactggggaggctggagaactaaggacctgtacatagtgtccgctgccctgactcccgcttagcgcacccttaggcaggcgccccttccacctttccccgagagccgtcgtcgctggagggggcagggtccagcccgcctggatcggtggtgtgcacctgatgggatttgggaaatgggttatccctaaagctttatcttgcttggcttagctgtgagaagtggttctcttcctctggtcccttctggggactctgtttccccatttcttgctgctgtgtccctcaccggttccttgcaggattccctcctttttaaatgcccttgaatctagctttgccttggagaccccagtgggtgctgctcctgccgttttcttcctgccaagcctgaatcaatgtttcatctccaaccctctgccagtttggcccctcagagcttggtggctcaagactgttagcctggcagagccaggggtgaagggagaagctcttggagcaggcaggatgcccaccgctgcttcagctgcctcctcgcccagctaccctttggccccattgggccctcgtctgcctctccaggattgtatgtttcaagccttgtcctgtgttcctttgtctgacgctctgtgtattgctctttgaatcgagtttggaggaagagttgagttgtatgagtggcggcatgttggtagtgccggacttcctgtttcaagttttctggggcctcgctaattgaatgtggaaagtagcaccacttgacggctacaagtgccgactcctgaattttcccatggtgttctgacttcaagggctggcagccagggagaatgggcccaggggaagcaaagacctcttccctctgcggtttctgtcccacttaactgacctcactggaggctacgtcacccaaagtagatgttagaaaacctaaattaatgaaccatatttttaaaatcctatttttcccaaacagggccctctgcagcccatcctttccttccgtccttctgaaaccacataccccaggcccaagcgccttgctgtcacgcccaacctctttgggagaagtatgaatgcgtgtgtctaaattaaaagaaaaaaatatttaaacgttttttaacaaaaatttatttttgtatttaagctaaattgccttttaaattccttcaagcttggttcattgaggtggttaagtataaatgctattaactaggaattagctgtatagttaagttatgcctgtgcaaagaagaggctcaaatgctgtccccggcagctttcctgggggactagagctccttctggccatgttatatgaaatgtaattcttattttataaataatgtgatgtagatgtaaccggtgccccctccccgttgtgactgagggcgagtgttatacctggctgcgtgtgcagctgaggagggagtgaacctcaagcctaaatacctgttaggattggagggtctgggtgggcctgggcctagcaatcaatcaagcttctacctgtaccttatgtaaggtagaccctcctagtgtcagtacctgagcttgtttacctcagttccgcaggcaggacagccggtccgggaaccctgagtgagagtgagtgtggatgtgtacagtacacacactggacggcagcgggaggctgggactttccattacaaatagagacttcattcctgttgagtctagttggaatttttagtatgaatgtgagatttttctcctgcttgtgacattaagaataaaaaactgtgatctatcgta

SEQ ID NO: 363591 - DNA, 4907 bp, Homo sapiens
gtcactgtagataggtatgcattttccagaatattctataaatcatacatttaagttttaaatatttggcttttcttactgactttgtcagatagatttggccagattgttagcagtaaaaattaaaagcattattctcttcccttcatgttattaagaaagatgtcatgaccgtggatgaaatcgtaaaagaatgttgccttcaataaagcatctaactgtcttctcttttattaggcctgggtctctgaagagaggcctcaattctcagagctcagatgaccacttgaataagagatcccgaagctcttccatgagctccttgacaggcgcttacacaagtggcatccctagctccagccgcaatgccattaccagttacaacagctccactcgaggcatctcacagctctggaagagaaatggccccagttcatcacccttctctagcccagcctcatcccgctcccagacaccggagaggccagcaaagaaaataagagaagaagagctgtgtcatcattccagttcttcaactccattggcagcagacaaggagtcccagggagaaaaggctgcagatacaaccccaaggaagaaacaaaactcgaattctcagtctacacctggcagctctgggcagcgtaagcggaaagttcagctgctgccttctcggcgaggggaacagctgaccttgcctccacctccccagcttggctattcgatcactgccgaggacctagacttagagaagaaggcttcattacagtggttcaaccaggccttggaggacaagagtgatgctgcctcgaactctgtcactgagaccccacctaccactcagccttcatttacctttaccctgcctgctgctgcaactgcctccccacccacctccctcctggccccaagcaccaacccactgttagagagcttgaagaagatgcagactcccccgagcctgccaccctgcccagaatctgctggagcagcaaccactgaggccctctcacctccaaagacacccagcctcctacccccgctgggtttatcacagtcagggccgccagggctgctccccagcccctcctttgactccaaacccccgaccactttgctggggctgatccctgctccatccatggtaccagccactgacaccaaggcacctccaacccttcaagcagagacggctaccaaaccccaagccacatctgccccgtcccccgcccccaagcaaagcttcctgtttggaacacagaacacctcaccttccagccctgccgcccctgctgcatcttcagcatctcccatgttcaagcccattttcacggctccacccaagagtgagaaggaaggccccacaccgcctggcccttcagtcacagccacagcgccctccagctcctccctccccacgaccaccagcaccacagccccgaccttccagcctgtctttagcagcatggggccacctgcatctgtgcccttgcctgctcccttcttcaagcagacaactactcccgccactgctcccaccacaactgccccgctcttcactggcctggccagcgccacctctgctgtggctcccatcacctctgccagtccatccacagactctgcttcgaagcctgcgtttggctttggcataaacagtgtgagcagcagcagtgtgagtaccacgaccagcaccgccactgccgcctcacagcctttcctcttcggggcgccccaggcctctgctgccagcttcaccccggccatgggctccatattccagtttggcaaacctcctgccttgcccacaaccaccacagtcaccaccttcagccagtccctgcccactgccgtgccaacggccaccagcagcagcgctgccgactttagtggttttggcagcaccctcgccacctccgccccggccaccagcagccagcccactctgacgttcagtaacacgagcacccccacgttcaacattccctttggctcaagcgccaagtccccgctcccatcatatccgggagccaacccccagcccgcatttggggccgctgaggggcagccaccgggggccgccaagccagcccttacccccagctttggcagctctttcacttttggaaactctgcagccccggccccggctactgcacccacacctgcacctgcgtccacgatcaagatcgtgcctgcgcacgtgcctacgcccatccagcctacctttggcggtgccacgcactcggcgtttggattgaaagccacggcttccgccttcggcgctcccgccagctcacagcccgcctttggcggctccactgctgtcttctccttcggtgcagccaccagctccggctttggagccaccacccagaccgccagcagcgggagcagcagctcggtgtttggcagcacaacaccatcacccttcacgtttgggggttcggcagcccccgctggcagtgggagctttgggatcaacgtggccaccccaggctccagcgccaccaccggagctttcagctttggagcaggacagagtgggagcacagccacctccacccccttcacagggggcttaggtcagaacgccctgggcaccaccggccagagcacaccgtttgccttcaacgtgggcagcacaactgagagcaaacctgtgtttggaggcaccgccacccccacctttggtcagaacacccctgcgcctggagtgggcacatcgggcagcagcctctcctttggggcatcttcagcacccgcccaaggctttgttggtgttggaccgttcggatcggcggccccttcattttccattggtgcgggatccaagaccccaggggctcgacagcgactgcaggcccgaaggcagcacacccgcaaaaagtagcctttgtcccctgtccctgttccccccaccccttccctaaatctggaccttggcacgtgctagaaagagccttggacccttccagctgcgtaaagcaaacctaccccggatctctggcttcagccgccagggggcagtggcagccctggggccctttcccttctggaggaagcacaagcctcagggaaggggaagcaggatgcggagggccaaagcccgggacctctacttgaacagttccactggggaggctggagaactaaggacctgtacatagtgtccgctgccctgactcccgcttagcgcacccttaggcaggcgccccttccacctttccccgagagccgtcgtcgctggagggggcagggtccagcccgcctggatcggtggtgtgcacctgatgggatttgggaaatgggttatccctaaagctttatcttgcttggcttagctgtgagaagtggttctcttcctctggtcccttctggggactctgtttccccatttcttgctgctgtgtccctcaccggttccttgcaggattccctcctttttaaatgcccttgaatctagctttgccttggagaccccagtgggtgctgctcctgccgttttcttcctgccaagcctgaatcaatgtttcatctccaaccctctgccagtttggcccctcagagcttggtggctcaagactgttagcctggcagagccaggggtgaagggagaagctcttggagcaggcaggatgcccaccgctgcttcagctgcctcctcgcccagctaccctttggccccattgggccctcgtctgcctctccaggattgtatgtttcaagccttgtcctgtgttcctttgtctgacgctctgtgtattgctctttgaatcgagtttggaggaagagttgagttgtatgagtggcggcatgttggtagtgccggacttcctgtttcaagttttctggggcctcgctaattgaatgtggaaagtagcaccacttgacggctacaagtgccgactcctgaattttcccatggtgttctgacttcaagggctggcagccagggagaatgggcccaggggaagcaaagacctcttccctctgcggtttctgtcccacttaactgacctcactggaggctacgtcacccaaagtagatgttagaaaacctaaattaatgaaccatatttttaaaatcctatttttcccaaacagggccctctgcagcccatcctttccttccgtccttctgaaaccacataccccaggcccaagcgccttgctgtcacgcccaacctctttgggagaagtatgaatgcgtgtgtctaaattaaaagaaaaaaatatttaaacgttttttaacaaaaatttatttttgtatttaagctaaattgccttttaaattccttcaagcttggttcattgaggtggttaagtataaatgctattaactaggaattagctgtatagttaagttatgcctgtgcaaagaagaggctcaaatgctgtccccggcagctttcctgggggactagagctccttctggccatgttatatgaaatgtaattcttattttataaataatgtgatgtagatgtaaccggtgccccctccccgttgtgactgagggcgagtgttatacctggctgcgtgtgcagctgaggagggagtgaacctcaagcctaaatacctgttaggattggagggtctgggtgggcctgggcctagcaatcaatcaagcttctacctgtaccttatgtaaggtagaccctcctagtgtcagtacctgagcttgtttacctcagttccgcaggcaggacagccggtccgggaaccctgagtgagagtgagtgtggatgtgtacagtacacacactggacggcagcgggaggctgggactttccattacaaatagagacttcattcctgttgagtctagttggaatttttagtatgaatgtgagatttttctcctgcttgtgacattaagaataaaaaactgtgatctatcgta

SEQ ID NO: 363592 - DNA, 4516 bp, Homo sapiens
ttgagacagtgtctctcacccagtctggaatgcaacagcgtggtctcggctcactgcaacttccacctcccaggttcaaaggattctcgtgcctcagcctcctgagtagctgggactacaggcatgtgactctatgcctggctaattttttttgttatttttaagtagagacggggttttgccatgttggcccaggcaggcggatcacttgaggccagaatttgagaccagcctggccaacatggtgaaaccctgtatcactcttttagacccttctgagtgtttgcaggttgagtgttcacagggtgttagcctattgagctttcttttgcggttcttatgcaggtgatttctgcctttgcaggccggagccctcatgacttcagtgacctgcttctgcccctctaggtctatcagccacagtctctgcatgtttccaagagcagcagaaaatgaacacattgcaggggccagtgtcattcaaagatgtggctgtggatttcacccaggaggagtggcggcaactggaccctgatgagaagataacatacggggatgtgatgttggagaactacagccatctagtttccttggcttatgaggtggcaacatcttgtacttcggagattctgaagccgagcaacttgcccaagtccttcttcttttcccattaacaagatatgatatcaccaagccaaacgtcatcattaagttggagcagggagaggagctgtggataacgggaggtgaatttccatgtcaacatagtcctgggatcgtgggactttaccagatcggtttgtaataacacctcgaagacgctatccgatccatcagacccagtattcctgtccgggggtacttcccacagtgtgctggaatggttatcacaagaaggctgtgctgtcccctcgcaactccaggatggtgtgtagcccagtgactgtgaggatcgcccctcctgacagaagattttcacgttctgcgataccagagcagataatcagctcaacactgtcgtcaccatcaagtaatgccccagacccatgtgcaaaggagactgtactgagtgccctcaaagagaagaagaagaaaaggacagtggaggaagaagaccaaatattccttgatggccaggaaaataaaagaaggcgccatgatagcagtggcagtggacattcagcatttgagcccctggtggccagtggagtccccgcttcttttgtgcctaagcctgggtctctgaagagaggcctcaattctcagagctcagatgaccacttgaataagagatcccgaagctcttccatgagctccttgacaggcgcttacacaagtggcatccctagctccagccgcaatgccattaccagttacaacagctccactcgaggcatctcacagctctggaagagaaatggccccagttcatcacccttctctagcccagcctcatcccgctcccagacaccggagaggccagcaaagaaaataagagaagaagagctgtgtcatcattccagttcttcaactccattggcagcagacaaggagtcccagggagaaaaggctgcagatacaaccccaaggaagaaacaaaactcgaattctcagtctacacctggcagctctgggcagcgtaagcggaaagttcagctgctgccttctcggcgaggggaacagctgaccttgcctccacctccccagcttggctattcgatcactgccgaggacctagacttagagaagaaggcttcattacagtggttcaaccaggccttggaggacaagagtgatgctgcctcgaactctgtcactgagaccccacctaccactcagccttcatttacctttaccctgcctgctgctgcaactgcctccccacccacctccctcctggccccaagcaccaacccactgttagagagcttgaagaagatgcagactcccccgagcctgccaccctgcccagaatctgctggagcagcaaccactgaggccctctcacctccaaagacacccagcctcctacccccgctgggtttatcacagtcagggccgccagggctgctccccagcccctcctttgactccaaacccccgaccactttgctggggctgatccctgctccatccatggtaccagccactgacaccaaggcacctccaacccttcaagcagagacggctaccaaaccccaagccacatctgccccgtcccccgcccccaagcaaagcttcctgtttggaacacagaacacctcaccttccagccctgccgcccctgctgcatcttcagcatctcccatgttcaagcccattttcacggctccacccaagagtgagaaggaaggccccacaccgcctggcccttcagtcacagccacagcgccctccagctcctccctccccacgaccaccagcaccacagccccgaccttccagcctgtctttagcagcatggggccacctgcatctgtgcccttgcctgctcccttcttcaagcagacaactactcccgccactgctcccaccacaactgccccgctcttcactggcctggccagcgccacctctgctgtggctcccatcacctctgccagtccatccacagactctgcttcgaagcctgcgtttggctttggcataaacagtgtgagcagcagcagtgtgagtaccacgaccagcaccgccactgccgcctcacagcctttcctcttcggggcgccccaggcctctgctgccagcttcaccccggccatgggctccatattccagtttggcaaacctcctgccttgcccacaaccaccacagtcaccaccttcagccagtccctgcccactgccgtgccaacggccaccagcagcagcgctgccgactttagtggttttggcagcaccctcgccacctccgccccggccaccagcagccagcccactctgacgttcagtaacacgagcacccccacgttcaacattccctttggctcaagcgccaagtccccgctcccatcatatccgggagccaacccccagcccgcatttggggccgctgaggggcagccaccgggggccgccaagccagcccttacccccagctttggcagctctttcacttttggaaactctgcagccccggccccggctactgcacccacacctgcacctgcgtccacgatcaagatcgtgcctgcgcacgtgcctacgcccatccagcctacctttggcggtgccacgcactcggcgtttggattgaaagccacggcttccgccttcggcgctcccgccagctcacagcccgcctttggcggctccactgctgtcttctccttcggtgcagccaccagctccggctttggagccaccacccagaccgccagcagcgggagcagcagctcggtgtttggcagcacaacaccatcacccttcacgtttgggggttcggcagcccccgctggcagtgggagctttgggatcaacgtggccaccccaggctccagcgccaccaccggagctttcagctttggagcaggacagagtgggagcacagccacctccacccccttcacagggggcttaggtcagaacgccctgggcaccaccggccagagcacaccgtttgccttcaacgtgggcagcacaactgagagcaaacctgtgtttggaggcaccgccacccccacctttggtcagaacacccctgcgcctggagtgggcacatcgggcagcagcctctcctttggggcatcttcagcacccgcccaaggctttgttggtgttggaccgttcggatcggcggccccttcattttccattggtgcgggatccaagaccccaggggctcgacagcgactgcaggcccgaaggcagcacacccgcaaaaagtagcctttgtcccctgtccctgttccccccaccccttccctaaatctggaccttggcacgtgctagaaagagccttggacccttccagctgcgtaaagcaaacctaccccggatctctggcttcagccgccagggggcagtggcagccctggggccctttcccttctggaggaagcacaagcctcagggaaggggaagcaggatgcggagggccaaagcccgggacctctacttgaacagtgttgaagccgtccttccacacttccattctcatgcaatgaaatccaaagttccgttgagacggcttcaacggaactttgtttgtattttttgtagggcggagttttgtcatgttgcctaggctggtctcgaactcctgagctcaagtgatctgcccaccttgccctcccttaagtattgggattacaggcatgagccaccatgcttagcttgtgatggctcttagtgtacatacctgggacatataactgtgccttcttcaaagtagttatctcagaatgcttagcaagcctctctttgacttgactttaaaagctttgaacactagatcctaactttttgaagtaaacttttgattttgaaatggttgaaagttccgttgacctcgagg
